United States Patent Application Publication US 2006/0134663 A1 - sequence listing, part 109

SEQ ID NO: 337815 - DNA, 1000 bp, Homo Sapiens
ccctcttatctcgcaagaggtgggggagaaagagagctgcatcggtacaagggcacaatttttttggtcaaaagttgacaccttttaaattccctctcccacccctccctggaaaaaagttacttccttaattaggttttctatttagtaaccaacattgactggacagaaaatatgaggcttgggttccaaatagatgagcttgttcttttttgggtttgtaccgtgcagttcttgctacagttgttaaggagttagggctatgtcccatcaggaggcatctgcaggattttgatctccaaggaattgtgggtgagtcgcaaatagtttgctcagaagtaggcagagtcaaaaaagcaacttcaagtaattgattcctttgtccaaaagagttaaaacattaaagtatatgcgggacttattttgtaatattttagggttttgaaaaaatatggaaatcaattttttttaattttgttttttgcttttttccccccctttccagatgcctcctgattgacctagtacactgggttaaaagggaattaaaaacattaaaaaaaaaagttcactggttttgattcatctcactccttttgcctggagatcaggccaaacatcaagcatgttgggaggggcacaatttaaagcaacactattgactgtaaagcatctgccagcaatttacagtgcaaaatgacaggtaacaattcttgtcacaatgcaagagaatggcaagcagctttctgtagcatgaaagttaacagctctcaggttgcccattcctgcaaaagtttatgtatcaaagcgggcagagggcaacacatttacacactacaggaaatgatccacagaaaattaagctccagaactgctaacattaccaaagctggtactggctaatattctgaaatgcaaatctgtgctttatatatatactgctcaatgacactgccactcaatagaattcctacactgcaaggtagattaatctttgccc

SEQ ID NO: 337816 - DNA, 1000 bp, Homo Sapiens
ttttttttttttttttttaaccaacagcacacttttatttaaggacctatagctgtgcaggatgcaaacatctgggcatcagtgactttcctcctgcccccgtttgtccctgatggtggcagaagatcccagctgaccacagcccctttctctggggtcagagggagaagacaggcgcagtcagcaggggcagctgttgcaggtgggagggatattttcccacaggaacaaaggtctccgtgatgacacggggtctctatagtcatgttgagagcctaacggcccttggcataattgctggtgttggggtagaaggtgtcttggagtttgctcaagtggttgagagggagggaggtgccatagacttggaggaactggcacgaagccaaggatacaaatccaggcagggctgtgggacaggatagggagcagggccttctactgaaggagtgactcaggaaggaggaggggaaggtgacaagcccctgggcaggagcctgtggccatggatcattttaaattgagaccagagagtgagcagtccagggcagctataaccttggctagaaagggcagaggcagatgggcctgctccatctcgcctcttaagaaggtgggcaggacggagatgccacagtggatgccacagctgccacagcctcctgcggagaccaggaaggaagcctggctctcagccatgcaggatggaaagaaagattctattccaggaggggagctgccctggaacgccccaaggacagccaggacccactgttcattcaggattcccccattttctcctacgggagctaacgcctgtgcctgggtcctggcagcactctggactccacactctcctcctgggtttcacctttgtaacaggatccccgcagaccacgcccacgacaaacactgtctccagcgggcaggacaaaggaagggcacggcgccaggcagtggtgtggttgcccatcaggaagaggccgacttctcccggtga

SEQ ID NO: 337817 - DNA, 1000 bp, Homo Sapiens
tttttttttttaatagttcaaagtttcctttaatagaatacccagaatacataggaaatcaacatgtgctagacatagaattagtatgttcactgaagcatggcaaggtcacataaaatgcatatagctagggtcccaagcaggggtgtgttactgttagatttttttgaagtttaattttgttcagcagaggaatatactctaggagcatttacagttcattttcagtcatcaaataacatacatcacttccaaaacgtagcctcttgtgtgcagagaaattgccttcccacagcattcacaatgtaaaaagaccttttggattaaagggtcagactctttctatgtaacaaaaagtggaatgcaagtgacagatggacttattattgtgcagaaaaaacgtctgaatgtatgctaagaattctccgccctcccagctctttacatgctggaacctaactcagatgctgggtcaccagcacaggagggcctctgataaggaaaactgtttaaagagtacctggtggctaaaagtcaggtcattcatcatgcaaaatgtcaccacttcttaaactgttctgtaaattcatttcattggtcaacttttaacgtgcatatgacctttaacagttctgaaaaatagccttggccagtaacacgtacttctagttcacatatgacatcatgaatgttctctgcctaaagcacagagtccattcagggttatacaaagaagcagtgggaagactttagagtccttcagaatgacagctttcacagatgacttcagtctctccagactaatgtcagctgaggcaaacaagcgctgcacaatcccaaacctttctgtatctttcaggggagtcaaggttgggtcttcaagatcagatactccatcatcagacagagcacgaagcaagtggcacagtgtgggaatgatctggagtttgcagcaagtgcccagcagagctgccgcgctatctggcatttctgcgagggc

SEQ ID NO: 337818 - DNA, 1000 bp, Homo Sapiens
ctgggtattataatctttattacaaaacaagtattttatgttgaggtaatatttcaaatggtatttgtcaaaaatcaattgaatcttacatacagaattttgctctgtaaaggactcagagaacagtttttttctagcattgcacgcaaactgattttagaaaaaataaagctaaaaagtatctacgtaaagaggaatttctttctcccactcttcctgacccaatccttcttatcatcaccagtgattagtaaggtgatgtttatgggagttctacaaaaaaaaaaaatgatgaattggtaaattaattgggagaaaaagattttcttatccaaaacaactcactgtgccataatttcaaagtgcttttgcaaactaagtattgaatcctatagaatttactattatttatcccaagaatagaattccccggtctccaatgaggaaaccctatgcaaccttccaactccaattcttctgctatgaagtcctccctcgttctccaacgcattggttatccttctcagtgtccccagattgatatcgtgttcatagcctcactggccttggcactcagcatactgggttgtaactattcacgtttctcttatacatacccctctgttaactctgttagctacgtgggtcccctctatacgctcctcaggagcaagaaacaagtcttaacctgctttacattctcaacacctagcatagtgcctggtatatacatggacacccaatagctttgtttgttacgttgatgaattaggaactatctcagctgcaaagttatcatgcagatcctttcttgcttactagcctctttggctgtgttactggtgtcactccacagtatttaaacctctgtgaaatgatgacaccctaaaaacaagtgtaatgtccagcaattcctttcaggaaaaatatggcatctggttattcttttgatcaaaacatcaataaattatagttatcatgatacattttcaagtcccta

SEQ ID NO: 337819 - DNA, 1000 bp, Homo Sapiens
tttttggttttattggcaacactgatgtcatatttaggaaccatagacttttctcagactgtgttagcttcagtgagaagtattagtggtcaatgatatttgaaatattgttaaagtacccgataataaggacttaaaattcatttcgttcactgcaagaaacctctaaagatttcatgtcttcagtggaactggcatactgtaattgctatgtggaacttaatataacctcaacagcagcagagagaatacagtcctctcattatgcacatgctctaggatcatttattttaatgctttcaaataaatacgttccatgcagcacactacaataaataaggagcagcaatgttcttctagtaaatccattcataatgtgagtcaccatgtaaaacaccacgtctcaagtctttggccctgtaccataatatgaggaacaccacatctgcacccaatcatatctggcttcatatggatttaataggactatgccaggagtgcatgtaagcacaaattcaaccagaggtttccagctattaaatacagctacaaagtagttaaaaggcagcaacttaacccataacccccttctcttcatttttgagacagaaataataaagatagaaatgctgtggtgaattttgggtcagtggaaagcatgatgggacacatttagaatacttggagcaaagctggcacaatatggcacccaaaatgtcacagcaatactgatactgaatggacaccgaatacaagagacttgactgcagacgctgagctctaggacacaaaggtgggggctgcagtgggggtggctcatttccactaggcagataactcaacagtgccttcctcctcgctatcagctctgttagcacgaatttccacaagggtcctggcaaatcgggtccattcatcattgtggggaactgcaagctctccaacgtcatagacccaaatacggccttccgagtccccaacagcaacttctttgccagct

SEQ ID NO: 337820 - DNA, 1000 bp, Homo Sapiens
tttttttttttttatcaggaaacagaatttccagtgcaaattttatatacagcattattaccaaaagcatatagcagacattccataaaataacattttccaaattaattatgcatacatatacatctgctaattgaatgacactggtagatacatcttcattaagatgtgagttttatgcttgttactgcatattttcaattatgaattaagggcaagaatcaccgtcttcctgtgaatacattcccataatttaagaattccactaagctacattctgtctaccagtttgtaagcaaatgtctctacagacctttcaagtatttatagttggtgcacagtaactcgacacttattttgtataatgttgctcaaccgaatgtgggatactataattatagcataattattcatagttacagtaaaactctaaaccattttatttagaatatttcagcagtgaacagaacctacatgaaagtgtgccaaaataatttgtgattgtttactgaaatttatgagacttgtaataggctctgtctgaacacatatgaaaaatgtagatagtgatagtttctgtatatgggctggcttacagcttccctacattcatatttatctatgagttctgaaaaattggtaatagagtatgattttttcaattgcagtaaaatatacataatgtaaaatttatcattttaactatttttaaatatacagttgcagtggcattaagtacactcacactgttgtgcaaccatcctccccatccacctccagaactttctcatcaccccaatcagaaactttgtatccattatgcactaactacccattctccatccccacagggtggcttatttcacttcgcataatgtactcaaggttcatccatgtcaccgcatatgtcagaatttccttcctgcggaaggctggtactattccactgcatgcacggaacacaattcctgcatccattcatgggtgaatgggatgacac

SEQ ID NO: 337821 - DNA, 1000 bp, Homo Sapiens
ttttttttttttttttttttttttttttttctgtaaggagcatactgtgcccatttattatagaatgcagttaaaaaaaatattttgaggttagcctctccagtttaaaagcacttaacaagaaacacttggacagcgatgcaatggtctctcccaaaccggctccctcttaccaagtaccgtaaacagggtttgagaacgttcaatcaatttcttgatatgaacaatcaaagcatttaatgcaaacatatttgcttctcaaagaataaaaccatcttccaaatttccaaagcatgcattgttacttggcattaagtatttcaaaatgacaaacattgttacggtattgtaaggccaaaatataatacctatttaccagacatacacattacaactagaaaaaaattacaaatgttaacctagtataacaattccatcaggaatgaatggggaaaggcactgcatccctctcatatcgccacagatctactatccacttgacatgctttgaattcaagtcctgttagacatgggaacagcttttcctacaacatatgattcacaggtaggttaatacatcttagtctcccactgccatacttttcacccaagtgtacaacaggtatgaatatatgctatcagctttatttacaagtgtatcttgatgtcttcgtggggtaaaagaaccaactatctcaaccaacagtttccaaaaaagtttttggctatgattcatgtatagaaaccaccacataaaagaaacaacagaaactgaggtccgatcccaaacacctaaactaaaatttctcacccactaaaagttggcagtgaaactgctattctctgaattgtataagctaaattctacagaggaatttcagatcaacttcttttgcaaaagcacaagttacacgttgcacggttggggatgctgagtgaatgcattccaggaagagttccgcaagcaagtgctgttgcaaagagtcgagaatccgagaat

SEQ ID NO: 337822 - DNA, 1000 bp, Homo Sapiens; identical to SEQ ID NO: 157508

SEQ ID NO: 337823 - DNA, 1000 bp, Homo Sapiens
tttttttttttttttttttttttttttaaatataacaatattttattgacaaatcctgaatgttctgtataaatataaagtgctaagtttccaacccctgcccacagggctaggaggaagcgggggaggaagtgttaaatgtcagctgagcacaaataattttccagcgccagcacaggtgtgaaaggctcacagacagacacacgcaacatgacacacccatcacttcccaagtccccagcttccccaggaacacagggcttgggctccaggccctgggcagacgaacccacagacagggctcctggttgtcacagcttgttccttggagctctcaggctgccaagggcttcaacatggtggtggaccagggagagtccacggtatagcgtctagctgatttctgccagaggatggggagggaaagagcagacacacccttggttcccgaccccgaatgagggccagcctcagtcccccagcagaagagcaccaggtcggaaagaccagcatgccggcattcctagagcccccatgtgggggcttctgaaactctgaggaggtagcagccctgccggaggtgaggggactgtgctggcccagaggggagcccaccagtccacagtcagctcctgccagcacagtggggcaggcaggcagaggggcaccacctcagtgacacagcacctgggtctcaaactgcagcagctgccccatgaaactgaagttgggggagatgaccccccggcgctgcttaacgaagtcaaaggcctcgtccagccgcacacggcgactctgcatgaggtatgccagacagatggtggcagagcgcgagatacccgcctggcagtgcaccagcacccggcctccgctgttcttcacccagtcaatgaagcctatggcctcctggaaccaggcactgatctccaccatctggttgtcctccacagggatactcttgtagcggaaaaggccctcaaagtggttggggcagctggcg

SEQ ID NO: 337824 - DNA, 1000 bp, Homo Sapiens
ccctttttgttatgtaaaaagtgcacgaaagctcggcagcctttgcaaaggtcagcagtgtttcctggggcgggggaactgggagggccccaggcctggcacccagcttgcgactgaaggtggcctcgtattgcttagaaacgtatgtttcagtttaaataccagacagtaaaaatagagctcgaggaccacccgcactgttgccaaatcattgccagaatgaacagcttaaataaataaaaaatcgaaatatttacttctcgataaaaatcccagtaaaaccatttacctttctttgcattatatataatatacatttataacgggcctggctgcgggcggcggggccgagggcagcggaggggtcaggacacctcgatgacctccacgctgcccgagaagctcgcctgcttgcccagggcggccagctcctcgccgcgcgcgcgcccctccaccatgccctcctcgaactccatctggcagctgcggcgcttgaactgcgtctccggggccggctcctcgggccagccggtccgcgcgtcccggggctcagccctcgctgcctcccgccgccgcaggtcgctgccgccgcctggtcccggggcgcccgcccggccgaagggcgcaaacagcaccccgcccgccccctgtgcgccctcggggctgaagcaccagggcccgtcgggcgacggcgtgcctggggagtcaagcggcggtgcccaggccccggggccggccggctggccagggccgggcagcccgggcgccgacagggccgagaggccgtgccgcggagtctgccgggccgcatcgccgaagttcaggccgaggctgtgcgcgggggagcgcgcgggggagccggcggggggccggggccgccggcggggccgtgggcgcgcctcaggcgcggcgtccgggctgtccgggctgggcgaggacaggcccagcgcggcccccgacgggctgtccagcttgcagagcttcggggcctcgccggggt

SEQ ID NO: 337825 - DNA, 1000 bp, Homo Sapiens; identical to SEQ ID NO: 158360

SEQ ID NO: 337826 - DNA, 1000 bp, Homo Sapiens; identical to SEQ ID NO: 158361

SEQ ID NO: 337827 - DNA, 1000 bp, Homo Sapiens; identical to SEQ ID NO: 158362

SEQ ID NO: 337828 - DNA, 1000 bp, Homo Sapiens
tgcaggttctcatgttttattgtaaagcaacaagaaactcttatgtacactgtccgtcttggggcgcctccatcctgtgccatcttctctaccaggccaggcaggcatgggtggggcgctcagagtcctctgccctgtccctgcccggccaggaccccgcagacctcatgctagacgatgaccgtctgcacctccagctggccctccggcgaggcgatgaccagctcgcctgcatgctccaggatctcgatgtcctctgatgacaccatggtcacagtggcctgttcagtgccacttgtccctgcccgggcggcaagcacagtgccctcgctgatggccgaggccagcgtcatggccacctgctctgtcaggctctcgggggtggcgatggtgatggtgtcggcggcagccgcctctgggcccagcgccgtctcctcgtccatggtgacgttctgcacgatgatctggtggccggcgctagcctggtgcacgatctgctgcaccaccttcatgatgtggctgtccacctctgtctgggtgccctcgatgatctccgtggcctcactggtctccgcatcgtccgcagtggcctcgatgatatactcctgggtgtcagctaccacggacgagaactccaccaacactgtgtgcgggtcttccgtgaggacggtggtggctgccgcggggctgtcctcagacaccagcaactcctccacctccagcaggcagccccctttggtgcgcaggtgccggttcagcgtgccgtgctcggcgaagccacggccgcacttgtagcacttgaacggcttctcgcctgtgtggtgtcgcacgtgccgcaccagtgagcccttctctcggaagccacggctgcagaactggcacacgtgcggcttctcctccaggtgtgtcctgaagtgcacctgctgtgcgttcttagtcttgtagcgcttgccacacttgggacaagggtagggccgctcgtctgagtggacgcgccggt

SEQ ID NO: 337829 - DNA, 1000 bp, Homo Sapiens
ttttttttttttttttttccaaatccaagaggtgtttagtgtaatgagtgttcagatgggtggggcagggtggggttccccccatctgaccctctagggctctggggtgactcattcttccttgggctcagaggtggagctgatatttgttcctccagttgagccctgctccccctggcccttggcgttctcagtgtctccagacactagagccacgttcctcagataattgatgttgaagcagttgacctgttcatccccaggactcaggtaacagcagagggcagggtctcgccagatgttacgtcggggaccacacagatcattgatgaaggttaatttctcctcctctgcacagcaggcctgttctggaaatggcaggtcacagcagcgggcagtcatgttgtggatcagcccaggaatatgtttatgcttggtgagaactctttggtttccacagaggtggcccatgaggttgggggtgactcgactgatgtcaatggtcaagatgtcccggtcatagttggggtaaggagcccgacgggcaaagcactcatcccgagtagggctgggagggtggcggcaacacaagtggtggtgggtcttcacagcatactcccggtcacagtatttgtcaagggtatcctcccaggccttccatgtacaggtgtgattgttcccctggcggcagcagcgctggaactccctctccagctggatcagtgccagcagctccctttgtagggggtcagtagctggcaggttgcgtggcacagagcggaagcgcctcaggtggcagatgttcttgatattgtccaatgtgggcaccccaggagggaaaggcagctcaagacccgaggaaatatcaggctgatggctggggcaggcccggagctggtagtgtggctggggagcttcctcctggaagcaggagaaccgagcctccccctgccgcgtgcagcaccagtggggtcgggtcttgaccgagaactcggcctca

SEQ ID NO: 337830 - DNA, 1000 bp, Homo Sapiens
tttttttttttccatgtggttaattttttttttttagttctcatttttttctaagaaaaaagcaacaagaaaataattcagagtttatacaaaacatctttacattattttttttccaaaaagactagtatttacacaaatggcaacagaaacaaaaacaaaaacccttccgactgccacctggaaggggctggctgttctgctccctctcccacctggcactggggtgggcagctggccaggaggcagtgtggaggtggatggtgtgagggccagctccttccatggctgctctgggagtgcctgcaaggcgcactcaagtggcagtctgttagcagccgtgctggcaaggaactggggtcaaagtgcacagcgggctggcccagccccaggcagcctcttcctctttccaggccccagcccaagactgggacagcagcaggagctgggttgggtgggggttacccacctgtgctagggcccagaaaaggagcaggccacctggtcttatacccgcttaggtctccaccctgggcctctgtttccccaccaggccaaaggatgccaaaggtaaggagagaacagggtggggggtgggggtgaaactcccagctctgcagggcaaatagccacctgggcacctcacctccctccaccccccatgaggtcatctgcctgcagcagctctcctgttccccaggcaacagccaattaagacattaattaccgtgagagtgagggaggcaggagatgcccaagaatcccacaaggaagggatttttttttgtgtgtgtgtgtgtgtgtgtgtgtgtggaagggtggcagtgactaccccattgccaggataagcctcgtaggagggtcaggaggggagggtgggacaccttgcccagtggcactttcctcttccctcatgggcgtgaacagccctggcctgccccttaccccaccagaaataccaaggaatctataaaagaaatggcatcctatgcttcctggc

SEQ ID NO: 337831 - DNA, 1000 bp, Homo Sapiens
ttttttttcaggccaaactaaagctttatgctataaaaacaagaaataaaataaggagatttataggccggctgattgtcagcaaacacaatatatttactgtattagcatttgctcacagtgcaaatggtacaacattacaccatttcaatatttcggtttttaaaaatgctgttttcattaactatattatattggcattacaatatgacaaaggagcaaatgaaatgttggtgaagaatttcaccttttcacaatatcaagcatatttttttaaccttagtataaggtactataaatccaagaaataaaaacatccacaaaatatattacatctggtttgtcttttttctaagtactcaactttatacaaaagtctttcaaaaaatatcattccccataggttttcctgtttaaaacctgatttttttctctcagttcacataagttagagtgcattttcttttgttgctttttttttttaaacatgcagacatataaaaaatctggatagcacaaccttttggcaacaaagttatttttctcttagtttagcttaatgtctgagaacagttttattaaaacaaaggaaaactcaattatcatgcagtgacatgcatataccagaaggagcgaggaaaaaatattaaagggtatctgattcctccttctagcttggaagtgaccaaaatttttgcttttttaataatcatcacattataaaaagtattcagcaaaatactgtctctgcaaagaaagattttacccttcagctgaaaaaatatgggccctcctggcaaacttcatcttcttctctctccttctacaaaaagtccaagtacctggaaattcacaaccccctgctcttcgatatcccccctttccactagagtccttttagtattatttatccaccaccaaaaatcaaaacaaaacaaaacaaaaatggtacttctttttcttaaaaaagaaaaaagtggaaaacgcataaagtgacttt

SEQ ID NO: 337832 - DNA, 1000 bp, Homo Sapiens
cctaagcgtttataatgtagcccccccttccccaacccaaatcataattacaaaataaatactgttttaaacttcataaataaaaatgtaaacttcaaaatacttttcttaaacagacataacagcaatgctttaaatgtaaaccaaacacaaagctaatcagaaaaaggaaaaaggggggaaaaaaaagacacaaccaactgaagaattacaacacaaagcctcaatatttactcacaggttcaaggcagttatgtaaaaagaaaagaaatgtcttcccttagctgaaacactttaaaaggtccaccttcttcaaagaaggcaatagaatgcaatgtgacaggtaaaaccctgtacctcttgtccatattcaacataaaagatatttaagaagttttaattcaaatactagcaataaaaaatctcacatatttcttaggatgctaagtagtcattttatccccatctcaacactgacttacaaagacatttactaatgtataaagtttctcttaacttgcctttgttgtatagttttcatatataaatggactgaggacaagagctcattaggctttgtgcgttttgtttgtcttaaaggagacctgcagtactctgtctcccagacggtatccattgaggctacgtatcgccatggcagcctcatcatagtttgtcatagtcacaaatccaaaacctttgcatttattggtgttaaagtcacggatgaccttcacattggtgacagctccaaaaggcccaaacatttgccacaggatactctcatctgcgtcaggagccaggttgtacacaaatatacaccaccctgttccagggtgcccagggatattaattccagccaaactggtcattccgtcaatggtcattggagaaaacctctttactccataagccatattgagcagattgtccaacctaaaacgctgtgcctgctgagctagcggtcctggataccttctgtttggagactggtacagct

SEQ ID NO: 337833 - DNA, 1000 bp, Homo Sapiens; identical to SEQ ID NO: 158365

SEQ ID NO: 337834 - DNA, 1000 bp, Homo Sapiens
ttttttttttttttttatagttccaaaaatatatttacagtctattacaaagattacaaatggaagtgtctaggtgactgtattatgctaattaaaattatttttacagattacttttccttagggacaaaaaacattttagtgaaattaaaatgatttttctagtcaatcaaaaaataaattaaaatatcaaataacactgtacagtgatttaaaaccaaaaaaaaagggtggggaggggtttgggaagcaatccatttgagtttttctatagccgtctttggtcctaaatgtgggaaaacacattatgtagcactgaaaatacctgttcttttgtgatgctctgcaagtaaaatagaaaaatatagtgcattttcaatgtattcagagcccactacagagaaatgtgtgtacaaaacaagacagtataaataaaatttacaagttttacaaaggaacatttacagattttgtttctgttatttgtttgtttgtttgtggatgcccacattatcaaacaagaccaattatgaccgatccctgggatctttctctattaaaatcattataaacagcccaattctctttggaagtacaacagttcaattctggggtagttcatgattttcataagttttgaaagcattaatcacaatatgtatacattcctgcaatatctataaagacacatttaattattgcttatgaaattctaacacagtaatcaaataatatggtttaataaataaagctttaaaaacaagccagatccttcacctcttccttctagggtaaagagtcctttcatttaacaagtttcttgcatcagtgttcacaaacaaaagactttttgttttgttttgttttgaactgcaatggtgatattctgtgcagcaaatttgtgtttaaatggtgaaaattgtgaactgcccctttatcatgcttcagagttataatataaaacaattatttcctttcatgtttggactgcattcaacag

SEQ ID NO: 337835 - DNA, 1000 bp, Homo Sapiens; identical to SEQ ID NO: 158366

SEQ ID NO: 337836 - DNA, 1000 bp, Homo Sapiens; identical to SEQ ID NO: 158367

SEQ ID NO: 337837 - DNA, 1000 bp, Homo Sapiens; identical to SEQ ID NO: 158368

SEQ ID NO: 337838 - DNA, 1000 bp, Homo Sapiens
ttttttttttttttttttgcaaattcccttctttccctttaatgaggagggggctggtggagaggcggaggaccagggaatgcagccatcgggagggttgggtttggtgtggggcatctctcacagaggctgttggagcccggctcacgtcccacatgtcccttctcggaccagtgtccagggctgagtcacgggtatcgtcattctcagacctccactgagccctgctgcctcaggtgttgctgaaggagctggatgtggtgcagcagcttcttctggtggccagccagggtgatgcccagggcaggcaggtcttctaggctgagctgagccacatcactgaaggtacagaggccaaacttggagaagttgtcctggtagcactccagtccaatggctgaaagccaggcctggggtgagtccagacaaggaaagtccagggccacaggggtcagaagggcctgggaaggcctttcccctgggtccccgccagcctgcagggtatctggcttgcggatcatcttgtcaaatgcagccaccagctggtcaaaatgaggccgccgggcacggtccttctgccaagtgtccaacataagtagatgtaatccaggaggacagcctggaggcgggggcagccggaactcctgctctattgcatttagtacctcctgctcactcatgtcccagtaaggccgttctccataactcatcacttcccacatgagtatcccaaagctccagacatcactggatgttgtatgctttccatgtgcaatgacctctggggctgcccagcgaagcaaacaacttgggccctgaggactgtggccaagacgggccaccttgcacaccaagtggctattcaccagcacgctgtgggcagacagcgagcgatggacgaaggcaaagctggacaggtactgcatggcagcagccactccccgctgcatggccaccagctgcaggctgctgaactggccctcccgctgcctgaggaagc

SEQ ID NO: 337839 - DNA, 1000 bp, Homo Sapiens
ttttttaatgagacagaaaccatttattaacagacagcaaatactgtttattgcagactttccagctgactcatgtgaaaaaggcactatgaaaattaatgaatctagataatttctctaaatgatttatgttaaaatatacaacattcttacataacatctgttttatatatgtgaaataatataacatttaatgacaaaaattgtgtttccaaaaataacatttgttgaaggttaggtatctttcttttctctatgtggaatctttcacaggattaaaatatgtgtaaattaagtgcttcttattaccagaaatacttgacacagataaacacataaaatggccccacttccttttaactactcatatcaacattcagaactgaggctttcattaagcaaaatactgtaatgcacaccaatgcagactacttcctttgctagattttgagaagacatgacctctttcgcatttgtgctttctcatatataagaacacagtatacataataagcagaatataaactaaatcaaaatacaagctatacaaggagttgcaatcaacagagccatgacaaactgtcttgagaatgctccatagatttatatttgcatgtccaaggtatggctgtactttacagttcattcaaatgttttaatttttttttaaactgttggcattaagaactttaaataaatctaaatattcttccattgagtatgtcagagaagagacttaagtaagcagaggctagcctacagtgagctatgccctgaatgacagacaccatattcacaggcaaaatcgaaactgcttagattttgaatcatggacaacattgttgctttgttgcagtgaataactccaccactatcaaaacaattcctgtttataccctgggatggggataaaataattagtctaattaaggaaacttcaccttggtaaagtaagaaaaatattttccaaggtcaaaaaattcagtttaaattttttcag

SEQ ID NO: 337840 - DNA, 1000 bp, Homo Sapiens
tttttttttttatagtataaaatttttatttgataatcattttgtgactattctgttcagtaatatgcagaaagacattctgaaatctgttaatctctaaacattttaacgttagcttgccatacttgaaagaaactggctagctgcagtttacattccattgtaagcaggtcctcctccaccttcaggtaccacccagttaatattctgacttggatctttaatatcacatgttttacaatgtacacagttctgagcatttatctgtaaccgaaatccatcaccttgttccacaggtacaaattcataaactcctgcaggacagaatcgctgctcgggcccatcatatatcgacagatttctatttacaggtatactgtcatcccttaaggttaagtgtgccggctggtcatgttcatgattagtaccactcagagccacagatgacaagaggtcaaaactgatctgtccatcgggttttggatactcaataggtgtgcaatccttggctggcttgagccgttcaaagtcagaacctttatgtttcagagtccacggctccattcctctcaatatccagtaaaagattccagtgtaaatcatccctccatatacacccagtactccgtggcaggacggtcttatatttctaacagaatatagctctttccatacccatgagttcttcaaattgtcctcatattcagttacatggagtcctattgtctttgattggagattttcactagttagttgattaaaaatagattctgctgctaaaattccacttttcattgctgtgtgagtacctttgatcttgggaacattcataaaaccaggactacaaccaattagtaaaccaccaggaaaggtgagttttggtatagactgaaagccaccttcattgagagctctggctccgtatgcaatcctttttccaccttccaaggttggccgaatgctaggatggtgtttccacctttggaactctctaaatgga

SEQ ID NO: 337841 - DNA, 1000 bp, Homo Sapiens
taaacgaaaagcaaacttctttattgtacacagtacagaatataacgcagcttggcaggatgcatacggccctgcgcagggtgaaagtatttcaaatcagctggcaggttcaagcctttctgcactgtagactttccacactctggaaaagaagcaaacaaacaaaccccaaagaacccccgaaaaaaacaaaaaccatccgggaggtgcatgagtccaatgggaatgcaaccgtgatgccgctgtcctatgcccagtgacagcacaggtcacgtaagttacagcaggggaggggtagctcaagctacagaggattattgtcatattgctaagacagcataaatccattcaaaaaaaaaaaaaaaaaaaatccaaaccagggtaagtaaagaaaggaaaaccaaatctatacagcatttacaacaaataaatctctagccagctgggggtaaaatatgcatctatgtatagactatgtgtaggttaagaaagctataaatatggtttagaaagagtcctttgattagagtacaatgctaattaaggcccaatctacaggtttaccacctttgtgggctaattagcttccaatagaggagaatctcatgtttccatagctataaagtgcaccccttatccctgcgaacctcttcacaaatgtgctgttggtcataagggggacagtttgagactatggagtgctccatgaatagaaaagcagttcaaagcacgtgtctcacactcacggagtcagcactgcctccttcacatacgaggaacagtgtagtcattcttaatgtactaagtgtcacggggagcacagaattctaccagcagagcaggcagcaaggtaccaccagtaacttttcctctactttgagctcaactttcacatagctttagcttggttgtttaaaacttttccaatataatacagcaatgagaataatttctttttaaaaaaaggcaggaatctagaatgctagcactgttgcttacc

SEQ ID NO: 337842 - DNA, 1000 bp, Homo Sapiens
tttttttttttttttttgcaaggacacgcgctttatttcggaagtgataattccagctccaggtgggtgaaccccggagacctagtgtccccccccaactccattctcacctataccagctcgggacagtccctgctcgcgcccagcccacctagaaacagtcccttcttgctgagttccaagtgtgcaggcgaaagagatggggctgttcttcagatttctcttcccagctttcagcccccgagctgcccacagcgttcaccctccacatcccggccgccctctgggcatgcgggtgaagagtgcggcgcgacgctgacctctagtggtcggccttggtagtgcagggcagacggccgaggctgagccgcgggccgtgcggggacaggccacttgttcccatcccgctttcctcgccccactcctcgtttacccgcacccctctgctccttggttgaggctcaaggattgagcctgacaacccaggcgtctttgggtagttgccttcccgggactaggaaccctaggaatgggtggcggggtggggcggggacagttctgtctctccgctcaccctgtcccgccgccgccctcatagggccaggcacgcagttaatgtctgccatccatctattcgtcaaatatttgcggcacacctgcctagccagagagaaaaggacacgacacgacccgccccccggggctcgcaagccagtcctggggcctgaccgtgcgggaaccgcggcaaacactgggctgcgaaagcgcaaaggagaccgaacccattgggggcggagggggaggagggccaggcaagtccctggaggagacaatgctctgaaagacgagcagaagttagctgggtggagaagcggagagcggcgctccggtcgcggggctcagcctccgcagaggctccgcggctgagggcgagcaggagaaggtaaggccacgcccccctgttgtgattggccaaccggggtccgacgtgtgggcccgc

SEQ ID NO: 337843 - DNA, 1000 bp, Homo Sapiens
tttttttttttttttttttgataacatgggtggatttatttcttaagatttgagtgcaaacttaaaaacaagaacaaacaaagcttttcatcaagaataaacacaaaatctaaacaattctgcaatcatgcattttaacagaaagtacaaatatgaatacattataatttgtaactgcatttaaaaattaaaatatttctctccaaatccaaaacaccacacaatctttatctgttctcatcttgttaccttagaaacatttgtcatatgctatcaggaaaatataggcaagacttactaatcagttattcatgatcaaagaaacatgattctccttaactgtgactttttgaatcatttatctgtatttctgaaatatcacacaattatacctctactctagagaaaaaaagaataaatacaaatatcaaggaggcaggaacattcatggaattaaagcaaaagtcacaagtgtttgacttagaaatgtacatattgtagtaaatttttaaagtacaactttagttgatggctgatgtgtatgtaataactgtgagcaatttaaacaggtataaaaatgtgagatcaaaatctttaggcttaaatacttgaaaagtcactatggatatggaaagatttgtttacataaacatgtatatttttagatggaaaatcaaggggtagtggcatctccctggtcccttaacaatatttggatttttgcaaagaattagcagcacccaaccttaagtgttaattatgtgtttctaaaggacctataacagatcagttggcagtgttctagcttttgggagttgggggcagattgggggtgcaaatatctgagataagatagtacatgcactcacacatttaaaatcaccattctaaatgggaaaaaaaatcacatattgggaaagtctaagaaactcattcctaagggataaacaaccagggaaggaataaaagctgaacagtagtctacttgataataatggta

SEQ ID NO: 337844 - DNA, 1000 bp, Homo Sapiens
ttttttttttgaacttctgactttattatttttcttcaaatgaacaggtgataaaacactgtgtccaaagcaaaatgcatgactcccttttctcttctttcacagagtaccagaaaatgtaaacaatatttagcttgaacttctgagtcctcatcttttttttaacagcctttagaacaacattaatttgtttgtttatactagcattttacaacataaaaaataaaataagcaaactgtctgaggggtttatataaggttttcagattctgatacaggcttgcatctgcatcgtttttagtctgacaaagagaaacactgctttaggaagtgggtcatgtgggtgtataagtggttcgtggacaggccggataagccgtggttctggtcagagtaccacattgcctggaaatccacttgtgcattaaccagagctttagcaatctgtgctgagttttgaaagtgcacattatcatctgctgttccgtggatgagaagatagtctacatttctgaaatattctgctcttgccatcacagttgaattcttatagtgctcaagattatcatcctttgttgggagacccatgaatctctctgtgtagacagacgcgtaatattcccagctggagactggagccactgctataccacatttgaaaagaccagttccagatgcaagggccagtgatgaaacgtatcctccataggaccagccccatatggctattcttttttcatcaatgaaacccatttctatgaattttctgacagctgtaatctggtcttcaacttcataaacacccagctttcgatacactgcatagaggagtttgtcaccttggaaagctgttcctcgaccatccaccaaggcaatgaccatcccttccttacttgcaagataagatatccaattaacagcaaatacagaccttacactctgactgcagggaccaccatacacttgaattagcaagggatacttctttgatctgtcaaat

SEQ ID NO: 337845 - DNA, 1000 bp, Homo Sapiens
ttttttttttacttgacaaatgcagagcaattaaattctttattataaaaatctcaaaaatgtccacctttactggagaccaatcttctaaaaggtcaaaagcaatcctgctgtttctctctgaaagctaaactcctttaaatgagaatacgagaatacccagaattttattcccagcctttgtgtggaaaaggcagtttgcattcttaggaaacatctaactgttacctaaaccataaatatttctatctactccattcaacccaattaaagaaaacaaaatgatgagaaaaataggagccgaacagaaagaaaattcacatcattttctactattacgaacattcaaatggtgcttcaaattaaatacttttaattatcattctagccaggatcatactaagtaggatctcatgacagtcacatatgcagcgacttcacctaaaccgtggcactgaatgctctgccatgagccacaagcagcacagtgatcatcacccacaaggacaggttgctgggatgaggcaccctttcctttcatgtttaggttcttctcacctgcatttcactttcctaaaggtcccagccacacagcgttcttttagggattaaagtagtaggaaaaaaataaagagaacacaacatccatccttaaagaaaaaaagtaaatccactttatggtggacttcagctatggacaaatttgggatcagtgttctccagtctgaacatagtcttctgttacctgggagagagtggtcaggtactgccagctcagggcagccaaaagcatgacaaacgacaggtagatgggggagtagtggcttcgggaaatcagctgacagttgggaagattctgcgtccggatggtggagatgatctgccttgttttgctagaagatgggtctgagtcggggattctatgataaatctcttccatatactgatatatgatggctttgacagctggcatattggtggcatccatcatcagggtcac

SEQ ID NO: 337846 - DNA, 1000 bp, Homo Sapiens
ttttttttttttttttttactgtaagcctgaaataaactgtatttttcttaaaaaaaaaaaaacacacaaaaaaacacaaaaaactgagtatccattgtcctcccccctgtttccctgtcctgcccgctggccctgccatgggtctggacgataaaatactgggtagccttggggccgggtagaagctgtaagccatgggagaggcaggagaggtctagttgccaccccacgtggagttgtacgtgtgaagacactggctgaggaggcagggctgggtcggggccccagggtcagtggcagagctggcacttgaatccaggtctcctacctctggtgctttgtggggaactgggtggaggcaggatctgtggtagggtattgagggatgagggagaaaaacgacctaattcaggtaggactggcaacggctcccaccctccctggggacagggattaataaaaattgacatcactgtaggaatatattttttaaaagcccacgttttgtgaaaagatgaattaaaaaacccaagacccagcattcgggattgaaagtgcccgtgatgggagttcaagtattgactgagctgggagggaaggggctagagcccccaatcagacatgggcaactagagtgtggggtgggggctcccagtttgtcccaaaccctctaggtcttgtctcgggtctggggggattcggggggttcagcagtggctcctaaagcagccaccggtgcctcctccatctccctgtcctcagacagtgtgggccccgggcagaacgtgtcccctcggcccgcccggccaagcacagccatccagcgtcgctgtagttcctctgtctcagggctgaagtaccagctgaggtggctctgggtgatcttgaagacatgccttctgtcaggccgctcccctgcctcgggcggtcccacctcgaagccaatgaggggcaggctgcgctgggctttcacatcctgaggggctccgtagatataca

SEQ ID NO: 337847 - DNA, 1000 bp, Homo Sapiens; identical to SEQ ID NO: 160524

SEQ ID NO: 337848 - DNA, 1000 bp, Homo Sapiens
ttttttttttttttttttttttttttttttttccaccaaatagttaacagctttattggagatattcctagagcaagcatgtgcttcccaacatagctaaatctatgaggcaaagagagagatgggagcagaggcacaataccaaagatgcattttgaatataatggaatacaaatcaggtgttaataaaatactcagctttaaggttcatcagtggctaagttacagtgggtcaaaattatcaaggttcttcagtgaaattatatgaaatgcttctcaagaatctaccccataacttatagacattcagacatttccttctacagcttgcaaaaatggaagagtctcttgaatatgcatgcatactacttgccattgtatgttttgatttatttcatgatattctaatttcaatactttaagaaatactgcatactgttttcattgtctggcaaatacactttcaaatgaaaacatttttaatttagaaaggaaggggcttggaattgataataaaattacagatacactaaattcttcttattcaaagtcacttctgtgcccttcacatcttcagatttaatatattagaagttaagaaggttttcagttagattgaaaaaagacatatttttaaagtgtgtcatttaaacgttgagttttagggactttatgaatatttcagcttggcttctgagaagttagtgtaacatatcttttcataaatataattgttacattgaaaaaggatctcttattccaggcatatgcagagagagaagaaatcgagacttcagtaaggtatgtcaggacagaagagttcagttaccaaatcccgggaagtaacatcaccacacttatcagagtgaatgtcatagattcagtcgccactgcacatcctgctcctgttgtgtctaaagtactgccagtgtctgtttgatggatttgctttacatcactgaagttcatatcatctggcatccagtctgtgatcttcagt

SEQ ID NO: 337849 - DNA, 1000 bp, Homo Sapiens
ttttttttttttttttttttttttttttttttttttttaacacagtctacatttatttggtgaatattgcatatctgctgtactgaaagcacattaagtaacaaaggcaagtgagaagaatgaaaagcactactcacaacagttatcatgattgcgcatggatatgttcagaatgagtatttttcaaatcactttaaacaaagctgaattgcagaaacgaaagcccaacagcagcaattaaattacatttggaataaaatcatttggcctaattttcataaccacagatttcagagaataccaccacccatgccaggtgtaccagacaatcccattgtctgttttagccgtgtaggggccgctgtagtatacaccattcaggtttgcagagtgacacctgttaaaccaccagccagactgatcttcttctgcgcagttcccttcatagttgtcatgatctctgtcccacgtgctgaatttcattctttggtgactagcccaccactgcacctcaggatgaaaattccccgcaagggaatctccagctgttccagaatattccccaatattcaactcgtagaaattcttttcatctccaactttgaaattcttatattgtgcataacggctatttttttcaaaatctgcaaggtcgatttttaaagtgtagtcttcttgagtggtcaagaagtgaagatttttattgcccagccaatattcaccatgtttttggacaaaatttccaaagccattttcatagtctttccatcctctgttaaagttttcactgccatcagatcgtctctgaattacagtccatcctcctccatcggacatgtcacaataaacagaaaattctgctgggctctggagaggtttgattttgtaaaatccactgagcttatacccatcattgaaaatctctgaacaatctgcatactgcctcttgcttccaagatcaatgacagtattctcatctcctttatcaaggaactggact

SEQ ID NO: 337850 - DNA, 808 bp, Homo Sapiens
gggaaaggagaaggtggtggggtatgctggagctgaggtctctgagtctctcagggcccacaaacacacaggcttactccttgggcttttaagtgtttttttgtttgtttttgttttttgttttttttttggaacagtctggtccctgatgggggcctctccccctgcccctccccagtctggttacagctcagttcgtcgctctattttgagcagctccacctcgaacaccagggttgcaccgcctggaatctttgggggagctccccgctctccataccctagctcggatgggatcaccagcttgcgcttttccccctcacacatccccagcagcccctggtcccagcccttgatgacctggcctgtgccaagggagaagacaaagggctggttctggggcaggctgctgtcaaactctgtcccatcttccagcttccccgtgtagtgcatgtgcaggacatcccctttgcgcgatttgatgggacagtggtccacccgcttcttgaccccgatctgcagcttccttttgccctcggcccccgtggccgtggccacggcgctcaggcagatggacagtactgtcaggacccggaaccagctcagcctcatgtctctcctcgccgcgcccccggagtcaaccccggtggtgctgccgcctctgcgcaggcgcgtcctcgtcgctaccaggccgggccacgccgccctcccttattggaccgtgcgaaacccgcggccacacgcccgctggcacgggtctttcccgagccccgcccccgcgacgccgctgccctgcgtcacttccggc

SEQ ID NO: 337851 - DNA, 1000 bp, Homo Sapiens
tttttttttttttgtttctttttactttattaatgtggctactagaatatttaaaattacatatgtggcttgcaccatatttctaatggagagcactggtttatacaaatccccatttggactgaaccaagttcacatgtcttcgtgaacaggatagtgcagtcccaaaaataaaaaataaaaattaccaatggttttcatacaatcttctttttcacaccccagcccttccctgttaagtttatacagaaagaggctgagtttctcttgccataactcacttgctcaaagatttttattaaaacagtccatctgaacactccagtttatctgaaagctgtgaatggagcctctgaaatatttaatgctgaaagtttttgctccagaatcgaaacttaaagatttctcaagggaaagggggagagttattggactttctctaattttagtgagcctgctacttaagcaagatacaaaatgaagttaaaattccagtttctttctaaagctcactttactgactgccctaacttaatttttctctttcctttttgcatgggggaggctgctgaggtgtagcagggggtgctggggatggaagagccctccccagctactgaaaggcgtcaccaacgggctccttgaatcctctcatctccttaaactttagttcaccctttgggtccagggctgcgtgatgacaagaaacagtggacaaatgaacgaatgtacttctctctgccttataatggaaaagcagatttatgactgggcagtaacagccatgaaattaccagcacgtcctgctcaaaagttcaataagttatgatataattgctgcctggagccaatcctgggactttaggttagacgcttggccatgaactcttttccgttccctagaacagcggctaggctttgggtggctactcagaggccctgggtggcccaccattgctgccaaatacgcagggcagcatccaagatgatggggccctga

SEQ ID NO: 337852 - DNA, 1000 bp, Homo Sapiens; identical to SEQ ID NO: 158369

SEQ ID NO: 337853 - DNA, 1000 bp, Homo Sapiens; identical to SEQ ID NO: 158371

SEQ ID NO: 337854 - DNA, 1000 bp, Homo Sapiens; identical to SEQ ID NO: 158372

SEQ ID NO: 337855 - DNA, 1000 bp, Homo Sapiens; identical to SEQ ID NO: 158373

SEQ ID NO: 337856 - DNA, 1000 bp, Homo Sapiens
tttttttttttttttgcacttatggtatttattgttggaagattgagtaccttaatgcacaccaatgctcagatgacttgggggcacataggggactgctgtcaccatgcctcactcctgcagggaaggggctgccctactaaaaccccagcgggcccagtgctgtgtccagaacaggtccttatattactgcagcccacaatggaactactgagtaggagccaaaagaggagggagcaggaagaggtggcatttggagaggggagaccgcacccacaggtctgccacagcgcgtcaacggtatggggtacttttacagtcaagttgacttcggtgtccgcccaccatctacctttgtaggaccactgaaacaagggacatccaccacggcccacagcctgggcgccacggccccaggaggatatgctaagaaaaccattccacggccgggtgtggtggctcacgcctgtaatcccagcgctttgggaggccgaggcgggtggatcacgaggtcaggagtttgagaccagcctgaccaacatggtgaaaccccgtctttactaaaaatacaaaaaattagctgggtgtggtggcgcgtgcctatgatcccagctactcaggaggctgaggcaggagaatcgcttgaacccaggaggtggaggtcgcagtgagctgaggtcacgccattgcactccagcctgggtgacagagcgagactccatctcaaaacaacaacaacaacaaaaaaaaaacaaaagaaaaccattccaatcctgtgggttgttgtctttttactaggatgatggaaatgcaggaaatacagaacctctgcagctgctttctccaggaaaggagatgaaaacgttatatgtttcagttggtcaaaatgctctaatttgatactgaatattgcaaataagggatatttaggcatagtttttttttttaaataaattatccactgaaatgtattaatatgatataaacttggaaactgatg

SEQ ID NO: 337857 - DNA, 1000 bp, Homo Sapiens
tttttttttttttttttttttttttttttttttttttttttttttatggctaaatccatttattccgaaataaaaagcaaaataaacaggagtcgcatcaccagggcgccacgaccccatccccgcctccttcctctgtcctatgctatcaataaataagtttcccagccccaaataattattagaacctcctccccatgtgccagctccaacctctgctaggtatgatacagggggcggccctacccctggaatatacaaaatgttacacagatacaatatgtacactggggaagcagggccaccccagcagcccgtgccctcgcctggtctacagttagccccactgtcctgcctcagctgcctctctgtgtaagaagatgggagcccccctgagggaaaaattgctttggtgagagtaaggaggccatgaggcctcttccaaagaggccaattatatgagcctctggctattaaataacaatcatcatcatccagaaatttaaggagtcagccctggccaaggtggctaagggtctacacatttgtctccccccattagacaggggtcttatttgctactgtaagagtaaagggatgactgggaaggggtggcaggcacatgatgggggcggagcctccggccccacttctccaggctttgctgacagtggcctgctttttaaaatttttatcctgactttctttaatcccataacttttttcataattttttttttttttgagacagagtctcactctgtcgcccaggctggagtgcaatggcgtgatctcagcccactgcaacctccacctcccaggttcaagcgattctcctgcctcagcctcccgagtagctgggattacaggcacgtgccaccatgcctggctaatttttgtatttttagtagagacacagtttcaccatgttgaccaggctggtcttgaactcccaacctcagcctcccaaaagtgctgggattacaggcgtgagccactg

SEQ ID NO: 337858 - DNA, 1000 bp, Homo Sapiens; identical to SEQ ID NO: 158374

SEQ ID NO: 337859 - DNA, 1000 bp, Homo Sapiens
ttttttttttttttttcatttttttcctaaggtttaattttaactaatgaattttaaatgatgaatgtaaagtcaatccaagtctttgcttatttgcaatgcacaaactatttttttgtaacttgcaggtgaaatacattcttttcacatggtaatgttttcgcccttatttatggtcttttattatttttcttgagtccttttccttcaatagtttaataagtcacttctggcttgtctagagagcaatcctagcacaataatgtttcaacttgcaaggaagaacgcccttattgagttgatagaactccaccagctgtattagatctgtaaatcttgtgtggccatcatccagtgtgtggaacatttcaccgtcatcttctactggtataatttgaaagtgctttattttttgtccatgactcattgacagtacgaaagttttggggttactctgactatcccgtaccaagaaaactccatccacaagtccttgctgaataatcaatcgctgagcctcatctctagaaattttgtggtgaaaccatggctgggaccggtggatagccatgtttgtggcagagctctgtgaagaggcagtggggctaccgtgagtgcccaggcgtaaacatccttttttcctccaagcgagtccttcttcaaccgcaactgaaagggcttcagtgggattttctataactctgcttttctggcctgagaagtccattgctaccagggaattctctgatatacttctcataggtgatatgctctgtgaactgcagccacttctaccttgatatggatgcatataattctggtacagctgcatgccatacttaagcaatctaatcgcggtcacccagcacgtcctactctgctcttcttctgcacagagcattttcaggtctcggggccctcccgctttgttaggcttaaagcagaatccatagttagtcggtgctccatgtttttttttgcctgccagtgacacataaat

SEQ ID NO: 337860 - DNA, 1000 bp, Homo Sapiens; identical to SEQ ID NO: 158375

SEQ ID NO: 337861 - DNA, 1000 bp, Homo Sapiens
ttttttttttttttttgttaacatttgatttatttaaagtccttaactgcaaatgatcaagaacattttccacggcttaaaatctggtattatttttgttatttaaatcaaaatatttttaattacaatcacattgataaaaattaacaatttaatttgtaattttaaccatcatttaaagcaatttcagctgtaaagaaaaagaataaaccatgcaataaattaacattgagaaagcaaagagaaataataatgaaacccgtctggctatactaacaccatgtccaactgtggaaagtgcataacactggatgaaacaagcacacgatggcaatgattaaaatggccactatcaataggatttttgaatcttggaccacgttttgaaatccagctccctataacttatctctcctccaacattgtaatattcccttttactgaaaaaaaaattctttaaatggtatacactcatagaaactaattttatgtgttatgtgacctcagaatgacatgaccatggcactctgcaaagcaagaagcagagttcttgagggcaattcctgaggaattgattcccagggccatctgtgggtagagaggacaaaggggttggggtccttgtaactttcggtcaagcaactcttgagaatgtatcatgtatatcacctatctattacctctatatgttatgtaaatatacggaggatgtctacacatctgagcatgtgcataattaagtccatacacaatatacatgtatttcatttaaagacatctgctatctgcatgtatcagaaatgtaaactgagaagcaaatggctctgatgtttataatctgtttatgtcttgctatataacagcagtattgtctttcaatacttttaagagcctctagtgtatacttgtttcttcaccatttcaattcttatggttaagagtattgccacagacctgtaaactcgtagggggtcaggtaaggagggggaaaaagcacaaa

SEQ ID NO: 337862 - DNA, 1000 bp, Homo Sapiens
ttttttttttttttttttttttatcccacactcacccaggcttgggggtttttaaattttatttcaaaagcttggatagcttcaatatccaggttgtggcaaaatcaggacacgtgtaaaataccttacaatacattagattcccaaaaggtaccaaaaagtacagtaaaattaacacttccgttacaggaaatgtatgacgcaaataatataaaattaaaaggtgaaaaaaaggtgacactggtttcctaagatacaatttactctttacaaccagggtccacaggtccaggctgcagagcggcagcaggaagcagagcctcccacctgcttctgggggacctggtaataaaaatcagcccatgatggcgctatggcctctcagacaccacacgctgcctaaacacctagagctctggaaatagtcaacaggagagtgatttccatgggggaaattttaaataagatgcacatgggacaggcaatagaaagtttgccaagttaaatttggtacataattgtgttcactccatatccaaacaaagcatgtgtgcgatcagttggtcgctcctgctgccgcctcagtatggcttgtagttattctgatggccaccacgtcgctggctcttgccgtagtttgtactaccctgacctccacctccaccaccacctccgctgcctcggttccctcggttgcggtttccacggcccccagagccatactgctgctgctgatagacttctttgggctgggccaccttgatctcacacttgcttccactgacagtatggaactttttctccagaaccttcttcacgggttcttcttctttaaaggtgataaacacaaaacctcgtcttttgttcaactttggatccattggcaattcaatggcctcaatctccccaaactcgccaaagtactccctgatcttttcctcagtggcttcaggattcagacccccaacgaagattttcttcaccgggtccttcttcatag

SEQ ID NO: 337863 - DNA, 1000 bp, Homo Sapiens; identical to SEQ ID NO: 158376

SEQ ID NO: 337864 - DNA, 1000 bp, Homo Sapiens; identical to SEQ ID NO: 158378

SEQ ID NO: 337865 - DNA, 1000 bp, Homo Sapiens
ttttttttttttttttttttttgactttctgtgtttacttgtatgaggaaaaacagcacatagaggcaaccacagtatttaatttgtttggataatagttaacagataaacaggtacaccccatatacaattaccaatacttttgatacagttcatatttcagtacatcaacactattttatttacactctatttatgtacattaacatctttctaaagtcagtgcattgtcaacaagttttatacagtaatttacaaggtgaatgtagttaatagttaatttaataaattttccgctagttcatgaattaaaaaaattaattacaaccagtataacacaaatcacacaacattagtagattgtgctacctgtttaaataaaacatctgtaaagaaattatttaaaatcttccactttttaatgggacatgtccaggtaggaatggacagattttatttactgaaaatcttgaaactataaagtgtgcattttgtctgactttattacattagacaatttaggccactcctacctacttgcaattatattttttctgaaaaggatttcaatttaggtagccatttaagataacctttccaaatgctctgagaactagatattaatagttactggcctcagatatcagaacacaaatgcttagttacattggtaattactacctatgaggaagaaagggtaatggaatctggcaatgagaatcaacttgcagggtctaaatgaataaacaaagaccaaaaataaggtgaaacatttccttcaagtatatattaagaaactacatgaaaaaaattctacctcaaataaataatatttatacttttgttccaatcttaaataattagagggaaaaaatgaagtaagcaaagaaacataactttcaatgactactgtaaaatttaaaaaaagacaaatatcaaaataaaaaaaccagtggacatgcaaacaaagcaaaactaaagttgacttcctaaaaccacc

SEQ ID NO: 337866 - DNA, 1000 bp, Homo Sapiens; identical to SEQ ID NO: 158379

SEQ ID NO: 337867 - DNA, 1000 bp, Homo Sapiens
tttttttttttttttttttttttttttttttttcttcagaatttcattactttttattatacaccaactagtttatattgtagttctttacaaagaaaatgctaagaaaaattataatcacatgttatatggttttaaaataataattccagatttctttacatataagatggaatggtccagcagctatatccactgtcacagactttagttccgttcaatgatatggcacatcctgcaaaattaactagtcacacacaaaaaatgtctcaaatacagtaaaaatgtacacacaaaggtaatttacaatgacaaggaatgtaatttttcttggctgtgcttcagaaatttagggtcagtagccttaatcaaggcacaaagcaggaaaagtgagcacagctgtctctaggagtgggcaaggtatgtacaatcactgatgaggtatgcatgcacgcaaaggatttaaaactgctcagtctcactacaaaaattgaactgagttaaaaggaaatgctgtggcttcccctactatctggctctggattgagtccacagtcttacttcatcaaatagaaaataaaactgacaaggatctccaaaagtaaatcactatttgtgtaaatgaaacaaaatgcttcattaatcccagttcttggttgtgcctcctggactagaagcattttgtagacaaaagagtgtttcacaaaattgaaatgtaattcaggtgaaggacaaaacattttccacagacacttaaaattccaaactttcaaatggcccttacagctgaaccgttgtatgttacagtagtgagggttctgggtatcctttagcagcaaatgccggtttaaagggcacggggtctcttcgggttgatttgcttgctggcttgttcctcctcttgtagagctgcacggaaagatttcactttatcccgcagttcagttaaaatgtctattttttgctcaagaatagcttcaagttgtgtagcatatgaatc

SEQ ID NO: 337868 - DNA, 1000 bp, Homo Sapiens
tttttttttttttttttttttttttttttttttttttttttttttttttttttttttttttttttttttttttttttttttttttttttagctaggtaatttaaactgagattaaaaaataaacatacacaaaaaatacaaaaagtacagtcctataaggtagagttagcttggcacagtaaagactaaatttaagacacgatagacaaactgtgtaataaatagggccacagttgtaaactgtcctttttccctcctaagatgccaaaattgcactctagttgtgttgggaagcagcagagtttacaagaagagtaggtaggaaacagctgtacaggccaggtataatttatacattttttttaaaagttataattctacaatcccaagggagtagaggttatagtcattgaatgactgcttgataccatgtcctcttcgtacttcgattactttttaacacctgtgggtatgtataaacgattacacttgtttgcctcctccacctcgcactgccactggctggctgttctgaacaaatgcacctcctccacgaattgcacttgggtgagttggagaagctgctggatgttgcccgggacgaataggtttagcaatctgtgcagaatgccctcttctggccatattctttgacctgactgcttcctttatgcgatctacttcttgctgatagcgtttgcgatcacgagatgcattttctttagcttctttcagtgctgattccaaagctttcactctctcagctgtagctcgaagtcgcttttccaacttaggaagttcacagcggagatctgcattatcacgtaccaactgtttgtgcactttagtgagctgttcaagattattttcaagaaaggagattttttgcttctgagcagcgctgcctccggtgtcatcagaatcaatctcagcactctttttaactcttgtagccaggtcctgaacaaagagtttgcgcaggttgtgtaaagtctgaagt

SEQ ID NO: 337869 - DNA, 1000 bp, Homo Sapiens
aatgtagaaaccacatttattaaccatggatttactgagggcagtttattaggtattatccatcgcttatgctgacatctgattttgcagagaaattatagccattattttattaagataattctacgagatcaatttagtttcttgaagtagcatatattcaattcttcaatagggtttggtttaatttagctatcaaagtcagatgtctctaaactttacacactaaactcatcgtgagcagaaaatttattctttgtacatattccttctgttttggttcttcaagctgaaacatctcaacttccagaaatatggttgccagatcaaaaataccagagtcctaagggttaagatttgaatcgagaaaaagatacatgtacacattgtattatatacaaacaagcaacaacaaaaagtttcatcatgtaaacaaaagaatataaattatagacataattggaagtttcaaacagtccttaaatcattgtgagcttctctaaaaggcacaggtcttggagtgtggcacagagccattagtcagatgtctgggtggtctcccataatagcaatgtatactctaaagtgggctttttgtgaactctgtcagggtgaatgagttaggcctcttaaaggaattaaatgctttcacatttggggcaacaagttttaaatacttaaaggagggatacaactagggttagatttattgttgacagtgattttagaaataaccactaaaaaggtgttaaaagatttctagataaaattctgactactgaaaataagaaaggataggttttgtagctctacaaatggtttggtgaaaaataaaaagggagaaagtgagccgaggagaaagcgaaatagggaagtctagggaggatgcaagaaaatacacaagtcatagcaagaaaaaaaacatgagatggtcctttctaaggacagatgttggtgatatttacctatgttaagctcaagctgagaagagtacagttct

SEQ ID NO: 337870 - DNA, 1000 bp, Homo Sapiens
ttttttttcagcagacatctttattagcaaattcagtaacaggataatctttccaaaatttacaaatatacaatatatttatagtattaccttcagacaacttcagtgcaaagatatacatatagtacattgtgataattatttgtaaaaatatgagacggcataagtaaaaaaagacacacaggatacctccacctataggcaaacagggaaaaatatatttttttcataaagtactgaatgttaacttttttcatctgtttgtaaaaaatatatgtgcaaaagtgtgtttctaattattccctaaatagctggtatagctatacttcagagtcttctttaacaagatttgcggtgtctttaaaagtgtcttctgttgcagaataggttggagttgggtctcttctcgaaggaggcttaggcttagcagggagcgaaggtgatggaggtggtgtcgcagcaacactttccttttgctcgttctccatctgtgcatagattggattttcaaagttggtagtttgtttagattttcgtttgaagagattccattttgtcacctgagttccatcagcagctggtgaagttgggtttgtctctggaactatctcagaagggtttatgggacttccataattcttattatccacattttcagatacagtcacctggattggctgaaccactttgacagcactgtctctggctgagtacattgggttttcaaatattatgggctgcttccccatttccatgacaaagtcttcactcattgccattgacctgtcaatagcagtctcaggtccaaaaccagacactccaatatccatgttaagatctgcccctgatctgaaggtcaccccattcccattttcagagggcttgacgagactgcttaagcttggcagcttgggcagagcaggcaaaagggagccggtccttctatagtggaagaatcctgcaattgccagagctccaattacgacgatcaagaggattg

SEQ ID NO: 337871 - DNA, 1000 bp, Homo Sapiens
tttttttttttttttttttttatattttattcaactttattaaaaattaaaactacagaaaccaaaccgaatgcacaaataagagagtggggaaacagacagggagcaatggcagctgataactgtggcgagtggataatccgcatgactcacatcccacccctgcgactgaggagcccagaacgctgcgctggcactgtcgtgccctcttccaccacaggggcacagaaacctgcaggagactgaaaacgattacaaacatcttcaaccagctctctggccaaaggcagcaaaagcagcctgaatacgcaactcacgccaagagggcagcagctctcctgacatccatgtaagaaggctaacacctaaaccacacgcaggcatcctgaactcagcagctctgatccaaggtactgagtggagacaaagcactcggaggtggcaagatgttcagcaaccaagtaagacacactggcaaggcatcccacccaaaggtgagaagcacaaagcaggcttggagaaacaaacagtcatgccaggtgcagccagacatcctgctataagccctgaccctagtaccccgagttcatcaagtgctctggttttgtgtccataaagcacagagggcactgaccaccccaaaccagaatcccaaggaatccttatggatggcatagggcctcagaactgctgcaggatcattttccttttcaggtcgtggctgaacttgttcatcctgaagagctcactgtcataaaatgcagagaggttgtggatgttgatctgacgagccttatccaccaagtccttctcagggacctcaatagtgtcctgctgggccccaaagcggttgcgctgatatgtcacctgctctgccactaactgcttcagtatgaagagcaacagctcattgttgtcacgccggaatgaaaggtagcgggcaaaagtcttgcgcatgctgcgcatgacgctgaacttctgtgtgtctatgaagctctcc

SEQ ID NO: 337872 - DNA, 688 bp, Homo Sapiens
tttttttttttttttttttttttttttttaggtatgaggctgatgccaggtaagtttttattatatttagaaaaaaaatgtaactggaaataaaggtaagtcatttaaaatgaatgagagtttttaaacccctataattctttaatggcagcatttgggtccactgcccaagccacttttaacccaaccaagatgctggaaagcagagcacacagttgtgcccaccaagcccaggagggcgatggaccccagggctcctcgactacgcttgctgggttctcccgtgtaatagccataagcataaagaactcgtccaacaatccaggccaagcccaggccagaagctatacgcgggtggtaaacacctccaacagctagaaaaaataagaagggaggatacacttccaacgtgttctggtgggctcgctgaatgcagttgaagatgtgcccattttcagggtccgtgctgtacatgataggatactccactttgtacttcttgcgggccttggaaacattgatggctaggtgggccaccattataaagctggcagcaccagttagaagcacaaaaccatattccttagagaggacagccatcttgcgtctggatcaccttcgaacagctggagcagaacaaaactgcgcagcgcggtgtgggtgcggcgccctcgcctggggcggggct

SEQ ID NO: 337873 - DNA, 1000 bp, Homo Sapiens
gaatttctagtaaaaactttgaagatgagctgttcttacttttcatttctccacttatggagaagatggaataatgacaccaaaagtactttggtttttttcttttaaaaataatttgctttcttttgcatgccacaggacagatttctagtttcaaaacaagggtacaacaagaacaaaaaaatccccccatccccaaccgtctttcaccaatacaagaaatccttctggaaatattagcaagcaactaaacaggtattgaaccactgaatctacaagttaatacataatctgttatggcagaataaccaagaatttttccccaaagaaagattttaattttttcaaatataaaagtgtctaagagaatcatatgtgaacaaacaaaaatctctgattccagatttttaggataaagatgagtaacacactggcagctgaagaaagctgaaactctgactaataaatagatccaaattaagaatttctacaacagttttttttttttagaaaacaggaccagaattctttttttttaaatgatgatcctgtggaatgcctttacttccatattcacctaatattgtaacagtaaaacagacacaagaatgttgatgacagctcaacaatgctggattcaggacatttacaggtacacttttgtttaaaagtcctacaagtttattgactaaggctagacagcaattcatatgatcctatttggtgcattttctaccatggtccaagatcattacatggatacagccaaggactgggccccaactttcaggaaaaagaccacaaagaagaaaatcaaggtggctatttggtccccccagttgataatctgtgtcctggaactggaaaaacaaaaggtggaaaatacagactgcaacgagttaaaggacttggaaaaagttggtggaaagtggcacggtatacgagtaaggtcactgggcttgggatggcaagggtgctgcattgaaagagcatccacggg

SEQ ID NO: 337874 - DNA, 1000 bp, Homo Sapiens
ttttttttttttccagacaacactgttttgttctcagcgaaaactccagaaagaacacagtcctgggaggttggggattggggtcaggactccaccaccaattgtcttggcaggtaggggacaggtctcactgcggcactcggacctccagcttgcactcagccagcgcctcgcccagctcgttgacggcccggcaggtgtaagtcccagcgtcgaagggcgaggggcgacggatgttcagcgtcaggactccttggtaattggttatcaggaacttgggatcttcacggatttccatcttgttcttcatccagaccaccttcggcttcgggtggcctctgacagcacagttgagggctgccgagtacccagccacgaccacgcggtctatgagaggtgtcaggaacttgggagccatccggaagtcatgctccttatactcgaacggtttgaaggtgattcctgtcttgaggatgcgggccgtgttcttggagacaccaggtgagtcactgagcccacagatgttctcggtgtaaactcggaaatagtattcattgcccacgataaggtcggacacagtacagctagtgtgcctgttacgttcatagacgttgaaccactccatggtttttttgtctgctttctggacgaaataccccatgatctcactgttcccatcatctttgggggcctgccactccaccagcgcgttcgtgccccacacctccttcaccatcacgtttatggggggcccagccttttccacaacgcggatgcggatggtggcggtgtccttcatgttctcgatctgcacgctcagctcgtactccccggagtcggagcgggccgcctggcgcacgaagaacacggtgtcgaagtcgctggtccgcacgtgcacgcgggaggtgtccagcggggccccgcccttggtccacaccacctggggccggggctttccctggaaggggacgacaaggttgagctgctcgcccactttgcg

SEQ ID NO: 337875 - DNA, 1000 bp, Homo Sapiens
tttttttttttttttttcacagtcagagtggacttttattaggaaatcaccctgcaaacacaccacggagtgctgtgggttcaacgcgcttcctgaggaaggagggtcacagtattggagctgtcggagggacgggtggcacagcctgtgagcctggcggtgactcgaggctgcctgcggccagcactccctcacagcaacaggactccaccgcaagagccgacacgcaaacgcgacacgagaaacacgcccaagcacacacatctgcgctacacttaaataataataaatacagaattccatttgctgttatccgtgcctgaaacaaaaggaacccaaaatggaaaaagaaaaccaaaatgtctttctctccattagaccaagggaaaacaaaatccccaaattatcaaaattcctcagttacaaaatactttttaaaaaaattccattattaaaagaataaataacaaaatatataaaaaataacttggttgcatcaaaattataactaggagttatatcaagattttttgtggcctatattatagtcaaatagttatttttgctttgaattcacttttttcccctcttagggtgccctggtgtggggtctagttgaaatagtataaaattaataaataaaaatgttaaataaatagcaaacgttaacataagaggctgtgaatataaatacttacatcttgacaaaattaaataatttacagaataattaaactaactactttttaattttttccaggaagtgcaatttctctatttttaaatactaacttggaattgcagtcacaattgacttggattctatttacacggtagggacattgtgtttttaacacattaaattaaaatgtacccttttttcgcatattggatggatctaaaagaagtgaaacctttgtggtctcctgttaggaatttaccctctgaccttgatgatgtcattgccacctccgtcaccatggatgcagaggtcaagctc

SEQ ID NO: 337876 - DNA, 1000 bp, Homo Sapiens; identical to SEQ ID NO: 158381

SEQ ID NO: 337877 - DNA, 1000 bp, Homo Sapiens; identical to SEQ ID NO: 158382

SEQ ID NO: 337878 - DNA, 1000 bp, Homo Sapiens
ttttttttttttatagtataacacactttaatatttatttattttaggttgcaatacaagaacatgaaaaacagtatcaaatgaagtgatcattttcagtgaaagggaaggtagaacacaatacaaagaaaacacggtatctttagtttacaattacacaatataagatgaagaaactttttcaaaaatactatgttatattaacacctcagtggtaaacaataacatcattatgattaaatttataggccactatatgtcacatacacaaggtctcagttgaatcaaatgtggtcttttcacattagatgtatgctaatctttttcaagcagtcaaacttcaaaatacactgttttatttactataagtactggatttctatagcaaactaatgaaggcacagctagtgcaagcagatttaaacccttagtcttatgggctggaaaaaagaaaaaaataaaacacttgcattggtacttcatgaactttttttttcaagcaaatatttgtttcagttaacaattctgacagtttcacagctacagtctaacagaaacatgaccaaaggacatcacaaaaatcaacactgtgtagcaccaaactaacatgctttagataattgacaacagcttacatattttgaagaatattatactacaacagcctagatagaataaactggcacttagacactttttaggactatttttaaaatatagactaccaagaaaccacaaaaacttgactataaggaataatagtgttcaggttacaggtcagggttttacttttttcaaggctgtatgaatctgcttcacttcttgagattttaagattcttgaaaaatctttcagattgacttattttctgtatttcttgtttccataatgtttgccaaattgatagtaggtaccattgacttctccagtatagtaatagattgatttcaggatgacattatcatgtaaaatctgcccaatttcaaagtcctcatccagg

SEQ ID NO: 337879 - DNA, 1000 bp, Homo Sapiens
tttttacgggtgttcatttattgactgctgggaatacagcctattgagaatacatgacatgcatttggtggagaaatcaactaaatctgaaatgaagccattcagtaagcctgctgtgagttaataaggtagcacagattagatctaaggacatggtgggggcaactcaaacagccactcacaattgttattaagattccagctacaatttcttttggaacttatttattcttaattacttaggaattaccaggaaagagggaaaatcaatctgcctctttaccttaaattaatgctaagagggatactgtgaatcactaaaaaactctccccaaaattatgttcttacttcaaatcctttaaggcaattctatttttacaaattcttcaatttctatgcctcaggattattagcagctaagcagagttagaaaagattaataactgatacaaaaggctattcatttgattctagtgtttactgctgaattatactgtgttctaatatgagcagatttttatacgatattgccaatttcttcccccaagatttttgttttaattcattgatgcaataaaataaatcaaagaattccaggtacacttaaaaggacagaaagataagttactggagtatcttacaccataatctaaaattgttgaattatacatacatataacttgaataaaatgaataacttggataaagtgagtaaaatgctgaaatgtatccctaactacagtttcatgccaggtattttccccgaactttgtttcccgaacttaagaaaaaaatggatattttttcttaagatgacaaccttaatatcacttgatgttcaggtgatttgagatagtttttatggtagtagaaagaaaaacagaaagagaaaccccaatgaaacaaaaaaaaggaagattctggctttttgttttcttttttaaagagcctgttcctttcataatctttcctccacgcttctggagaaaatggttatgg

SEQ ID NO: 337880 - DNA, 1000 bp, Homo Sapiens
aaaatatatctgaggatatgatttgaagtatttgaacactaaagacttgttttttgataaattattttaaaaataaatgataatcacatatttataaatatatcaagacaccatattgatattgttcccatttcaatttactttatttgaagctgagggcagaaatcaatattatttcacttgcaatacacttttttttgtataatccattgtgaatgaataggacatatataaagagatagagatttagaaagtctttctaatctaattttatatacaactaatattctttcaaatgggtaacaattttgatctggcacttcagtctatcaaaaatcaatgttgaaaatgcactgaatcataacttgaaatgagttctccaaagttttcaatttttaatatctgctaaagataactggctctttgacgcctacgttccctgaaattcccctgataaaatgagtaaccattattaagctccttcatcttgaagttgaaagccactttaagaatctatttgcccagaataggactcatacacatgcagggccttcttacacatgtagctcacgttttttttccttaacccctatatttgttggtggtattaaatatagttcttaataaatagagcactttagccacataataaattccagtacttcagtcatagaatcaaattgaataccaaagtgttggtgccagtcagtcttgatattgaaattcttaacaaaattaacaacaacagcaacaacaacaacaataacaaaagggaatggatcatgggcaggagtatttgatcatatgtatatgtgtacaagctattccaagctagaagtttcccaagaaattaaggtcaatggaatagttttggtcatagggtcacgcaatccaaatactcttcgtagtgttgttcaagcccctgtaatattgttgttatgctttgctgtcgtcttcttttgattgaatgatgtcgttagaaactttaatttctatagtt

SEQ ID NO: 337881 - DNA, 1000 bp, Homo Sapiens
ttttttttttttgcagaattagaggttttattagttgctggtttgtattgattataagtttataacttcagaactgaattagaaataataagcattagcaatcagcaaggaaaaggtgaacatctctgctatttttcctttaatgtgtttggcatattcaaaatccctgttttagaaaagaaataatgttaaaacatgtttataatggagaaagactctaggcacagaaataatattgcagaagcttttaaagtgtctgttctgcaacttattttaaaacccaaaggagaaaggatggtactaccataaatcacattgacacagaaaaaccataggcagcttgagaacttaggtaacagtggagagtctaaaccgaaacattgactgcaggatctgtaagtcctgcagacaagtgtgatgctttgaaatgcctaaatagcttcaacgtagttggctgggagcattccggtcctgccagtcctctgcacagtgccatacatccagccttcatcaattgcttgaacatttatgatggcatctccatccttgaaggacacctcatctgcatcagcagccatatagtcatacatggcacggaagatttttccagcagtagatggatgagatgggatggaagataccgttgtctgttgggtagcaactgaagatgatcgttgttgtgggagctctgtggtttttgcatgtttgtaagctgttgagactgcaaagacacccccgtcgctgtaagtcgaaaggtggtggtctggtgcttctgaatgctcagacttctcctcacccccactgacgcttagtgcactggcagatcgtgactgctcccggctccggcgctgagcttggacattaatcatgtgtaagcttcgggactggatgttgtcttctgctggatcatagtcaaaaaccgaaccaggattagtacgccagacacgtaaacctgtaatagtctcctgatcttggtcattccgtttttgttccatttcta

SEQ ID NO: 337882 - DNA, 1000 bp, Homo Sapiens; identical to SEQ ID NO: 158383

SEQ ID NO: 337883 - DNA, 509 bp, Homo Sapiens
ttttttttttttttttctcattcttgaccaagccactttaatttgtaactttaatgtgcaatatgaagtcgataatccttgaaattctcacctggctcttgtacagagtgaggctgagtctacaccttcagtcttcatcatcaggagggatacctaattcttcatctgtccactgggaaggatcaggatacggaaagtgacccagcacctcttctgagtcatgccaaaagcgccagagaatccagaaccacatgagtccgctgaagaactcgctctggaacacctgggatctggtcagctgggggaactgtctataccggggctcaatgtgcacaccaccaccggcatgacggactccaccatctccagcagtccgtgcgcagccgcttctgaaaaggcggcctccaacgcgagcgaaagacgccagccgagtcagagcggacatactcgctcccgtccgccccgcggtccccagccgcctcgcccctgcctacttcgcttccccggcg

SEQ ID NO: 337884 - DNA, 1000 bp, Homo Sapiens; identical to SEQ ID NO: 158385

SEQ ID NO: 337885 - DNA, 1000 bp, Homo Sapiens; identical to SEQ ID NO: 158386

SEQ ID NO: 337886 - DNA, 899 bp, Homo Sapiens; identical to SEQ ID NO: 158387

SEQ ID NO: 337887 - DNA, 750 bp, Homo Sapiens
tttaaaataaaaaactattacgtgttaaatagcaaattttaaaaaaattattcaaaggaatgaaaagaatggcagtgttttacacgttgcagtctctgtagcgtctggttccatggaaaacagctgcattcccacgcacgcttctgcatccagtctgctgtgatgtgtcgctttggttggagtaggcaaagaaaatccagcctcacacagatataaattgtcagccttgacagcaacaccctttattcagcaccaggaatacccttcgcacagaaccagcgagcttcacgtgctcagcttccccgcggaaatgctcacaggatgctgcgggacccccggcgtgccacacgctctagtggtggtgctgtctgaactggagcccacagtaaccgcatgtgccggtttttgtttctttgtccaagtttatatacacttttgggtggccaagagctcccccgccgccatcgcacgctatcacccgagtctccacctcgctcacgggctgctctgctatcaaatcaatggcaaagttttcattcacctctttctgacgacctacaaaccgaattctcctgtagtctttatcatcataaacctggccagtgtgcgtgaccttctccccggtcggcgagacccgcaccccgaaacacctggcgcccaggggcaggctccgcgccgcctcgccacaccggttcagcagccggcagaaggtcatcgccgccgccattttgcgccgctggcctttgaccc

SEQ ID NO: 337888 - DNA, 1000 bp, Homo Sapiens; identical to SEQ ID NO: 158388

SEQ ID NO: 337889 - DNA, 1000 bp, Homo Sapiens
aacttggaaaggcatctttatttggatgtttatgcttttaacggctgtctctctcactggatgagacgctccaagtggtcagagactgtgctggtttattgccccatgctcttcatgccagcataggggtgacctagcagggccctcgaaggtgaggaacggggggaaaaacgtggagtcagctccctcgtgcccagcctccctgggttacccttatccccaggctcctccagatggcaacccccagggcagtggtgagggctccagggcgtgtgtcctctcattcttcctcttgtccctccatccctcatcatttccacagcaaggacaagggtctgtgctggacacagagaaaggcctggaactactggcctctgaccccacccagcaaggccctaccgtgctcaggggacaatttccttctctctgcctctaccacaaagtcacagggcaggcctgtctaaaaagccccaatgcacacagacatgcatgcgcgcaaaacagctctagaagggaaaaactttttttaacgtctctgccattttagtgtcatgttactgaaacttcccttccccagtggctcagttcagagccttctgtgtgaagtctttaaacaacggtgtttcagggtcctcaacagcaataagatgggacacctctcagggttctgcttgctcctatttcagtctcttctcactcaggagagtccatgcttcctactggttggcagtttcaggctgacccaacatgggtaaaacaagagcacctgccattttcaagagaggcaaacaggcttcacccaggatacctggggctttgggggtcttccaagaagccctgtccacctggaaagctcttccttccagactggctctcttccacttgcagtccctcctcctcggctcaggactgtactggctggccccaggctctggccacagcagtccctagggcaccagaagagcacatagcctgggcccaaactgcagcagttatggct

SEQ ID NO: 337890 - DNA, 1000 bp, Homo Sapiens; identical to SEQ ID NO: 158389

SEQ ID NO: 337891 - DNA, 1000 bp, Homo Sapiens
tttttttttttttttttcttttttttttttttttttttttttttttttttttttttcgagttgccacactttatctcagtacagttatcgcgagagtcccggggccgcgccggcgtgctctacgcacgcgcagtctttcgcggggccggccagtggtgccgtcgaggcggggggagtggccgccgcgccggccgagtgaggtagggtcacacgcaggcgcactcgcgcgccgacagctcgtgcaccgtgtggtagcggctgtgcgcgtccaggaaggacacctcgtcctcgtaggccgtcgggcggcagcagggctgcgcgcgcacccgctcccgccgcaggcgccgccgctggcgcagtcgtcgcagcccgaggtcgtagacgcgcgcggcagcctcgcaggcgcctgcgcagtagcggaacagcaccgtctcgtcggacgcgtagcccaggcccagctcgctcacgcgcacctccagctcgcgcagcccgcaaggccgcgcccccaaccgcgcacgcgcgcgccgccgccggggccccgcccgacggcgcggacctgggggccgcccagcccagggcgtcagctcgcgcagctccatcgcatccggggccccctgcaggagtgcacggtactgggccaggcgggcaatccgggcgtccagggttcgaggcaggcggtgcagggggaccagcgcaggtccgaggcggtggctgagaagcaggccctctcgacacatccagatggacagcacggagctgcagagcactgaggccaaggccgccgccttccagcgctgcatcctcagcctgcgggcacgggatggtcagccgcacgccccgtctgtccctccagcagccaacgggcacagggcgctgggccaggactcagtgtggggcctttgactttgaacgcctgccgaatggtcgataatcacatgggaatggtccctcaaggaaccattgaacaaggaaggggttggcctccgtgccaggagtcaca

SEQ ID NO: 337892 - DNA, 1000 bp, Homo Sapiens
ctcagggttttttttttttttttttttttttttttttttttttttttttttttttttttttttttttattatttaagacctttattaacaggtgcttgcagtttgttgacttttttgaaaaaatcaagttgtaaacttttattacaaattaaaaatgaagttcttaaaaatctcaacttgaccagatatgaaacaatttaaaaacctttaaaggcgtattgagaaaaaccaggcttttttaaaaaacacgtttgttattaccaaaaagagacgtctttaggtaaaaataataaaaaccccatgctgcatagataatgcagatagttattttatctggtcaacgggcaaaaagcaagcactttaggtcttcagctccaatcttttgttcatttcttattgctggaatttcatatttcttcttgttggatgactaaaccggatgatggtagagatggtaagccggcatttactcagccccgccctgctcagcctcgggagcggacgaattctcagctggtggatcggctgcttttgtctctttgccatcttgtggtttagggttttctgggcgtctgcgtcggtaattgaagttgcggcggtaccgacgttgaggtggctgctgaccttgggtctcatctccttgattttctttatcttcttcattgccgtcctctctaggctgtctttggcgaggagggcccctgcggaatcgtggtctatatccccgatacatattctgcctcactggtctaccttgttctcctgcaccctggttgtcagcaccctccatcacttctccctgcacaggagggttggaatactgtggtcgacgcccatagggtctccgcatgtagtaaggtgggaaccttcgcctgcggtagggccggcgttgttgggcctggccttcgggagcactctccgatccctcgttcttttccccactctcactattctggtaattttgctggtaattgcgtggaggacccctacgacgtggata

SEQ ID NO: 337893 - DNA, 1000 bp, Homo Sapiens
gctttgtttcactttattggatacaccgggtgtgggatttacaaataggaccaacaatgtgtgcggggcacagacggctgcctgtgggtctgtgtgtaacaggggctgtaaaatgaatggacctcatgtgcacgtggtacagagagaagcaaaccaagaccaactggatcccaacgtgggtaacataaacagttaaattactaaagtcatcttaagaccaaaatacttcaatgaaaatggcatattaaaaacatataaattacatttaagctctgtacatgattcttaacaaaaataacaataccgtgttctgtacaatactgcttcctctgaacattccaaacccaagaaacactttcccttgaattcccaaaaaaagtgggcaaaatacacatggagtataattaaaaccatttcaccaaatacaaagctgtcagtttctttgaaggcacacattttgttgtatctcaggaactcccatttcagaagccccttgtcttccgaccccaacaggcagcagagggcagcctccgttccagcgaatctttggctgctaaagggagaatattctcagcagggaggcagcagaaatggagccccttcatcctcaaaccaacagaccagatcggttgtcaggaacctcaagacccgaggtgcctcctcgctgccttttgcaggcccttattcccaacgttttgaaatattcactccatatatgacatggagtgaagctgccacctattttcttgaaaggcatttgctgctcactaccagtctaccaccagaatcaatgtatacagccctggggatgaccatgtgtcctgctccccaggacgccgtgctgccagaccccctgcctggcttgggtgctcctaggcagggcagctctctgtgtcagaggacagagaggagcagggctccacctcacccagtctgcaaacaagcccactggccggcgggctcttgtgattgctgagtatggtgtcttctcaaaggtgac

SEQ ID NO: 337894 - DNA, 1000 bp, Homo Sapiens; identical to SEQ ID NO: 158390

SEQ ID NO: 337895 - DNA, 1000 bp, Homo Sapiens
ttttttttttttttttttttttttttttttttttaacagtatctccaacatacattttatttagtttaaaattccttaatacaagaaggtgttactccttaaccactgctgcagcctcaccggaccctcctgatgtggatgaagcaggcggggtggctgctggtcggctgtggaggcacctccaggcacagggcctagagggtgagaacactggtgacattaacgccatagctgtggcttgggacagggattgagaggcagctctcagggcacatgggcatcagctttcacaggatcctgttcccagtcaggctgcactgtttgttgttgtcccttgggcaaggggatcccaaacatctcacaatgacagcttcttctccaggatctcctttatcatgactggatctgctcggctttgagtcgctttccggaccaacccaatcagtttatttatagctctggggtttctgttcttcacatccattaccacttgaggatgggcctccatcacagagtggcagagctgctccagtgccccctggtcctgcatcagttcaagctgcttttctgaaacaatctgccctggagtcttgccttccctcttccacagttcctcaaacacctgtttagctgctgatgaagaaattgttctgctgtccagcaggtcaagaagctcagcgagtgcagagggtgtgacaggactctcactgacagcgaggttctgttgctttaaatagcccagaaaagtgttgaggacccaactagtcaccttttttggctctgccctagtttcttttatcacattttggaagaactccagtaggccgacttcgttcagcaaagtgaagctgtgttccagcagcatcccatactgttggacaagcttctctcgggtcacactggggagctccgggagtgtctcccgaatctggtcaatattgatcacttgctgtgggtctgcacctgcgggcagagatgtggcgtcgtagagcaccagggg

SEQ ID NO: 337896 - DNA, 1000 bp, Homo Sapiens; identical to SEQ ID NO: 158392

SEQ ID NO: 337897 - DNA, 1000 bp, Homo Sapiens
tttttttttttttttttttttgcaagtttctatttttaatttttttgctttgataaatcaattgcttcacaaaaatcctttttaaagacaacaatccaagaaaacatattgttacagtattcacatttcaaagattgtcagtttcaaagaccgaatataactagaacgaaagattgctgagttctttctgtctctaagtgccaggaatgggccttcacaaggggcagaaccccctctggacaccctggagtttgtctcaatgaaaagtgcccactgctacctcacacaggcaggagatggatcactctcaggtcacacagacacaactcccagagcccttagccgtgagggtttcttttgcatgctcgataaacacttccactcatcttactatctggaatcaaagcgcaaaggccaagctagtccctcggtgggagcgagctggaacccagcacagccagccctgccactcctgctccacaggtgcagggcaggaataacagcaacatgctcaatttgggtctcaagacacattcaaaaggagccttcatagggaaaaactcaacaagaataaaactggaaccgaatctgatcatttaaaacgaaatcttagagggggtcacacttttacagattctctccactgtccaagggctggagaacaggtgttttaaggtgccaactgacctcaaacatgctgggcagtgattttgcaaactgaaacagcttgccatgtagaagctagttaaaagcacccattgcagagaggttaaaggaaactcaggctatgtccataagcaccctttctctaagtgatctttatcctattcctctgaatttagtaagaatttaggaaagttgaagaaagtttgcagctggagagaatgcacactgtatcattcagcatgggtgtttaactctcaggccagagcttcccagtgccaccgaggttcaggcagtgctctctttttatagatgggggtctcactgtgttgcccaa

SEQ ID NO: 337898 - DNA, 1000 bp, Homo Sapiens; identical to SEQ ID NO: 335644

SEQ ID NO: 337899 - DNA, 1000 bp, Homo Sapiens
tttcactgggacgaggttctttaataggagtaggaaagagaaaaataaataaacctcataaattcaggagagcaaatgatgctgaccttgtcaggcaggcagcctgagaggggtacatggtaggaactgcctgcccccaggcctaggaagaggggtgagccagggtcagggtggaacagcacccaagagcccactgccccttgtgactcagccaagcagggccaaggcagcttttccatttcagcctcccgttccggacaggcagaggggaggggagggccctcagccagggagtggccgtccccagggagctgtgaggtagtgccaggatctgcctcaaggagtggacaaggccaactcagggcaggcctgatggggcctggaagcctggggcaggagggttcggggctagagtggaggtgagtgggtccaaccctccaggtgaggaaactgagcccagagctggttgctcaataggaaaggcagagtggggccaggatcccactttctgccttccagtccatagtcttttgccctcaacaaatatatgacacttatctagagatggagggggaggtaggaagtcagcttgagaagacttctaggccccagagaggccctgccgtgagggtgcctgggtcctgtctcagactctggcctggccgttgaggagggggctgcagcgtccaaggcagccacaggttcccacagcctcagaaggctggggctcctttttcctgggggaatagaaccacatcccagagaaggggctgaacctccttgctaaatgtcccagtgggatgggggcatcagaggcggctctcctgggcatctgcctttgctatgagtgggtcctgctcacacagctctggggggcactcgcaggccctctcaggcttgtccttggcctcggagggaaagcaggtcctgaggcaggccctcaccgactccttcacctctgcctccagacccttcatcctggcctcgtactctgccagcg

SEQ ID NO: 337900 - DNA, 1000 bp, Homo Sapiens
tttttttttttttttttttgagtggtgtccatttaatattaactggatttagtaggtttccttaaaatgaacaggaaacaaaagatgtgaaaaacaggcagtgatgccattatactgaattccagaaaaagcacagtacaatgtgttttctagcagggagaccagcaaactggaagtggatgagcggccccagcttacatggtctattgtatttgatcaactgctgagagaagtattagtagcccagtaggtttgggtaaaggtaccagaatccttagtgctagtctcacagccaaaaacagagcaggtactccagatatacttcctgaactgacctggatgaagaggctttaaaatcaacagagctggacagtataaagttcacggaaaaactcaatttttcattttattttggtatattagtgaatgtctactgatctagtatttcaagtgtggatcacgtaaacaccatgtagaatgtagtaaacggagttaaataagaaaacacactggctatcaatgccagagtctttgaatatcaggtcataaatataaccaattgtgcaatataaccaacatgatgagaaaagcacacctcacaattgacaattttagttcatatgattaaaaaaaataaaatctgaaactgcatttagtgccacattctatcatatcatacatcagattccatgctgtggagccgcactgggctacaggacatacagtacatatagcatgttttaaaccgaaagtgaaaggaaaaatatgaaacagaaaatttttacatacacatctaacggtgttgtccatttaattcgatttatatgatttgctgtgccactttgactggcttgcagaacaccccaaattctcttttccccataaagatctacttccatacagagtagaaaaagatggtggtaaaaaaaacttcagattcttcaggttccaacgattgtgtcccaaatgccactgtatgaacacctgtgtgctctcctaa

SEQ ID NO: 337901 - DNA, 1000 bp, Homo Sapiens
ttttttttttaaaacaaaccagctttaataccaatatagttctctcttaaataccgtgtttcccaggacaaatgcaggggcaggctcttggcagaaagagtagaaaggaaatgtggaacaaaatggaatggatggcccaggcccagggtccctgccttgggcactagggactgggctgcctcggggatgggggagtgacagcagctccccctggtccagttattgcagaggcgtcgggggctcccctccctccccaggcctgaaacatttctcaggattacttctgaccttcagccccagcagggccagggcctgggctcctctggtctaggatgggcccctttgcccaaaagggcctgcagctaaggcgtggggtggggcggggagcccctggacaggcccgctgctcttagtaggtgctctggtggcccgtgaggatgtagaggttgctgtgcgcctctgggttgtcagtgggaatgctctccaggatgatgtctctgtgggccccaagcactcggaagatccttgtttcatctgtgatctcctgggtcacctcattggtatccaggcttcggccttgcatcccatggctccagaaggccagcacactgtcctgcaggcacaccacagtctcgatggggaaatcaaaggtcagctcaggtgccagtgtggccgtgggctcgccctgcatgttgacaatcctcacacagcgttcaaagctgactaggattgtgtccctgtccacctggatcacctgctgggccgagcctgggatcccctcaggtgggatgaggatgtcgggcgtcaggccagcctccaggggcaggacatggaacaggacgcggcagccgggcccctcaggcccctcggccccaacacacacctgcggcagctccttcccatccagcaccagcggctccagcatcccagctgggctgggcagagggctggagaagttcttcagcagcagaaacttctgcagcggctcataccactgcag

SEQ ID NO: 337902 - DNA, 1000 bp, Homo Sapiens
tttttttgtatttttcttttctttttttaatgaatcaatagcagcgtccagtcccccagggctgcttcctgcctgcacctgcggtgactgtgagcaggatcctggggccgaggctgcagctcagggcaacggcaggccaggtcgtgggtctccagccgtgcttggcctcagggctggcagccggatcctggggcaacccatctggtctcttgaataaaggtcaaagctggattctcgccatggcctccgtctcacatctaagacactgcctggcagctcttctgcacagagccgcttgggagtctcggcaccgggccccagccagggcaaccctagccacacactcgggtccaaggctcttagaattccaagtcagcgccaaagagtatcaggaaagcaaggaaaacttgtcagctccacgggggtcccagatgcatgcccaggacttcaggaaggaacaggtcatgattggcagagaagctggatcaccaggggccagcagcacctactatgacattttccttaggaaggtgagcctgagggagacaggtttccagccttggccagctggagtatagcctgaggctcaatgagaaataagaggtaggaacgtcagtagttcagggccaagtctggaaagtcctgattggctgggggttgtggggagataacggcccaggcccgaccgctgtgggacagctttacagtgacagccagctggggcctgcgagaggcagtgaaacagctcagctccagcaagcccacctttctgatccccagggctgagagacccagttctgccactggctggggcttcgtctagtccaaggcctctgggtacaggcttcaggttcttggttcagccttcaccctcactgtcttccgccagcacagggctggggccctggggggagcgtacaggggccaggatggagccgaagaacagtgagcggaacttcttgggtgggggagtcccaggcactgtactgggctcagcctc

SEQ ID NO: 337903 - DNA, 1000 bp, Homo Sapiens
ttttttttttttttgcattgatttgaaactttattatataaattttcatttcttttaaagattacaaaacctgttctatgacaggaatacaagcaatattgttccaggattattcatggatacatctgaagagcttagattacacattaatagtatgatttgaaaacttcccagattagactcttaagtaaaacaatttaaagtatttagtgatatttgatcctttacaagcattttataattatggcagcaatgccaagcatctgatgcgatttaaccaccaacaaaaggtacaatatgtaagaattcatgatatggtatcttgggcttctggcatgccttactagagagaaactagtataaaggaagatcatatataacagtagaaaaatatttgtgatttttttcttttttaaaaactatttaagtaggcacccaccccattcccacccatgaccaaaaatgcaaaataagtacatcccttaggtgtataccttcccttttgcttagggcaacagttaagataaactaatacacgtatatgattttaagagttaaaaactcatcacccataatcaataaggatgctaaggaatggcaataccttgaagctttttttaaaattaaaaaccaaagctttagatggtaaactacacttacagaaacacaaaccaaaatctttatgcccttgctttgtacgtgaaagttctattttaaatacttgtttgaaaaactcattatacagttcattcagtactatggtgataacaggagtaaagatgttcacttccattagacaatgaactaatctacttagagaggactattatagcgactctcttctcatatacgtttacatatactctactcatggtatgtgctctaaggaggttttattgaggtttgtacctctgaacttaaatctctacattttcctttccactaatctctattcaaaatgtcatatactttgctagttgctctgggagaagtcatggac

SEQ ID NO: 337904 - DNA, 1000 bp, Homo Sapiens; identical to SEQ ID NO: 158396

SEQ ID NO: 337905 - DNA, 1000 bp, Homo Sapiens
ttttttttttttttttttgattttcaggggagatagtttattgttgccagtagacccaaacaataagacaaattgcaaaagaaactcagtctgctcccaaaagcagatacatcccagcagtcgagtcacagagggccatctcagtttctctccccttccaaccaccccttccaacctctctatagcacacacaaccaagaaagtgcatatgtagttgggttttcccctccaagtgcacaaagcgcaagaacattccaaaatttgcctttggtgaatcaactcaaaacactgagaagttattacacctccccacacacacacagtgtaacttttggggtgggtgtggtgagatgtttgatatttgtatatataatatatctatacctagagagagagactatgtacagtgcatcagcaagcttcaataaaggaagacgccagcaagaggcacagcaagagacacaggctgtccatctttaagacataagtaggaaggaagatttcttgcttcatcacccgttaactgcaccaagccattcctatggcctggaactatccttttggacctgcccagtattttcaattgtctgtctgcttaacctgaccttgcaaatatttaccagcccaacctccccaaggagactcgcagagagaaacatggatccgatcagcttttcctttttataaactggaaataactgtgaagagtccatagctagggggcagatagctatttccaaagccagttccaaggcacctcaaagcagttcagtcctgaataattgtgctttgttcttataagctaaatcccatgggttagccagcccgtctctctttgcagtggcccttaattaggaggaagagacagatggggggtgggggcagagggaggttctgagagagcaggagaggctggggcagttgagaaagtcagccgactaaaaccagcagagcgtggtggtgggaacatgcaaccagaagtggggctcgaaccccacgg

SEQ ID NO: 337906 - DNA, 1000 bp, Homo Sapiens
tgtcaaataagggagttttatttattgcatgcttgggttttggactaagagtttacccctagccgtgtctcataccctttctttccctgtcctgcaaagcttaacatgggaggtagagatttgtgtctcttcttcttcttcttctctctctctctcttttttttttttttccaatcaggcactctctgtacccctgccaccctgaggaagacaaaatatgagaggatctagcaaagtctctgcaaaaatgattaatgtgaatattcccatccggacttcctatgaaaaagttgcattataaaatgaaagaataattgaagaaaatatagatccagaaaaatccataaagatggacaggaaaaatcaagagttctatggggctcttaatgggtcaagacccagagggcaaagatcatctggaaggctggaaactggctaagtatttagaatggcttgtgtactggtgtgaagtgaggaattgaaagagagcaggagaaggatgtgaaatatatttttctgtgtattaagagtgcactggccggatgtggtggctcacgcctgtaatcccagcacttttggaaggctgaggcaggtggattgcttgggcacacgagtttgagaccagcctgggcaacatggtagaatcccgtctctaccaaaaatacaaaaattagccaggtgtggtggcgcaagcctgtagtcccagctactcaggaggctggggtgggaggatcacttgagcctgggaggtggaggttacagtgagccaagatcaagtgagccaagatcacaccactgcactccagcctgggtgacagagtaagaccctatctcaaaaaaataaaaatataaatataaaaataaaagagcgtacctctgcccacgtcccttaactttggtatttcctcctaagattgagaaaatattcgaaatacttctcctttattttgatcattgttctgcttctctcaatgtgactggctagtttcagcctaataag

SEQ ID NO: 337907 - DNA, 1000 bp, Homo Sapiens; identical to SEQ ID NO: 158399

SEQ ID NO: 337908 - DNA, 1000 bp, Homo Sapiens
ttttttttttttttttttttccatctgagagatgtttaatatatcttaggttcaaggtacaaaacacagggcaggtgctgatccctagaaagtcacctgccaccctgtcagcccctgcttagccaggaatcccagcccccagagcaatggagcagtggccctgagatgatgggttcttatctgtttggggaatgttgcaggtggtgacatggcagcccagaggccactatgtcccttcctcaaaaaacccagacccaaggatcagaaaggtttagacttagacccagagcagcagatcccagggtgaccccagttaagcaacaggcctgaactgaagcctggcccagcctcttggccttggtcttggaaaaggaggaaatattaccccaatacctggcagcaaagggaaggggctaaagcaggaagtggaggcagaggttcccactgccctaaaaaaatggactatgggtagctgacccaacagggcagcaaagcccaagggtgaggcctgccccacttcccaccccagttcctctaagggccagccccctcacggagcttcactgccaggacaccacgaacatgaccatgctggggaggattggggcagggaagctggcatccactgaagaataggaatgatgctcttgctttgcgggcaggagcagctgcctatagagtccccgggaaaacccactagggaagggggaccagcaacccaagtctctgggcctagcccgtagaaggcctggactgggtcctgagccagagtagaggccttaatgaaacagaaagtggcaggggttaggagcagggaggtggtgagaaaggcccctgtgaggaccagcttaggtgacccctctgactagctccaaggaagcccaattactacttcaacccaggcccttctggccccatgtcaagtttcgagggctctacccatcacccagggagcacttcccacagggattccacctcctgctcctccccgaggccttga

SEQ ID NO: 337909 - DNA, 1000 bp, Homo Sapiens
ttttttttttttttttttttttgtgaaaaaccaaacctcaaaaagccactttaattccggcctaacagcgccaggtgcaatgtctggggacagactctgggtacaatgctgtgtggcgaccactcactcacacacggctccaagaaggcccccaaggggggacttaccttcagggggctgagccaagggggaaaggggtggccccagaacaggggaaggggcaggcatggggggaaaaggtgctacttcttggcaaaggagatcttcatggcgttgttctgcgtgatcttaaagccctgcagggcatcgcgagctgcccctgcctgtacctcattgtcaaactccacgaaggcgatgtcatgccgcccgggtaccagacggacctccttgaagccagggaactgattgaaaagcatggacagcatgagctcgttggtctcctctggcaggttggtgaggaacaagatgtgattcggtggattctcagaaagaggctgggcagggggcatctgtcctggcataagctgctgcgggggcatggcccctggtgggatctggccaggtgcaaggcctggcggggggatcataccagggggcggcatgtagggcggctggcccggcatgtggtgcataatgcggggcgcctgagtcatcggcggcatgcccgggacaggcccctggacagcccccaccacgggggtggctcccccgccttgcacagccttcttggtggccggggtctcctggctcttgggcttcctcttctcccgcttgcggtcccgctccacgaaggtgcctttcatcttggcaatgatatctgagtcggtcttggcatactggatacgcataggtttgtcatagaaagggaaaccctgcatggagcgcagggcgttggtggcgctgctgacctccttgaagatgacaaaggcctggcccctcatcttcaggctccgtgataccaggatatccaggatctggccaaactgggagaagatggcgt

SEQ ID NO: 337910 - DNA, 1000 bp, Homo Sapiens
gcagacaaagtaaaatttattgagacagacagaaatgcacctactcaggactacagttaagcatttactattaaccaaagagttgtgttcacattccagataagtctacgtggaaaagcattcagaatttactaggtttttgctacatcactatttcatctacaatagggacaacaaactgacactcaggatttgatgggctctcattacaatgctatacatttaacaggaacaaacatcagtgactttgagaaaaagttataaaaagaccaaaaccacccacttgtagaatgggctcttggatgttacttgtacagcgtgggtcaagggtaacaaagaagaaaaaaatgtgagtggcatcctgggatgagcagggggacagacctggacagacacgttgtcatttgctgctgtgggtaggaaaatgggcgtaaaggaggagaaacagatacaaaatctccaactcagtattaaggtattctcatgcctagaatattggtagaaacaagaatacattcatatggcaaataactaaccatggtggaacaaaattctgggatttaagttggataccaaggaaattgtattaaaagagctgttcatggtataagaataaaactgttcattaagaacttttcaaaagtgaattagtgaggattcagcttaataccagtatcaaatgaggaagtggtttattacaatatttttataatcggtattttatgtgtacttggtcactatacaagtgacttcttgtcactggtacaagtggactttttggaggactatttccaagaagaagaaagcaaacattctacttctaaggataaggtaactcattacaatctttagtactcatggaaagtattaaagatctttaaaaaaatcgaatgctgtcatgtcaaagtgaggcatgaaaagtattattaatgtgactccatcgatttgggggttccaatctgaggagggctttttatttaatgttttaatgaatcaaaat

SEQ ID NO: 337911 - DNA, 1000 bp, Homo Sapiens
tttttttttttttttttttttaaataagataccatttattttttaaaaaattaaaaaataatgccaacattatttcatgcatccgcaggcctgccccctgcctcccaccagcctcccagggctgggcccccctcctcccctggctgtcctgtgtaataaagggaaaaacaatgagcaggctcagtcaggcccaggggagggaacgcagacccagggagagaatcaagacgctacagcaactcagcctcgcatcatggcaaacccaagcacactggtagaaaacattcgtataaaaaggggagggcatgctgggcacaggcctgagggcaactgctccctggtgctcagagactgctgtcccccagagaaagcctgataaaaactgaggaagcaaaaaggagagagtagggttcaggagagagaaactcaggaaggctggaggcaggggcttggcagcttgggagctccccctgctgctatcaagtcagggctgcccagtttctgccctgccacctatcctctcacgcccaccaggccctggaccatgggcatctagtgacagcagctttaaggggctctgcccaggggtgcactggcctgagtggcccagaagcctcggcaggtgacagctaagaagacaaggctcttccccaccactctcagcgggaagatgctgagggggagagagagaaatcgagagagaggtggaggggtgggctgagcctggtggtcaggaggcggcaatggcagtgccaccacccagcttaacaatcatctgctggcagtcgttgcaggagcgccggtcgcccaccttctccagggtgcgggcagcttcggccagcagcactgcccgctggcccggggaggagaggaaggagaggggcaggtggcggcaggccagcaggatggcggtggcccgctctcgctggccgggccaggcatccacctctccgtgcttggtgctctgcgtggtgcgccgccgcaggctgtgttccagcag

SEQ ID NO: 337912 - DNA, 1000 bp, Homo Sapiens; identical to SEQ ID NO: 158400

SEQ ID NO: 337913 - DNA, 1000 bp, Homo Sapiens
ttttttttttttttttttatgctctttttttgttttttaattttttacaaaaccgtgtgtcccggccaatcaggacagtgcaggcctcccccaggcattgaggcctgaaggaggaggccatcatgaatgagcagctgccaaccccagaagaactgtctgcccttctgcataggggccagtgtgaggaaggggtccgactggaggctctgccctgccccccaggctgctgggagagaaggccaggccctgggttcctggtgctcctagtgccaacaatgtgcgacattatccaaccactgtgacgccaatgatgactgctaggaggacgacggtgatggacacacagatggcaatcaagactttcttcttcctcgccttcttctggttctccagggccgtcttgacgtgctcctgcccacgttccacgtagtccgctgagctcaggatgttcttctcaatccgattgatcatctccccctgcatctccacttcggtagccagaaaagtgaatatgtcgtgcagctcacgaatactgcgttcaagctgctggatctcactgtgccgggccgagatctcatttaaggcctgtcgagtcacctgcgtgtccttcaggatattggacacaaacacctcgctttgcccactgtccagcatctgctccaactcctcatcagacaccatcccagcattggtgatcttcagctgcctccgaatccgctccacgttcttctcccggtattcggactgcattgaattgcacttgttgatgagctccacgaattgctgggacaggaccccatgctgggtttttctcattcttgtgttgacggagttatagttctcatcagcttcctccttctggggctctatggccttcagctgcaggcggatctccctccccagctgtttgatctcatcgcgcaggttctgcagctcctgcttcatgctctcctcgggaaggggcgtggccaggatggtgacctgctgtttctccaactcc

SEQ ID NO: 337914 - DNA, 1000 bp, Homo Sapiens
ccccgcccagggccaaacacaggagcccaatgtttcctgagcatggatggcttttgagttttattaacaaaaatactctggtcccagaacaacagactggtgtggcctgcaccagtgtgtgtgggggggtggggattgagcccctccagagcccatggggaggcctggtaagtggggatgctggtctgtggccccatttggccagcagagccccttccattcacacggaggtgagagccgggaaggggaagccggccccagctggactcccagcagccttggttaggctttgaagccagaggggggtgggagtgaaatcaaggtgtgaagttgagggggtgggtgggcaggcccaaggcggccatttggtgtgggggatggggccggtggaggtgagggggctccagggctgggggaagggagcgggaggtttgtgatggaggcagaggggcccagcagtggttcagtacatgggtttggagcccacatccagatagcccccaggcgcggtgtatggtagagggaaggggcccccttggagaaagtgcggggcaaagggtaccgccggtggagccgctgggtacccggagccccctgacccgtgcggcagctccagaaatgcagccgagtagggggctgagcgcccggagtctggagcctccgggaagctggggctcctggtgggaaggtgactgggggccccatggaaagccgcagggtgcaggaggtaggcctcagcactggggccaccacacagaggtgccggggcagcggtggcttccccgggggctggggcctgttctggatctgattcacgaatgtctccacccagggtggagtcgcagggaccacctggtgtgtctccgctcccataggcctctgtggctgctggctctgggccccgcagtttcctcttcacacgggcgtctcgctccctcttacagtttctgccgttctcccggaagcctttggcaaagggattggctgcaatcttcagttg

SEQ ID NO: 337915 - DNA, 1000 bp, Homo Sapiens; identical to SEQ ID NO: 246444

SEQ ID NO: 337916 - DNA, 1000 bp, Homo Sapiens; identical to SEQ ID NO: 158403

SEQ ID NO: 337917 - DNA, 1000 bp, Homo Sapiens
ttttttttttttttttgcttgtaattgctctatttattaatacatatatcacaaatgttcacaatatcaatgcattcttgttggcatgctagacagaggcattatttttgaagatcttttaaaaatattttgacttgttcccccttcacactcatttttaaattgtttggatgaggtcctcaatgtctataatgtcaatgcaagaaaaaatacagagagaagtagtaaaataacacaatagcaattaattggggaaaaacaaaatatcatggccttcacaagaagcaacaacacagctttgtaacagggttatacaggtttcaactgagaggcaaagatgcactaaactgcctacacatacccaggtatgtaacaagcaaggaggccacctcaagttcagtttccttcatgcatgacacatgctttttttctcctcatggacaattattgaagtgtttcgttacatgtcttaggcagcctgaagaaggtaggaaagccttagtagagggaaaatcaaaccaaatgagattaagtcaaaagaacagataactatcgtctgcttatctacttaaaggtgtgtggcatttaccacagtgaggagctaacaggagcctcccacactacatgcagggcccaaaggggccagcgatggtgtgataaccagtcaccgatgatgagttgcagttggaccaagtacagatggaggggctggcccatgcagggcctcggggtgaggttcactaggactagctgcagggggacctggctacactctgtggcacaacagggcttcacaaaatggacactacacgtgacgtgggctgaaaggtggagcagagactgggtgggagtgtcagttgcacgttgtggggtaaggggtagagggagcagggcaagtgtattatgtactgtgctctaacattctttggaagtctttcaaagattgctgcagttcctttttaaaacaggtctcttattccgtcattcttgaaagacttct

SEQ ID NO: 337918 - DNA, 1000 bp, Homo Sapiens
tttttttttttttttttttttttttttttaacgtaaacagttacttttattttgagtaaaaatacacattcatatcattttcccttatatccctcaaatcttaaatgtgttcaatatgtctagaagatatctgtggtctagctagccgagacattttaaaaagacagctgctcctgacttatatagcacttacatatttaaatttacaaagccaaagcaacattttaaaggggtttgactgacgataggttgatgcatccacagattcatttgttcccgatctggcaatacaggaccatagaaaacaccaaacccagtatctcaataactgccagtccaaatgatattccaataactataatcaaattttttgccaagaagtcttttatgaaagaaatacaggtctctttgtaaacttgttttccattatagctttggcatggtctctgcttatctagacaggcacataattcaggatagtgttgaaaattatttccccaatcagcagctccattgaccaaaccgcagcatttaaactcttcttgaaacacaattatggcttcctggaattgtttttcactttcccctgtggcgctcaaaagctttgtgttttcatagagagtttcattcacaatgcgatcagacttagatttgaaaacagctcctaggatacctgtcgccacctgcaggagcaggatcagaagcaagcctatgaaaaacaacagaagcatgcagcgactttcttttatagcaccgcagcatcccaggaagcccagaatcatgatgatggcacctacagcaatcaatatgtccacagcaacgtaggagctagagcctacatcttcagaaccaaaaattgcttgagagtcattgcttactcgtacccatattgctaatgctaggatcaagataccacatagccagaacaagaagttgaaggtaaacatagaatattttatacaggcactcacacctgccatttcggaaaaggattaggaat

SEQ ID NO: 337919 - DNA, 1000 bp, Homo Sapiens; identical to SEQ ID NO: 246445

SEQ ID NO: 337920 - DNA, 1000 bp, Homo Sapiens
tttaatccagaccaagaaacaagcaaactttaatttccgagtacacaattatgaaactatgccagtagcgacctgcatgtttgtctcatctctttagccacttaagttctcaaaacactgccaaagctttccttctctattaaactcccttaagcattactcatactattattcaagtttaagatgtggcaaatctccccaagtgtatatggctggttctcttcttataaatgaatccataagacagtgtcccctaattcatctctattttctctaacctgcttgattttctaaaattggaaaaaagtaattccggtatactaaaaccagagcccaggtttctcaacatcttcagttaaatgacttttaattccccaatcaaggtataacacacaaatgttatctgcgctttacagtatagaactctgagtggctggtgtcttttggttagtgtaaccattacacagcagtatctgcttgtcaccccggtcttctttagcctcaaaaaatattcagaatttgttatgcacatgggagatttcttacagcagcacactcacttacaaaaagaccaaaaaaattttattgctttacaacaagccagcaacaaacacaactgaatagttataaacatgacacttctaaatcctcaaatggaattccaagaccagagtgtgcttctccactttaatagcatttgttaaaactgaaatccacaacttctggcaagtacttcaatattctcaagcagaatcaatacttaaagaggttaaaagaaaaaactattatcaaacgtattgtctgtgggatgatctaatttaaaagcctttcatgcttgatcctggcagtgctattactgcacattttaagtgaccatcatgggcacttttaagaacctaacttcacaaaaagagctgtcacaagaaaattgttctaaaatcccaatgcacagtaactcatgcctcatttcaactgctttcctcatgatgaaaaaatgtag

SEQ ID NO: 337921 - DNA, 1000 bp, Homo Sapiens; identical to SEQ ID NO: 158404

SEQ ID NO: 337922 - DNA, 1000 bp, Homo Sapiens; identical to SEQ ID NO: 158405

SEQ ID NO: 337923 - DNA, 1000 bp, Homo Sapiens
tttttttttttttttttttttttttttttagataaatgctttattattttctcaaaatgttataaaagtcatttctccttagtacagagagctttatacattttatctagtaatgaatacaatctagtttaacactgatctattttactaacatttccttaattttcaattcgtatttttccttttctttcctgattttagctttttttaggcttctgtcaccacaaaatgttacttggaaaactagatcccagcagatgacctgtacttctctgctctctcccctactgcaaagaggcagtgagggcagcattagtaagcctgactcaggggaaggtaagtggcctgcagagaaatggtcctaggtccgcaaccgaggcgagtgaacttgtcggacagatgaagactctaactggaagaaacgatcagcgcattcacggatgcaccaccatccagaaatctcccggtggcttccatacaaaaactgatgtttctaaagatggaaagaacaggtctaggaggcagaagagtatctcctagcaaagtgttctgtagctcaaagggtgagtgggctttggtagcaaaaagctttgaaggcttcaccctgggtgaatctgacaagggctggagccagacgggacctgcagcacctcctcagcttggcctcgtctcccctgaccccgcctccgtgcatgctgcctcagtttgccttctcagcagagaagcccccaccaccaggggctgggcatgcccagggcaggtgtggggcctgtagtggggcagcagcaactggtgggtgcccctctagtgggcgctcagctcacagcttctcaaatgggaacaggtgggaagctgctgctttcttttcccttttggtcttcttgggcccacccttcagcttctgcttttcttcatcttctcggttttgaggccaggaggcagccagtatcctggccgcttctgcttgagagctggtcccctcctcttcatcagaagagag

SEQ ID NO: 337924 - DNA, 1000 bp, Homo Sapiens
ttttttttttttttttttataaatatgaaattttactcgacaacagaaaaggagaaacaggaaaaaaggtgcctcgagcaaagtcaatgacttggtggtggcagagattgtttcctccaaaacgagaatggtagtaactagggcaaatttcacaggcctaccaccaatctcaccagtccaggaattatataggaatggtcacattcctaatgatggtgaagcagaaagccctccccacagagagacagcccactggggacccagctcaagctcttcaaaacgtggcagctacaggtcacaagactttggcagagatgtccgaaattcttcaaggaaggcgtcacgatcagagggacggatccagctcaaatagctttctaggtacagggggagagaccacagagcatcttcatgtgaccccttagtttgggcctccagcctccaccagagtgcagtggcctcatccctccgatctagcctcttcagagtctgaagcaggtgaaagtaagtgtctcgattacctgggcacatctgcacactgaggaggaagtcctgtaaggctttggtatcctggccgctggctacccattccagtccacgactaattagggcggctgcccgaagctgctgcagtgccgcatctgacttacatccctgctcacagttgaaagctgccccttgttctttttcctcaggtgtggcccggaagagcagctcgaggcacctgctaaattcactaattgccactttttgggcacccagttgaacccaggcctggccctgaagcaggtgggtggcagagacccagagtgggcagtatggcagttccttggttccttttctggcatcttcccacagccgggacatcttgggtagcagagatgatgtgcggctgagcaactcctcacatagagtcaaggcatcttgggctctgcctgcctggatcagtgctaccgctgcctccaaaaacacctcaggcatacagggccctggaggggag

SEQ ID NO: 337925 - DNA, 1000 bp, Homo Sapiens
aatgatgaaatggtgtttattactatctggatgtaaaacccagcagtgttgtcctatctgacatggtctagggtttcccagccagtgagagaggggccaggaaggaactaggctgcgtgtcaggcacttgtcaggcagtatcaggcactcagcaccctaaggctaccatggtggggtggggctggtaagctctgatcagccatgaaaggccctctctgccctactcaggcccaagccaggaccagacattctgagcatggctcagtcgccttccccaacctcaggtctgacccagagtaaagaaagagacctcaggttaatgggaagccacttagctctgctcccaaccagccactttcacacaagtataccaaaagatagcccctgacttcaacagagaggggctttcctgcctgagatctggtgagcagatgggtgcagggaaagtatgctggcttttgtcacagtgacattttccaaagtggaaaaaagttaaaaatatctcccaccttaagttcagatgaaaagtcaccctttgggtcgggaatagtgaggggatggctaggcccagggactccctcaggggagagcgctgagtgccatctgggctggggctgcagcaaggcagggctggactgcacagggaggcaggcagaccggatccagcagcctcagggcccaaggaggagtgagaatgagagggccagccagtgtgtgagaaatcagcctccccaaggcagaggtgaaccctcaatcgcccctcctcccttactcgctcactcagcattcacaggcagcaacgtggtccctggtcaccatggcaaccaatggccaatgcctttctcaaggccaggcccatctgcccatcccacagggagatgtctctgtggaagatgggaagcccagccacaactcccagtggcctagaaagctaaggccatgcaccagggcaggacagcacagaggcctcactcgggccaacctagctaaaggtgctgct

SEQ ID NO: 337926 - DNA, 1000 bp, Homo Sapiens
ttttttttatcattgttcttgttcaattttattggcattgcgttcatctctttacagaagaactcagcccacaccctagaatgtagacctttggaaaaaggagaagtgctccgttaagcaagctacaatgcaggggcagatcctaggaagggagcagaactgccagggttccaaccaaagaaagaggttaattaataatgggcaatattggggagatgggtggggaaaagaggaaaaagctccgctaacctaagaataccacaaccctgaaaggagcgccttctagaacaaaggtaaaatcactaggacagatctgttagggttttcctttcactcttgtagtagaatgctgatctaacgggagttttgaagtgtggagcaggggggaaaaaaaagaaagaaaatgagaattttaatttttgaaataacggcaatttatccattgcacataccactgtattatgcaaatcaacgttttggaaaatttagacacagaagggaactagacagttttccccctggagagatgaaaagctttttggctcttaagtctttgataaaaggcgtacataattcttgtgtctactgtacagaatactgccgctagctggatttcccaattctgagtaacactctgcaatccaaacagggttcaaccctccaccttacaggcctgcattacaggacttaaacacataatccaagaatttcttacactaatttatacattttaattggttgcatatattaacatgtactataagattcttttctaagaagcattacataataaatggatactgtaaaaagatctgattagttaaaagtaacaagcattaacagatagatacatacaaaactcagcctgatcagactgggtgtgagcctgtaatggggcatggggcaccagccttcccaaggggtagccttcaaggagggaggggaaagggggggtaaaaagaccacaagaccaataaaaaaaatcagataattagacaca

SEQ ID NO: 337927 - DNA, 1000 bp, Homo Sapiens
aaatccttttattactcttttttaacaaacagccccagggacaggggaccaggggaagggggaggaggggaagtgaggccccagccccacaacccctccccgcccacccctttcccccttatatatttataatctatatacaagccccgggggtagggggcaagaggaactccctcagcggggtgggggcaacccaggctccttgtcccctcgggacccaggctcctctgcccgtcgggagggcccttctcgaggtggcagccctgtccgctcccaaggcttaggtatccagcgcagggcatctggtggggaggcctgctggtaaaggtcgacgcgctgggtgcggaagactccactgtaggtggaaggcgtggccttgagacgggaattgaggccagagaaggaccttccagttgggggagtccgtgatgatccaggtcccccaaggttgctgctcagtttttgataatcctggaacggctttagttccactggatgcagctctgctcgccccaagctagcggggaagggcctggcaggtgaaggcagcacccgagtagcaggagcaggtgggggccgcacagccaggctggggggctgcagagcagggcccacaggtaacagagaaaggggaggtggggcaggaggtggtgctggcggcagggagccaaagttcaccacaggcagctgtgagtctaccatgggtagaagcatctgctgggcaggagcccctgaagggagaaagccactttggccaccaggctgcagaggagtagaataaaaatccgaaggggatggcagatcctggcgtacctgaagcaacgatgtgtcaggcaaaggactggggcagaaagccggagagtagaggaaggaaggtggagggtagagaactcctccagccggcaacttccccagctctgtagcttgcattgtggagaaatccagaaactggcccttgagagctaccccagagagcagtgctgagggaggggctgggccg

SEQ ID NO: 337928 - DNA, 1000 bp, Homo Sapiens
ttttttttttttttttttatagataccacagacacatgtgtttcatttttagttttgttaaaaaaaaattctgacaaatcagaaatgggggttcaggagtggtggtgatgcaaaagatggaagccatggggtgggggctgtcaggggtgggggcagtagtgtctccttcacccccaccctggtgtcctctcctgaaggacagacggtcacattccaaaatgggcgagtcttctaccgtgtctgttcaatgtaggaggagatgtctatctcatcaggcagctcactaatattgacctcaaagcgatcctgcacatcattgaggatcttggcatcattctcatcggacacaaatgtgatagccaagcccttggtgccaaaccggcctgctctggccacccgatgcaggtaggtgtcagaatcctcaggcatgtcataattaaaagcaatgttcacccgctcgatgtccatgcctcggccaaataggttggtagccacaagaattcgtcgttgaaaatctttaaactgctgataccgagaaagcctctcctcctggggcatcccacggtggatggcaatggctgggaagttctgctccactagtagctgggccaaggcaatgcaccgctgcacagacttcacaaagatcaccacctggttgaactcaaggacatccagaaggtcaaagagcttccggttcttctcgttgtccttcagtttcacgtagtactgctgcaacccatgcagcgtcaacttcgtctcatcatccacgaagatctccattggatcttgcatgaacttgcggcagactggacggatctctttgctcaaggtagcactgaacatcatgacctgcttctcgtggggggtcatgcgaaaaatttcctggacatcccgacgcatgtcgagctgttcaagcatcttatcacattcatccaaaataaagtgtttaatgtgtttgaggttgaggctcttatttcgagccagggctaggatacggcct

SEQ ID NO: 337929 - DNA, 1000 bp, Homo Sapiens
tttttttttttttttttttttttttttttttttttattttcaaaaacaactttattcatgacacatattaaaaaaaaattcccacccctggaaatgagctaaaaaaataaacaaaatccacctcccacctccctgttcccacttcctcccattccctccaaataaaagggaaaaaaggcaaaggaaaaaaaaaaaacaaaaaaacaaaacaactgaaaaacaaaaacacccctaaaccccccaaaacaaggtagtgcatttccccagggggaaggggaatttacactggagccgctgggagcggaacggagatcttccggctacagaaacctgcaaagaaagacactcaaaacagaaaaagaaacacaaaaggaaacaaaatagatcaccaggcaatctggaggggcagggagccggagaaagaggggtggggtgggtggtagacctggctggacaggagcaggcaggaggggactgtgaaaggcgaggagaagacgggagggaaggtaacaagcagaacagtttggtgtccttccagagccctgggtaaaaaaaaccctcctaccacccacgcccacctacccttgagcaggcccaagggggtgaagggggcagggaaacatgggcaagcagcttgcgcagttgagacgtgtccatggcgaatccccagagtgaataagcagccccctgccccactccctgggccttcccctactccccaaagcaggtccctcctcagcagttagttatgggattctccccccttccacagtatatcttttttttaaaaaatattttttttccatcaaggtcatcttctgtttttcttttttttttttttaattcttttttttttccttctttcctctttttttcctctctctcctcctaatacacactttttttagtaaggggaataccatgatgtcgctctagcccggcccctgtagacgcgaccccggggcctgctgttaaaaccactgtagaatcgagagcggga

SEQ ID NO: 337930 - DNA, 1000 bp, Homo Sapiens
ttttttttttttttttttagttcaatatgattttatttaaaaatgtgtacagctgaaggagggatctgatcttttgttaaatgaaaccaattttcacggtatatatttggccattttagcttcgtagtgaataataacagaaaaggaagtttctgttcaagatcctcactccagcacactcagccaggtgcctggcaagatgacacatttcctggtctgaagctcacagccaatcctctcactgaagtgaaacaccaattctccaggcatacacacacatacgcacatcttattttcactgctctacacagggacctgagaatccttaattttaaagttgggaaaaacgtgaaaggattccttaactcattgtctgcgacaaatccaactacctgttaactcttaacaattgcaagtataaaatacttgaaatttacaagatgctccatttaatggaacaactcaaatgctaaaaaattaggtcaaataacatgctttaatatttttaaatgttacttaaaacttattgagacaagatacgcagcacattcttggtattataaactcctactgacgactgctacttgatggccaaaaacatttaaagaaagagaagaaaccatactggtatacaacaatatctgcagggaatgtcatgttttacattttgttaactgaaattaaacctgacaaaaaaaccaaagatctacaaaaccgacacccatgtcattttaaatgatgaggtagattgtttcctatgcagtaaagtgaagataacaaaaaaatccatacaacttccaaatcctctttaaaaaaaaaaaaaagtttgggttatagtcactttcacaaacaagacattcataaactataaggtggagaggtcatactcaggcaggttctgtacttgatgtgttacttggagattcaataatcagtcttgggtcaatcaactctttccaaaatacagtgatcttgctctcctgtgtcacagcgtactcca

SEQ ID NO: 337931 - DNA, 1000 bp, Homo Sapiens
ttattttttgagacagaatctcgctctgtcgcccaggctggagtgcagtggcgtgatctcagctcactgcaacctccgcctcctgggttcaagcaattctcatgcatcagcctcccaagtagctgggactacaggcatgcgccactactcctggctaattttttatatttttagtagaaatggagttttaccatgttggccaggctggtctcgaactcctgacctcaggtgatccacccgcctcagcctcccaaagtgctgggattataggcgtgagtcaccgcacccggcagcatttcatttttgagacgacgtttacaatctgccctgtccttttggagaagtttagtttctaaagccaaccccaggatgcaccttgtttctactctggtaccagctgaaccatctctgtcactcagccccctccatgtcctctcctgacaccaagtccctttgggttttatggagctcacctaaccagctcggcccaggctgtaatgagagagaccagtggagtgtaaattcctgcaggtgcaggacaatggggttgagagggctcttacaccagatgtcccctcagctcgaagggcagagaatcgggttccagagtgtccaagtctccggccacctggtcatagattcctcttggatcctgatatgtgtcttcaggccagtggaggtcccagggtcccatctgcacttcatcgtagaggggtccccaggctccagacggggggtacgttctttctacctcatcatacaagtgcccagggaaggccatatcctcatcttcacctgtgaaacctcgggaataagacacctcctcctgcgtcgggggcagctgggggctgaagtccctcagggagcggtaatacggctctgcctctgttgtgctgaccgtggagctctgagtgtcccgctctcctgtccactggctctcctcatattcgttcctgactcggtcctcttccgaccctgcctctgtcttctctgagatgcc

SEQ ID NO: 337932 - DNA, 1000 bp, Homo Sapiens
ttttttttttttttttttttttttttttttttttttttttttttttttttttttctaacgccaacacactttatttcccttcggacgcatctgcaagcttctgccacacctgaacccacggcctggcaccaacgctaccatcactccccagaggtcaatcctgggggctgaggagctgcaatttccctttcttcctgaaaattaagagaactgagactaattgaagaaacctcactgccattcctcactcagcagtctcagcaggtctgaaatgtggctgtgggaagttgccattttgggaaggcgtttattctctgcggctacagggattgcctgctttagaaatccccttacgctgattaactcaaaagtcccttcagagtcaagaaccaacctttcatggtccataaatgtggtatttctggtttcctgatcaggaggcttgcaaacctaaaaatgttcttccttccaaaaactaactaacctgaagtataaaacctcagacggcagaattttctatttctggaaaagctggctgcgatttgtttttgggacacagtgaggcaagtccctgtggcagagaacgaattggcccctcggcctctgtatgtgagagcagcccagccacacccaggaagaaacatcccccatgcactgcagcacatcctccttagagagagaacgcctgcaggtttcggcaaagaaaaaaaaaaaagggcctgccagactcccagctggatggaaagcagccgacagctcctcagccagagggtgaggccaagtcctggcgcctagctgggccccgtccatgcgcgtcactttccagtgagttccagcaccttcctcaccatggctccgatcccatcatggatgtagtggagtgccgtctcgcacatgaaggctggggtcgtgaccaccttgtttttctggtccacgtgagcttcgaccacttccttcacgcagtgcttggcacccagggccttgatggcctctgcggtcc

SEQ ID NO: 337933 - DNA, 1000 bp, Homo Sapiens; identical to SEQ ID NO: 158406

SEQ ID NO: 337934 - DNA, 1000 bp, Homo Sapiens; identical to SEQ ID NO: 158408

SEQ ID NO: 337935 - DNA, 1000 bp, Homo Sapiens
ttttttttttttttttcatagtatccaaacatactcattgttttatttttaacaaaagaaatgaaattaaagatagaccacaggtagagtcatgaaattcttgtttttccctattctttttggtaattacaacgtacattgtcttcttttataataagacccaaggggagaaaagaaaaggatgtacaatgaaggtacaagttttgaagcaccaaaatattttatgacagggacaaaaaaacaaaaaacaaacaaaaattgaagtacagaaagagggtggtgggggcaaaaataaaggtacgcacttgggcttcctcaagatttgtttgtccctattcagactagaatgaaactggtttaggaaatcactcctgtatgctagcaggaatgttgctggcaagacacttctgagcatcggggtgtggactttacgaaccaaccttttaacagtaactctaggagagaggatatcaaaaattggcagtgaaaaattatagataagcaaaaagctccttctgaggtccaggccaggagatagtaggatttaagaaacaaacaaacaaaaacaaccacaaatgacctttggtgccactgtcacaactgttgctcatcagagtaggagagttgtagcaaaggcattaaagaaggacaagcagctgaagagcctgaatccttgtgttgtaagctattttggtttcctttcaagaaagggctgtggtctgtggaaggtgtcaggaacatattttcacggtctgctttctcctgataatgttcttcttctcggcccacctgagacataatccctgagctccgagccctttttgactgaagctcctgttgaacaagattctcaacgtttctaccctgatccaccttctgccgccgccgtcgcctctccagagcccggctccttgtccgactcccttgatgttcaaatttttccagctccagaagtgtgcgaattctgtccaggtctggaggctgtccagcctgcagcagc

SEQ ID NO: 337936 - DNA, 1000 bp, Homo Sapiens
ttttttttaaagtcttcttaaattttatttgtgaattcagcaaaataatttctataaaacaaaacagccaaacatttaaatagtataggataggctgtatctatttgcaggtatatttggtttttaaacaggttccaaaatattacacacattcaaaatttaccaattctcttttaaatatagtattaactcacaggtttcttggaatcttaaaacaaatgttttttctaaaatggtaccttagaattacattaaataagcaggagcttagatcttaattaaatcttgtatctaacaacaagagttttagaataatgaaaaaaaactacaacaattctttctttcaaataaaagtgtgactatgaattcagtcagacatcttggtgcaatggtacttcaaagtactatggattcttatgatgtacacttcaccgggatcaggagaagcaaagttttagaaacttcacttaataaattctatggaaaaaaaaaatcgcaagcacaccaaatacaatctattatgctccaccacattctgacataggaaaattttgtgtattggttttaatattttaaaattcgtattatcgatactttgatattcttcagctcaagaaattgaactatcaaacattaaatgtgaagaatatgtgtgcaatgaaaaactgcttgtctgtcacatttttcccccattttatatttattctaggtataagaaataaaagctctgagcaatatacagctgtcactctgggcactgtcattcatgtaattctgtcctcttggctacacaaacagtgtgaagccatgctaactgttacagcataagaatagctttaaagtggttagcctatataccagaataaaaaggtaatgaaaagtatctagaaatgttacactgccaattttccacatcaaccatataattcaaaagttaccaccagccttatatatccaggaaagaaggattaacaagaaactattggtgtaaactgacaaa

SEQ ID NO: 337937 - DNA, 1000 bp, Homo Sapiens; identical to SEQ ID NO: 158409

SEQ ID NO: 337938 - DNA, 1000 bp, Homo Sapiens; identical to SEQ ID NO: 158410

SEQ ID NO: 337939 - DNA, 1000 bp, Homo Sapiens
ttttttttttttttttttttttttaggagtgaggccatttagtgcccatctggggcaacaacatcacatgggcatcaggaattcaggtccagctgtatccagcagctcagggccaggctggcctccttggtatggatagaggccagtttggtgaagtagagaccccagtctcagtcaaataagtcaggttccttatcctatccactccagtctgaatcaagccagagggcaagtttcactcagtgcaaggctggcccctgccaaagggcttccatgccctgagttctggactcaaggcacacaggactaggcacgtctctgggagcctccaaaccacagaatcaaagaggtccaaggagacaggagactcccggggcaggatgcgctgaagagggccccctggctcttgctcctccttccgggctagctctggcatttccttaggggccaagggggcccagggccgccttccctcgctcctgctgctggaactcctcgtgggcacgatccaggtctgcgagcacctccagcaggcgggcagttgctgctctttgccgggccaggacctcaggacaggcccctgtgtctgcctccagagttgtatccatgttagaatcctccagtaatttcagcctgagctggtcccgccccaggagcagctgccgatacactgtctgggcctcagcatcaggatccagtgggtcactccagtcccccagggtgacagctgagtgtgtacggctgcagccggcggctgagcgctcagcctggaggcagcaggtccagcgcgcgctgcggaaggcaccggggtggcaggcggccagcttgttcgggttgggggcgctggccttgcgcaaggccgagagccactggttgagctcattcacattcttgcactggaggtaggtggtgtgcagcgcccccgtgccgtcctgcgtcaccacctgcatcacgtggggcagttggaaggcgccctcgtctacgcgctccacggcgcgga

SEQ ID NO: 337940 - DNA, 1000 bp, Homo Sapiens; identical to SEQ ID NO: 158412

SEQ ID NO: 337941 - DNA, 1000 bp, Homo Sapiens
taatccccctataactgtttattagaatgtgaatataatccaaatcaataactaaaaaaaaatcaaattacagagcatgcataaaatacaaagtagcaatttacaaatagataatattatcttcataactaatacactaaaataataaaatggctatagaagaaaaccaaaatgactgactacagcaatgccttccgtgtgccccacacatcatgagcaccgcaagagacaaaagattaactatgaaatatagtaatctaagcaagcccacacatacatatttttggggatttcccaccatcctgaatagtatcactgcagttgacacaacttccaggaaactgcagagtaagtgcttaatattatccacgagaaagcaaaactaaatattagtgtgcacatttctgaatgagaaactaattgcttcattgatttcaacaatgtagtggaagaaaactatttcagatctctacaatgcctaaatgcattctatttaaactcaaggtactatttcattttacatactaaaagaatacatgcctttaagtggtaccacttgagcagaaattaacctctcactgtactcttcagacatactgaaaccaaagatttaactggactatattctataatatactgcaaaactcaaatattagcattgttaaaataattatccatgcctgctggtggatatggtgataaaactaggttgtatttcacttactggaaggttctaagacaaaattaacacttcaaaatttgacactaccagcattaaaccaattattgcctgagcaataaaatgccacataatctaccgcttggaaattattatagatcatttaaatcttttgggctgcctgatcattgccaacagaggcacccgagatggaataccacaagtctcttcagttcccagcctaccaggcagcactgtttaacttatggccccacaaccatactactaatgaaaccgtaacaatcttttgtgtttactaag

SEQ ID NO: 337942 - DNA, 1000 bp, Homo Sapiens
ctttttcttggccctggtgatttatttaaaagtcatagactttattcttcttacactgtttcagtttgcagactagaaaacctctccctctgcacactgagaattcccactgcagtgaatggaaggtcaatgtatgtaaagcccacgtgagcagtggcggttcaagcccagagaaagaaggtgttgagttgccttggtaaagaatttatacaccatgtgttcacagcttcttgacaggtataattatcagtgttgtcttttactatgtgctgggattctgaagcacggtttcaaatttgtgactatcggatgtttgatcaagtagctttccctcaagggcctatgacatgtggttttgttgtgtttgttgctgctgctgctgttgctgctgctgaattagcaattgctgctgctgccgacgcctggctgttcgtagcttttcaaagcgagcctccatttcttccagaacttttggggtgtatcgcaccaccagcttgacgctgtctttagcagccttgagtagttccacagctttctcatggtgttctccttccacactcactccgttcactgatagcagctggtctcctcttttgaggcctccgtgtctttcagccacccctccaggaattatgcgagagatataaatgggggaattttgctcctttcctcccatcacattaaaaccaaggccttcatcagtctttggcagttcaactactcgagggtgggagtggccttcactagctgcaaaagctgcaactgttgcctttgctgttgccctcgcacggaattcgggacagccattaacagttatcgtttcatgcatatattgatacacctctcgaatagctgtacaaaactcactctgaagcacttttttgagggattgtagcttgtgcactggtacttctccagattcctgtagtttttccagtaattcaattgctcttgcaacatctctgtccagggtgagcggctggaccactgtcaatgtcgc

SEQ ID NO: 337943 - DNA, 1000 bp, Homo Sapiens
ttttgtttttgaagtttttaataattcaagcctatcaccaacacatcaatatgttttctgttttacattgaaattatatgagaatacagagaattgctctgaggattcctgtttctaaatacattatgggctttcttattttctattaggtcttgaaaaaaagcaaatgtcagttaatgtcacccaaaagaacaagggattttactcaaatatttcttggatgatatagtactttttaggaaaaacatctgccacaaaaatgtttgtctcaaaatgatgttttgctggcatagatcactactgcaagtgccttgctctcctgtgcagaagggcatgctttgcacagtgcatggctgttatcggtactatgtaattgtccatcatcacagcactatgatattagtgctcagagtctatcagtcagttgggagatattttggcttaaatgatgttgtttcactgagttgtgtaatgtcaagagattctgctgttactaaaatagaacacacaatgctatattaaatatctaatttcttaaaatgggactctctggttttctaattccagaggaattcaatgatctaatggtttcactatcaatccatcagcaatccttctttaagagtgtctattggagtcttgaggacccagaccagctgaatattcttaccaggtaagccttttgttgaagcttcagattacagtagaaaacagtagtggtggggagaggaacaggaatgggtctttgattcatttgccagggctgcctaacaaagtaccatggactgggtgacttaaacaatagaaatttatttctcatagttttggaggctggaagtccaagatcaaggtgttggcagggttggtttcttctgaggccctctcttcttagcttgtaaagagttgtccttcctctgtgtctccttatggtctccctttgtgcctgttgtgccctactcgcctcttcttttatgatcatcagtcatattgaattagggtc

SEQ ID NO: 337944 - DNA, 1000 bp, Homo Sapiens; identical to SEQ ID NO: 158413

SEQ ID NO: 337945 - DNA, 1000 bp, Homo Sapiens
ttttttttttttttttttttttttttttttcacttgcaaattcacttgttttatttttatctggcatataaattgcatatttttatgtgaaatgtggttgtatacattagaaataagatttacacatttcaaagcacactactgcaaaaataaattatttttaacctccaaactctcttttgagctttgcctgctcagatctcaatctcaccagtagccctttatgctaaggatttctcaagaccctcttcttcaagtgagttgactcttcctttttcctccccatgaggctgctgacaattttacattatgttcttacttaggatcacttttactatcatcttctgtttcatctgatctttccttgtgtttgccttttctttgcttatcatgctccccccacctataaccaattaggtatattattcctcccaccgcctataaccaactagcagatgttctttctggatactttcttgagatgctgattagcttcaagacctggaactgtcacagaaagctttctcttgtgtatttaacaaaagaatggggtccattctatgattacaaacgtggacatacacacacttcatcatggacccagttcatcttcagtaaatgtcatatgatgaacagtcactaccatactaaccacacagagacattaaggtaatgcatagattttccacacctccctaactgcctatcccacagggctaaggtttaacctttagggttcacacaaaaaacatataacaaaattaacagaaatatttcaccaatagtgggtatgaacaaattagcaacacacaataatttttatgagtatgaagtataagtagtttcaaagtcattcatagttagttagaatcttgctgtaaaaattcacagagtgcttatccacgtcaatgaagtaaaattatgtaggctgatgtttctgtcagtcacatcgatgcttaatacctgtgtcgtggggtcattgttgaaggagggtgttatg

SEQ ID NO: 337946 - DNA, 1000 bp, Homo Sapiens
taattttattgctctttattttaacaaaaacttttttcactgatttgtagactccatccattaacgtatgaaagtgaaatccatctctcaggaagatacagttatggttgaatgtatctgatgctgagagtacagcataattaagaaaaatccttgcatgtcatttggttcttgttgcagtcttctgtgttcacccctcagaaagcaaaagaatccatctgactttcaataaataccaaattattaaaaaaaaaaaaaaaagaacgtttccacagactagagatccaagaaaaagcagttctgatgaatgattcccagaatcaagtgagtcctcctttagtccaatgagatgatgtcaggaatgttacttccactgctggttatgacccctgtctcactcctgctgctggatgaactaacatgagtactgctttcatgggagctggtggtggtgacagacgtactgcttgctgttaagggtgaggtgagactatccaaaaacataggaggacagtactggggatcaactggaataagggaaagaaaatccaaacctggcaaatctgatgacatgcttgatattggcgtatggtggaatggtactgagtagtctgttaatgaaggcggaatagcagcaggatcaaccgaagtcacactgggcacccttacagaagatggctgatacatgagaacccctttggttgggctgctttgtgtttctgacataaagatgcatttccttttggcaggagggtcttcctcttcgtcagaagagctttctattgtaagatcaataacatctactttcttcttgcttgcctcactggctacagtcactgaacaaggcttactgaggacgcttgaactttctatttttgtacacggttggctggatactttcatagcttctttcttcggtctcattggacaccaagaaccatcttcttggaatttgatctcatctacatcagaacagtcattgagaatttccataaaaagc

SEQ ID NO: 337947 - DNA, 1000 bp, Homo Sapiens
ttttttttttaactgagaagccttggtaaagttttattcacttaagatttggtgtaacagttagatgcccagttccttccaggaatcttataacagattctttggttctgaaggaagtggagagggactgaaaaaccagtttaagatgaccacaggtaaaacaaagaataataccactatgaggtttggatattttgtttaatttgtttcaccagaagttttattttgagatgtggcagatgaaaaacattggtcatgttgatggatttgagttgtccaaatgattatcttcacattaagctattcccatgcatagtttgcctcacacatttcaattcgaggttttctttttgcttaagcaaaagtttcatgagctatctttaaaattttaacttcacaaatatattaaggcaaggtcacctctaagcagtgaatatgtattcctgaaaggaaattgttccagaaagtcactagtaaagttgttgattgcaaagatgagttaaagacactgtgagactaagcgttacatacactgtaaaatgaaattagcagtttggactaagctatgcccctgtggcttctgctctggagctgttgaattctcagtatcgggaaaacagccaacagttccttgagtttgttttagtcccacctgttctgagcatgcactaatacttgtaaagctgtccaaactttctgatttgaattgcagattggttgggtttttttttctttgtagtagtaagatcagtaaattagaaaaaaagtaataataaattagaactataattcagatctgtagcacactaaatattctgcatttttgtaataccaatattttgctgattttagaactacataaaatgcatttctggagattttggtgttcagcatatcatatgaagataacactgaaaaattcattcatagatttgtctttataaattgaccatttaaattatgcatgcattatttttgggtttttttttatttttaaaaa

SEQ ID NO: 337948 - DNA, 1000 bp, Homo Sapiens; identical to SEQ ID NO: 158415

SEQ ID NO: 337949 - DNA, 1000 bp, Homo Sapiens
ttttttttttttttttttttggtcattaccaggttactatttattgttccttgaagctttaatatagttaagtatgaaatgcagaatcaagaagagatatgtacccacccaccctggcaatttacaaagaatcaagaggctgattgacagttgaacgattcttcgcccttctatagtaccttttacagaaagccttataagtgtgttatcaaaaccacctgtcaccccttgttaaaaatgctctgccttttaaaagttgtaaattaaaacttaacgctgttaataaaatcattgcctcatttttctttctaactagattgaaatttcaggcccagaattctctagttgtcttcagagctccctctggcaggaaagaagacctgtcctcatcccgcataggagtagggagcaattcctttgacccccagaccagttatcttgaaaattccaccagcttcaggttgcctcaaaagaccctcggggtccatcccatcccgggcgcaggtcacatacatttcagagtaattcttccctccaaagcagcatgaagttgttttatcaacaggcaacttcacagtttgaagtcttttccctgtcacaggatctaaacgaatcactcttcctccattgtaacaggccacccagagcttcccctcagcatcaatacacattccatctgggatttgttcttccttttctagcttgtaaacacttctgcggttggagatctgtcctgtctgcaggtcatagtcaaaggcatccacggagtaggacaggctgtcaatgtaatagaagattttgtggtctagcgaccaatccaaaccattggaaatgtccacctggtcaaagtactttttcacgtggtgatcaggaaagagggagtacagggccccctggtgccgctcaagaactgctggagctgtttcctcagccatggtgccagcaaagtacctcccggcgggatccaccttcccatcattgaagcgattgtttttcttgt

SEQ ID NO: 337950 - DNA, 1000 bp, Homo Sapiens; identical to SEQ ID NO: 158416

SEQ ID NO: 337951 - DNA, 1000 bp, Homo Sapiens
tttttttttttttttttttttttttttttttttttttttttttttttttttttttactaatatagagattttatttaaactgtattgaatttttacagcacattgcatgtttgtcacaacgcaactgcacagtttggatttttggccacatcatgtcacttacacccacaacagctctgaaaggagtatttgatgaacacatctgagccaagagcccagagtctctctccaaggccatgcagtttgttcactgatgggacagtccctcaaaacagccacgctaagtagacagatacagtctccccaaatgttaccaatcttactccccttgaaaacaggcagagtgaagtgcaatgaaagacaagttaattaaaaagccactcacaactggcagtaaattttaatgattgataaaatgcttaaaataattttatgtatcagaaacaaggaacagcttgttactttttcaatgatctcaggaattttgcagacacaaaatctccattattcagctccatttaaatgaaaaaaaaagttccgctaggctgacctaaatatgccaaaactttttaggttacatctatggcaagtacaaaagaaccacagatgcgtctctgtaggactgaaaaggtcaggacaaataatgattcttgttctaaatgcagatcctagttattttggaatgaaatgctgttttctagaaagcaacatgaaagtagcagtaagaaagatgactaccatcatttcaaaacaggataagcctaaatataatttaccatttatatgtcaacaaattaaggaaaactgtataaagtcctagtggtttcattataggccaaggagactgtatctgtcccacccacagtacatggctatatcactgtatcttttggttaagtgccactggtacatattaagatgaaaaaaaacaaaaacaaaaacaaaaaaacaaaataaaattttttaaaaaccaacaacgtttggtccaaatggacacatg

SEQ ID NO: 337952 - DNA, 1000 bp, Homo Sapiens
cgatggtgagaaatattttagcttttagtattgaacatttcgatttatggcagctttgttcccttttaaaattggaagcagcatcaaaaataccaatatggaaaaaaagctagtagtgctttggcttcttttaaagccagtaattcttgagaaataaatgcaagaagattaaatagattaaatattccatggggcggggggtgggggggaaaataaatgcattatttttccttctgacaaacatattaatattttttcaaccctgtattccttagtttcaggatgtgaattatacagattatcattagcctaggaacactcaccaacacgatggcttaatttctctagcttattttctaccaaaaacaaggttatgaggggaaaaaagagctctgtaaaatagggggtatgtttcatatttggttaaagcaagataaaactaaaactgtctttcaaaaaaatttcaaaaactcttgtattttaaaattatttagcatatatacaaatagataccaggtttctccttttaaacaaagcactacttattttaagtactttaagtaccaagaactgactataatattcagttcataatttactttccttataacaatttttttctaaatactgatttaaacggctggaataaattaacattttaaaaggatttcccataatttaggaaaataaaatattgtacacagagcacacatatatagctctgtcatatttgcataattttactctcagaacctcaaaacacctcgcatttcaggcccttttacaaatcctcattacatttatttactagtgtgttaaacatatactagatcgcgatttttaatctctgagcctgtgttttgatcatcttcatccgactgctgctctgagccttgtgaattaatgtattcatattcaataggcttcggataattatatgggtagccattgtcatcaaaaaaccttcggaaggtaaattcatagaatgcatgttcaggat

SEQ ID NO: 337953 - DNA, 1000 bp, Homo Sapiens
ttttttttttttttttttttttttttttttggctgcttatgtctcagattttatttcttttgattactttaatcatcctagaataacttaataataaatagcggtttaaattaaagacactacagtcacatatttctgtataactaaaagcaacaggaaacacatttttaaatgccattttgtatattctgtactgaaacacttctgataaggactggccataaaaagaagtggtaatcttcacatttatgaagttcaagttatatatatatatatatacttaaaatttgtttattagtaaaatgtttggtcttaaactatatttcatttccagcaagcagaggccgtaatttgttaacgggaaccttggtattttacaaagggtttaacaaaaactatttattcatatttctgaaaattaggaattttaaaaatgattgaagtctttttttttttgactggccaatttcatttcaatgacctgggttggatgttgttttattcaggagagtagtttattcagacaagaccataggaagaaagaaaagaaaaaaagaaaatcatttatcccacgtgaaagcttttaaaaccactttgccagttcatgtcactattttaatatcggaatgtgaaccaaagagtctttctacatatctcttgtattgctactgaatacagccagatttatatatggaagagtgcttggttgttttttgttttggctttaaaaacaagcaaaaaaaaaaagcttaaaacaaaacaaaacaaaacaaaagcgatgttggtagtgctcttcacatacacattccctttaaaatgtagttttgaaagtggagtagaggggttagctcctctgcctccttgtgtccccgttgggcccaccccatccctctccagccaacacagtggctgttgttgtaagaaagtgtgtcataccggctccatttgcacgtgaactctgtgctcattttttgcaagatccatttccagaaagtcttca

SEQ ID NO: 337954 - DNA, 1000 bp, Homo Sapiens
tttttttttttttttttaaaattaaattttattattttgctctaacaaagtaacctcctactttttcaaggctcagaggtggtcaacaatttgcccaactcacatggcagatagtggcggagtcaaacagggcactcaggtagggctattccagcccagagccgtttgcttggcctgcagtaccgcctttggccataagagccactcatggctggtcctggaggaggcaggacatccccaaagatgcttattgacgccagctggacgtggctggcgggaagactggcacatgatctcaggggaccgttgcttcccaggaccgtctttggcttccaagaaaagatcccgctccagggcatccgccgcgacagcctgcttgccttgctccttcttctgcagggcgtagaagctgccacccatgaagagggcagctgagatgaggaagaagctggacatgtagaaaacatagctaaagttgttggtggcgtccaggagcaacccggccagtggtggggagatgaggaaagcaaggccgtccaggacagtgaagagtcccagggctctggggaactgatccatggggacgatgtccatgagaacctggaagatgagggcgccgatgccactcatggacacgctgtacgccaggcagtagcccacgagcacccagaagtcacctgatgccgcacacaccaggttagtgagcccattgagcaggagtgccaggctgaacaggtacttgcggtggctagcaaaggccggccgtcctgccatcagcccggctaggggcctcaggaagatgttgctgaagccgatgatggagatgaggagggctgcctgctgctcgtccacgctgtgccacatggcatatggcaccaggaagacttgtggcagtgggaagcccaggacggaccacatcacacccagtatgtacacgcagtagcctgtgttgtgccgcaggatgtcgaaggccaggtggcgctggatggtccggccgcat

SEQ ID NO: 337955 - DNA, 1000 bp, Homo Sapiens
tttttttaaaaataactctttaatcatatgcacataaggggaataaagggcaacaccaggctgactcaggaggggagcaagatattctccctttgtcccagtgtctgcttggcacagttctgagatcacacaaacaagtgggagggggttgggaaatagaataagtgagaggactgaagagacaaaggcaagggaggagaggcaagggcttgcagtagtctcaatcagtggactctaacacagattcactcagcgcaaggtcccagtagtgttcagccccatgctttttgaaatgctcacgagccatgttctctgtaggacactgtttaaacttcatctctccaaagctccggtctttggctgtaccctcccagactagtacacatttgttggttttcttcacagcttcctcatcagactcctcatcatcatctccctttgtgttagatgtctgttcatcccactttatccgatgcagcataagacgcttaaatttcttctgggccttggggcccccttccactactaccacgttgacatccttgtgcagtaccaccacccctgtcaggtacagttgcccagcattggcttcaatcttgaacttcttggctgggttgctcaaatttcgaactctatatacagatatgtgtaccccctgtgaaatgtcttctttaagctttttaattttcttgacctttctctgttctgctgtgagttttcgggcagcgttggcctcttcatgcgctttctgtctttttgccatctgagctctgacgtgggcttctaccttcgtggggtcttgaacagcttctgttcctaatactcgcatcaaattagaaattctcactttgggttctggaggaggcatcaggcccagcctgactttttcttgtagttccttctgtgcttccctccttgtttgtctccgaagttttttctgttccttcttggtaagatatactcccagagtaactggtgtgtcattgtcaactggaggatt

SEQ ID NO: 337956 - DNA, 1000 bp, Homo Sapiens; identical to SEQ ID NO: 158418

SEQ ID NO: 337957 - DNA, 1000 bp, Homo Sapiens
tttttttttttttttttttttttttttttttttttttttttttttcccaaaagaggaggcttttaatacaaagagggtggggcatagcctgggaaggacttaaataaggaggataagagtgtcaggaaccagcagctgggggtacagggaccctgcggagtgggatgatgcagacagaattccgagcctctttgattctccaccatcggccaagcctgtgctcctgccctaccccagccaccaggaagtccccagagctggagaacttgaggctgttgataaaacccaccagggggatgtcacagagaaggtcaagctgccggaagccttccccacactgccaaagccgcacacaggagctgtgggagcctgtggccacaaggtctgtgttgaggagggctgccaccgacgatatccagaagggctgctccaggcctggctctccccgcagcccgtgagcttcacgctgcagggcaagtggtcgcttcttggagagaccccacaaggccacagagccatcgtccgcgccggacaccatgtgctcctcattgattaggtggatgcagtcgatggagccctggtggccatagaagacaagctgggactcctcggggatcttccacacacgtacagtcccatcccggcccccagccgtcacacagcactcccggctcaaggcatccagtgcagccacagcgtcctggtgtccgaagagcgtctccacgtaggagttctctgccacattccacaccttcacggagcgatcgtgggatgtgctgtagagctggtgggtgcctctgcggaatgccagacccgacactgcatcccggtgtcctgtgaaggtgtacaagtgctggcagctctgggcctcccaaatgagaatgagcttgctgcggtcaccagaggcaaggtacttgccgtcggaggagatggccatgcagaggacgtggctgctgtggccagggggctttccctcggcacccttcttggctcgaggaat

SEQ ID NO: 337958 - DNA, 1000 bp, Homo Sapiens; identical to SEQ ID NO: 158419

SEQ ID NO: 337959 - DNA, 1000 bp, Homo Sapiens; identical to SEQ ID NO: 158420

SEQ ID NO: 337960 - DNA, 1000 bp, Homo Sapiens; identical to SEQ ID NO: 246446

SEQ ID NO: 337961 - DNA, 599 bp, Homo Sapiens
ttttttttttttttttttttttttttttttttttttattttgcataacaagtttatttttttaaaaggcatatagacaataaacaaagtaaataatcagatcttaacttctgtcctagacttgttccgttaagttctagtctgtgagcacttgtagttcaataatcgtcatcttcatcagagtccattacttttcttctgttgaatttcactgttgttgtcttttctgtttgttggcttacttttttaaggatttctattaaaccttgttctgataccttctcacttagttgtccatatcttgccatctgtataaggtaattctctactgctttagttttttcaggctttacaagtgctaagttacttaacctggcccgggccgactgatccagaacttgggctaagatactgtttctcatttctgcttccctgtgctttgcttcctgttgggccgcatcaccaggatccccgtgtttggcctgcagctcggccagcctctgtctcctcagcgcctcaagctcctcgtccgccatggctcggcgtcagcgctggagcagccgcggtcactctcgcagcccctcggcgcgagcgcggcct

SEQ ID NO: 337962 - DNA, 1000 bp, Homo Sapiens
ttttttttttttttttttgaaacaatgtcactattaggcacagaagtctatttacacaagagcttgtttcatttgacatttattgcaataacttgagaacaattatttgcaactaaatctaacagtatttgtacgagtactttcaagctaaagtactgctaaaaaatttcaacatgcatgcaattcgtttacataataacataatttattataaaacctgtgactctgagcactttatggaatatgtgcttatggaataccctctactgtaacatggccacatctgagaaaagagatgctgctgagcagaagagtcctgtgttcaattttgttgaaatgggttggctgctcagactgttcaggactgctactgtgctatgatagcattgcttgatagctcaattcacatcagacttcagaagactttcaagcacaagccgttagccaccagcaaactggtagcacaagcagccttggcaaaacacagttactatgcaggtgggctctgttttaagcaaagtcgatattgaaaatccaaacatacaaaagagataaatcagagaatggttatttgtattataaaatggttttctgctttatgaaagaattcacaagtttcctctaaatggcagctcccctaatgcatttaaaatacaatttgatttacaaaagttcaatttacacgtgactttttgcacaatcattgtgagaagcaaagtacacctatatacagtacttaattttctctctcaggattaaggtgtcttatcattgtattgataaaagacacttaagccaaaacgttataatttaagccactgaaatagaaagtaaatattacctctgaaacatggatattccagaaaatttaagtacctttttaaattttgtatttacaatcttgggtagtcatctttacaaagtagtgctttagatagcacaagtatatagctttcattaggccataacattgggccttattttgcaaaaacaaatgttt

SEQ ID NO: 337963 - DNA, 1000 bp, Homo Sapiens; identical to SEQ ID NO: 158421

SEQ ID NO: 337964 - DNA, 1000 bp, Homo Sapiens; identical to SEQ ID NO: 158423

SEQ ID NO: 337965 - DNA, 1000 bp, Homo Sapiens
ttttttgtgagaaagctctttactgggggtacagcgaggaggagcaaggccatctccccctacctgcccccaccccctcctagggtcctggggtgagggggggtcttccctccaccggaccaccactgtctttggtacaataaatagaaaaaaagggggagaggggcccaagggtccagtccttagtggggagggagcggccaaaaccctctccttgacccccctgccccaggccccaatcagtgcaggcctcacccaccccagctgggtagcagcaattccagtcaaggagagagatgaggatgggagcccagggcccccagatgggggagggtatggcttcaggaggggccccagggagggggcagggtcacgagctggctgctgtgctctggggtacaccacggaggcccaggtgaggccccagagtggcagggtcatcaggaggcgggaggggtggacgacctccagtcatccgagtccggagggctgaggcagccgggtgctggggggcaggcgctgggtgaggtggggagcagtcagcagggccgcccaccaggctcacatccatcagctccgggggtggtggtgaggttggtgatgggggacgaccaaggtatcggggctgggggggtaactgggccccggtcccaggcagtgacgaggcagaggcaggggcttgatgtgtcttgtggggcacatcaccccctgcccagggccgcagcggctgggagggtgggacctgggggctgttcatctcacagtctgtgatagggggcccagggcccccacaatatcggttgctgtagcggtaggtccggttgtcactggaggagccactggagcctccagaactggagatggagctggcggtgctggaagaggggcaggtgtcgaggggcgcgggcgaggtggaggcactgctgcctgccgggcccgtgttggtggcctcgtcggccgtgcggcggaagaagccgtgctgcagagcccccagggggct

SEQ ID NO: 337966 - DNA, 1000 bp, Homo Sapiens
tttttttttttttttgtttggaaggtttttattttggaaaagctgtgcagaaaaaaattcaagaaaatgttgctgtgaaaagagaaaaacaaatcttaagcattaaaaaaaattcaaccaactagctcagaagaggggagaaggccaaggttgagagaagagtcacagcctgtcaggcagatagctggcctccggcgggaaggccatttccctgagcacttgcagaggaagacagggtggtggcaggactggagtggcagtggctcccaaggctctctcctccaacatgtgcatctgccatctgctctgcagtcctgccgcaggattccctagtgaagcagctcaggcctgggggagccgtgtgtatcccagctgtgccggcagcatcataccaatcgtgggggtggtgaaggagccaggggttcattcatggttggtttctgatcaggcatcttgggaatggataatggaggcagccgctttcaggacaggcatgtccaggggctcctcccagcctctaccccgaagtcctcttcccaagtgaccccagtgatgtttccattgagatgcgctcctggctatggcaggcaccttctcaacttatatgtgggaaggggtcccccatgcttgggggacctaggcagctggcttggcccaagagagatgaggatggaggccaaaccaaaggggggcgccaatcccctgtccaacaccttctcaccaaaagctcccgtttggctggaggcagaccctgtggctctgaccagacttctctggcagcaatcctccaccatttgtatcttaagaaggccctcaccctctttgagtggagtcagaggatgcctcagattccagatgtaagcatcagaactgctttctgtcaagagctccctaattttgggaaagaagagcctgtcccacactgtcaggccctgaggtcagcagatctgctcctccttcccgtgcggtacgtctaggtgctgatgagggcagtccaggg

SEQ ID NO: 337967 - DNA, 1000 bp, Homo Sapiens
tacccccaagtcaagtagatatttggacagaaagacagacattttcttctgatattttagggatcacagagtccctaagagaggtacctgtaagtaccattcgatccgtggcaggtttagatgttacaattctaactatctgacagacatttctggctagattccaatggtggtttgcactaaggactttctgaaaagggaaaaataaagtagataaaataatatattagactaccccatacatagaaaatggggttattaagtacgacctttggacctgacaaataatagttgaagcatccttctgaatgatccaggcatcccataaatctggcagtggaactcatacaacaagcctttgttcttgggtcaaggattacttggagtaatgaaaaccaaaaacctaaaagaaagacctaaaatggggctcctctcaccactgtatccaacagtctatagttattagcctctgtgcaacattccaatgactgtttcctatttcagtgacatatgttgacatatgttgctacttttgcttttgctgttttttttttccaagtcaattagggtgctttctattatcattcaacaaagtttagaagtaaacattgttagagtgctccatttcctgtaaccacagttcccacacaggattatttgctctgcaatttaaacagcacttaaaattgagtggttctgcaaactagctgtgggcctctgtttaatcctttgctcatcttctattgcagcaaaaggcaaagatggctacacataggcagtacggagctgtacagacagcccaagctgaaccagtcctgcatggctattggctacagcccagcagcctgggctgacccctgggttacctctctgaggtacctccaagcacagacatctcccatgccacctcaccattcctcagagatatagcacacaagttgacattatccatgtggcacttcccagctcctatataatgaaacggagggttggcgggtga

SEQ ID NO: 337968 - DNA, 1000 bp, Homo Sapiens
ggccttcgcgtaacaagcagcataacctttatttggtcatacaataggtgaagagtgtttcaatgttttgaacactaaattttactcgtgataattttttttctatctaggcaatttattcagatatgtgctttaaaaatacacattaggaactttgcaactgatatgttctatttaatattagaaacatttttcatggtaatacattatttaactttctataattagagggaaaaaatcataaagatcatactttatattttaacctgacagaataaatgcattatatatatctctttgaaaaccagtgcacttagaagtttctaatttatgcactccattgccctaatcaaaaagctatacattttccagtatccacactataacacagtcctagtaaagatgcacattcctttaaaccctttactttcccttgaattttgtgggggagggtggaggggaaggaaggatacagaagttgcagtgcagacctatatttatttagaacaaaacatcatatcctatgttaaaaaaataattttatcaaaaccaaatttcaatcacagttatgtatgattttcagttaatggtacatgttgaaattgcactttgcagatatcctgataatgtccttgacagcgttccccatttcagcctatgtttttttcagtagacacaggttcttccagagttttcttttggctccccttccgtgaatatttgtatttgtctacataggctttaaccagatttgccactttagtagaatttacttctccactcttactatgacaaactttatctactgctttccgtacaatttctttatattcttccttggtgatatctttattttggtaaaatggcttgatggccaattttacctcttgtgctgctttttcttgaatttgcaatttcttgtctgtcttcgagctatctgcgctggcttccactgcaacacttactttgctttctgccaattttacagcagcattagagg

SEQ ID NO: 337969 - DNA, 1000 bp, Homo Sapiens
tttttttttttttttttttttttttttttttttttttttttttttagagtgtaaagaaaggtttactccttgtatcatcccctccccgtggactgcttcaattctatcggggacaggccagtccctggaggctgcaaggagccacaaacctttcccagctcacactctgcacccctcagtctctgctgctaaagaatcagactcaggtagatggggtgtccacagtctgtcctcattacccagtcataccgggtagcatggcccgagagagcccttatctctccccaccttaaaaccctcagcatcacacagcaggaaccagtccacagggcttaccaaggatacgcagtgaaaacagaataatgtctgttacaaaccccctaaacctgagatggctgaagagccagattcctgcaccccatctgactcccccaggcagtgggagatgacccaaagcccccattccctgggcagagtggtgtgcctggggaggcctggcagtggtgctgtgccatgccagaccttgtcctgccagtcagtcagtcctgttggttgggttgagccaggagcacccacaagtcatcaggggctgtggatttgttgcttgccgcgtaccgctgaagttcaaggtagctaaagggtggagtccatcagtgggtggccgttctcgggaagcatgatgcgagtgctggcacctccctgggcagaggatgtatagtggacagactcgcgggtggactggcggaggcacgcgcagcagagaaggcggcggaaggtgcggcgcatctcagcatctcggcaagagtacacagcagcattgaccagtgagttggcctcggccaacagtaggaagtacttttctacagccaggacattgcaggactcacagcctaaaccatccaggagcagtaccacctggcctggtgtccagcagaccacgaacgcccccaggatgatgacaacagtcttgaccaggctgagcgtggtctctcggtagcgg

SEQ ID NO: 337970 - DNA, 1000 bp, Homo Sapiens
ttttttttttttgttctttcttttatctctttttttttttgcaagaaattattgtctctctatctcatatatagttcactctttgcagtacaaagtgttaaaatgtcaaacaaaaataaatatcaatgttacagtagctagaatattcaataaaatagatccctgccattcttgattgaaatgttcagtgagacttaatttcatttggatattattttccagagatttgcgaagtctcatgttcctgttattgcagctcatttctagggggtggtaaagatggggtagtctctcttcccagacaaaatgctgggagagagtgggatgagtctgggggtggggtggatctgaaatgccagtatagtcacgagatcttcaggatgtgtattccttcattaccaggtagcagagctgtagtgtttattggtcctaactgtggcatcagaacactccccatctgaagagtcacagtccgattcttcaaactgcatggggttctcatagccacgttcctccacacacagcttgcccagagacatctgagtcttcacacggcgcacggcacactccttgtcagagagcccatccgagtgtgaggatatgtcaatgggaatctctggcgtctgggacagcaggtcgtctagcttctctgccaagcggtcttcaagtttatcagctaactcatcaggactgtttgagtggtcactggtatttccctcttctccatcagacacagagaaattctcagagctaaaggttgaatatgactggcagctgctgatacagcgatggggcctctgtcttcgtggaaattcaacttcactatctacttccccttcttcctcttctgaggagtcatctccactcttctgcagaggccttgtttttcgaggtagcgctggaggggtgccgagatgagaggtgccgagggatgactcagacctacagccgctgaattcattttcttccgttttctcagaactctgggcgttttccaaga

SEQ ID NO: 337971 - DNA, 1000 bp, Homo Sapiens; identical to SEQ ID NO: 158424

SEQ ID NO: 337972 - DNA, 1000 bp, Homo Sapiens
ttttttttttttttttttgtaaaaagcaatatttattggaaagaaatattacaggaagtctccttaattcctgtaaggccaaatatggtggcccattcctcccttcccctcctccacacccctaaaatatctccgatttgctcagaaattctctaccctgactcctggaatctcccaattcctcgttccaaagctagggcctgcatttacaatgtatatagctcccagagggctctggaagcagcatgaaataatgctgcctgacagtttgttagctaatcaaaggaagatggctagaaagtcaatgaattgaggtgctttacttgacaatttatcttaataaacagttcttaaacaaagcctcgtacaggccaggaggtaagacgttcttctgtaaagtcaaacttccaagatgtactggttcaccaaaaccaatgggcgattcaaagaagtctttaagggagtaattatgccaagggaagaatccacatattcaagacatagctttcttaagaagatggagctatttaattttagcaagggcagctgctcttctttctgtgttctgaaacaaggcacgaattaaagcttttacttcactggaagagaacgcagctgccaggggtccttttccatctgcccaccgatccccaatttcttgcaagctggcttgtagcatcatcatcaattccttgaatggcatccattttggcacatagactggaacctcttcttgatatttcttgttcttgctttcttcagataaaggtgcaaatacttggggtccttcatccatcactgttttgcataaggaatataacctatcaccatcttcagtagatatgtcctctagggcagtaattttgccaatgacctcagaaattgctgtattgagtaaagtccccatagccttgcaatatatattcactggcaggacatcctgccacacaattccaagtctctttagttggtgcagtacctgccggactgctttacttgc

SEQ ID NO: 337973 - DNA, 1000 bp, Homo Sapiens
ttttttttttttcaagggttctgcatctcgtttattagcacagaaataacaggtttagagtatattacaaaaagagctcaaactgttcagatacagcaactgggcttactaggggacagaaggggaaatacgtcagactactgtacagggacacaaagactcctcatcctaaacaaagtattaaggtacatagacaagtttcttgtaagacagaaaacagagaaatccacagtaactctaacacatcccttaaggaataagcatgtatttgtaggaagcaaacaaagctttccatagagaaaccactttcacaggatgattaggtggacctgcaatgaagaaaatacatttcaaaagatgggttcagacttacaccaagttttcactgaaatacttaaaaaaaaaaagacccttctctgtatcaaaagaattaaaaaaaatacatcacggataaaataaatctcaggaaaggtccaagtcctactcagagacatacatttgcaaattaatataaattttaaagtttgacaacaaaaatactatttggaactacctagaataggccaagctaagttcgtgttctgctttagtgcattacattgaaatgaatctcattctcactataatttttttctttttaactttaatcaccagcggctggtcaactgaaatggacataagaactatataaatgtcagagaaatatgtaaacctcattaatgtttccaaaaattcatttagagatagaaacaggtccaaatagatgcctgtctaaatgcactgcaattacgttacaattatttttccaaatacacagatatgctctgtcttttctcagctcattactgactcaaacaatttgcccttctgggatcaattgtttgctaataaataattgtttacagtcacaaaatgatattaggaggttttcttattagttttccttctgcaccctaataagattgaaaactagctgattcccaagagtctaaccttaacc

SEQ ID NO: 337974 - DNA, 1000 bp, Homo Sapiens
tatggattatattttgctgctcacagcttttgacacagtcaaacatctatgacaagtagttgggttcaaaacattcaaaagaaagatcttggcagacaaggtcacccactgtcacttgaaccatgggggggtcacaacacagtgaccggacgaagttgttccaattggttttccaatgcaattcgttcttgatgaacctccttgagctgctgctggagctcactgttcagccgagccagcactgcgtttgcctctttatttttgcggatagcagtttgaatggccttcttctgtttggaagactgcttttggactgttggatgcggtttcatggttgccgcagaagctggcccacttgcagcagtggaaggctcttggttttctgtagcttggttttctggtctgaatttcctacgaatgggctttgatggtggctgagaatacagtacatccttctttgctggactactttctgcagcctgggatggggctctgctcagctgtgggagtaactcggcctccgacacttgttcagactgtgatggacaaggtcttggagggagcgcaggtggtgggggtaacaatcctgacttggtagctggcacactgggctggaagactttattcagatccaaggaggaggctctggaatgggttttctgtggccgaggtggcggggtgggagggtcctcgccccttttcatggcctcttctatggaggtgctagagtaagatctggatcttggtcttgctttgagactgttggaatccttgggagttgctggatcctcagacacgtcctttggtaaggcttcattgatagtacttttcaaagcttgtttgtcatcactagttacatcctggttagggacaggaaggtcagccatgtctttaacagatgtcttctccatccgattcaagtcacgaggttgttgatttgccggcagtgactcagaataagaatcaaataattgacagtcccatttgggcttaggaaaag

SEQ ID NO: 337975 - DNA, 1000 bp, Homo Sapiens; identical to SEQ ID NO: 158426

SEQ ID NO: 337976 - DNA, 1000 bp, Homo Sapiens
tttttttttttttttttttttttttttttttttttcccacattttccctaatttatttacctatgatattggcacatcttgttttacttaacatttgaaaaatacaaatatctcttcatatgcaaaagagcaaatgttaaatgaaaaactgaattttatatagcttcctaaatatgagccacatgcttaagcagtgaattaactttatgaatcaaatgtttaatgttaactattacaaaagcctggtatccaggtgcaatctcaccagaaaaaaatagcacctgcctttattacaataaaaaaaatggctaattccctttgacatcttaagagtgacactactttgtcaagcactaaatactttttaaattaatcatgttaaacttcagatttatagatataaatattgtatttataactttagtcataatgtacaatttctttcttgtttaaaagtactttctcactcaaaatggtatttatagtttaaaaagaatatgcctctgtattcaggagtgattcaaattcccagatgttttcacatagttatgaaaatgggaaagtgctgaattaaactgggctgcaatatttcaagttttttgctatcaggttataaactatacctacgattgcaagtcatacagtgcctctatttctagaaggcttttaaagtttcctggcttagttatgtccaaaggcagcaggaagtctcatcagtagagggcagaattttcaagtgctgccattcttatcccaggaggcatttccagtggttgagcacaaggcctgtttgtagtttgcttttgctcttgcattttgtggaagggaaggaactgagagagcttagagggttcattaaaaccacccctcactctcttagtcgtagtcagatggagtattcataacagtaacctccaattaccactatgtgttgggaaaaattagaattcggtctacttacaatcctgccaactaggattttactttgatatttcagtat

SEQ ID NO: 337977 - DNA, 1000 bp, Homo Sapiens
agggccccttttgaggtacactgtatgtttcttgtatgtgctgggtttttgtttttgttttcttttctgggcctcgggaataaggggaggagagtagggagcgagacgaagtggcagagagccgacggcgagtagctcatgcccgggatttgcaagaagggcctagaaagacgcagcagggggcgggcgtgctactttctctctcgaccccactgcaaaaggatatggctttgttcatgcgtatcactactcgaagccgggactcgttggtgggcggggctagtctggctccggccgctgcgtggagggatccggagcgggagaggcggctgcgaggagcggggctcgggcgggtgcagcgacaccgggttgggtccctgcgcccgcgacagactacttcttggaatgcggcttgtttcccaggagcccgtctatttccatcactgtctgcggggtcagctggctcagcacctgtagcgcgcccaggtgttctatcaactgctccgcactcgacacccccagcaagacagagctgacaccctcactgcggagacaccacgcaatagcaagctgggccacggtgcagcccagctggtgagcgacaggaagaaggtccatgactttggcttgttgcttcttgccatcttcactctgcactttgtccttgagccactggtagcccttgatggaggccctgcaagtatctgggactcgcccatcatacttgctagtaatgagaccacaggctagagggtaccaagtgactgatccaactccaatcttgtggtagagctctggcagctgcatctccaccttctccctctgaaacagatggtgctccgcttgttcacacactggaggaatcagattgaactgtctggccatggagtaggcctccatgatttctgcagccccccatcgggatgtcccccagtatagggccaggccctggttgatgacataggtcatggctcgcacaatctcctccataggacagttg

SEQ ID NO: 337978 - DNA, 1000 bp, Homo Sapiens; identical to SEQ ID NO: 246447

SEQ ID NO: 337979 - DNA, 1000 bp, Homo Sapiens
tttttttttttttttacacattagtaccaccaattttatttatataagaaatgcctggtccactggacttttcaatttaactcagtaataattactgctgtttcttgacagaccagtgatatttcccccatagttttaaagtcaaaaaacagaatagttaggggaaaaaaatctcaagtataaataatgcaacctttaacctaccaagggtcactaaattgttaacactgattattataaatgattcaatttatttaaactaaaaagcattaattaaacatttcctcttcatttgggccaagggacatgcttaacaaaacacaaaaaagcaatagaagcacaaagttgtatgattttttcagaaaacaaaacaaaacaaaaaaacctcgattcaaaaagggaacacattttggaagctagtcagaataaagatggaagaaactactttaaaaagaaactatttgtcagttaattgataaaaattttctagtaacagtaacttttactggagttacgacagggatgggtcaagacttgtaatacatggtggaagtgctgatgataggagtgtattaaagggcagtaaccgaatgttttgactaagcgaatggtaatagctgcccttccacttatttgttcctttgtttataattaagctgaaaattataggactaaatttactttcatgaatctgctggtattgactttgaaattttcatttgggtctgggggttattaaaacacattttaccatgtcctggaatttatattaattttgttagataatgaaatgctaaatttaatgccaaccatattcaataaagtaatatctcttatggttttcaggcttatttggatgactaaggaacaaagggaagaaatgagacaaagaagtgacaatgggcactgtggacagatcataatagtctataatttctaagcagtgtacttttcatgtatgaccaagtaaagatccctaaaattttaaaacaggttttct

SEQ ID NO: 337980 - DNA, 1000 bp, Homo Sapiens; identical to SEQ ID NO: 246448

SEQ ID NO: 337981 - DNA, 1000 bp, Homo Sapiens; identical to SEQ ID NO: 158429

SEQ ID NO: 337982 - DNA, 1000 bp, Homo Sapiens; identical to SEQ ID NO: 158430

SEQ ID NO: 337983 - DNA, 1000 bp, Homo Sapiens
tttttttttttttttttttttgtatgtaaaattaactttatttgacatgcatgtataccaaatataaaattagcttagctgacagatctaggttggttaaaactctaaatagatcatacaaaacaaagattggcaaccatttcttatatgcttctcatctacaacaaggacttttgccattgccataacttgatattgctggaaaacatttttgatatttgacattaacagtatgaagtagaaaaatagaaaaacaagaaacatatatatactgaaaaaaaattcaaacaacaagtctatacatagttgcttgtccttagaaagaaacatatctaacagagctaaaattaggagtatccaatatacacatagtcatcaagttaatctattttgcaagaaccaactttctggcaggaaagaaaagtgaatgagtcttccttgacactccatcaggagttatgcatgaatcaaataaaaggattttgctaaagtctgttgactcttcctaaacaacctttctctctactctcacgaatacagatccttttttttttagagattgagcatcttagctagtcctttaaaatgagttcctttgttctccatacttttgggatttatctttctgaaccccaaatctcgattgcctgttcaaaagtctaaacttcttgttctatacaagacttgtaccagaccattgctttccttttctgacatctttactcagcactctgctctgcgctggcccctgaaccacttgcacttgcctgaatgccctgtgcagttccatgttttcaagtcaacaactcatagggtacctcacagctatgtgccaggcatgttgtaggcaattttcatgcatttgttcatgctatttccagtgcatggaatgtcctgcccaaaatctgtttcctggaaaatatccacccatctttcaagtgttggtacatggtttgtataaatttggtcatatctgtctgtctcactttctgttccttca

SEQ ID NO: 337984 - DNA, 1000 bp, Homo Sapiens
ttttttttaactaaatactgtaggatttattaattaaaaactcatttaatctataccattttgcatacatattaaatctgtaaccttaataaatgtccattacttcttaaaatatagagaaattgaggatatttcaacaatgaaatatataatggaggaagagtgtaattttttttcggataaaactctttggtctatataatttttctgagattaaaataacacgagaattcactccaataaaaaagtaaacattacttttctcaaaaaatttaattgccaaactatttacaggaggtgaacatcagcgatacagaagtcaaatggaggcatcgtcacaggacggttatggcggaaacggtgcacagtttcttacagtcagctgagagtgaaaaaaagtcatgggaaaaaagaacacaaataaagcaatccttaactgccttaaaggaatgaccaacattctggtaagttattaagaggaagtaagaaattgtcgtggtgatgaatagcatattgcacattcagattaggtatcctgcatgctactaaatagaatttatcaaaagaaccataaaagcgtgagaaagagaatgacataaaatagttgaattccagtgaatgactttgtacagatgctgaatatttggcactctgctcatcctcacactcgatatgatttcatatttatatttatatatatatttatatacttctttaaaactttaaacagctagtttcctggttctaacattccttgaatttctataggaggcatttaatatagtccttaggccacacctgggtattttggtctgtagtatggaaggtcgggggatgagttgtctctctctgcagggaggacctgtcctgcccgagagcgaagtggcttaccgttcggaaggaagcgttcgaaagtagcctaggtctcactgctcgtaaggggaagccttgtcgagttcagcaaacgagttaaaaagtggagtgaggggaacattcgtgc

SEQ ID NO: 337985 - DNA, 1000 bp, Homo Sapiens
acagaaattgacctttatttgttgtactaaagcctgtttaacttttgatacaaagtaacattttagtacagaaaatcccagtctgtcagctcagtacctgtctgtgcacactgtaccatctcagtcccactctgcctgtaacttagaaaacagcccctacccccagagggtctgcgagttaataccttgagaatagtctacagtttttcatagtttgtctgagctagaaaacttgtacctgtaaaacaaaggacagcattgaggactgaaacttgtctcttttttgaacaactgtgcaagaaaatatatccctttttaaaaaacatcagttatggctaaactacaatctagtgtctagaattacaaagaataaaatgaaatcaaagatttctcgctagtaaaatgaaatgttaggaacagtattaaaatataggtcctaccccaacgacacttacacagagcccagtacagtacctattattaacaggacgcatagcttaaggaggaaccacatcaaatcttcagccagacatatctagcctcagaagtgcaaaaaaaaaaaaagcccccaaacgaagacacccacactgagtagggtgcatgccgtgagtgctgtaatcaagattaaaaagacctcagtttttctttttagactgttgatagtgacaataaccattatgcttcccctaaaagctctcaattcaatgtctgaaacatgaatgttttcatatcaaaaagaactgatgtacctgccaccctctaaaaagtttaagaattaccctgcaaacattgcactgatgaaggctgtcacgacttacagagcctaaggaggacccaatggcaggcatcagcacagctgaacaccacctggaccccactgcagccctgcccacgcagctctcacggagcagacacagtcctcaagtaataagcacagatggaggagaaacgagaggctgtggaaggcaggagagaaaggccgagagacgagtttgtaaga

SEQ ID NO: 337986 - DNA, 1000 bp, Homo Sapiens
ttttttttttttgatcaggagtatttatttttaagttaacagtacagaaggaagttctctttccatcaaagttctcctccacgttaccaaacctggaattattaggaacggcagctccacagaatggaaaagctaccagcaggcattcaactgaaatcaagtgctctaccacatatccctccttcactctccctatcacagcagttctcattctcacttagtgagaaagttagtggaggaactactagggttaggggtgagagaacaagcagcattcacccaggcagcaatttgcaaggcaaaagatctacttacccacaatctaatagcagccctcttatcctaaaggatgccacgaattgcaaagccctggtctcccacccacactgtcccagcaagttctgagcatgtttgtacatgctcttgccccacaggtagcaacgctctcatagtgtgtctcaaagttcagtcccatagatggccttataacgtaggtattcttctaagcactgaagagcattatcatctacctttgggtcaaacttgttggccaacaggtgatggttttgaagcatccaattcaagtccccagccccataaacgcagatagcccgctggtggattccagagcagggagcataaggagcacccttatcgatgtctccctcatgaccctgccacttgaccagcctggcaatagaagtcatgtctgagatgtcgtacttggggtggttgggaacagagccaggcatccaccgtgcacgctgaagggtggcccagaggtgttcatctgggctataagtgtcttttacccattcaatcagttgttgggatttagggttcttcaaaacatgttggacgaaatctcgggaagccacaatgtacgcattccctgtaaacatagttaaattataagggggaggatccttcttcttgttggttaggtgtaatgtgtctctcactacctcaaagtgatatttccagcgggtttctttgtgct

SEQ ID NO: 337987 - DNA, 1000 bp, Homo Sapiens; identical to SEQ ID NO: 158432

SEQ ID NO: 337988 - DNA, 1000 bp, Homo Sapiens
tttttttttttttgcatagggaacgaattaattgtatttttaaatgcagcaatcttttaatgaaatgttttcatcacatagtacttgttttctgtatgaattcagaacttttgagcaataaaagtgctctgcataagtttataaaatatgctttctggatttaaaatttaacagaaaaatttccaaacaagtcataggtatgattctaaaatattatgtacataatatatgactacaggaggaaattcctcactgtagtacaacacagtgtacaaatatgaagcacagtgtttagtttaatttccctttaggttttcctcacattggtgcataagtggctgactacatgacacaacatgccccattctacttgttgcatacaaagtagaagaggaatgtgaggacaaatttaaagtagaaaatgaaaataaatggcaaaaatacagtgcaaatgctttaaacagtgcactttataaaatagtttgctttattcatacttttttataaagtgcaatattacttaaaacagagagacatgtaccttaatattctgcaataaccattaaaacaaattgccaggaaagagcagtgcaaaattaaaaacatacacatagcttagcatgcatctcagatggatcccgaatacagagtatgggaccttgagttcttatatctttttttttttttttcactttttagaaaaagtttaataatagcaggttatcatcatatgtaaccataaaataaaaacaataagttaaaatcttctctcaagaaataagtatatgccacacataaaattcattacagaatcttttttgaaaacagacccctttctctgataaatcattgtttgaagggtgcaaatttcaaaaacccacattgtccacaaggcaaagcaaaaggtatcatcacagtatgagtcatttcttgttggcagacatctggaaaacctgtgacttacaagcagctcaaatctagccctaattaaatttacagg

SEQ ID NO: 337989 - DNA, 1000 bp, Homo Sapiens
tgcttttatgatcaatttattagaaactactgtggcaactgtttacaatgtgttcattctttagacctagtcaaaacttattactaattattttgctaaatagaaaaacttcaagccagtaggaaatctcagttttttaaaaaaattgctgttattgtattattagtcagggttactctggcagcaaagcaaaaatgttcagatgccacttctcctagcttttatgtttggctttcagaatgagcagttggtcattatcagtattattataatatgaccagttaataagtctgacaaacattttccaacctgtcatttttgaaaaggagaggatatttttgatacagatacacaatatacaaaaaatcccagagcttgaaatttcatgcatcctgtgcctacaaataagaaactaaacattaatctagttagttatctatgtgtataaagaaaaaaaagctgctaatcaatattcctgctaaaaaataaattattacaaaacataggcaacttcctctctccattataaatgatcaaaaaccgaggtaaaaatctagtgtttccccaatcaatgaaaacaatatataccaagtaaatgactagtcaagtctagaagagagtaatgcaaaaatgagccactcatattttaggtataagtgacaaatatatttctctttattacttttaaggttttctctaatgtcttttggtagtggaagcattttatttgattccactgttgctcatggtttgagccctacatactcccttccctttcacctcaaagggaactcctttgtatgtagccacacactcatcattagtgtgaagatcaggctggatctgctcccaaatcttcttcttaggattcagctccttgtcaggctctcctgggaaagcatcaaaagtaattctgtctccaggaacagacccatttggaggagccaagatttcaattttctctggtgaactagcacacatgaccattgcttgagataat

SEQ ID NO: 337990 - DNA, 1000 bp, Homo Sapiens
gataggcaaatatttaatgcactgagccttttgtgtgtaaggataattagttactttaaggtattcggcatacacttttacatttccatattttaattggactttactggtcactgtggggcatagatacaactgaactgttcaatcctaatcaaataaaactattagtacattcttatacatctttttgggacaaagtacctcctacttacagagtatccaatgtaaattttttatggacaaagtaaatgtttataaatattttggcattttataacttttcctagcatagcttgagggctgataagaaactcagcagaaacaggctgtggttggcatgaagacactctctctctctctctctctctgctctaggggattttactcactttgggacaaaagcaatatagtagcatcttttcactgaccaaggtaaccagagtgttgatcagatcacactgatacctacaagtggccaaaattaaatgacaagcatggggggaggtgccaggaagtggcaggggtatagagtgtgagagagaacagatgcatgtgagtgtggtgtgatgagggaagcagctcaaaagctgacacctaaacccagaataatttcagaggtgaaaaattaccacctctcttactagtgacattgaagagaaaaaaaattagggtttttcactgatatgttactagtatttaggcaaaaacacaacagaaaccaaatcaagtcactataaagcagtaagaaaatatttaaaaaagacattatcaaactttagtgaatgttattctaagtctcgaaaatttagatgtctgtttagactaaaattttgccaaaaacaaatccaaagtgaaaaagtagcaattttagtagacattaacaaacattatgcagatatagatacacatatgaataatgcaagagatttacagaaatgtagttttggcacttttacttggattttttaaagaaagtgaatacaaatatctttgtacacaa

SEQ ID NO: 337991 - DNA, 1000 bp, Homo Sapiens
ttttttttttcaggtagtgttttggtttattatcttagtgttgtcacagtgatagaaacccccagagtgggaagaagagctcctgcgaggacctacattttgccattcccctctgccctggggctcagagccttgaagcctttgcttggcccttgcatgttaggatatggccaagaatcagaaactgatgcgtttttccagcactacctgtgtgctgcactcatggaaggtgggaagctatacacaggtatccaacttggttataagacaccagttcccacagggctggatttctcagctgtctggtaaaccagtggcacttcactgccccagggtggctggctccctttctgaatttctgtctcaatgtgatataattgccaccattcaggatggctacccacatctggtatgaacaccatgacttctgtaagccaacggggcttcctcctcagaacagtgcccgtgcaatcttcctccctgtggccttgatcctgggaaaggagccccctcctccctcactcggaggagttcctgaggcagacgggccactggtgacgccaggtgtagcagtagaggaccttcgccgctgccgcaggaggaaatcgtgtgaagctccatccatggcgtagaatacattagccgaggctgggatagtcagctctcgctcccctggtagcagctgtaccagctcatactctgaagccactgcagagtcacgattgtttttcttaaggacacgactgatgacacttggagccttgtcctggcttgtcaccaaaatgctcttatagacactgccatcttcccccaactccatctggactcggatgatacggcaatcagaggcccctggcccagatccctctcccccatatccagtccccccggaggcctcttctgcacccccactcagcggggagccacaggaggctgagcggcggtgacctcgagaaggcctaggggaggaggctggtggggagaggtggctggggtcagc

SEQ ID NO: 337992 - DNA, 1000 bp, Homo Sapiens; identical to SEQ ID NO: 158434

SEQ ID NO: 337993 - DNA, 1000 bp, Homo Sapiens
tttttttttttaaggtgacaatcacatcaattttattttataacaaatagaatcatgtcccagttccaaaacaaaataaatagtaatgttaatatagagatttactcatggccttttttgttaaagagtcttaaaatgtttctttggacaatttaaaaattttcaatgttttttttactcccatacaacctagcccccctgccaaataaaaatcaagcatattttctcctgtatcttgtgtataggttatataatagtaccttttatctttaagatatgagctgaaaccccacctatggttgtagtgagcatcctactttacgcctcttatctcctttaaattcaaaacaggtatctcaaaaataaagttaatataggtttataagtaggacttgctcactcctgaaagtacgtttaagtaaatctccaaacacatttcaaatactctcagagagtctgttttatactaccaagtatcttatccacatttcttcaaaataaacaaaaaaatgctcacaaaatatctatgagaaacaagaagataaaatataaaatcttaatttttacgtataaaataaggaagccggtgaatagcaatgctagaaataaaatgctagatctcctaatccccttcccaagtttcatccagaaagataacagttaaaaaaaaagtaaataaaagcttaaaaaaatcccaaagtcatttcaaaaagaaaagcggctgcatcgtcttctgcaggttagaggtagtaaaggcggtttgacagtgacagatttggctctctgtgaatactctggccaacaagaaaagccagcttgtgggcgtactggcaaggagcaggaacacgaatgacacctggccagttgtaatagatgtggcacagcttgtaggtcaagcgctgtatgtggtctggcttcaggccgctgttgtcatagatgacattgtaatgtgtgggagaaacactaccacttctcacagcctggctcacgataaaaaagt

SEQ ID NO: 337994 - DNA, 1000 bp, Homo Sapiens
tttttttttttttttttggttcctaatagagctctttttatttgttcactgttcttcagtcatttttgttggtttgttacaaaatgcagtcttgactcattatttaaacagtacttaagctaaactgttcatgccatgcaaaaataacattttatgcactttttttggggagggcttcccatttttttagttcacaggcattattaaccgcatttttaagaaacaagttttgttttgttttgttttgtttcaatttattgcttttgtaactagtcacatgctggtttcacgtgtgggacaataacctgtgtctcctgggttggaatgaatttctggggcaaacaagtgattttccatcttgcacccttcttgactactgtcctttttgacttcactcacagcatggtaaatgtcttgcctacagttgtgacctgtgtcctgcggggaggaagagcccacactgccctcttctcttaaagggtctctcccatcactaggcttatctgcaaagcaatttgggctggagtccacctgcttctcctcccttgcccctgggagctctaagaagtcttcgtcgtcaccagtatctatttcagtgaagctcctcctctctcttgaagagaaagggaacagtttctgcttgggaaacctgggggacagccctttggaaggtccctgacaaggcgctgaaacctcagtgcccagcaagggtctgtctccctgggagggggtttcttctaagaggatggtactgatgtgctgcggggtagtgagcgaaaagtcagctgtggtgactggcagtggcctggctgtgctgggcggggtctgtggtgcactgcctctattttccttaaagttcactttgagggatctggactttagtgggttgctgccttttagagagctcttaggactgtcggtggcattgtcagactgcaaaggactatgtagcccacactgggagccactggcatcgaggttcacagttatgtcaactggg

SEQ ID NO: 337995 - DNA, 1000 bp, Homo Sapiens; identical to SEQ ID NO: 158437

SEQ ID NO: 337996 - DNA, 1000 bp, Homo Sapiens; identical to SEQ ID NO: 158438

SEQ ID NO: 337997 - DNA, 1000 bp, Homo Sapiens
aatttgcatttgcaatgtatttgttaatctttatgtaataattaatacaatgaagataaacgggcacagctctgtcactctcacagaaacatattaagttcactgtttataggcaaaaataattttaggtctacactaaaaaagcaaaacaaacaaacaaaaagcaaacgaggtggttttcacaggatgacaaactatatttcaaaactgaaaaaaagcaaaatgtttatatctcactcctgaaacaaaaattaacatcagacttaagaaaataaggcagatactagtagtactaagttttcttgaaactgtaaaatatatataaaaatgaaaagataccgaatgtggacagctccacattgatcaacaaatgttaacattctcaatctctttcattgactttaaaaactatgtaatagaaacagaaaatgaactaatacacaaatgaagtacaaatatcataattttcagaaggtttgatttttcgagtaccataaaaaaactgaaatataaatattttggaaatagttctaagaaataaatatgaaaatattttgtttggtatcataacacagaagctatccattttctcaaagtaaggattcaattattttatgatttagtttgtggtcatttgtgttatcaatattgccataaaaatgacacttcaaaataaaacttacaatctgagataaataaccatagttctgttttaggtaaacaatccttgaggcaaatattatccaaacgtttctcatatatagatttctattgctcatcattgttgttgaacattcactttatagatatttaattttttgtttaaaatttgtgaaaatatcaagatattttaaacaatctttataattgctaattttcaaaaaagaatactgttcggctttactgtggaaaaattcatccaaaattaagatatgtacttgatatcaggtagtaagaccttttctcagagaacagtcatatgaagataactggacaaagc

SEQ ID NO: 337998 - DNA, 1000 bp, Homo Sapiens
tttggttcttgaatatgtattttttactgaaaaaatcattcataaattaacatacaaaaatgtacaaacacatgagtaaataatgtaatgacaaaggactatttttgtgaaaagtgttttttaaaacatctttagatttcagtgcaaaaatgtacccctggcacctcttaaaacgtaagagcaagctcaaaaacacgtagtgatggaaataagctagctacgctcaatgccatcgtcaatggtgagtggatacaatcaatccatgtggctcctgctcagctattaatgtctgtggtagaggatctctgacaagaggacctattatgtcaaaatgagtattcttgcaaatacccccccaccccccaaaacagcatgaacaaacggggacacctttccctgcacacagcaatcaaagacaagattaaggggccacccatcagtagccttgaagattttcagctaccaatatatgcacaaggtcacatttggttcctgtttttttttttaacatgacaatttcacactattaacagcacacgggcctggctgtacgtttttaactatgacatttcccatatgatattcgaggcctggtggacacatgactgacagtgcacatccagagattctacactcatcagacacagacatgaccgcaaaggtatcaaagtgaccccactttaagcagtgaaaaaagacctttccttttgttctcaaatcagcattttctaaagtcaggtgttagccttttgccaacagtgtgtacttgatggtaattatggcaacatagagcttcaaacaagatcgcctgacaacactgccgcatacacatacggcacccaggactcagaatcagtctgtcctggcaaatccttccaaatgacatcatagtgttgtcacattgaaagcaactcacagccttcagtgaggaaaggggagaggagaatgagaaggggagaaaagccaaggcagggacaaaggcccggtgggggatgggggt

SEQ ID NO: 337999 - DNA, 1000 bp, Homo Sapiens; identical to SEQ ID NO: 158439

SEQ ID NO: 338000 - DNA, 1000 bp, Homo Sapiens
ttttttttttttttttttttttttttttttttttttttttttttttttttttttttttttttttttttgccagtggttaaaaagaaatctttattttacaaaattaaaaacataaatagtatttacaagcatcttaaataccagcttataatacttgacattttctaatcatttcaaattgagtttcccataagcttttaaaatgcaagaccattcattcacttgagtgagttaccagtttttacttccaccaatccaaagtgggttttggtttttgaaattgtccatactgtagtcattcaaaaaaatacaatatgcttttgaaatgactagctttaaagaaaaaagtcctgagcttcctaccccagttgtgggatattactccaaaacaactcaagaacccaaattatcttactgcctgattaaatgtaaccactctagctttttaaagacacattcctgttactcacattaatccatctccctcacgtttcaggtttgctggaaggaaaagtagagaaataatggagtagagaagtgggagaatccagatgaccatctgaaatcacattactgaaaatacaacagacatgacccaaaaatctgatcttactagtttccttcaggatcaaatccaggatattttattgtacaaaaatttcaaatgatttcagatgatgcatatgtgacagcaaacctgaatggcacaatggaacacagacttaaaagatgcttcagtggtcaacactcattctggagttctcatgaatgaagggtagacagattcagtaaaattgtttgcttttcagtttcattatctggtcttcaaatttcagcacagagcaattcatttccatatagtaatatgtaaagagagactacaaaagtgtgaggaaagcaaatgtcctcgagaagggtcagaaaaggaaaggaagactcagtatctacaacccattacctaagaacaccattttgttccattttccctggaagccctcac

SEQ ID NO: 338001 - DNA, 1000 bp, Homo Sapiens
tctgctgagaatgtggcagtggcctttacatgtatttattttaaataattagcttaggtctgagctataatgactaatctccacgagtctatgcctgacggtgataaaaagttgacatacatggaaggtgttagaggaaagaaccagaaacaattacagtaagtggaaccgtgcacaaaagctgctctgcatcccgggttcatgcttttaagcagcctttttgctgaaagcctcacgaagtagttttgtttgggttgagtgttatgtttaaaatttcccttctaccagttattgagaaaataataatgccgagctcatctaataaacaaatgtctagttcgataagctttaatcaggccctcacaccctgggatggtcgttaatgacatggatcagaatccctgaggtggctggaatctaaccagtgggtagcacagaaagctcaccttgcctatggaggctgtgggtatttttaggaaggtcatgcattatgggatgggaatttttataaacaaattgctacataaaaactaatgcactgttgcagcacttgtggaggtttcctttgctttgagacaccactgtttataggctgcagactgtaaagggaagtactgggaaatggcaaaggtcacatgggccagtgccatgttttaaggtcaaaggcactgttattttaagtgacctatctcattattaaaatcagtcactttcaccatcttcaaaatattttgtttttttaaaaagacaagggccttgtggctccaactattttgttggatgtaccaacataaataaatcagttttaattgatgcttctgcatgatttcttttgtaaaatgaaaggagaaaatgagctgggccagttaaaatggtatctgggctttttgcccccttagcaaaatccttctatacaaagtcagcgtcatttatagagtgccagtcctaaaaccaggtggcagagaaataagtgatgattcaagttaccttgcaagaagtg

SEQ ID NO: 338002 - DNA, 1000 bp, Homo Sapiens
tttttttaagcttggcaaaagtggtgacttttatttacaattgcatgtgtcaagattacaatggaaacactagtgataccatctgaacaaaagcaatgatttattggtaatggcaatgaatgaaacattgacagtctctggcgagaatcaagcaattatccaggagctgtagatctgattgcaatatggttgtccagtgtcttttgtaccttagtggctttctccttttttgccaactactcgtttgaagtcattcatatttgttgcctggactggagtaccaataaaagtaaaatatgaaattcttgttgtttcctcttcaccttgattcgactgaacaaatatagttacactgttaacattctgaaacttaacataacgaagtggaacaatgccatcttctttaatatcatcctctgtcagttccagagcttgagttggttcacttctttctgcctcttcaaaatccatagatcggggtaggttgataaaaatttttacatatttagggccctgaccattatctggcccttgaaatttcatggaataaagcttaacaggttgattgaatgccacagtaataagcagctgttcatcacagtcagattccaagaaggttgtgtcttttcgtaaacagttgtcaaatccatgctcatcactttcattaagacattcacaaccagctttgttaataaaaggcattaaatccatatagccttttggaatatctgtgtcctcattgcttccagggtcattttctaagtgctgcttgattttttcttctaatcccacagcatctgctccttgatattgatcaattctcactttgtttcgaaaaaacaaaaatgtaggtgttgctgatatattgttggtggcagctgttccctgacactgatgtacatcgacttccaagaaaacagcctgtggatatttattactcatagaactgaatgctggggcaatcctcaaacatggcccacaccctctcatggtgaacttg

SEQ ID NO: 338003 - DNA, 1000 bp, Homo Sapiens
ttttttttttttttttttgtaagtcagatgttcatttattaaatacaagttttgaacaaacactgccaggcaagtttgacaagaagtaaccttcctggaatgtttcaaaatacagtcgcgttgatcaagttttatttcaatcaaccttttcattttctgtttctaggttcatttcctgttgagcagttagagcatgtgcattatttcctcacatgacatcaacagtgcagcatcagcctctggcatgtaaaggcacccagtagacttatgctctgtgcaatggctgcttagcaaccaccatcaaataaagtaatgaagcttttgtagagtgtgatatcaaatagcaactggcaccttcacttgcaccattaaaaaacctttaacatttccttcagttttcacatatccattaaaaagtatattaaaaaacaaaacccagactgcttgataaaacatacttaaacaattttccaagtttagtattagcctcttggtaagttatgagcaataccagagctgagtaaaagagtcttcattttgctatcatactccagcaaagccaatacacaaaactaggtatgttagaaagtctgctctactagatttagagctgcttctaagttccagacaaaacacctttttaagcttccaagtgtatatacacacggtgttgtaccaagataactttttaaagtctaatttttttggatattcttaaattacttcacagaaagaaaaaaggcacagaggacacttggtttccttaccagtagtggccttaagctacacacttgcttgtgcagagtttaaagatattcagcagcattaatggtgccatagccattcataaaaagtttcaggaaaagagtttaaaaaaagaagaaaagcttgccagaaaaggcttacaatctgaaggttaaatacagaagaatacagacaaagactggaggcagcatgggggttgttaactaggaagctgctgggaatagctgccttctga

SEQ ID NO: 338004 - DNA, 1000 bp, Homo Sapiens
tttttaaacaacttctgtcactatttatttaaaatgttaaattgtacatttttcataatttctttaagagaatcttctttggtgagtttaaagtgagagtacacaaataacttagtggctaaatgatttaatgtcagatgacttaatgaccagtttttgcccttgatccagccccactctgatattctacctcctgtgtgcttgtcttcattgtccccatattaaaatggtgactgatacggaattctggaaaaatctgatcgattaattaatgtgaatatgcatgttttccttagattctaatatggtctttcttgtgtaagaatgtggatttctaatagccatataactcaatgtttctcagtctgagccctattggcatttggggctggataattccttgtttgggggctgtcctgtacactgcgggatgctcagcagcatccctggcctctacccaccaaatgtctgcagcataccttcctacccgacccagtgtgacaatcaaaattgtctgtagatgttgccaaatgacttttgggtggaaaaattgctctcgttaggaaccacttatgttaattatggaagaatcttttttttctaatgttatttgcatctaaatttgcataactcatttctaataggtactcggatttcattcgtaattcagaaatagaaaaacatacaatggtctttttaacctgtcctagtggtgaatatacatggtttccttcgcatttatatgttctaatggcccagaaaaaataagaatccagacctctctcatgtaattgttaaggatattctgagccaagccagatttcacatgcatttccattccatccatcccagcattcacagtttccacagctacatattccattccctgtacaaatgagaccatcatgtttgtcgcagtctctgtcatcacagtcacagaactccccagaaatataccactcttcagcagaacaaatgcacttcccacaatgacaagaac

SEQ ID NO: 338005 - DNA, 1000 bp, Homo Sapiens; identical to SEQ ID NO: 158443

SEQ ID NO: 338006 - DNA, 1000 bp, Homo Sapiens
tttttttttttttttttttttaatctatacaaattttattttgatatcaatttgtatggaaacaagcaggtgtcagcattatgcaggcacagaaaaaagggaaagaaaaaactccagtgataatttatcttgtatttatatcgtttggtttcaacaaggacaggaagttttactgttagcttcctgtgggaactccagtttctgcaccttcccctgctgcctctcagcatcacgatacagcagggatttctgggccttcaatcggcaagccaagcacatgaaaatcgactccacgttctggctctctttggggtccttggccgatgtctcaaacaagagcatgttgtgggcatcagcaaatttcagggctaagttggagggcacctggatctgttccctcaagtcacacttgttgcccacaagcactttggggactagtgggggcacagcatgcccattgcattcttggatccacattttgaggttggtgaaagatgtcatcttggtgacgtcatagacgaagaccacggcatgtacgttgcggtagtaatgctcgaccatgcttttgcggaaacgttcctgacctgctgtgtcccacacctgaaccttgatcttctcgccctcgatttccacggtcttctccctgaagtccacgccgatggtggcttcagtcttgtctgggaaggtacccccgcagaagcggaaggtcaggcaggtcttgcccacgttggagtccccaatcacgattattttgaagatgcgaatctgcacgtactggtccagcgacgagtcgagctccagggacgccaggccagcggccgaggcgggctgcaggctcccatggcccaggatgggctgcgccatctcccccggaccgaaccggggccccaaccccccttgagggctccacacaaagagaacgtccacgttcgtgcgctcgaggcgagcgagctctgtgcgtgtgtgtgtgcgcgcgtgtgtgtgtgtccgcccgtgtgtg

SEQ ID NO: 338007 - DNA, 1000 bp, Homo Sapiens; identical to SEQ ID NO: 309581

SEQ ID NO: 338008 - DNA, 1000 bp, Homo Sapiens
ttttttttttttttttttttgggaagaacattttattgctaagcatatccttgaacgaaaatgcaaatatgaactaagaaaagaaaaaagaaaaagcagtaatgtcacaacatcattaaataaattcctttaggttctgctaataaaacaggaatatgatagaagctcacatagagaatgcacatgttcccataaaattgtccaaatagaaacttacactgaaaggaatataacaaatgtattattacttaaattgaaaaaaatgaaagaaagcaggaaatcaattcacaagacctcaagactccaagaacagcaatcttttacagacatcgagatataatcaacttcgtataggctgggccgtttaggttatctaaaatcgtgctttgatatctctttataatcctgtcttttttaatgataacaaaaaaattaaactcttaacacattgaaatattagataatgaggaacacctctttccacacacattagtaaaggctaccatttagattgcactttttgccccatgtcgttaagatattttttcaaagtcaaatattcatgcaacttacaaagaccagcaagagtagatttctaaatctaagcagctgattgattttcatctgtacaaaagaaattgtatatatgaccctccagaggacacacttcatttttgtgtgaatatttgtcttgctttgtctcttgcttttcggatagctatggccatacaaccagtttattgtttttctgtacattgtttcctctttacaaaaagaaaaagacaaccagaatataaaccaaacagaaataaacaggaaaaaaacatttcttaaagcagtatgtacataggtggctaaggaattataccagcaaaaatgtagtaaaatatgtaaacaaaatctgaagtttttttttttaattctctttgacacagttaactgtgacaaaactaaaattcacactttcttcacattttaaggtttgcttttttgttgtttt

SEQ ID NO: 338009 - DNA, 1000 bp, Homo Sapiens
ttttttttttttttttaaattcaacaattttattaaatataaattgtctaaacaccaattaaaagacagatatttttagactggataaaaattatacccaactacatgcagtctgtaagaaacacattttaaatacaataatatagatatatttaaagtaacatgatggaaaaagatataccacaaaaacactaatcaaaagaaagttgaccaggtgtgatggctcatgcctgtaatcccagcactttgggaggccgaggcgggtggatcacaaagtcaggagtttgaaaccaacctgacgaatgtggtgaaaccccgtctctacgaaaaatacaaaaattagctgggcgcagtggcatgagcctgtagttccagctacttgggaggctgaggcaggagaattgctcatggtagaggtagcagtgagccaagatcacaccactgaactccagccagggccacagaacgagagtctgtcaaaaaaagagagagagagagagagagaaagaaaaggaggaaggaaggaaggaaagagagagagagagaaagaaaggaaggaagaaagaaaggaaggaagaaagaaaaggaagttgagtgcgtatgttatttttagacaaagtagacttcagaacacagaaaattatcacagataaagaaggacattacataatgataagagagtaaatgcaccaataagacataatactaaacatgtatatatctaataatagagcgctaaaatatatgaagcaaaagctgacagaactaaagagaattggacaaatccacaattgtacttcaaagcatcacaggaccattaatcctgaaatcttgacctcagtttctctcaggcctcttttggcctcagttgactctctctgtgcctctggttccacaaaggaataaccctgccccagagagtttagggtaactgtgaaagcgtgttctgtaaggagcccaccccaaccagatgtgagactgtgagcatagccagacttta

SEQ ID NO: 338010 - DNA, 1000 bp, Homo Sapiens
tttttgtaggtacaataaatctgattgatttttattacacatcttagtttagaatcacttttacattcctagacaaagagatgatacaaataaatatcaattgtaaaacttagagccccaagtattgattggcgtattctttgtctaaaggtagccaaagagaaggtcaagatcagtaataacttcaaggagccatgaagcccactgcctcctgcctgccccaggatcactcctttcataaataaccccagaagcatttcattcaggaaacaagggcaggcagaaaggtgacagatttctgaacagtacaaaacaaagccttgcgtgatagacaatcaccaggcccactattcttagccagttccctcagagcatttttagtatggcttttagagtatattaacagccccattttcgtccactgatggggttcagatggtctgaggtgttgtctccagtacgcctcaacctcaagtgggaaatgtgaggcagaactgatatccatgttaacagggaatcgacacttctcagaaacttggcaacgattctacattcagtgagggaggacttgtcagagtcagacaggaaaagcagagagcggcccacgccccagttgcagcactctggcgcccttggtcatggaggtgtgggtggagcaattcaagcagcatgcaggcattggacgggaaataatccagcgttaggtcagtcttaagaaagtgcttcatgcctatgatttgtggccttgggttctgaatccaggggtctgagagacatgtgacttgaaaatatgaagccagatacattctccagatcagagtaaaagggggtctattgggggttgcatacacagtctcaaactccttctcctgatggtcatcttagatcctgttagacttgctttctggctttgctagctgctgccggcatgaaggccctcagacggctcagaacattctaggtatgactagagacatgaaaacctagtccctcagtgggc

SEQ ID NO: 338011 - DNA, 1000 bp, Homo Sapiens
cagagatatatatattattttattagaaagaaagttttcaattgcagcagccagagttaaggtgtagattaaccaattttgcttccataacctgcccacataatggttcttattcatgcagcagtatatcagtgatattctatttgataaggaaaggttcatttctttagggactaaaatcttcttaaggttacctgggagcaagatctcaatgaagcaaatcaccccatttgtcatcaataccttggcacaaccctcttccttcctgcttttcaatttgtcaataaatatttgctactgtatgcacgtttggatcttccagcatatctgatggattgctgtggattcgtgtgtgtgtgtgtgtgtgtgtgtgtgtgaaaatagtgaatgtatgtgggaatgtgagtatttcagggagaaaagattataagatacatatgtatatatgtgactttctaattcacacctttcatacaagtactaaaacttaattgcaacagaatgaaggctgtacatataagaaaagaagtagctgagtctttgtatatacattcatacatatcttccttagaataaacactacactgtaatttctttaaaaaataaaagtaattgtggcaatttataatggtggcaaaaaaaaagaaaaacccaactgaaataattgttgctctgatgtcataaaactccctatacttagcaacacttataacattgaatttaccaaaaatggctgaagagcagagatatattttgcattttctatacaacaggctataaaacgtcacttatcacagtccagaaagcacacagagatggattttatataaacatatgtaataacataataagcgtgcatgaaaatttcccaatgattgcatctatgccctcttgtttttgttttgaaattttgtgtgaaaacgtgccttatatttcacatttttgaaaataaggcctccatacttttttttcctctctcacaaccagaaaggggcttttt

SEQ ID NO: 338012 - DNA, 1000 bp, Homo Sapiens; identical to SEQ ID NO: 158445

SEQ ID NO: 338013 - DNA, 1000 bp, Homo Sapiens
cggcaaaattatgaatacttatttacaaataagacattttccattagcatgacacatgacagttttcatgataaaatcagcatagaggagtatgtgcaattttgcataagtaataaaaacattcaaactatcaatgccctgatagcacgaataagttccaccaggcatctcttttgactttacagttttttatttccttttcttcatatatccttgatgttgctgagaagaaactgaactttgcacaacagcaagaaaagtctagttagtcgcgggtacaggctctttcttttttttttttttttgagacggagtctcacgctctgtcacccaggctggagtgcagtggctcgatctcggctcactgcaacctcacctctcaggttcaagcgattctcctgcctcagcctcccaagcagctgggactacaggcacacgccaccacgcccggctaatttttgtatttttagtagagatggggtttcactatgttggccagaatggtctcgatctcctgacctcatgatctgcccaccttggcctcccaaagtgctgggattacaggcgtgagccaccacgcccggcctcaggctctttcagagagcacagtgagtgcttgcacaaaactctgcttttgaagcaatccactgacctggtaaagatcaaagtacaaacttgcatgtttattgattcggcaactctgcttatggagaaatacatgtactagtcaccagtacatttaatattgctctgcacttaaacaaccaccacctgtcactgagctacagaagtgttgattccataaatgttcccagtgataccatgtaaggtgataccagtaaaaaaaatttccaaatggatcttttgttctgttacatggacaaatgtaccatcacttaagaaacagaaatgcagcaatttctctccacacaatagcaaagattttcttacatgactctgtaacttctacttagtccatagaaaaacagtcccttttcta

SEQ ID NO: 338014 - DNA, 1000 bp, Homo Sapiens
gccaggacaaaactccatttcatttccctgcccccctcccaactcccccactgccttccacacacccctgaggggggcagaaaagcaagtgtcaatattattctccacctgagttcccttttgcatcaactaattaccagcccaattgccaataaattactagtataaaaagttgtgtgtgtacacaggcagatgtagatagatgtatgtatatatagtcatggagtccagccttttttccttgccctctttcttgtgggcagctccagacaaaaagcttctgtcccctgaagagtttatcgggtcatgggtgccacgtagttggcagggaagaggcccagcttgttgtgcaggcggccggtccaccaggatgggttggagctatccaggacctccaccacctccccgctgtggaaccccagctcgtcatcctccagggcctcaaagtcatacagcgcccgggcccaccgcactcgccctgccgcctggagctgcactgggtctgtgtgtctccgatgcatgagggccgcattcatttcactgcccaagccggtgccacaatgcccatcatttatgtcaaggctgcctcctcggcgttcctggtggaaatggtggtgctgcagatatcgctgctgtgggggctgctgcagctgctggggcgctggggcatattgcggaggctgtggctggtgctggtgctgctgcaggggaagggtcggggggtgatccgacagcttccggttcatcgaaggtcggatttcttctcccacagccccactgaggtgtgggcctccctgggacctccggtccaggctgttgccccggtgaccctggtcttctcgggttctgtctctaaggaagatctgcttctgtctggagatggaatttgtcctgtagtagtctaccagcttatttagggatggaaacttctcagtccacagaaagtaattacccttgttgtctcgcatgaccttgaagtgttgaacgtcatcctcatgcc

SEQ ID NO: 338015 - DNA, 1000 bp, Homo Sapiens
tttttttttttttttttaggtattcatagcaatatgattattttatattttgtacaatgaggactaaaaacaagccttcagaaaaaaaagggctggttattgctccctagacctttacatcacatagaactataaaacaggtttccataaaattcattccacattgtagtcaacggatgtatgatcctaggtgttgacttctaagccaatggttaataaccttaaactctcatactgtaataggcaacaactgaaaagaagccacgggaacatgaaataatttaacaagttgatatatatatatatatatattatcaagtataacacagtcatacaaaaacatttagtagaaatataattcacacataaaaacagtctacttattttttgtcccttttatatcctattttaggcaaaatgataaaacccagaaaataacaggaatgtactagtcctaaaaactggaccttttataaatgaaacagatccgatcacctataccttctctcaaattccaaataatgaggcttactgacctgtactctcagaatcaacttaaataaattttagcttgatttggatgaaatatgtactttcagttgttgacaatccaggtagaacaagtacataaaatgattcctaagtcaaaacatttcatacaaaaggaatggttttaacccagacaaatcaagaggaaatgcactgaattcaaaaacttctgaaacaggcattttttggaccatttataaaatactaaaaagttcagaactgctgaaaaacaaaagtttatataaaataaagccaaggggtgaaaaactatcaaatgtattaaaaccatctaaagccaaatataatataactgaatatataatttagaaacaggtttaagtgcattttctttgtacaactgactatcacatgtaaaaactggcaattaattaaaatgcaattaaatacagatttgcaagccttctggccattatgtaaacatttaaaaatt

SEQ ID NO: 338016 - DNA, 1000 bp, Homo Sapiens; identical to SEQ ID NO: 158450

SEQ ID NO: 338017 - DNA, 1000 bp, Homo Sapiens
tttatttctttttaaggcaaagcacccgcaggtcaagccccgccccgtcccccagccccgagtccctgtcccaccccctttccccctcgagccccgtcagctgttccccttggcctcgggttccctggcgtcctcggcagccgggctgggagtcttcatagcatcttctccaacaggtgcgagggtctgggggctccgctcctccttcaaggtcagcccgcccgctgccgtctccttgggtagggggccctcgagactagagtccaacagcgcggcctcggtcagccccgagtcgtcatccatgctgatgaagatgcccggggtctcgcactcaggcccctcctcccggaaatccatggcttcctcagacgggggcgggcctggccgggccgacggagagggagagggggaggaagaggagggggctcccactcctcccggcttcagcttctgttcctcctccagctgccgctttaaggccttctcctgggccagtcgcaggccgatgaggtcctgagggggccggggtgctggggccggggccaaggtcaggggctccagatcatcctcctccaagggccccgcaggcgcctccttggcctctggctcctgcttgccgctggcctccaagatggtcatgatggagttagggatgtgagcttgctggtggggggtgaaggagcggacatgggccagcaggggctcccggagctctgggcacttgtcaaagacggctcccagctgctggggcggcagctgcaggatgacctggaagctctggggctttgtgcgctggcagcacttgatgaagccctcccacaccttggggtacttccacacctgcttcatgatgaggcgggacaggatgttcatgacgaagccccccaggcgggggtacatggtcagggactggatgacggtcctcatgagcagcatgggcagggggctctgctccatcagctgctgcatcaccacggccagcacctctgacgtgtacacg

SEQ ID NO: 338018 - DNA, 1000 bp, Homo Sapiens; identical to SEQ ID NO: 158451

SEQ ID NO: 338019 - DNA, 1000 bp, Homo Sapiens
tttttttttttttttttgtgttaagaaatattagttttatttaaccagttttcacagctgaatatttattctataaaaactttacagattgtacagtttatatatagttcaaactactgaacgaaaaggtaggtcccacagatgcaaaaatactgtaccaatcaatccaagataaaggcagatttacacactgtacagctctccgcgtggccggggaggtggtcagttctaagtataaacttcaaaactgtacaaaaataagaatttgatttcgctcttcatacattcaatatgattgcaagctcagaagcctaactaataataggcatctggagtctggaatcagtacccactcctggaaggagtgcacatgtctatccacacagggcactcttggacaccatactgaactcagtatattgtatagacataaaagcagaggccaagaacattaaatgttgaatataaggtagttcttttttgttttgaaaggagtttttgcatttaatagtgtgccaaaagaattttaacttattaaataaaatatattctaagtgaacctaaaaattacactttataaacataaaaatattttattttggtgaaatacatcaatcatatctgcaaacagaaaaccaaaactgtctataaagtagtatttctcacccagcaacaagaagcacttatgtagttatttttcagaagggtcagaaaaactatttaaaacccactaaagactaacttataacttagatagtcatacttaagctattcagtgattcactaatactgcaaaacaagctttcttctagagacagtggtttcttcatgttaactgggtaagaactggacgtattttaaaaagaaggggaaaccaattgatatctcagcatgaatcctaagcatatgtctggtttggggtatgctcctcagcggatttttcatcagaagtatttatcctagaagctaagtcttttgattttgagtttcccgaatctga

SEQ ID NO: 338020 - DNA, 1000 bp, Homo Sapiens
tttttttttttttaacagtgcagtgatttattgaccagactttgcagcaagaacacagcgaaggtggggcccgtacaatccagcctggcagagggtctggcccccttagagcagaatctggggaccccagtatatttccctcacagccccccaaagtccagcctcaccctgctccaggcccctcctgaagtgaggggcagcagggggaccgggtcctggaggggctggaaggcaggtggtgcccagagcggggctggcaccgggtgcatgcctgccccggtagccagcaggaggtgattcgtgcgggggcagtgggggcgtgcaggcgggcagccaggctcaccacacggaacacttgtgggcagggttcatgggtgagacctttggacagtgtaaaacccggccaaactcctcaaactgggacacactgcccagcaccctgtagtgctcaggggcatgcttgtcagtcagcacctgcaggtagatggactgcgaccgccgcttgatgcaccagttctgggcaaaggcaatgaagaagagctggtcatgtgtgtacttgagccggggaagtgggtgctctgggccgtgctcccgcacccacttctgataggcgtggtaggccagcttgaggccgcccatatctgcgatgttctccccaagcgtgtgtttcccgttcacccgctggttgtagacagtgaagttgtcatagagacggacgatgcactcagcctttcgcaggaagcggctgtaggaggcctccgtccaccagtgcagcaggttccctgagcggtcatactggcccccccagtcgtcgtagccgtgggtcagctcatgtccaatgatggtgccgatgcccccgtagttgagagactgtgggaagtcagggtcgtacagggtgggctgcaggatgcccgcggggaacaccatctggttcttgttgggtagatagtaggcattgagcgcctgtggggggagcagccacgtggacttgtccacctcc

SEQ ID NO: 338021 - DNA, 1000 bp, Homo Sapiens
tttttttttttttttaggatataattaaattctcatttatttaaaaagttaataattgtggctgttttgtttcttttgaagtatattttgtgtaaaaagtatagatagatatttctctctgtgtaataagggaagggtatatatagagaactgtaagggacaggtatgtgaaaagcaggaattataccaagaacaggaaaaactgattaatcttcctgatcacataaccaagaaaaaagataatgtgttccaagatgacgcattaatcaaatgtcatccaaaaagaaaaaagttcaaagataaaaatataatgccatgttcccaaattgatgttgtgacagaatgtcagggcacccactgacaaactaaatgaattccaagatgaccagtgtcagggcgtctatacaccatgatgccccagctcagttaactcctgtaagtgctgaaaagtatttacttttaaaaaagagggctagatgaaatgtggtctcctgaattgaatcctagaacaatgaaagaatattagtggaaaagtggtgaaatctgaatattgtgtgcagtttaattaacagtgattgtaccaatgttaacttgttagctttgacaaatgcatcttgctatataaaatgttaacattaagggaagctgagcaaagagtagacaggaactttcctcactatctttgcaacttttctgtcaatctaaaattatttccaaattaaaagtttattaaaaagtggggagataattaagtatcaacctatgcacacagaaacacaacacttggctgtagcaatgttctcataacagcaacagagggaaatacatcaagtgtcatttcaaaaataacccaggggtaaggaaggaagtagtgactgggagaatggctgagtaggcttttgtgtgctacaatcttctatttcttgacctgaattgatggttgcacatgtgtgttcattttaattcactgaactatattttttggtacattacccttcaa

SEQ ID NO: 338022 - DNA, 1000 bp, Homo Sapiens
cgggaaacaatcacacggtttattcattcagcagactttactcattagttttcaagtctttcgcaatgccaattcccccaaaattaacaatgtctctcaaaatccaagaaataaaatgtgtactgtatttacaaatataaaatttaaaaattttaagattataaaaattgaagaattacatcatctgtcaggtgagagtgtcaacctgcaaaagcaattaacttatttttaaaaaaagaaattggagaatcaaccatttaagcatgattttaagttcaagaattttcagatgttattttcttacatggcttccaactaattttatacagtaagttcaagtccatagcaaaggtaataaaactgccagttgaccttgatagaaactatggaaatttataataaaatttcaagtcattttaaaaagaatatgaagccttgtttgctcctacaatgcaacaaaatctagattccttttcttgatataaatctctattattctgaaaatctaccaagagatttatgtataaaatatttgtaataactgttttacatgtgtggtgcctttaaaataatatatctgaagactaaatatgtcattaataataaaaaatacaaacaaaaacaacggctagaataggaaagactgaaagtgccaatgacaagtcatttgatcacagatacctctatgttcctacatagctctaataagttgttatgaatatgaacaacatgtatcttacttgatctcttagagacaaaaatatagatagggagatgggagttataaggtgtcaacagattcatcatttgaatcaaaataaaacaatctgaatatcatcactgcttctactatatcactacagtgtgatcgcattcagatttaaaaggtttgagtccactctcaaagacggatatatttctactttctccacagtacagtctggcttcactgagttactggtaaagacacgggcacctgattagactgaggtgctggaga

SEQ ID NO: 338023 - DNA, 1000 bp, Homo Sapiens; identical to SEQ ID NO: 158453

SEQ ID NO: 338024 - DNA, 793 bp, Homo Sapiens
ttttttttttactgaaggaaaatatcagacatagctttattgctgactcctgcccccttcagagcccatagtcacaggcctcagggctgttctgtaagtagagctctaggaaaccttgccagtctttctcactagtaagcagggctgagactgtgggatcttccttcatggctgccatccacagtttcagttttggagtgtggtctacacactcatttaacttcattgcttccagccgttcaaaccagggccagatgaggtaatcaatcatagagatagaattgccaccaaagaaggtcgtcttcttattagtcagaacctcctctagcttggtaaattctttacgaaattcttcttttaggccagcatagtcttctttattttggcttctaataaagcttcctaccaaggatggcaccttagaaaacaactctaagatcatcttctggcaagctttctcataggggtcatccggcaacagcttcttccctgggtatgcttcatccaggtactcacaggtgatggcagactcgtagatcagctgaccctgactgttttccagaactggcaccagaccaaagggatttttcttaaagaaccactcaggcttatttttcaggttgatattgatgacttcatgcctgattcccttggccttcaggactagacgcgtcctctcagcaaacgggcagaacctcatgctgtagatgcggatcgagccctccgggaccggccccgggggcgcgcttcccttccccaagctcctggctgactccccggacatcgtggcgca

SEQ ID NO: 338025 - DNA, 1000 bp, Homo Sapiens
aatttaaaaaaagttttattaaatcatttagacttgaaagaagtcacaagttaacacacttaagtgtgttctgtacaccaccaacccaaatggattgatttcagaatttttataaataaaacataaacatatttacagtgaaaaataaaaacatgttagcaagtgagatgattaaactgttacctataatcagtttgggggaagtaccaacctacaggattacatataagacacttaagatttcattaggcttaaaaagtccatagttgaagaagttagttgtaatatatatgatccatttcttactacggcttttttcctcccaaaactagacctttcaaccaatttacataaaaagcttcattttccctttattggaggtaaaagtacaaaaagctgtaaacccaccctagaaccatctaaggaataaagctattgaatgctacaaataggactataaaactacggacataaaccgttatacagtttgtgctacttgtcctccaaaatagtgcagattcctaatttacccgccagggacaaaaatggagtcagctttttctagaaatcagtttcaaaatcatcatatctctagaaagcatatttctagaacaatacagttaccacacagggggactttccttcttctgcattataaaaatatatccattttagttctcactatatatatatattagggattgctgctacctccttaggcaaatggtgagggctataaagcttggccagcagccagtttcaagagactaacaaagaacaaagatagccctttccttaagtatagcaaaactcaggagttggctcaaattaggttatgcccccaaatccagcttaaatttgatataaaaaaagtagtccacaaaaaaattgagcgaagaacaaacttttcaagtctgcaattttggacaggcatattctaagaagtaggctattatctgcatcacctattagggttgctagcacaacttaaggctaattg

SEQ ID NO: 338026 - DNA, 1000 bp, Homo Sapiens
ttttttttttttttttttttttttttttttgcctggaagcaagtcttttttattgacggaataaacacaacattgatggtagtaggatagagttggtggcaatgtcctgtcactgcaattatgacattcaaatcagacctacataactgtggctgcttttgattctttcaactttgaattttgattatctgtacagaggggcttctaaatgaaaacgaattcacttgcaccacccctactcacctatttactgtttctggagaataacaaattttttaaaaggtggtaaggctaaaagacaaaaaaaagattaactaaaataagctatgaggtccaatcaagaatggcttaacattattcattttcttctttgaacatcttacttaagtgttttactaaggctactagctcagggttcccaccacgtgcatcaatctgtttataggctttagcttcaagctctttaagggtattacgagtgtattcaaaagaacctacatcctcaagataatgtacacagtatttttttatatctatgttttctgttctctggcgcaagatattctgcacctgggtgctttcaggccttgaccaaatagcatgaatagtaggaaatgagaactttccctctgtcagatcttcacaaaaacttttgttttcactatattctttggagtgtagattagcataatcatccctaatttggaaaaagagcccaagtgtattaagtagcggttttaaatcttctttgtaatcagagaacaactgcatgagacctactgctaatccaaacagtccacctgttttctgcagcaccatagctttatattcttcttcagtgggacaagtgtaattatccctccagtaaatatctaggccttgtccctgatggagttccaaaagctggcgggtaaaaagcttcactgcatctgggtgatcaagggttaagactttctccaagccaaggaaatacacgtaattggcagaattgatgacagat

SEQ ID NO: 338027 - DNA, 1000 bp, Homo Sapiens
tttttttttttttttataaagcactgtttatttttatgtattgaaaatgtccattttaaaagtcttcaaaataaaaacaagttagaaaatttgagcttgtgttaagaaggggaaggacagaaaaggaactgaaaggcctctacgggcagcagtttaattacagggcaacaggaacccatttatagagtattgtaaacaacacaactatggcgacactgctctcagattaacatggcttcatttcctttatattatagtttagtgtgtaagcatggttaccactctgcacaagcttcgttatccagagtaccgagggcccctcatcagaagggccaagtccccgaaacatgcatatgtactcatcactgtaaaatgaagacctttcaatattttcagcaatcaactaaagtattccgtaatcacaaaaatgtttcctatagatgcagtttgcacatttattgcaagccattgactaaccacagaatgggcagatgtgaagatctgtgttgatgttgttggtggtggtggtagtactgatgtttttaatttttaagtgaaggatgttatatctaaatggctgtgctaaaaaacagaacaacagccattcctagaaatttctttactcttcagcttccaaacacggctgtgtgtggttggctgatgttggactgcaaaaatagtccatttcctgtggatggtgtaatttctgctgtgcagcaagcagacaacagccctgtaccatgtagctatgggaccttgagactctcagtaccaaaaataaaaagggctcctcagcaagctgggggtttcaaacttcaagttttgttttttcagagacagaggtgtctctctgttacctaggttggagtgcagtggtgtcatcacagctcactgcagccttgacctcctgggctcaaatgatcctcccacctcagcctcctgagtagctgggaccacaggtgtgggccaccatgcctggcttcaagtttggtttttaaac

SEQ ID NO: 338028 - DNA, 1000 bp, Homo Sapiens
ttttttttttttttttttggatttcctttctttattgaggggataaggggaagaagtactttaaaagttaaagatggagataaaattaccccccatagatttgctagtacaatggatagagtctttatcccaaacaaaaattataacaacacatagaaaaaatttttaataggaaatattcagagattccagctgtggtatggttagcccttttctgtatggaagaaagggtgttgatctggatggcttatggacagctatttaaataacctctccaggggagagtaaaccctgttggtgatgacagctcccactatggggaggaaagcacagtgaatgtgtgaagatgaagatggtatgtggagacacaaatatttatagttttgtaaactctaaagaggaaaaagaacaccctttattacaattggggttaaaaacaaaaagcccctgtctaaaagagaagactcccatctgctgtagacagaggaaataaacatattgacaggagttcaatagaaattactcctaaagtccagttttgatgcaacagcttttgtctgtgtcctctgaaacagtgaatccccaaatcagattagctgtccaaccagaaccagtcttggttgatcagtggaataaattattgttttgtatggatcttggtatttgcatgttttctgaaaggacaagagggccagagtggggtttttaaactagtagatgaatccctgaaaaattccttctcacaatgtcctattgcactccatgtgcttctatcagatagatgcttggtctctacctactgaacctacaggctcatgtctcgctcacacaacagttcctactttacttcctgtaacaactgcagtgctttcaacaagaggaaaacaataataaaaatagcaataatcaaaaaggtaatctacattattaacttccttttggtatattacagtgatattttctgtacatggcccagaactaagttccctatgtacataga

SEQ ID NO: 338029 - DNA, 1000 bp, Homo Sapiens
tgcaattctgcatccctttatttataaacgagttgagaatggtgtggtccatttgagagcaagaatgggataggagcaggggggcagggggcgcgcagagttgggggaggctgattccagtagttcgcgttattcagcaccagagtaaatgcttgggcataaggtcgtgctttaacccagacaggtcttgtcttatatgtacagcatagtcttaagtatgtatgctctacttatggctttgtccctggacacatcgcagtgacacaacagaggaaaactagaaagaagtctagagaggagaagttgcaaatgcctcatgagctatttcttttttaaaaatctgatggccaagactagtgctgaacggatgcctaagaaacaggcacatctctgctagagacgggctcatctgcttcagctgagccagtgacaccgtctcgcatctctccctggggtatgactagatgctaaaataagtactgaagacggagagaaaataaatccgtgctcttcctgtccctccctcagggggtgaaataacagtatctagtagcctaagagcaaaactgaaatccctaagctgtgtctcttccactcagaccaggttagaagccaggccaatgtctcacgtcctgctcctcttgagcctggcatttctttgccttggtaaggtcctgacacacaggagcatgcttgccagaagcaagtcgttcagtgtgacttatggcacagcaatcccacccttgtttcttagctggtggaggggtgaccagttcattttagggtccccataagcagctaatatagaagtgctgaaatgaagcaaccagagaggcagggaccccatatcctgcatgggcatttgctaaccttggttgtgcgtaaaaggaacccttccctcttcacctgtcagggggtgagttaacacttgaaagggagcggaaaatcggctggacgccgtggctcgtgctcataatcccagcactttgggaggccgagg

SEQ ID NO: 338030 - DNA, 1000 bp, Homo Sapiens
ttttttagtttagcaccatttattaagtgatctcagctgttgttgtagctgctgcgtgtcagcctgttcttaaaacataaaatgctcttccaattcctcttgtccaggacagaaggatcttccaggtagcacgccaacagaacaagagactccgatgacgccagcttcaatgatggtgccatccagagagggagagggtcatggcacattcaaccgcggcttccagaggttttgaaaaaggagcctttgggggcccagcctgcctggcattttgatgctgtcggtgtgagttttgtattccataatggtgttgggaggtaggttaagcactcgccgaagtgtgtcccggattcgggctgtggttgcttggtcactggcagtcttattccatattgaaataatgtcttcctgaaagcggacagacaccacagccccacagatctcctccccaaccatgaactgttcccccagcatggccaaaatgagattctcccagcaacgggaggccaagcccttccgcagccgaataatccacttgccaccatttttatttgcatcatcctcccacatgggtttaattccttctttgaagagatggaagtcactgtggcctgtcaggtccccaggacgtaccatgtggctataaaacctccagaactgctccacagaggcaaaggtgccaatctgtttgatattctgttcatagctctgtgagctcgtgggacggccgggggttctcctggagtaccaaaaagtgtagttgtactgcaggggatgctctgccggtccagggacaacagcctttctcttgctactgctctgattcttgtctcgttccgttttttccttctcaccatctttctgtgtgctgttttcttcattctgatcatggtccccactgtcatcatctttcaaagcgtcgaacttgttgttcatcctctcgccgccgctgtcgccactgcctcagggagtgacttccgctccaccgggtccctcagcc

SEQ ID NO: 338031 - DNA, 1000 bp, Homo Sapiens; identical to SEQ ID NO: 158454

SEQ ID NO: 338032 - DNA, 979 bp, Homo Sapiens
ttttttttttttcagagctttgggggaatttattgagagcaggttttgcgtaccaaaagggtgttgggcttgcatctgtcattgccaggtgtcactgctggtggtctctttactgccatcagttggtcggccagactgcaacaaccacgatagccacaagcagcagtaaaatcaccatgatcatcccacaagaggctgactttctgtccaccatgtttacccgcctggtttcattgcgaagtttttcatctgtgttctccactaggttggcaaggtcgtcaattatctcattttgttcatccaattcattcccaatttcctgccccatttgtttttggcgacttatgatagaggaaagggcatcaaggcctgcatcctgttcttggataattttctgctgctgttgccggatttcatcaaaacccaagcctctggtctcctctggctcctcaaagagccaagggttgggtgctcctcgcttagcctcttcactcatcaggctggacctgattagatctggttcggcaccctcattcttaaaggatgccagaagtagtctctctcgagttacaagatcatccaagaggttctgtcttcggtccccttcaagctgtgttatctgatgtgttgacacagctcttagcaataagtccttcaaaagggcgatcttttccttcaggttctgcaacaaagctctgattgtcacggtaagctttggtgccttttcaccttttcgttcatattgatttcgttgttgaattttctcagcaatttcttgggcaatttgacaagtagaatcgtatgtggagaaccaggggtccggtgccatcctgcagactccgcccgccgctcggactcttcctgctcttagcagctgactacggcggcccgcgcggctcactccccgcagttcgtcccgtgcgcgaccggagcctggagtttgcaaagtgagtagctagggcctcagaactataatcag

SEQ ID NO: 338033 - DNA, 1000 bp, Homo Sapiens
ttttttttttttttttttgaggaaaactaaaggtctttatttaaaatctggcattgtattaacatgtaattttatactatgtggtattttatacatttcctcagtagtgatatttggtaaagcagttcatacagcttttttctaagttccatgaatcttacccagtgtttaccgaagtatttaagcagcatctgaatatttccacccagcaatgttaatttatctaggaaagttcagaatttcatcttcatgttgaatttcccttttaacttccgttcatagacatatatgtgacttccaattcgaccctctggcaagtgagtgtggaagaaaacagcagttcttttataattgcttgaaattaggaaagcgcttatttcctcttccaaaatgctgaaggtgatcaagtgagtaggcaatgatgcatcatcatgaaactctctatgtaaccagtttaagggatttaggtaaaatacatctgcttcatcaagataatgactttttccagtcaggtctggcgggcactggagaaatctcatgggaagtgggcagtgaacatggctgtaataaggagtagagtggcaaggcatcattataaatattgaagctgaagatttattgggattgttgtaacaaactttttgaatatgactcatgacatcaagagtacctcgttgatgaactaaaccagtataaagggcgaggaacaaatttgataaaaacaggaaacttagagctggtttcttccatgttttcaggtgggttaatgagtatccacagaacaccatacagaatggtaaaactggataaataaacctgaattctttgtggctcaacatgctataaacaagcagtgtccacagcacagtcaccaaaagtatccggtatctctttggtgctagatagcagccatgaataaagaagggtaagtgagtacccaagataactggaaatccttgactgaagtaccagtgccatggatgagaaccataaaatgttc

SEQ ID NO: 338034 - DNA, 1000 bp, Homo Sapiens
tttttttttttttttttttatttcttagtgcttttgattttaattcttttggcatatctaaatgtcagaaagtgaatatatacatacagaattcaaaacaccttcctaaaatggttattattggccagtcatttacatctttattttgaaagtctgaattgtcaaatagttctaaagtgcattcttgcagctaataaatagcagcatttgtttataaaaccttaagaaattcagaccagggctggagaagtcacaataaaaaatcagacatgatctagatatagtcttccttaatcatctaagacaaacacttgtgtgaattagtttataagtatacatgaaatatattttaaaaaaacattataaaaaattcatacagtgatgaaaaaaggagtcttcctctgctattaatattaaatatggcaaaacatatactatacaaggtttgttgaatactagttgtctttggaaccatagggaaagctttgctctgggtcagtgtatgatgtagctgaggtccgtgattttcaacaaagctggagttctacaagatgacctggaagactgcttctggcatggctttcgagaaatcatccacacaaatgaaaatgttctttcagtactgggactgtcagttcatggctttttgcgcttgggttgtgcgtgatgctgatatccaggtcccagctgggatcctgctctcatctccacagccacagaacaccttgtttctacatcggtccattcagactctgcaccatctggttgggcaggtgctactgtggaagatcttcgttttcgactaccatttggtgattcttgctttaaagtctcaatatcagtaaactgaacagattgtccaccaccccttgttttataaatatcacccttaattagtttagtttcaatctccccatcggaggctagttcctggtgggtcagcatgtacttctcacacttagctagtgccttttcatttgcaacagatactgtgatggca

SEQ ID NO: 338035 - DNA, 1000 bp, Homo Sapiens
tttttgtagagacagggtctcatcatattgcccaggctagtctcaaacttctggcctcaagtaatcctccagcttcaactcccaaaagccctggaattacagggataacccactatgcctggcctaaaaaaaagtcttttaaaagttttttcaaaggacactattttaggcactaactgtatttggaaacacttcccagctcactcatttctgggtctggtattttcatttgctacacattctttctttgcacatataggcaatttattgagggtccattgtgtagatgacaagatgccaagtgctgagggaaatgaaaaaagacagaaagtcctatgcaagttatctttgcatggtgccaaccacagcaccatttgcaattagatatattacaaacattctaggaaataatgggtcttatgtatttgtcaaattagaccttttgaaagaatgtgagccattgaatctgctagtaagggcatactgtatgttcacattgtaggtatgagcctggtgagtagattataaacaaaggaaaaaataagtggttgtcaaacccaaaaattaagaacagacagaagcaagaatccctaatccattcttagctgagaacatctttgggggtaatcttcccagctcctaaatataaccctcgggattccagacatgctgacttttcacatgacccttcctatgttctgtaatttgaggcccccaggtatacagttggtgcaaggactatgacctcttcctccttggccttctttttggcatcatccaacttcttctttttgctttcaggcgtgagatcatctagccagctcagctctcgcttagagaaacagagatccatgactttcctgacaaagaccaaggccaaaaccatcattgggaaaacaatggcagctggagatgccttgatgacccagagcaggacgagacaggtcaactggatgagggtgaagaggtgcactttgcgcagcggcacatgccgcaggta

SEQ ID NO: 338036 - DNA, 1000 bp, Homo Sapiens; identical to SEQ ID NO: 158455

SEQ ID NO: 338037 - DNA, 1000 bp, Homo Sapiens
ttttttttttttttttttttttttttttttttttttttttttttttgccatttggatttttttattctctttttaaatactgtacagtgaaaaataaatacgccttctcatccaccagacaaggttggtcccctccccagggggaccttgtcaccccccttcatacacacccctggttctactccaaaaccttccccgtgcctcccacccacttatctcttactatccccgtcttccacagtgatgaggccccagaaatggggggtacaggatgggaggagggatagcaggggaggccccctgaacggtcaaatctgggtgggtcgaggagcaccccccaccaacaggtggagaatgggggtgttcagagagagattggggcattagaggataaaggcacatccagtctgatggggaaggagagaggctccccttaccctgggggtagggtggacaagagggagggggtatgaccctgttacacacccctccactagctcctggaggttggggggtacccaagctgctgtgccacccccctcccccctagataagagcagctccagcgcaggtcagttgggcctgtgagggccatggtgttgggcagcaagcgagatggagaagggaggggtgcaggttggaggttttatgaaaccccattcaccatactacccaactccaagggggcggagagctccccattctccgaggggcccttaggaagcttgctgacagagtcacccttctgtcctgaaagagagtcttctgagggtttagtgcgttccaggggtgcgctctggcggctctgagactctgctcgtgagatatagtcagccacagtcactggctggcggtctccactgatagagccatcagtccgattaccacggttacggcggcggcggctgcgattacgacgttgaggtcttgattcatcttccaggccattctctgtcatgttgggcccatctgattccaggcctccatccatgacggtcct

SEQ ID NO: 338038 - DNA, 1000 bp, Homo Sapiens
aacaaaaacacaacatcaaattcctttacttctgaggtctcccctttaaggggaggcagaaatagaacattctttatcggggagggaaaggggtttaataaaaactggtataattagttaaatactgatctcggttaggccctctctgtgttcatgggcccagtcttggctggctgcctccccccagggagccccccctcaccccggggtctgaggtggcaccaggagggggctgggggcggccagcaccagcggcgtcctgctcagcccctctgcagggagcgagcaggcaggcaagccgctgggcggtgggacgtcaccaccgcaggaaatcgcgaatgaacttccagagcttggtgacccacaggttggcgccgaggtccatcaggtactggatctcgggcgtgagcatgcgccggcagagctgcgcgtgccgctgcccgatgctcttcttgaggttgtagcccaggatggacttggtgcccagcggctgccagggctgcatggcctcgtcctggatggcggcggcgtccacggcgtggcccccgtcgatgcagatggtccgcatgcgctcgttggcatggcgcagggcggccacctcgcgggccatgcgctcccgcccgaaggcctccaccttgcgccagaagctggcgttgaagtggcggtagaggtgggagtccagcatgttccaggcggtggcgcgcccatacagctcccccgagagccgcggcacgggcgagtcgcggcgggcgttgagcttgaagtagagcacgtcctccagctcccagcacagcaggtccttcagcagcaccagcgactcgtcgaagtactcttgaaggagcaccaggtggaagcgacgctccacctccaggatgtgctcctgcacctgcgggctgctggggtccaggctgttgtcatagcccaggtcgaagaagagcaggtttcggaggtagtgggcattgaagccgttggggtcgtagtagcgatccgggtcttgcag

SEQ ID NO: 338039 - DNA, 1000 bp, Homo Sapiens; identical to SEQ ID NO: 158456

SEQ ID NO: 338040 - DNA, 1000 bp, Homo Sapiens
ttttttttttttttttttgcattctttagggtcagtttattataacttatcctaccagaaagaatcacagtttaaggccatttatcatgtgcactatgtagtaaacaaaaccttgtccccagctccaccaagccactcccaagggtggactgtgaatgtgacacttccagactcaccagagattagaaaaaacatttctattagggtcttaacctagcccctttggtttcctccctagaaaagagctgcttagaaaacagatgtcactggaaatgacaaaaggaacaacagtattttctatacattaaaagcaaagggatcattggctagcactagcatttattctgtgtgatagggaagccagccctctaatttggctctctggctgggcacatggcaatggctaggggcctgggcacaccttttttttttttttttgagacagagtctccctctgtcgccaaggctggagtgcagtggtgtgatcttggctcattgcatcctctgcctcttgggttcaagcaattcctgtgcctcagcctcctgacgtagctgggattacaggcatgtgccaccatgcccggctaatttttgtaattttagtagagatgaggtttcgccatgttggccagactgttctcgaactcctggcctcaagcaatctgcctgcttcagcctcccaaagtgttgggattacaggtgagccactgcgcccagccatgggcacacatttcatgtggataaagttgaggcgagaaaaagacatgtttttctccacatggaaggtattttttaaactggtttaatgtattaagatggctgctgggcactgagcatccacgtgaagcaagtagcagggtatctgtaggttctgggactgaaaaaaaaaatccctgtaagttcttggcttagtagccaaaaaataatctttgctttttatacctccccattcacaacccctttgggctaagctgatttaaaaaacatttttttcttagat

SEQ ID NO: 338041 - DNA, 1000 bp, Homo Sapiens
tttttttttttaacagttcagacagctttatttttatcaccagagttttaaataaatacacagttccatcagaccagcccccgagtccccaagaaggtcaccccaataaattaataataaataacagacttatataaatacagctgtttgggcaggaatcgggtgtctcaggaaccttgagcccattccacagggcaggacaactgaggtcgcctcccccgcgcaggtgcacagtggaaggaccaggactgctcatatgcagtggcagtctttggctaacaagtcatcataggtctggagcgacaccccggtgtcggtcttttgaatgagcaccatgggattgtagctggcgggcacgcagcagggcgctggctccgtgtcgggcttcaggcggtgcaggctcgtcttgatctgcgcgtgcatgtttgccgcccggaactggctcgggcacgcgccgatgcacatggtcacttgcacctcccgtggcgacagcacccaatcggcccagcccaggtcttccagcgacgcgcggaccgtgtgcagacggcagcaacgcccgggcccgagcggacagtcgtccccgttgcgcgcacgcgctctgcggcgccccctggcggcttgcggccgcaagtgcaactccagctggggccgtgcggacgaagattctgccagcagttggtccgactgcgacggcggcggcgacagtcgcaggtgcagcgcgggcgcttggggtcttgcaaggctgagctgacgccgcagcggtcgtgtcacgtcccacgaccttgacgccgtcggggacagccggaacagagcccggtgaaggcgggaggcctcggggagcccctcgggaagggcggcccgagagatacgcaggtgcaggtggccgccggatcccagccgcacttctggcgtgagtatccggactgcaggggccgggacgaggtcggtgttcgaatcttcccagctctggttggcccgcagcctggttagcaggtcctcg

SEQ ID NO: 338042 - DNA, 1000 bp, Homo Sapiens
ttttttttttttttttagatgttaacaacagtgttttcagaaaaagatacagcaatgagtaaaaagcactatgctattacaaatgatttacagaaacaactaattaacctaacataaatccccttaaaatgcaaaccatacataatcttaacatgaattacagaataaaatattttcctagtaaattaggtgtaaaaatccaaacttgcttttttaaatataacacccagaaaataaagaatactgttccttttttaacatgtatttctcaaaataagattcaccatgaacattattttagatatttttacatcttctttagctaaccaagtgaaaaatccaatatacacaaataggtactttcatcagtacataaaacagcaataggtagcaaggatagaaatcagaatacaagttcaattgaataaatacaatactagtacagagacacccatttttaacccacaatgaaaaatctgagccatgaataggttttccattttgaatctaacttctagatgatctgtattttgaccttaaaggggccaaaatatttaatatgggtgaagctcatgttccattacctgtaaaggtctaatgcaacagaaaaatggtcattttacattggttagaatttttaactaggtctttcatattattttgtttagcacatgacagacttatacacatattttaaaaaatcaaacatggaatttctatatacatcaaacctttaacaatgtctgtctctgaattgctattatagtgttcaaaattatacaaacaaacatccagtaaacagcattttattttatgacactctgtgttaatacaataaatatacaaaacttccaacccactgaaacatgcaacattagagggacacatggagggcatttctgtagaaccatgacagtcaccatgatggcagcgcagtattagttactgacaaaatatacaaacatctctagataaataatccaagtcccaaattacaaat

SEQ ID NO: 338043 - DNA, 1000 bp, Homo Sapiens; identical to SEQ ID NO: 158458

SEQ ID NO: 338044 - DNA, 1000 bp, Homo Sapiens
agagaataatactatatttgtaaactgcaaataacaaaacaaaacagaagtccaagaaggctaaagtctaagctataattacacatgaagtatatgttgaaagcagtcacaatgtacaaaaatgtgacaagatatccagatgtttaaaaaaacacatcctgtttgtctcagattatatccagtttcatctggtaggtttctgataagcctgttgtgtgaagtgtgtttccctcctgctggtaagaagcagcttgtagatatccataaattttttaaggagtgagtctacttggcaatattggtaactccatagtttcctattacattcattcgtctgaaaactgaaaacaactcatgactaaaatattcttccattcctttgccagtttttcaagtataaaatcaaaggaaagctggaatgtattgcttcttgtcatcaacaggcatttcaaaaagagggtaattaaccaaatcaagtgttctttggtcaagttagtaacaggcttccactttgttctaaatcctttcataatccttttttttctaatttttccagtatggcctgaatcttacaaacagcctcttttctggcctgccgtacagagtcctggcccccagtttcaactgaatccagttccaaaagttccttggttagcatttcttccagaagccagtatgctttgtctgtcttttttcctacaaattcttctacttcttgttcaagatactggaccttctccagcacatgtatgatttttttaatactcggaggagtactttcatctgaaggtacacattcttcaggaagactgctactttgatcttgattgttgggatggtcactggtggcattaccatacagctgaggctcagcactatactggacttgggaatccaaaagatctgaatcatcattgttcactgtccccgaggattcgtactgatggacactgcaaggaaagttgtgccggttcatgctttgatctgattggctataggg

SEQ ID NO: 338045 - DNA, 1000 bp, Homo Sapiens
ttttttttttttttttttttttttttttttatagagacggggtttcaccatgttagccaggatggtctcgctctcttgaccccgtgatccactcgccttggcctcccaaagtgctgggattacaggtgtgagccaccgcagccagcaaatctttcttacagatataatgatctcgaacccgggcaagcctcacaaccttctttagcttctcattccggaagatttctctgctgaaggtatccagccgggggttggcaactctggccacctttttaccttggacttcctgcacctcaataacaccaggtgagaagcacctgctcaactcctcagctgcctccccttccacgggctcaagcagggtgatgtctggcaggagcctgtaactggctgttgccactggtgaaaacttggcatgatctttgccaatgcccttgacacagtgcatgagcaggtcaatttcttggccaggccgcagctgagcgatgaggatatcatcatgcactggtcggatagtgccctctggaaagagatcagcctggttccccagggggatccatgtcatatgcctggtatacactttgtggttcacgtacagttcgttggggtcagaggaatctttagcagcatgggggttccgagtgcatctgacctggagacgaaactgtagagtatctatctctgtgccttcttcatctccttggttccgatactcaaaaagacggggatcagcatgaatgggaatgagccccagacggtgagcaagaatctcatcctgaacaatggatgtattattgtacaccaggaccttctccacagccatagttggcacctcagctagcagaattcgtcgaaaagcattggcaatggctgcgtcaattcccaccatgtcaaactccagtgagttttcatccatgtgtactacatccacacggaaattcttctcgaagcggtcctggtcccaggcatcatcataaccggaatagttaccgggaaagtc

SEQ ID NO: 338046 - DNA, 1000 bp, Homo Sapiens; identical to SEQ ID NO: 158459

SEQ ID NO: 338047 - DNA, 1000 bp, Homo Sapiens
ttttttttttttttttttttttttttttgggttaaacagtatttattgaatgtaaagtaccccagccccatggggaagaaaattccaagaacggggaataatacagattaaatacccacctgtgcattcacactctcacacacacacacacatgccacgcacatatccaagctccaacggtgacaaatcaaacacctgttttcccccagcctgagggacagctggtaggaggtggttcagaggtggggctccaggatgggctctaatagcagcagccttgtctctccctgccccctgccctgccccaggggtcaaagggagctgggcggggcgcctagaggttggcggcaactcttccccactctgccgcagacgcttcttggctctgatctcattcatagcctcttcaatggagcgtgtgtccctcttattggccacgggcacacagccgtaggtcttattggcctgtagcatgtgggctgcgtctttggctgctcccttgccgatgaggtggctgtacttgtccttgtagtcgctggcagggctcaccaccacaggcccctgctgggctgcctcctcctcttgcctctgggccagctccttcagcttccgcttctcctcagccttctgggggtcccattcctctccacgacggtaagagtctagctcttcatctgagggtgcaaactcctttttgaagatcatgacatagcgacagtcatcatcttccccaaaggagaaggatgtcaggccagccacttccaccacatcatgtagtatgctcctctcgatcttgttcattggctgaaactttttcttgatctgcccactgtcttgaatgaaatctgacacctccttctccatccttttacgaaactccactttctgttgtttctcttgctcttgtagtttcttcaggcgggcggcctgttctcgggccttgcgccgagtctcctggtcaccgaggctgggtggcttctccatggagctcaggatggag

SEQ ID NO: 338048 - DNA, 1000 bp, Homo Sapiens; identical to SEQ ID NO: 158462

SEQ ID NO: 338049 - DNA, 627 bp, Homo Sapiens; identical to SEQ ID NO: 158463

SEQ ID NO: 338050 - DNA, 1000 bp, Homo Sapiens; identical to SEQ ID NO: 158464

SEQ ID NO: 338051 - DNA, 1000 bp, Homo Sapiens
aaagctggaaggtgtttctatttggtatctttaaatgctatagatttgggattttaactaacagctttggctatagaaatgaagaacagacactgctgaatcttcatttgaatgctcaagtttcatggggcagggtggggggcgggatagctttgcaacccaaatttaagagaatcaggaggaaaacaaagcagcaaagaggcagctggtgcttactacctcttccactactacgcttcagactgacagaaaagcagctagctgctcctttaaattagcaatggttaattctaagcaggaaaagatgagctgcgaagaacagtaagaatcataaaggaaaattttaattttttcccccgactatttgtggagatgggaaataattgaaggggctggagtaggacaatgtgagtaaacagtttagacgtttacctggggcttgtcttatgctttgttgctgtcaacctaagtagtactcacagttcaccatcttttaagtgtggtatgtagaggacaggcctcaatataatagttcttcatatcttttgttagctaaatccgtatcactaggtattgccaataaataaatgaggcacaactcagatatatatggaatggcataaggtcaagaaaggcaatttgaaaggggagaagaacaatgctattgccatattccacaacatcccccttgtctgtgtacatatgctcaggtacatacatattctgacaactattcttgatattcatgggaatgtgggaaatctctactggatggtcatttagctagaagagctccttgatatgttaattactgattgatatctagtcacacttcttttgtagaagggtaagtaccaattttctttggttgttttctttttcaacattaatgttcaaagtaattgtagccaggtagaattttctgcagaaagacaaagtatatgccttaaggataacagcaaagcagaggacagagaagtcttaagaactggcttagcat

SEQ ID NO: 338052 - DNA, 1000 bp, Homo Sapiens; identical to SEQ ID NO: 158466

SEQ ID NO: 338053 - DNA, 1000 bp, Homo Sapiens; identical to SEQ ID NO: 158468

SEQ ID NO: 338054 - DNA, 1000 bp, Homo Sapiens
ttttttttttttttttttttttttttttttttttttttttttttactcaaatggtttttattttcctatctgacatttctaacaaaacgccaggtagacggagttaaaaagaatccaccgcacgaaaggtaaacaaagcagaccctcagaaactccctggcaaggatgttcccctccccagattggcccagtttcaccagcaactggtctcagctcagccttatgcctttccactgacaccccccacccctccacattctcgtgattcagaccaggaacttctcggctgattgtgtccgtgtgtctgagggaggggcacgctggaacctgggaacctactgggcacctctaatgcagatgagaaaaacttgagaatgtgaaagtagatcagtccccgctcccacccgaaggtgcagagacgcgggacattaaccagcagcacgcgggggtgaagtaactcaggccactctcctccccactgcccagggcgggtgcacgccccaggacctcctcccaggccccacacccacgcaaggcgacaggaagctccccacgcctgccccatgacgcaacgatgaccgcttatacaagtatgtcagcggagggggaaggggagtgcctggaattctccgaggttggaaacgcaaaaccaactcttgaaaaaccttgaaagggccagcacagcccacagtacaaaatgaagtccgaccctgaggagatctttaaaaacaaacaaacaaacaaaacaaaaaacacaacacccaagcctcccttctcccagtccagaaggagagcgaaaggttcacgtcccagtccactaagacagcacctgtgggcgcaggtctctgcggaaggcgcccgcgcccccggctcagactcctcggtgccgtccctgcacactgaaggcgatggctccccggggacagagtccctctccgggcctctcagcagcccgggcggcggcttctctccacggttttcgcgggcgcttcccccagga

SEQ ID NO: 338055 - DNA, 799 bp, Homo Sapiens; identical to SEQ ID NO: 158469

SEQ ID NO: 338056 - DNA, 1000 bp, Homo Sapiens; identical to SEQ ID NO: 158470

SEQ ID NO: 338057 - DNA, 1000 bp, Homo Sapiens; identical to SEQ ID NO: 158471

SEQ ID NO: 338058 - DNA, 1000 bp, Homo Sapiens
aaatagggaatatagtggaaggacagaatgaagcaaatagaggaaataaattctgtttccagctatgattcaactgaagttctctgtagaccatttagatggacctagaacaagtataacttggaaattaagatttgaagttcagaaaagaagttgaggctaaaatcttaggtttgggagtcaacagggtatttggtaacagttgaggacattagaatgaagggaactgaaaagggtattgttcatgtagaatcaaaagtacctagcacagaattaaagataaatcaggctttcttgttaactttacttaaccatacaatcttaattttaataaggcctacatatagtaccattaaaaataagcagaagttaatgtgaagaatagtaatataaaaattatctgcaaactgtaggacaactttaaatatgactatatctctgaacttatttagaattcatcagtttattagtttggaaaaactgtagtttctagcttatgaatagcacattcatcaagttggctcttcatctatatcactactttcctaaatgaaacaataagatatctggtgatttacttcctacaaagcaaagtcaatatacataaactattaagtcaactcataaaaaatacagcatgtatttaacaaatgcaacttctaatatcaagagattatcacttaaaatgtgtctatgtatgtgtgtgcttgtgtgccaggcagttttgtgaaatttctcaactttaataatcgaaattccttattgggtctgaaattattctaacagcaaaaaagaaaaaacaaaaccaaatttaagttcacaaggccatgctacttccagagagtgaatgcccttgtttagaatgggtctctgaaatcttcatttttaagaggcatctaggtaattatgatgcaaggagttcatgaactatactttgagaaacactactgtatatcagatttacattttaactaagacttttaaaaaaatgttgagaaat

SEQ ID NO: 338059 - DNA, 1000 bp, Homo Sapiens
aatatgaggacgatttaatcaaggaccatttacagaggtgggggtgtacgtgaggcagtacagctctagctcagaagctggtaacagctggacaccacacccacccccgcaaacatatcctggaggcccgaaggggcaagggaagggagctgtggagaacgacagtccaccatgggcaggttctcccgtcctgtgaagcttatgcccagcaaacctggtcttcctaatggaccccaatgctgtctgcccgaccacaggctgcatttagtggaccaggctgggggccgcagtcgggagaagggccttcctgagtacgcaaagctataactacaagaatggccactgcagcaccattggcaagagctaaaagctggacacaagccggatggcccgcggatggggagggtcaaatgaactacaatccatccacatgaaaactgggcgctgctacaggaaggaggctccttgtgtgccatcagggagaggccttggcgccagctccctaggaaggcaggctgccaggcagtatgtccagaaggagctcactctggtgaaaacaacaaacaagccatcaacactagctgtgcaggcaaaggcacagagtccagaaggaatagtcctgactgttagcagagctaacagtctttcctgctctctgtccatctgtgtgtccttccattcatccatctcttctgctggagacacttcaggggcgcagctaatgtggcggggggggggctttcaccttgtattttatatgctttgtactgtctttgttcacactaaacatacaacccctttaaaagtcatttatggaggccggacgcggtggctcaggcctgtaatcccagcactttgggaggccgaggcgggcagatcacgaggtcagatcatcgagaccatcctggctaacacggtgaaacctctctctactaaaaatataaaaaattagcccggcatggtcacacgtgcctgtagtcccagctactcgggaggctga

SEQ ID NO: 338060 - DNA, 1000 bp, Homo Sapiens
tttagcatcagcacagaaataattttattgtgatgttccacaattcatacagaaaatgatatttgctagtcatttcgggcctagggctaaaatcacttttaatcaatgacaaaaaacaaatataccacttataatcaatgataaaaaaacaaatttgacttccttactactactactagtcctttttgattacagcttatataaacatgaaatattcatttgtaataaaaaatgcgatacaaataaatctataaaactatttgctactatgtatatataaatattttttaaatggcttggatacattttgatgttagtacaccaaatgaatttgtagcacactttaaaaatgtttcttaaaatgcttacaagtacaaatatatatcttttcatattaaaaattaatgagtggattattccagacaggaaatgatatactcattttgattaacatttaataactcaaatagtattaattaatcaagtaattaggaaacttacaacttttgtacttcactttttatattataatgagctttataatagacaataagtatagtaaattaaattttaaataaatgtttaccaagtatgtataacattgaatttgagttctaatataatttctagtttaaaatatagataaaattacagctaatccaaaaattgccaaactgattgcagaaatattggtacccagatcaggaatgctgggttcctgtggaggaataaagttagttgcttgtgcaatgtttgaaacctctgaggtgacattggcttcatggatggcttgaattgcaatatagaatgtcgtaccattctctattttagaaggttctggtttaaattcaaaactttctactgaaccaggctccttaggtatcagaccagaagtatttattaaagcagctttatcaaaatcttcttggaggtccaggaaatgtttacttattcttataatgtagctctcagctcttcctttatcgaggaccttgccagg

SEQ ID NO: 338061 - DNA, 1000 bp, Homo Sapiens; identical to SEQ ID NO: 158472

SEQ ID NO: 338062 - DNA, 1000 bp, Homo Sapiens
tttttttttttttttttgaagacattggaaatttttattcatctttgctttacaacagaaccaaaagcgtcaacttaagaattcattttacctgctggtttccacaagctagttatgtgaaccatgttttacaaacaataataatattacaacaataattatggagaagttaattggataatagagcttttccacaattcaagtagaaacacagaagaaactggataattttaagtcctctaactcaagacatgctggtgcaagcctggcctgcgaggccccattgcctgcgtctcccgggggccttaggaaagactgacagttcgcgtgcctctggggaaatatctacgctacagaaaatctttaggtgttcagtagttctctagagattttaagtggtatcacaacagcccatccggagaacttatttctaaataatttgaaaaacaaacaagaaaccattagggttttcatgcagagcagcctccagagcaacattctctgagaggaagagtcgaccagagtgagctctccgcagggcctgctctgccctccgccgccctgcagacactctcccaggactatgggaacccaagctctctcctctgggccagacaaacaatgctcaggccatgcacctcctcagaaaagggggcatgggttgccacatcttcagagagctctgagtaaactccctgggcccagggatgcaggggagcctggttgttgctgcagagccagcctcatgttcccctaaacatcctttctaaactagagatttctagactaagacaaaatcaacatgcattcacactttatactctactccattttcaatcccttagatttaaactcagtgtggagaatctgtgataagcaccttccaaattcctccaggatcatctgctctgccaggcacttggagcagtgttctttctcggcctcttctccctgagcaagcaggcaggcgcatgtggcctccaccacctcccaggagatg

SEQ ID NO: 338063 - DNA, 1000 bp, Homo Sapiens; identical to SEQ ID NO: 158474

SEQ ID NO: 338064 - DNA, 1000 bp, Homo Sapiens; identical to SEQ ID NO: 158475

SEQ ID NO: 338065 - DNA, 1000 bp, Homo Sapiens
tttttttttttttttttttttaccattccaacaaagcgctttactgagggcacccactccacagtcccaaggaggcagacacaggcctgaactgtccaccctctatgtcccgagtggtgactccactccccactgctcagagatcacaccccttctggagagcttgcatcccttctggagagcttgcacggatgagtgactgtcttcaccctgggcttccccaagtccggcgacagtggctgccccagtgctgcagctggctctggtgacggtggcacggcatggccccgagcttgggagaacagcggcctgcacacacggtcacgcatcaccgctcggcggaggatgggaatatctcatggagatctggatctcaaccccacatgggacaagggcccagggacctggctttcctacacaccagctggaaggctgactccccatctcacgtgaatgcttccttggttttggggggcactaggaaggtccccagggccacgggtcactgcccagattgtggcatcctcataagacttgcgactcttcccagaggaaagaaaacccctctcagatgctccaaggactcccctagtctagctgcttcctgtgccaggcccggaccccagggcgaacaggcctgttcatccacaacctcacagctgagggccctcctgcagttcttcacaggagagagaaaggaaggcgcacctgcccagcccggccaagaaaacaaaactctctcccatgggtgcgggaggctgctgcctgcctgctgagcagctcagggcagatgtcgctatgggtgccagcattctcgaagtctcccttgcccaacagaaatctatccaaggaccaagggctggaatcggcaaagccatccgtgaagacctcctcattctgtggagaaacggcccttgctttcaggaagactgtcacaaccatgccttgggaaacgtcacctccagatcaaccttgggaaaatcttttattagggaggaca

SEQ ID NO: 338066 - DNA, 1000 bp, Homo Sapiens
aaggttattttcttctttatttattcttagtagttaaattcagtctaatggcagtgcttccatttacacgctaaaggcaaagccaatctcccactcaacatcatttgttgaattttagtttttggcaaatctcgtttctgtttgttcttgagggaaacattatagctcacattttttggttatttttatgaattcagaaaataagtgttgaatttatagaatggggacattcaagctgacccagaacgatcattaactcctaggcagtaactgtaaatttcacatggacacatctctcatagctccctgtttcacaatcaaagaaatctaaaatcaccaactgttacatatcaactataaccagtataggatattctagctacaaatatgtgaaactgacttagatgtatgttaaagaatgttttagaatcttcttgctagataagataaatgattacattagcatttcttttcagatgttatttttttaaactcatttgaaactatttgcagatagaaatagaactattttgaatgctgatctcaatatgaaatatagaatccacagaatacacaaaagtattgatgatataacattcaataatcaggatgctatgaattttacattaaaatttaattatgtagtaaaaaatagagttgttatagctagaaaaaaatattttcagaggcagcagatacccttggtggaaatgaacagttctacatagaaagaaaatccaggaagtatgcaaactagacaccaggatatgcagtatattaaatttaatcagagattacacagagtatgacataaaacagcagttgactagaataatttgcaacacatgaaaacagtttagaaaatggatttaggtcatattctctgacagtaagtttgttggaaatacaggcatagaatcagacagatttatgtgtcatctggtgctcccttcccttgtcacatcaacttgaaccgatagttttgtatggatccaagcag

SEQ ID NO: 338067 - DNA, 1000 bp, Homo Sapiens; identical to SEQ ID NO: 246451

SEQ ID NO: 338068 - DNA, 1000 bp, Homo Sapiens
tttttttttttttttttgcatgaaagagactagcacgtttttcattcagatttacccaggaggttgctgtctttcatacaaagatgaggttcactggtaggaggcaaaggtgggactagggaggtgacccgcatggggccgatggagagaaactcttcccaccccggcaggaaggggcctcttcctggccgccccatccacactcaggttctgcccccagacttgggccctcgcctacaggaaggaggctgccccaggcccaggggggtcgggcccggtgacctcaggctgcctctgcaggggccatcactgccacgaggccggggagtggcatgtccagttgcgccccagggtcaggctgtccggcctctgtgtctgggtagcagtgccccaggagaaagaccctccctggcctggtggtcccatctggccccgtactccaacccgcacgggtgcccatacatgtctgccagccgggcgaagcggggcccccagtctctgaggtagtcgtagtcctggtcctcatcgccctggctggacaggatggagctcagcgtccccgccaccgagccgtcaccctcgtagtcatagatgagggctgtgtcgtaaggcggcacactggggtcactatctgcagcctccaagccatcattgatgaagtcggcgatgtccagggggctggtgggcagcactcggggtggctgggggtgcaggcggccctgcggggcatctctgcgaagtggcggcggtcccagaggcaggctcagcgctgtcgggtgacgcagctggctgatgtcgtaggcgtcctggtcctcctccccgcctccttgctcatcgtagttgaggacattgtctcgaaggtcgtcctgggggccgtgcagcagccccttgccccgagactgcttccagaaccgcgcccggagtgccacgagcaggaccagcaccagcagcaggagggcgctggccagcacgatgaccagtgcgcccaggctgaggcctg

SEQ ID NO: 338069 - DNA, 1000 bp, Homo Sapiens
ttttttttttttttttactttcttccaattaaataacccagtttcgatcatgaaaagggcacttgtttctacaggagctgtgtccagcttcctcagttccaagtactgtttccacacttcttccttgtcattgctgaggttgtatatccacttactcaggaagcaaattccacaaggttgcaagaactgaccccctaagttgttctttcagattctatttctccatagagttcagctaactttttaaactcgggtccccagtctccaaggtagtgataatcctggtctgattgtgtcgttgctgaatccagcgagctgatagacccagcttctgatctctgaccctcataggcataagtctgaagagagtcataagggggaacgctagggtctaggtctgcttctgccagtctttgcttaataaattcctgaacatctatgctttccagggtggatgatgtctggtgtctgggagtgagcttcacttcaggtctgatatccctccggtacttgagctcctcagcagcagaaggattcctcaaggctgtgatgtcaaaggcctctgtgtcttcctctccgcctccttcatcatcataggtgaccacgttctcccgtacatcctcttctgaaatgatcaagggctcttttttgctgcgcctcagggtgataaaaagtaccacaattgccaggagaatgagaacacagagaagaatagcgattaaggctcctgtactcaaaccagccgaggacaggaaggcttctgcatggcaggtccgcacacgcccatctctctcgcatgcacaaaccctgatggtgagggtgctgctgctgctgagagaggggattccaccatcagagatcataatgggcagataatacacatcctgaacagttcgactaaatctcctccgccttgtcagaatgctggctgtgttatcttcattgtccttcagagtgaagtttggatttacaggcaggcgttcatcaagaaagaagttaa

SEQ ID NO: 338070 - DNA, 1000 bp, Homo Sapiens
ttttttgactgtgggaaaggagccaatttatgaaattaaataaagtccacaaagggagtgagaaattcgggctcaggcaccccaccccggctgggcccagcactgctggagcacagcgcaccaggcacccccactgtctcacccctctcaagagggggcttaaataggccaggccccagcctggaggccgggggtcccggggcctagggcggacagaagtcggagaagtaggggtgctgcagggcctcttctgctgagatacgctggacagggttacacttcagaaggttctgcagcagatccctccctgtggcattgagtttgggcacgacgttcaccagggatgttgtggccgggtacatcggatagggcttatagtctggcagcttggtcatagagggccactgctcctcggtgggcgtccccagcagtcggaagatcctcttcaactggtcatcgacatcattgccgggaaaaagaggccgcccagcattggccagctctgcaaagatgcagccggctgaccacatgtcgatggacgtggagtacagcttggccccaaagaggacatccggtgggcggtaccacagtgtgaccacctcagctgagtaacagcggacgggaatcccaaaggctcgagccaggccaaaatcagccaatttcagctccccattcctgtttattagcaggttctggggcttcaggtccctgtgtagcacattgcggctatgacagaatcccagcccttttagtagctggaagaggaatgactttacaatctcaggatcgaggtcaccattgcaactgtcaaaatacttcttcaggtcctggtcacagaattcaaaaaccaaagtcagcttcttgtcgctgtgcaggacgtcatgaagcctgacgatgttcttgtgcttcagctccttgagtaggcagatctcccggagggcggaactcggcacaccctcatcatcgtcatccagcctcacccgtttcagagccacgatct

SEQ ID NO: 338071 - DNA, 1000 bp, Homo Sapiens; identical to SEQ ID NO: 158476

SEQ ID NO: 338072 - DNA, 1000 bp, Homo Sapiens; identical to SEQ ID NO: 158477

SEQ ID NO: 338073 - DNA, 1000 bp, Homo Sapiens
atctgttagagacattttatttagaggcaagaaatggttaataagatgagacccttgggtctaggagcgtttgctctttgttttcttccttagagtgacagattttttgctgttggtgaaggcccttgaagactgtagtttaaattcaactggaaagtggtcgctgacatccagggcctcctcttcagtcagcttgtaagctttctggaagtcaaaaacactgtttgacttgggaacaacagaactgacgatttcttgtcctctaagcacaatcctgtcatatgcacagttggtgctcttcttcaccgtggtgtcctcttggtccccgatcagccaaacaaacctggggtcagtcctcaagcggatgttcttccaggccttcttggggacgtagctgcagccggcattgaagtcacccatgaaaatgaaattctccgccttccagcggtgtttcacgtccgtgtagacctcaaccaactcatcgatctccttaacggatgtctctggggtggtgtgcagggggataatcacgaagtctttgacagcagtgtggggagattggaaccagaccacaaagggctccctggaaaacacatctgcgtctccatcctgatagtcatggtagtgataactcctcttcacagacaccagcttttccttgtagagaaaggcatattgttctttatatgtgtttcttccaagccgagagctaatcacatagttgtacgttatgcctctccttgaatttctgttcagcttctccatcagtatggggcagatcctgttgttgctgtccttgatttccatcacgagtatgatgtcacagcgtttgatgaccttcacaatgacatccatggcattcttgtcttcctgcttgctttccccaaaggacctgacgttgaaggagcagatcctcatggccagggcgctgtggatggagaggaggagaagcagcagtggggccagctcccgtgacatcctggcgctgctctggcttcaa

SEQ ID NO: 338074 - DNA, 1000 bp, Homo Sapiens
cgaaccaagagaacattttttattgtcagtaagaaacagcaactcttcagagatgattggctagaaaagaaactggttggttgtataaaaaaatgtaaagtacaaaactgttaatctaaaataaaattaaaaagaatatttaaaaggcttccttttctgttaagttctgagacttaataaatgagataaaagcagtttcttacacctaagaaactgggttatgaaagctgtgcctaggatgttggggagagcacactgggagaaggcattcttgctggtaccttgagttcaggaatctacgttgaggcttcctcatccaccatgatcacagccccaggggatgctgggcttgttagcactccagctctgggacctgattggcctctctgtctcctctaagtaaggacaactgatggggacagtctcccactctctgaggcttcgatgttccacgcatggctttcctcttccagaaactcccctccctggctctcccatgcagccctagtcagcagcagctcacaggtccgtggacagcgagtctgggatctgtttgccttcttcagccgatttgctggccagcattgtcttgaagaactgattgaccttcttccgtgtgagtgtcttcttgtcaccatctgagagttggaggaaggtctggctgaggcggggagatgtgttggcctcatccaacccagggatgcctgccactgagagcgccagggctgggatggtaggcatggactggctggcaaagctcatttgagagaggacagacgccttgagggggatggccgcatgctccgagaggttggtgtcactcatgaactcatgcttcctggaaagccgcttcaggtccgactctgcagctgctttctcatccgcaaaaactacgctgcttctctttgtcctcttcttggacctccgcagcttgacctcaggcagggtgctccccggggagatcggttcctcctgctccactctcggcgtcttgggtgat

SEQ ID NO: 338075 - DNA, 1000 bp, Homo Sapiens
tcagtatcacgtatttatctttaattcacatcacagcagtcaaggaagtggggaaagggggaaaaaaaatcaagtggcagatatttacatctaaaattcacattacttgttggattttgaacatgctaccacaatatatacagtaaaatacctcttgggacaatggtacaaattttgtttcctttaactttgcttttctggtacaggtaagatcatttttaaatcactttttttctttaaacatgaatacacaaaagaaatggttagaagtttccttgttttaaataagcacagaatgcgggaggttaaaaacacatttatagtgctgaataccaattggacatcacactctatacattttttgctcaaattcctgtacaaatacacagcattcaaataggtatttacaaataagcttgaaagaatgaaaatcagtattttacaatcttttcaaagggttctcatctctggcctcccatttcccctcagactgacttattctccaacaaaagggatttcagaatgtgtccttttcatttagttagggaaaatggagagggaaaacaaacggtttcaccttgcataatgcgaagccaaatgaacccatactcccctccctacctcttgtgccaccaagtggagaaggtagctgttcttatgtgatgactgccttgtccagggattgactttcagaagtgccttaaaatctaagccctcctacctatgaatcaaatccaaaactagcccctaacccctaaccctctaacacctgtgaacaccagatggtccagagattgaagcttgcaaatgaatgtaggctgagaagcaggccagccctttgaggtgagggctgctgtaactgacccatatcctcagcagccttccgccccactctgcctggagtgaacctggtggtatcagaagggacccacactggtgataaacccccagaaaaaccctggaggtaatttagacctccatctttcccagtaggttatta

SEQ ID NO: 338076 - DNA, 1000 bp, Homo Sapiens
aaaaaaacaagaaaggtttatttaaatcagagagcctctgaaggcacctggtttctgtcaaatatatttttaaaaaaggcagtaacgtggcaactgtacagggtgcatgatgggtaaaaactgggcatggggagttgggagggggacatggaaaaaacacagaggaggaggcgcaggggagaatggagtatatcaggtcaaaccatacaacggtcagacccagctcctagccaccccaggacaggcagacagtctgacagacacggacgcagacacacagacacatacacagagacacacgtgttctccaagcccaagagcctccactggcctgcacaagcagggatcagtcagagccaagagtggagaaactcaagcaaatgccgaggctacaccccgtccctcgactctgagccccaaacccacaatgtccccactgtccgtccagaggctccctccccagggcctggagatccgggcccagcacacgccgtggaaagcagaagtcagttagaagaaaaaaccgccagaccactcaggatcacccctggcagaaggaaggggcaggaggcagacagggagggaggcaggcagtccttctgtccatcctttgtcacacaattgcccggaacaggaaggagaaaacagcccccagtgccagacccagacacaggaagaaggccatgatggctcctgcggtctctgcctcagctggcttcactttcttgggcccgaagcacatgcagaggctggcgaggtagccgttggagaaggcaaaggcagccatgaagaagatgaaccaggcatcgtgctcgaagaccacagtcaggtagcggcggggcttaatgttgcacagcagcagcagtggcacaaacaccagccgggccagcaccaggcttggcagccagcggctgtccttcccaggccacatgaatacagctgtgaggctccggcccaaccagtcaaagatattgaaagtcaagaaacaggacacaggaat

SEQ ID NO: 338077 - DNA, 1000 bp, Homo Sapiens
ttttcagtttctgggcttttattttagatttaaattttgagcatatttaatttgctataatcatgattttcatagcatgttttctcaaaccgtaagtataattttaatacaaccaagtgaattaaaaattttcttccccatagaagcataaatataattttagaatgaaagtaactaatactggagtctatatgcaaaaaagaccctaccttacatatgaatccataaacaatagccacggtatatacacttgtaactgaaaattctgaaatcattaatatttctataaagatatccacttagtctaatcaaattctcctcttaaactgtactttccataaactgttttttttttaagtatgtcaaagtgagtctcatgtatataaaaaaagaagtcctaaaagtactagttgagctctgaataaactgggtgaaattttctagtatcatgcccaactattaccatctttttgaaacttgatttttccaattcttagtagaattgcttaatatgtacatttgccttctttatattttttccaccatcacttttacccaatttgtatttttttaataattctatttcctctcttctccataccaaatcgcaaatggaaaatagcttactcacttcttatttttaaattttagtttttgttttctaggattccaagtaacaaacatccaaatgaccttctcctctgtaatgttttctcattacaagctctgaaaaggctgcatgatagacaaagtggctcattttagaaatccctatcatctggcaaaattctgtagcttctggcaatatatttctttcctggttatataaagataagttgactcattttgcaattgttcttttgagtaatagacatattttacacattgttcttacctaataagtaataatcactagcaaatgataagatcacatagtaacccatattaacaccaaaagaaatgtattaaaaaataaaatctggattagaccactgattta

SEQ ID NO: 338078 - DNA, 1000 bp, Homo Sapiens
ttttttttttttttttttttttttttggaaactaattgcgaaatttattccagggctgtgggggctggggtgatccttaagggcacttctcgtttcagggctgtgggtctccggccttggcaggggcacatgtttcagggggcgggggggggaggtactgagacagggtggcgggaggcgggaggcaggaggcaggggtgcccagtctcctccaactgggcaggctcagcacaagctgcaacagtaacatgaaagcgggacggacagcaggcaccccgccggggacaggagacagccgaggcctctccctggtgcttcaccctgcagagtgtccttcatgacctaggacagggggtcagggagctgagggccagcttcatgggtttgcagcaagggacccaacgggttggagccacagagaggggatcaacagcgctatccctgatctacaggcccgtgccccctcccaagttcacttgcattcccacccacagagacctgaagcccccaacagggcatcctgctgttcacctagtgggtggagggcgggcaacagcgcttctctggattggggctggggctcagaagtaatgacccagcaccaccccaagggtacttagtaggcgagtgtccggggagaaaccatcagctgtacttagtggcaatccccaagccccagcttcagtcctcaaatctgtccccttccctccatcacacacacatttcaaggagtgtctagaagcttaaaaacaaaaagcggggagaaaaacctcttgactacaaccttgcagataaataccagcctgggagggccacctctgggtggggctaggatgtcgattgtaccaaacgttctccttgggtgggagagggaatcagtgatgcctggagcaaagttttttcccgatgatgtatcaatgccccctcttgcagaggtcaggtggggtagaagggctagggagaaggtctttttgtcctaaccagtctcctagtgtcctct

SEQ ID NO: 338079 - DNA, 1000 bp, Homo Sapiens; identical to SEQ ID NO: 158479

SEQ ID NO: 338080 - DNA, 1000 bp, Homo Sapiens
cctttagcttttattcttgcctaatatatagcatattttctgcaaaaattatgagttaaatatactttaatgaagatgggtatttaaaatataattatgacaatttaaaaaatcttatgaatacagaaggaaagccagtaaacaaaaacgataaaaataaacaaacaaaaaataaatgaaataagaataaaatcttctcaagttctagatagtctattcatttcttttcttttccaggtagaagctccctggaacaactgctggaataaggttccagagtggaaggtagttatttcactgagaacacacatctgattcatgcaagaaagtccatgttccagacagggcagccaagcctaagtacatttctgcttcattgaggtctcaggaaaatgtaagctttcaggacacttgaggtcgctgcctcagtgcagctgtattttaatttgtgtgagtccttatacctcatttaggtttaaaaataggtgctctccttgtctgtggtattcagctgcaagtattccagagtgccttttttatagctggctacccgtctgggtttttggcttcttatccctgctgcctgtcttttctgtaaagagttggcaatcatgtctgaaaattctgcttgcaaacgctgttgattctccacagtaggaggggttggcaggttgaatttctggtccttcatcccagtcagccagtaggtagtctcatttcctcttccctttaagtatgtttctcctctcacttcataaaggaactggcactcagttctcttcaggatggctatggtggagccactcacgtgaattctcaaagggaggccagtggattccatcctagaggctgtgttgaccgtatctccaaatagacaataacgaggcatcttgattcccacaactccagcagcacagggaccagagtgaactccaatgcgaatccatattgggaggccaggaagatgctccagctcaaaggtccccatgaagctgaggat

SEQ ID NO: 338081 - DNA, 1000 bp, Homo Sapiens; identical to SEQ ID NO: 158481

SEQ ID NO: 338082 - DNA, 1000 bp, Homo Sapiens
ttttttttttattttcataactgagattttattggttgaggatcagtacagacatttcaatttgtacacaaatcttaacatacgtaacgaaattctaaaaagccatgtattgtaattcttttttaaagttattccagtgactttccagcttaaaatttggaagcaaattttccttaagaggctatcaagtaccagtatcttcacgttggtcagctgttacatacggcccaccagttcacaactcaacagcacgtacactacatgttcaaatctgtaatctttcacagcacagtaacaaagttattaggaaaacaggactaccacaaagatgttacagagtgcacacaattctggcagagagagccatgatcaaagagtggttttctttaggaaacaattctactaaaaaacaacatggtaatagaagtaatttaaaatgttcaagacattaaatgcaggactgactccatattgccatttaatatgctttgtattataggatataaaaactaaccccccatctgtggaatgttaagctgacacccgagacagtcagagcctcccataattcaatatcccacactattttctggttgtaccaaaaaataaacaaccagcaaatgatttcacctcttaaaaaaaagcatttacacttaaaaaatgggatgaggtgggattccctccttcttaaaaatgtttctagagctactaaaaaacttgcatttacaaaatagttgataaaaatattcctctggattgtacaagaagggagacagggaccactgataagacatggtatatggttattaatcagacttggcttctttctctcctgcttcatcagaggctggactctcctcagtcttcgtttccccgttttccgcaggtaagtcttctttagtttcttggttagccacttcggcctgttttccctttgctccccttttcccttttgtttgcacttttttgtctgaagatttatccttcgctgctgcctttt

SEQ ID NO: 338083 - DNA, 1000 bp, Homo Sapiens
caggctggagcttcactggtggtggtagtaattctgaccatcatagccatcgtagccttgtcctttaaagtagctgtactcatcttcataggctcggtaattgtccccacgaggttccccgttctcactttcatagatttcatatccattgtcgtattcattgacgcccgtgtattcgtactccccctcgtattcaacggtggtggttttcccaaaaggtggggaagtggttctatagacttgtggtggggttgtaggttcaaacccaccatttggagaggttgttgtcttcgaggtgcccttgccctgccctccggtctctgtggtgccttctgcattggctccagtgacactttcttcttccccttcttctccattgtctcctccgctgctgccgttgccgttttctgcctctgtgctgttggtactggtgccgtttatgccttgttcgttttcatccacttctgcttcgctttcttcgttttcatttccttcctcttcctcctcttcttcttcatcactttccttctcttttgtagctttgtttgttatatccccagccttcttgggaagctggattgcagctaaccctgtataccctgtgccaggcgtggcgtcctctccatagcccagtgttgtagcagaaagtgtggtattctcagcctcagagtcttcatcttcattcgattcttcattgttttctccttcatttgaagtctcctcttcttcctcctcctcttctgaactgtcatctccattttcttcggatgagtcactactgccctgaactggaaatcgttttaaatgaggataaaagtaggcatgcttgtaaagataatatcgtggcctgtacttaaagaccccattttcttcagaatcctctattttgactcttcgatgcaaatttttcattgagaaagcacaggccattcccaaaatgctgagcaaaattaaagcagtcttcattttggtgattgcttcctctggcagtcctggagtg

SEQ ID NO: 338084 - DNA, 1000 bp, Homo Sapiens
ttttttttttttataccaatataaacagggccgttgaccctttcattttattaaaatggcacataattattaaaacagcatactgatcactttatacttctgctagcccccaggggagctgctgggggcggcatgtgagtgccctcccgaagggtacagattcatgcattgagcaattcgtgttctttatcggttttcccaacagcatcaggatttgagagtgggtcgaggtcagcgaagaggctgaaccaggcagtcaggtctgaggcagccttagcaggttcttgtagcgaggcctgtaagtctttcatattttggtctaaaagctgcgaaggaaggaaacctgagcctgtctgggccttggggtctggctctcccagggccatagtgggcactggctccttcacttggccgtctccaaacacagcggcccactctttgctgaactcgccctcttccaaggaggaagcattgaagatctcactcaacagcagcaggtcatctttgtcagcaccttcaggttccggggtccctgccactggtcccaggcaagctggtatgttgctagcatgtgagacaagagattgcatctgctcgctccaagaagatccactttttgacaaacatccatcttcaatttgtcaaagtttttttttgcaaggcgcacttgtgtttgtaccttcctgaacttctccatttgcttgtagaggtctggatcaagctcctgagacacgtccttcatccataatagtgctcctctatattccgtcctgcactgttccatgcggttcaccgtcagccaagtatctgagatggcccgatgccgaaaagtctccacttcttggtgaaatcgacacaaaggatttcgtaaggccaacctttgctgggaagaaaagcagagggcctttcctgtcgcttgcatcatctttcctgctctggttttatcttggaaaccttgggatcgaagaaattttcccagttcgttttcttcttgagacaa

SEQ ID NO: 338085 - DNA, 1000 bp, Homo Sapiens
ttactttggatttataatatttctacataatgacatttgacaattttttgtttgtttctctaatagtgaatcagaaactattaaagtggccaagatgattttcttaggctctggaagactcaggaatgcatccacttgcactttcccatgcatggggaatcttcagagttttgcagccatgaagttaatatgtggtttcacaaggggaaacagtggcagaccacgcttgaattcggtcatgttctgaatcacttcaggttgtggcaaggctggtgcttgtgacaaatttatgtcattttgacatgggaactctccaacaacaggacaagaatccatttccctggcaagaacatggacggataccttatgtctccttggagcatctactgccaacatttccttgtagaatttgatgatatcttccttggtaagtgtctttaaatatgcaacctcagtgttatctctgtcaaaattatattgctgggagatgatttctccccagtatttagcacactcagcagatagcttctttggtttgtctagtcgacgaattgctaatgcctgaatgtgtttttggaaggcctcttctgtcatgtcctctatggacttttccatggtaattaagaaagcttccactctgctttctaggtagtgaggtggcttttctgactggatgatgaatctcaagctctgtatgccattagctcgacgtggcccgctgaagacgatatagcccaactgctccttggtgcgcagggtgttgaagcaaggttccgagataatctgacagaagagctccagaaacatattctctgaggtgctttgcatgtctgtttggtagtatatctcgatgccacagttattgtgaacttcatttctctgctgataaacaaaccatcctctgtcagggagctgaacttctctataccgaaccagctgacttggaaggagaggtttggtatgagcatgttcaatgagggtgtcttcaaccatctgcata

SEQ ID NO: 338086 - DNA, 1000 bp, Homo Sapiens
tttttttttttttttttttttttttttttttttttttttttttttttttttttttttttttttttttttttcgattgcctttgcctttaattgatgacagctgggggggccgccatgccttccaccccatcaggcccttgcgtcttccagcaagtgcactgggcaggcccctgaggacactgaggacctgtccccagcacaaggtgagccaggtgggggcctgagtccggggcttgagtccggggacctggtcagcagggagcaaagtgggcctcgctgaggtcccgcaggtcgagccccacgacctcgggcgggctggcacaggtgatgttgttgtaggtgtacgcgggcggctggcaatcgtccccctcacagatggcctggacgaagcggggcacagcactggggttctgcagggcgaagtcccgcagcgccttgagagggcagccacagtcccaggggttaccctccagccacaggcgctccaggcccgggggctgcggcgtgaaggtccgcagtgagttgttcctgaggctgaggtagcgcagccgccccagtggtgccaagaggctgttgggcaatgcctccaggcggttgtgcgagacgtccagccagaaggcccgctgcagggggcccagggcgtccgccggcagctctgccaggcggttgcgggagagcagcaggtactccagcttgcccaggccctggaagaggcggtggggcaggtgcgtgagctggttggaggtcaggtcgagctccagcagctccgccagcccccacaggctctgctcctcaatgcccacgaggccgttgtccttgaggaagagtcggcggagccccgagaggccggtgaaggtgtgcgggcggatgcgtcccaggcagctgccctccaggtgcaggctgtgcagcttgcccaggccccggaacacctgctccggaaggttccggagacagttcccagagaggttcatgaccgccacgttggtgaggccgaggaaag

SEQ ID NO: 338087 - DNA, 1000 bp, Homo Sapiens
taattgaaaagatttaagatgtatgctcatttttcttaaagatacacgttatgaattttctactggcattcttgaataaaattaacaagcatacttttttacttatttacctcatttcccctctaaaaaggaaataaatctcttctatgactgcaatgcaaaattctgaaacccctcaaatatacagtctttaggaaaaaattcttaacctgctgcacttcttaatgagctatccatttttaaaaaacaatctaatctattttatggcttaagcttaaatttagttcatgagcataaatcccagagatcgaagaatgttattggcagtcagcagctcaaaggatgacaatattcctggcattcttaatctcaaaattttaaaagaaaactgttcatagtagtcttagaaaaatttggagatagttccatttaaaaaacacattcaccacaaatagatacaagggaaaccataataaaatagattatatctttgtaagcttgtttcatttcaaaatgtattatttagggtcagggaaatttcctatacaaataaaactagacatttgttccctttatgtgaaaaatatttacagtacatggaactacaagctaaaagtatacacctgcttataatgctggccagcgatataaatgaacaaggacacaaaggtacttattcaattatctgaacatcttaatttgtttgtatagtgaagtaattaattatagattaactatggaaaaattagaaaacagtattaatgaacaccagccctcatgtgtgtaaaacatcacacaagatgccaaggtattatacatccactgtggtaaaaactatacatacatattctgtgcatctttaacattgcaaaatttacataataattttttcaggtctcaaaaagctgagttgaaaaagtctattttttttcttttgccagacaagagtgatgttaacagacaatgtttaagaaacttcttacaaaatccttgctaagga

SEQ ID NO: 338088 - DNA, 1000 bp, Homo Sapiens; identical to SEQ ID NO: 246452

SEQ ID NO: 338089 - DNA, 1000 bp, Homo Sapiens; identical to SEQ ID NO: 158483

SEQ ID NO: 338090 - DNA, 1000 bp, Homo Sapiens
ttttttttttttttttttttttttttttttttttttttttttttttttttttaaaggttagagaatccaagtttattagaaacactccaacaaaaaacaaaggtgagaagagagggcccagcccacctccactcctccctttcctccagaacagaataccagtttgtatccggcaaactggctccttccccagggttggtcccagtggggatttacatggcactgccaaagcaggacgggagccctagtcctcagggcactgcaggatgtcataggtcacgtagcccacttggtccacctggttcaactcactccgggaactcacgcgccagtagaagcggtcctggcagaaataggctttctctcggtactggaagacgtcgtgcgtgtccaaaggcaccccggggaacatccggtccacctcgctggcgctccggggatccaccatctgcgccttcacgtcgaacctccagaggcgccgcccgctgaacagcagcatcttccccctgccactccggagggccccggtcacctgggccacgtcggctcccaggcccagcttgtccagacgcctcgggcccagcaccgacgcgcctgtgtacacccacacctggcgcccagagaagaagaaaagcttcttggagagccgctcctcaaagaccgagtccagcttgcggggcagcgcgggccacttgtcggcgataaggaaggggccctgcggccggctccccctgccctcagagaatcgccagtacttcccatccttgaacaaatacagctggttcccaatctccgcgatggcgtcgaagatgttcacgttgcaggcatcgtccaccggactcaaaggcacagtagtggccgtagaagggccagcagtggggggacctgtggggccagctgaggggggacctgtggggccagctgtggggcgctctgaggggtggacagtggggggtccggtggggcagaccgtcgggggagccgtgggctgcggtgtggt

SEQ ID NO: 338091 - DNA, 1000 bp, Homo Sapiens; identical to SEQ ID NO: 158484

SEQ ID NO: 338092 - DNA, 1000 bp, Homo Sapiens
tactttataattttattctaaaatacaacaaaactccttagaattatgtcagcataactccttgatgtatttttgtctttaaattccaaatgtgaaagtcataaatattaggcttaaagctgctgacatttgaatcaatactaacagcacacaaagaaaacattttaaaattatcagttatgtaaaacaagcacttactaaatacaaggatttctgaattacaaagcttatgaaacaggtctacaattaccaaaacctcaaaggccaaaaaagacactaggaatttcttaaaaagaaagatgttggaagcagaacacttactaaatcaatgaaacaacttggacaagattctgatacaaaaatcactattgagatgaagttgaaagaatatttgaattcagtccagttaagccactatgccacctaaaacctatttccttttctaattgaaacaaaacttatctcaaaacttttaggcatttaaacaatctgaatttcctttatttttccacagaatataaaaagaatattctgacagcaacacacattgtgctagcaaagaaaagcaaatctgtgctggatactattagtacctcttatcacagaatacatcaaatacattaaggctctttctagaattctagaacttcgaagtgtttcattcaaactaagacactgcaaaggaggaaaaaaatagattttccacctttaatggaaatttccaaaatgtctgaaaatgtctataaagtacacagcttttcagaccaaaacattagtgccttgatcattttaagtggtttagttattgtaagaatgtaagctcatgttttattactccagttatatggtactgtgccatccttaaaaagtattttgaattttgaaaaaagttctcttttcctagagaacaattacgatggatgtaaggtagtcttctggcaaaggatgagaaacatcagaatatgcccatgtgtaatagttagagaataatgagagtttt

SEQ ID NO: 338093 - DNA, 686 bp, Homo Sapiens
taacacagcactgagttttattagggatttcattaaggttaaatttctaggaatgagggagtcctagttagaggacccaaaagcccacgaagcctcctcagatctcatagtgaaccacccgctctggttctttggagggatcaccgcctcgttccaggtacagattattgtaaggatactgctttggtcccacaggctggtagacagggtacacgtcccccacccagcacatgaatatcatgaaagccaggaaaccgaagagctgcatacacatgacatgccaagaaacaggtgtgggggatgtatccacacggttcctgttgtacatgtctaggtgccagtgcatcggttcaccccagttcaacctcaggcccggctggtcccagctataccatggatctctctcatgctgtgagcggtcagggagcttcgggtagtcgccataccccatgccatcatccgggtaaggttcgtagtcttccacacgcatattatacttcttggcggcggcggcccgttcttctggggtcctaggatagggccccgggaacatgtccttggtcatgtgggaggctgtccgtgcgcccagcggcatcacgttccgggatgccctttgcagccactggactcccaagaccccggccctggccaccgccatcttcaccttcttcacgtttcccttctgc

SEQ ID NO: 338094 - DNA, 740 bp, Homo Sapiens
ttttttttttttttttttttttttttttttttttttccatttcactgattttttattagggcaagtgcatgttctgtaacatatttcacttgcaagcatgaaagatgaggtctctctctttctacatgggccgctcccggggtctggtcacaatataccaccacagtgggggcaaatcaccttcctttcgggcagggggcaaagcttcagttaaaggaccaccaggtggcgtttcctcctgcagctgcttaacctctcgttcccagctttccctccgcagtttcttccactgttctctcttggcaaagtaatcaggatacattgccttctcagaaggatgccagtcatctaagcaccattctgggaccttgtagcaatcgtatctctcataggaggtgcccccaggagagtcagggaagatgtatggctgtggatgctgacggtaccagaattcttcctcggcctccttcagcagctgggtggccttcgccatatccttttcattcttatgttcttcaaaccgggctctcatcaaacaagcaaagtatcggtatttgtctctctggacgcaccacgactcgaggtggcgtagcgcccgcttataaagccgcaacaccttttgctgatgggtcaggtagggtcccgacgccaagaacgccattacggcgctgaccttccccggccgcgcggagagccgggaaactgcacgcctgctgcgggtgactgagcggggctctgcc

SEQ ID NO: 338095 - DNA, 1000 bp, Homo Sapiens
tttttttttttttttttttttttttttttttttttttttttttttttttttttgggtgtgcaaaacttcctctttactgttcaactccttacaacttgcataaaggcgtcatttctacctcagagctgggggaagtcataattagtgtaccacccatgtgctgggcacagtgaattttaatgcctcccctttagaggagaggttatgataatgtgaagacccccccccaccacaaaggttgtccggcactttggtgcaaaaaggattggtccaatcttgtgctggcttggggtacagaaaggcactgaagttggtggctcaaactcctctgggctggggtggggcagaggtgaacagggaagtaagtggtttgggacaggcaggtttggatgtgggcttgggttcttgctgacggaggtagttggtcctgcgtgggggatggggtggtaagggcagcttgagcctcaggctgggtggatgctgctgtgctggcccccgtctgcccagctcaccagctcactgctctggaaccacagctggatctcccgctgggccccctccacggagtcgctggcgtggatgacattcctgctgatgtggacgctgaagtcaccccttatggttcctggggcagcctcagccgagtcggtgtgtccaatcatggccctcgaggcgcggacgacattgtacccttcccagaccatggccaccacaggcccagagctcatgtagcggatgagggcagggtagaagggcttcctccgcaggtcctggtagtgctcggcaaggacgctctctggtgcctgcagcatcttcatccccaccagcgtgaagccccgcctctcaaagcgctggatcacgtccccaacgagccgccgttgcacgccatcgggcttcaccgccaccagggtccgctcccgggtccaggagggccctcccgagccgtggcgcactagcaggctcgggcccggggcccgcgggccgcagcgcagcccccgca

SEQ ID NO: 338096 - DNA, 1000 bp, Homo Sapiens
tttttttcttgtttaatagttacttttttgagggaaatccagtcacatttgcctgtaccattacatacaccattacttggacattcacactcaattgggaacataaattacaaaagagagaggaacttttaaaaccacatttaatttttaataccaaatctgttgcactattacagaagtgaccctttcatgcacagataaatttcgcatctaccagtatggaagaggaaaaaatgtagttttattgttctcccaaaatattggcaaatttaaagtaacttttaatctttgtgctctctgatgccaaggcaaacctgttttgtctttttatattttcaagagacaggtggatctgtgaaaaatgaatatagagacatgaaagtatttagggccatctttacctgggattactttaaattatgctttacctacatatatcaaacatgccaggttactaggcctactgtgccccataggcaaagctctgaagatttcatcgaaaaatctgctgtcaatacgtagaaaagttcactatttcagtttcacagcaaaaaaggtggggggaggggggaacccaatagatatttaagtagatgctttccaatcccattcactgcattaattagcttacctcttatacagtacaacataaacattgcatgtttatttgtatgtaacacctataagcatatagcatctacattttaagtgtatttacaaattcaacaaaatatctacatataaaaagctttacttaaaattaaacttgatgcaagttatgagaaaccaatttattggcaaatgaaactgagcattccttcaaccataggttgttatagattttcatatttggaggtaacccatttgatagatattgtttatgaatacgatagaatatatatttactttttaaactgcagatgtaatcccttggaccgttggccttttaagcacttgcctgatttcttagattctgaaatgtatccataacaatttgcat

SEQ ID NO: 338097 - DNA, 1000 bp, Homo Sapiens
ttttttttttttttttttttttttttttttttttttgaccttaaaaccagagcaacattttaatagtcatgagatcaaggattcctgggaaggagaggagatgggaggctgaggcccgggagctttcaagacattcatctgcctgtggcaaggtcagcacctgggccagcccgaggagcatctcagctggcagaccacgcagtccctggaccttgcaagcacatctctgacccaccccatgctggagcctctttcctcaggtgagtccagcagggagagttctgtgtggccactgggaggcagctttggtgaagggcatggtcacctccgcctgagtttgtcagtagctcaacgcatgaccctggtatgaacaaaaactgggtgactgtgtctggccacgtaccctaccacccactaaactgggtgaattattgtttccacagcgcaccttgatttcatacagataattccatgcgggtttcatacatatatatatatatatgtatatatatactttatatatatgtaaatgtgtatgtccatatgtacacatatacatatattcacactcacacatacacacacataagtatacacacacatttccgcagaaagaagtcctgccacaatttggcttttttgggacagtgaaattgacaatgcagtttcttcaccaatcccagaaaatcaagagtggtgctttaaaaaatgcaattccaaaatccgctttcttccttttaaaaaaaaaaaggttaacaaaactttccttccaaagtcgagagacttaattccatttgattgcacctctgcaaacgtgtaaaaaattttgaagtagactagaaaacgatgccataatatggctgtatgtcactgttccaatgtcaccacctccacagcttggccgtccatggtgactgcgctgtctgatatcctggtggtcacaggggccatggccacctgcactggtccgttgccctgggcgaggctggtcaccacagtc

SEQ ID NO: 338098 - DNA, 1000 bp, Homo Sapiens
ccaaaaaaaaaaaaccagggagaagcttataaaactaaatatggatctcagcatcaacagctgaacagagaaaggaattaaaacgctttaattaaaaaatcacgagtggatgataaagtgtgtagaaactgaaaatttacaaactatttaaaacctggaatcgctgactgttcagaaactacacagatggatcatgggtggtggtgaacagcagaaagggattatggatgaatctgcattgttctagctgctccccatgccacccgtctccgaggaaagcctgacattgattagatattgagccaggctaatgctggcagcagatccagtgatggtaacctgcctatcagtagatccttccactgggttcgcaattttgatctgcgccccagacatctgacggatctcattgattttggcgccttgacgcccgattatgcagccaatcaaatcgtttggaatggtgagttcatgagaagtagtctgagcagatgcatccaaacctgcccaatagcctttcacctctggagagctggattcaatgccactgaatccggtgttgccatgcgtcatgggaaaatgagactgttgcattgccaactggtgcagcttggtcaaatctggctgtggaatggcatactgtccttgaatggtataggcctctagaggtggtccctccaggtcagggttgaggcacatggacggggtggtgtggggaaagctcgcactgtcgctgcctgtgctgtacctgtcctgaccacctgcaaagatgaccggagagctggacggcttgggccggtacgggatggtcacgcccttcgggggggactgggagagagtctccaacatgaccacgcagatctgtttgacacactcaatgatggattgtggaatgccagcaatagtgatggcccgctcagttgagttgggtagcatatcccctgccacctggacctgagcccctgtactctctcgtatttccttgatcttgcatccacct

SEQ ID NO: 338099 - DNA, 1000 bp, Homo Sapiens
ttttttttttttttttttttttttttttttttttttttttttttttttttttttttttttttttttttttttttttttttttttttttttttttttaaagaaaatgacaatttccctgttgagatcacgtgaacataaacagtgaaacaaagcccttgggggggggtaaatggatgcagagcaggcttctaaggtgcagtccccctccttcgtgtgggtgagtgatgtcacttgcaggacaggctgtttgggttcccccagtcctaggtcttctttccccagttgtctttcctttgtagctgtccttaggtttagtgttggggtcacaatttggaattcaacagagagcttctgaaggtaatgggacagaaagggaggacaggaaaggagggaggaaacattagtcttcttcatcctcactgatatcataggctgcagccttgtgcctggagagatttgctggggagcaaggtggggaagtcttgccggagaagggccatcggaaagagggggagggggagcgctcgcgagtagggctgctgctggggctctgcttcgggctgatggcctgcagcatccggcccttcccctctttcagcatatgtttcagtgctccttccggaccaaacatttccagaaaacttccaatgaattctcgggacttctcctcccacttctgaatgaggtcaatgcttttttcctccaccttctgaacaaattcttttgacttttcctccacatctttcactttcttctttactttgtcaaccctctcctgcaagtggtatttcttctcgttgataaagctgacattgagctcctttgctgtgtagcccctctgcaggttccgcctcgcatacacatcataatcccgcacaattcgggtgatgatgtctgatgtggagataccttctgtcctctgtgttggagcaaacatgcctgcctccttgatgtgcttataaacatcatcactgccagcagatgaataaggaatatcatc

SEQ ID NO: 338100 - DNA, 1000 bp, Homo Sapiens; identical to SEQ ID NO: 158489

SEQ ID NO: 338101 - DNA, 1000 bp, Homo Sapiens
tgtattacagaagtgggaaaaaaagcataagaacaattttaagtctgaaaggaaattggagaaaacaaatgttcctgactcaggaaaggaaccagagactggaatcatcatctttgcggtgatgaatgtcagcatggctgtatcatcagtagccagtgcaaaaatgacaacatttaaagtaacggcattgacagtcataaaatggcaattactgtgtgtgtggcttttttcaggcctctcccagcatatccaggatgtccattctcatcaggccagacagatgccttgaaagccaggtcattagcaaaggattttgaggatgccccttcatgttttgtttctgtttgagtaaaaatctcacgttgtttgttttgctcaggggaatatcccccagagttctaagacctcaaaccaacccccaaagattcatcccctggaaggagatggtgtgagggaaggccaagggtcagggggtggggggcttgtgtttgaaagttgtacaccttctccagatatgggtctttgtggaagaaggagaagaaggagaatgaagaagctcagctagaatgatgcaagacactggcagcctcttttattgtctatgaggtcttttttactcttgtgaatcatctgttttctttgaatcatttccgatgttagagtgatccttcttgtctgtcttatttttaccatctttgaagtcaccattctgttgctgttctcctgatgacttctcggctttggaatttttcccacgagggttgtcacttttgtttgcccgtgttccattgacttgattcttagtttctccagacgtctttttctcagctttgccagatgcgccttcttcagcctggcttttggcttccatttccttttgctgctcctctgcggccaggcgagccttttcctctgcttccttcttggccttctcctctttgggtaccttggccctccatctctcccgattgatgtgcaccacttccgtccaagtagcttt

SEQ ID NO: 338102 - DNA, 1000 bp, Homo Sapiens
ttttttttttaaggaaaaatagaaaactttattttacaattctccagaaaaaaatcacttatattttgccaaaattactttatacagtaaattatatattaagtagacattattaagttaaatagtggtttcaaatgttggtaaatatgtctttagttgcaaaatttcagagacaggctgcactttatcctgatagaagtcaagcccagtgagaagttctacatcacggacccgggcaatgtgagctgtaaatctttcttcaacccaaagagcttctggtttaccttcaggacagctctccacgttggtaggtcggtgagggatgataaagggtaggacatccagccacccagggcagttttccggtgtgtggctcttgtttttacaactggtcagcaccacaaagtagtgtgttgggatgggaacatcagtgttggctaaatgtttggtaatttcatctggagcatcaaaatggccatcataattataatcaaatattggtccactaaccacatttactccatttctttctgtggcatgttttataagaagaacactgtggaagtagtcccacatttttctgaattcttcatacataggtaccaaattgctagtaattaaagcatcatattggctatctgatgttctattgctggcaggaggatagaggaagccgtgggtgatattcttgtctgctaaatagaaggaacatttttggctctcagaaggaggaaccctgacatcagcccgcagacagtctgggacagtgggaggcagaggcgatgtgtctcccaactgggggactgtgtatgaactccacatgggcatcctcatagcttttccaaatccactgacatattccctgtggtaaaggagacagtggtccacgttcttctgcagtaccctaggcctcccaaatggcaaatttactttcactgttgctgttatttcttcttgggtgagatttagcatctgattcacttgttccagctgagtacta

SEQ ID NO: 338103 - DNA, 1000 bp, Homo Sapiens
cttaagaataagacaaaataagtcactcttctttaaaaaaaattatggtcatctgttttcaaagaataatcccagatacttaattaattaaagcaaattttctacgatcagcagtgagctttttaaatgatcactaagtgttcacctgaagattatcaatgctatatgaagtgtaaacttgaaaatttgtgtccattttataataagatacaatttgcactgaagagtttttaaaaagataacctacacacatacagttaatttgcctcaaacaacttcttagaaatacagtataaacatttaagaaccacgacaaagttgtggttcaaacttcaacaaagattttcttgaaacccagtataaagattactggctcaagaccatatcccaaagtgaaatcagcaggagatttgattgtaagactctaccttttaaaaaaagagcacacttggttatacatggcttttaaacttgagctacagttatgctacaaatcccccccaccctcccaatctaaaatcagtcatgtggagatatgtacattctctgagcattgtttagagtccttggttttccagctttgatggagatctagaaggcgttcagaagtccgtgtgcttacattcagagcaggatgaactttacaaattccactttcctccattagtgacaggccacagatcccaaagtatgcatgcaaagcatctggatgactgtctggccacttggcaaatccccctacaaggcgatcttgagttgataagatgtaatttctatttttctcaaagttagtgtattggaaaatttttagaagcttcagagttgctcccacccaaaaagaataacaggtgtctacaggcttattaggtcttccatgataaccattttgttgcctcattatacaccacctctttatcctgttcaattctttttctgaaaaaacttcttctagtttacccatcagacatagtgaggcaatgccacaaaaagttgatcctcc

SEQ ID NO: 338104 - DNA, 1000 bp, Homo Sapiens
tttttttttttttttcttttcatctgcctttacttctcatttcaaggtttcacagagtgctggtctcaacccacatcagtgatacttaactaacttgccttccccagacagaaacatgaaatgacttaaaaaaatagaaaatattcttctcgccaggcacacaagactgtacacccaaaaccagaaacgctgtggctttgcaaagtgtgctcccacacccgcgcacacaggcgcacttaaataaataacgcgcacgcacggctttccccatttcgaaacaggcagacggtctagtgagtttcagcacttgctgggaacaggcgtgtggccagggaggtgccccgcgggtggcaatgactactgacggacccctggtgaatcagaacagagctggcacctgagccgctgagcgggcggctacttctggctctgttgagttttggaagacctttgagaaatcaacagcatcaccgggcaggtcctgagtccatggcctgatatgttaggatcacctgtgggctgctaaaagcccacagtcctagccccatctgcagagttagttggcttctgaaggctgggagaagccctagaacctgcatttctaaagctgctcaaatccaggcctttggaggcttaagactaagcctgcaccatttcaaactaagtatagtcagagagaaagatcccagcacgccccctcgttctcacacttctggtacctcagcactctcacagcaggttcccaaaggtgatggttctggaagagttctggcctcatccttttgttaaaacctgctttcagaggtggcttagacaatggcagagtgggccgggcgtggtggctcatgcctgtaatcccagcactttgggaggctcaggcgggtggatcacctgaggtcaggagttcgagaccagcccagccaacatggtgaaacccccgtctctactaaaatacaaaaattagctgggtacgggtggtgcacacctgtaatcccagcta

SEQ ID NO: 338105 - DNA, 1000 bp, Homo Sapiens
tttttttttttttttcgacgtttgatgttttatatcatatcaataacaacgtaccgtacaaaacctgcctcccagctcgtggggcaggcagtgtggtggccaagggcagcgtagaaaaccagggctcttgtcccaaaagaggagaggaaagagggttttgcagtcaaggaaaaacagaatcaaaacccaacatgatcgaagagaagccctgaatctgcatcagagggaggggccgtgggcagtgtcgcaacttggccactgcggcggcaccagtacggggagctgtgattcctaggaggggttggggccagctcacaagtttatttatttatttttttgagacggaggagtctccctctgttacccaggctggagtgcagtggcacgatctctgctcactgcaacctccatctcctgggttcaagagattctcacgcctcagcctcccaagtagctgggattacaggcggccgccaccacgcccggctaatttttgtattttagtagatgcggggttttgccattttggccaggctggcctccaactcccgacctcaaaagatccgcccgtcttggcctcccaaagtgctgggattacaggcatgagccaccgtgcctggcctgcgagtttaattattttttcgggggtgggtgaacttctcgcagcggcccccttgtgggggtaacccggtggcgggtttcacttcggggtttggaggggaagttggagtctgtggggcgggtcccgcccggccccgaatgtcacggccgaggttctcggaagcagcagagtgaagttccttcctgccctgaccccaggtctatggcttaaaaatcagggtgcccaggctggggccgcgcagcccaggggccctctgtaaacatggcaggtgcagccagaaggggcttccgggaccccgggggacctgcggtgggcagggcagagggtcagggtgaccagagccatggagagggcaatgcccggaggacacgtagatat

SEQ ID NO: 338106 - DNA, 1000 bp, Homo Sapiens
ttttttttttttttttttttttttgaccgaagtggatctgttttaattaatttatgacttttaaaatgcacacgcgcgcacacactcacccccccccaacacacacacacacacatatacacaaagtcagaaatagctagaacgatgctgggaaaatcaggtagctgtaaagcgagtagcccccaaatcagtcatcttggcctgaagatgtaaacaaggaggtttgcttcctgcaagatgagtacttcactgagtttggttttcatttttcctacaccgaagccacctctgtccctccaatgttcatgtctgtccgaggctgcgcaggaggttacgtcaagatgtggccaataaagtccaaaaagcgctttgaatactgttctgggttcacggtggagatctccgcgccagcgccatgtttaacagtttttgcagcatgggcagctttcttttttgcatcataatgagtaaggatgtcaataattgccatgaagtacacctccttcctaggcgagttttcatggcacttaattccatagacgtcgatgttcggatcgaactccccgggagccaggggtggtgagctgttcagtgtattcccggggctatctgggggggttcccaccgggtgggtgccatcgctctcgccctcctcctccccatcgttctcctcacactccacttcctcctgttcggctctctccacatcatgaattcccaccagcagactgtagtccatgagcttcagctgggccagaaactcaacatccttttttagtttttccaggaagaccttcttgttgttgtcatcaatataaatcttttggccctcattaatgaaatcattatctttcagagttggcagttctttggccttttctttgtcactagcttctctagccactgtagagccctttaagtcgtatttcctatacacagacaaacggtggctgaatacatttcttgtaactatcacatatatttcaactccatcaacatt

SEQ ID NO: 338107 - DNA, 547 bp, Homo Sapiens
tcgagaggaacgcacgttttattggaagtcttggcggcagggggagtctgcgggggcagggctggggaaggggcggcggagggggcggtgggcgcgcaggtggagcgtgggagatgtcaggtgccaggggagtcctggccggattccatcgctccaggtgtttctaccgcctgcgggtggacagacggcggatggagctgcggaaagttccctcctcttcatcgggttccccagtcctctgctgctggttgaacttgcaccggcatcttctgctcagcacgatgaggatgcccaggatgaagaggatcccggcgatgacgaggcctccgatctgcagggactggtagtcgtaagtgaacgggtcgtgttcctttggactttctgccttggccatggtgaggagacccacacagaaaaccaagatgtggccaagagacgccattgtccctggaggaattctgctcgctcaggccaccatggcaacagcctgccttcccccactcagggggtcacgcacagccctgccggggtgaggcccagctgccac

SEQ ID NO: 338108 - DNA, 1000 bp, Homo Sapiens
aatggaataaatatcccttttaatagttatatatacagatatacaactgttagctttaattggcagctctcttcttttttcttcttttcactggctttttacttggtgctttttcttgttttgcactggtggtctgtgttcttattttctttggattcttgtctggttccaaaatgatcatttcttcttcttcactatctgagagtattatgggagcatcttggcttccaatatcagagacttctactccagtgtccatttttataccatcaagaatgatagcttgatcaccaccgccttcatcatcttccttctcagagtcttcaagatcaccccaggagttttctactccctctccaatttgggcagttccaggagtccatagcacaggtgtagaaacaacttctgaaggaggttctgcttcagcaatgatttcttctgctttttcttctacatccgaggtatcaataggggccttttccattttaaatgctgtgatcctttgatttgctatagactctgcaaaaccaaactttccaccttctttccttactttttggtcattctccaaagctttcaatattagctctgtaatttctgctactttcacaccagcgattttactgcatctcagaacttgatcttttagtagcattatcccaccactggactggatagtacaaatctctcgatgtttgttcatggcaatcaccagcaagccatccatcacacgttcttctcgttcattgggatccaccaataaatatgttccttgctggaaaaaggcaaaactgacacaaatgggcatgtggtggatacttaatggtacaggatcacgctcttcaggtgtatacagtgttacttcatctccttggacagagacatcaggtcttcggaaatgacataaggccacgattgcagcaatgctggcagcatcaataatatttccatcatgatttaataaatgtaggtctacacgtatttgccaaaccttttcacc

SEQ ID NO: 338109 - DNA, 1000 bp, Homo Sapiens; identical to SEQ ID NO: 157406

SEQ ID NO: 338110 - DNA, 1000 bp, Homo Sapiens
ttttttttttttttttttttttttttttttttttcataatatggtaatttttaatattaaaagtaaattgtaaatgtgtctttataaacaatatgcataaaatagatcatattctaaaaccttttctttttaaaatgctttttcacagtaaatttcttaggtgtcagattttccctcagaatagtgcaactggaagaagggaaatgttggcagtggctcaggactctctgctagtacaagtccttgtagatctcctgcaggagcgggtgaagactcatgtctgtctccgtcttcttgatcacctgcagtagctgcacgtgttccgtgacaatctgtctgaggtctgtcattttctggagcagcttggcaaacagctgtgaggactcagggtggttcagcttcagctggagctccagggcttgtagcaggttgtcttgaatgtcttcaatgggcttcacattcagcaaacctgggcggtctccactgagaataatgacagcaataaatattgccaagtcgctgtcatctaattccagtgcattgaacttcacagcaaactcaaacttgggctccataaagtcaccaaaaggctttcgcaggctctttagaaactcccttgtcatgaagccttggccctcggatatgagaaccccatctttattcatcaaggaggccagcattgtgtaaatgatctcgtggactccatatttgaggagagttacttggtcgttcaagtcaagatttacaaaaccaggaatgcttttggcatactctgtgatctcctgcacagcctccacggagcgaaactggcagccctgaaagatgcggatggccacctctttgctctgctcctgcaggggggtgatgtgtttgaacttgattttatcttctcccatcattaaggaattcatgtcatagataacgaatggtgatttgtctgttgtctttcctgtcaagatcgccctcgcctttgctttggtcagcgggaaggactttatgt

SEQ ID NO: 338111 - DNA, 1000 bp, Homo Sapiens; identical to SEQ ID NO: 158491

SEQ ID NO: 338112 - DNA, 1000 bp, Homo Sapiens
tttttttttttctttgtgccttttgatgagataatttttcagggtgttgcagatacacataaggttagcagctactttgaggtacaccattttaatcatggtcagaaggctaatcaaaaaagtattttacaagaattgttttttaaaaaatatattaaatattatcaaagacaacgttggcatcttttgagatggtcatatttttttttcctctgctgacttcattatccaaaacaaataatgaacattccttaacattcctagaatcaagtctgcttggtcatttaactcatatatcactttaatttgttttaaattatttaaagtgagatttatagttattactgttagagtagtcatatcaaaaaattttttttcaagaacttggggtatttctcttcttttcagcattttgtataaatcagcatactaaaggactgcctgttaatgaggaatcttccatgaaggtgcttttgggaggagtgaattctctattaaatttcatcatattttacttagatattaactactataatgagtttaatatatttttaaggtcattttgtatataagtcactccatattgtatatctgtaaaaactgtgttcagtttttcatgtttgcttttcagaatgtaggaaaaactcatcttttaaaacacttgtttaagctttacctgattactctgaagattatctgcttcccttattcttccagaattttcacaatcttttgccaattttattggattttcaagaagttattactgttagttcaaaatttatgaatcatttcttctcattcatttaatcttttaaatttttattaattcttatttctgttctcccaagtgtattttgtctctcttttttaattatttgagctcattgcttacttttttttcaatactcctggttgcattataaagtcatcaatttctaaaatgttttctgactattgtgtaaatcaagtcacatcaattttcacacgcaattgccct

SEQ ID NO: 338113 - DNA, 1000 bp, Homo Sapiens
tttttttttttttctgaaaagatacaaagttttattaaataaacctggaatcaacagtattattacataaattagacagcagtaaaattttcctagggcatatgtacaaatcacagtgatttccattgtgcaacaaacagacaggattaaaaataggcactcccctccccgaccccccatgagaaggggtcaccccgcggggttcccagttctggctcgccaaggggtgcacaaacctgccaaggcactctgcctgtgtgcgcggcatccagcggcagtgacaggggccccagaagcacgttggcaacatggtgaggctgcccagtgttcagcgcaaagaaagaattcagctacgacagttgagcagagctcaacagccatctcagagcacaaggactgtggaaaggcttcaagtctcatctgctaaaacacaattgtaatgccttttacatacagaacagacgtgtccaccatggaagatcaaactaagcctcaacagaacttcccaacacacgataatttacagaaaaaccatgacagagcatccctgctattaggaagggactgttctgcggggtgcaaggccataaggtttgcaaagcaaacttgattatgaaaaggcttggtgaaaatacagcccctcaccttcaccaagacacacacacacacacacacacacacacacacacacacaccccgcaaagaaactatccaaatgcattaagacacctgttcgtgtgcttttcttcttgcttttcttaagtgaatcccatccgtttaacttagactaattagaaggcctgcttgcctccatcagcaacagaaaaacagtgcatacgactcctccaatgtgtgtaaaatgcatgctaggtagcttgaaggaaaaacgagagcaacccgggcaccccatttcaaatctctacaactggagaaatcaaaggctgcaaggactgtgtagacctgatgcaaagttaactggctgcaaaaatacaacccaagc

SEQ ID NO: 338114 - DNA, 1000 bp, Homo Sapiens
ggcttttggacataatttttatttaagcatgggcttttatagcttggttcaccctagagtgcaacctttcagttacacaaatagcattcagagctacagggccattataatgttgctggtgttgtacaacttcatcagaaggtatgaatatgacccgcagaaaaaacaatccacgaagaaaacacaatgaaaaaacaaccactgttttacaaatcactctgttatcacagacaaaaaatggcagttactgttagtaaatcagccacagaacacttaaaaaaagatctttagacaaggaaatgggaacttatttgtgggagatagggtcttcatccacaatttaaagtagaaaatatttcagggtcaagcatttttcttatccacaaaacaacgctaaaccaacatacatttttaaggagtatattaaaggagatacaatatctttacaactatcttcttgaataggtatttcaattaattttctgcagaatataagtagccccaaattcagcagcaaaatattacaacataacaagtaaatacagtttcaatgtgttgtattgtagaagagaatacataaaggacaaacaatgataatttaatcatataaaacatgagacatagccgaaatacagtccacttaaatagctttgtgaccaagaatgttaaatactgtgctaaatgccattttaaacataaaatctcttaaattttttgtgcttaaatttcatttttctgttaaactgtttcttattgtcaatactgccactgtaactgatattacaacagatcacaactttcacggacacatcaacatgaagacatttacttatgagcaaataagtcacttgtcattagttcacagtgtgggaaagtggtgtacactcggtcttgagaagggctttcaggtaatcaccaagtccttcacagatatttcctgatatcagatgtagtgcgagatttaaaagaatggagagcaacacatcacatgttggaagaa

SEQ ID NO: 338115 - DNA, 1000 bp, Homo Sapiens; identical to SEQ ID NO: 158492

SEQ ID NO: 338116 - DNA, 1000 bp, Homo Sapiens
ttttttttttttttttttacaacataaccctttttaatctgaagtgtagacttcatcctcacgttagaaaactccatcttttttttaatccctaagttctttatcaaacctttatgttaaagatataaataagtctcatacaaagttcatgtgaatacctctctgagacgcattttcaacattcatcaccgttcacacggccccgctcctggggccaggtgccagtgcgtgccggcccctggcgtgacccgtcggctcgctgtcctgatgggctacatgtgtgcacaggaaaagcaagtcactaccactagtgacagtatttcagctgttctctggacccctcctctttgctggcccaggtggcacaagggtcccatctccctggcaggtcttagccggcacaatccaacgctgcaaccggctggctctaggccagcatctcttcttctgagtctctgcctcctcctccaagcagatgcaggctgtcatcttcagatgcttctgcctcctcctcacttcccagcgggtctagggagcgttttgtgccccgctgcttggaaactgctagtgcgtactgcatgttatagtggttccagctacagagtttcgacaggtcgtccaggtgccgctggatgctcttctggaggaactgaatgacaggcagcagcgtcccggctctggacttcagcttctgtccgtgcaacatgagcagtttgtgagtccagaggaggtagaattccaggtggcgagacacttcaaaggaggaagctaaaaactccagcactttctccacatacagttcaggaagggaggaggtgaccacttcaatctcgcccctgggcaccgcctccagggcctcctgcaccagtttgctctcgttgagccggagggccatgaggatggccctggtgaagtcctgctggcgcagtgcctcgcgcaccctcccgggggtgacgctggtgtccagctcaaacgggtcaaagagcacgcgggtgtccag

SEQ ID NO: 338117 - DNA, 1000 bp, Homo Sapiens; identical to SEQ ID NO: 158493

SEQ ID NO: 338118 - DNA, 1000 bp, Homo Sapiens
ttttttttctaggagaatttagctgttctttattgacatggaatttggggtggcgagggtagccacaccctccaggaggatgaggtaggttcagtgcttccagctcacacctttcctgggtcttccttcagtgtgacagttcggttaaagacaagctttccctgatggctgtctggatccacggagaaatatccaagacgctcaaactggaacttgtcgaagggttttgccagggccacagagcagtccactaatgctgcatccaccacgtgtagtgatgccaggttcaggtcacttaaaaatccaccaggcacctcagtaggatcttcagggttcttgtgctggaatagtcgctcatagaggcgaacctcacacatcaaaggctgtgacacccagtgaataaaggcctttggcttctctccagcatctgcccgtctgcaggtcacctccagactctctacacaaccactggggcccttgacaacatgctgcagctcaatgacgtagcctgtatgcctcaggcccacaggctggccccaagccaggcgcttaaatcctggctctggctcctccttgaagtcagtcctctcaatgaagacaatgggtgcaaagggaacctgatggaagcctttggtctcatcagctgggaagttgggcacctggatgtccaaggacttggcagcaggaaagttggtgatgatgacccgtagtgactccagcacagccatggctcgtggggctgtgtcattcagcacatcacgcacacaggcttctagaagatgtggctccattgtggtttgtgccacagtcactcccacccgggcacagaagttgttgatggcctcaggtgggaagccccgccgtcgcagggccgtgagtgtaaagagccgtgggtcatcccagtcccgcacagcaccagttgctacaagctggaggatcttcctcttagagacaacagcatagtgcaggttgaggcggccatactcccactgcacagggc

SEQ ID NO: 338119 - DNA, 1000 bp, Homo Sapiens
agtttttaaaactttattcacttcaaaacctttatcagagacacggttctgttctggggtgggggtggccttgacaatgagctgatgttagcccttctccaggctggaggccaaggccagactggggagggggccttgggcctttcaggacttgccctagatggaaagatttgggccactccaatggaggatcaaagttggggctccagcttcccctcatcctagaagaggatgggggggggtcctcaggggtttttcggaggatggagaggcaagcagccgcctttccgtctggctgcagagagctgggacagaggccaagaggggcccatctgtcgcctcccagtcctgccagcttctctgagcaggctgggctggggaggaggacggggggacagctgtctggcccgggagatgggaacaggggccactttaggaggacaggaagctggactgtttgcttgtttttttaagatttttgatttttttttccatttcttaaataaacatgaatatatatatattttttcttttataaaactttcatggaataagggtagggtgggggcttcggtggcctggcttcctggcatcactcgtcatcaaagttctgactcaggaggaagttggcagccaagttctcatttttttcacacgcgaaataggcctggatgaccaggctctctgggaagcccagggccttcaacctctctatagcttctttctcctgcggcgtcacctggatgtagttcatctgcggggcctcctctcctatggcgcccacctccccctccacatctgagatgtccgccagctccccagggggctcgttcagcatctggatgaactgctcctggtgccggctgatttgctgtaaaagctgagggttctcctggcccagctgctggagcagggcgggcagcagcgcagggttctgctgaatcacctgccgcatgttctggaactggggctggtcccgcaggaactccagggggttctc

SEQ ID NO: 338120 - DNA, 1000 bp, Homo Sapiens; identical to SEQ ID NO: 246455

SEQ ID NO: 338121 - DNA, 1000 bp, Homo Sapiens
ccaggtacaaacagtttatttttctataaagagcaaagtacaaagaggcagggaggggagctgggcccaggggagcagccctgggcaggccccaaggccttggctatggtgaggacgacctggcagctgccccaggagtaaatgggcctctggcgtgcagtggagaaagagcaggagtggcgaggaggaagcccacgcctgctgccaggagtcatacaaagccaggcttcatggatgagcggcggcagttgggacagctccgggtcccgttgttctgcaggcacctgaggtggaagatgtgggagcaaggtagggcctgcagccggctgttcttctcgcctatggactcgccgcacaggccgcagtagagctccgtctcctccacgcactcgtggaacctcacaacgtgcgcccgcagttcccgctgcagccctttgctgcggtaaatgctctcgctcagacagtgcagcttgagctggctcagcttgttccccacctcctcggccagatcctgggctctctcgatggcatccagagccttgtccagcgccttcctggccacccagcacttggccacacccagcagcgcctgcacctgccccaggcggtttccgatctcggtcatgatgctcatggcggagtcgtacctggggaaggctgtctccaggtccccacggctccggtggatgtcagcgaagcagagcaggcagagcgcctgcagtggccggtccccgtgctgcagcgcgatcttcatagactcctcacaacactccatggcactgcccaggcggcccagcaggcgataggccacggccatgtggtactggctcatggcccggtacttcaggctccagcctttgccatagttgttgacaagctctgccgccttgcaggggaagaacagggctttctcgtagtccttgacctgggcatagaagctgcccaggctgcagcacacgcggcactcgagcatggcgtcatcattgttgtgggcatagcg

SEQ ID NO: 338122 - DNA, 1000 bp, Homo Sapiens
catagtttgcacactgctgcagtgtacagtgcagaggactggaatggatataatgtctgcaaaacaaaaacatgtctagtgagccatctactaatctcaaccactggtctaactcatgacagtctcaaaatgaatatttaagaaaaaagtagtggcatctaaaaatatagacgttttgcaactgactcagggagagctctttcttcaactactgaatatactggttttaaatgatggagtgagacaaagaggctcttgctgacgtgctctactttgatttctatcctaaaatctaacaggtaatcaatgtgtttggctacctataggagcatccaccaactgatatcattttttttttttttttgagatagagtctcattctgtcacctaggctggagggcagtggtgcgatctccactcactgcaacctctgcctcccacgttcaagtgattctcctgactcagcctccagtgtagctgggattacaggcatgtactaccacgcccagctaatttttgtcttttaatagatacaggctttcaccacgttggccaggctggtcttgaactcctgacctcgggtgatcaacccgccttggcctcccaaagtgctgggattacaggcgtgacccaccacgcccggctcaccaactgatatatttcacagtaagcacagtatttaaattctccttttaaaatattgaaaaaaaaaaaaaaaaaaaaaagacgatccagattaagcacttccagtcagctaaaaacgccactcagagaagctactgagcccttttcacacctggtttcctaatgggattttcagagaatttcaaacaccaaatgtacacatctatccaatctgttatttttataaagaacaacaaatgtcaaaaaaaaagctaagcaacctttcacagaaaggaagtgactgaaaacacagtaagaaaaaggagcacaggtataggcagggaaaaatgcaatgactgatgaggatagatttcca

SEQ ID NO: 338123 - DNA, 1000 bp, Homo Sapiens
tttttttttttttttgcagtacatgtcaaattttattgtgaaaattttaaggtagatattacatctaaacacttttcaaatagcatcaacaagtatgaaattactttgaaaacaattccttttcctttgaatacctcaaaaaattcatggaggaagttagtatctacctctctccacaaaaccaacatgtttctttcagtaatatgcaggtaacaatgcagaaataacatttcaatttttgatttgcaaacaaggattggtatgcaataactattattttcaatgcttgctttaatatctgctcgagtctcctttttcagatcgactctccccaccatctactatagatgccacataacttgagctaccacatgcttcacgaggatcagggagcaccctacccagagaaggcggattcctttggtcttttctgcaaacatgctcacgatcacaataatgaaaatcaccacagctcgagtaactctcccaacttctgccatatctatctcgtgtattactatatgcgtggcaggtgcttccaccataagacatccgaggccctcttgcaggtggtgcaccatgagaggtcccgtatctctgaagtgcatctctataagaacttccacttagatgttcagaatgatctctaccaagggcctcaccgtagccatcatgataactatatcctctagaggaatgttcatcccaactagaatgaccataatcacggtatgcatagtctctatgtggtggagcataatccctggtttctcgggaacttggatgatttctatatcctctagaataactttcatgtcgacgagaatgaccataatcacggtatccatggcctctagatggtggagcatactccctagtttctcgggaacttcgacgatttctgtatcctctagaataactttcatcccgacgagaatgaccataatcacggtatgcatggcctctagatggtggagcataatccctagtttctcgggaa

SEQ ID NO: 338124 - DNA, 1000 bp, Homo Sapiens
ttttttttttttttttttttgcctttaaaatcattttataaagaatggcacaagttggggtttatgtttactcagatgaacccgtccccttagaggacacaatcccacccccaacccccccaactccacgactgcccatcattgctgttaatccctcaggggagggttcacagctgtttatgaagccaagagaggttctgggcaagatcacagctggggaaacaggcccaggccctgctccctggtgtcctccatgctggagtcagcggtgcccaatgacggggtgatgtgatcacatctgcttccttctccacaacaagagcagggctggcgggcaggccaggaaagtcctccaggatctgatcttgccttccgactgaccagtgcgagcgacttctgcttctcttgggtcttctagtggtagaagacagctggagctggggtggtatttggatcaccccagacccaagatcagtggactggagcaccatggaaatgtttgggagggtccctcaggattgggactttcccctgaggcctctaggctcctccaagctgtggcctcaaggataagagagattgtgtcaggttcatgtgtctctggaactgcatgattgctgttgagtctgtatgtgtttcacctgtgtatggatatgtgtctctgatcagatttgtgccagcccctaaagtctatctttaaagtgcacataagaggtttgagttttaactctatgtctgagatgctcttggccttcattgtaccctagtcccacacccaaatcccataaaacaattatctccagcctctcatcctcatcccatccatttttggttagaccccaggtaaagggtagggtgcccaaatacttccttgctgagctgggaggaaggcagaggcagaaaatgtaaagctccagattcattttatacaggtccttctgggctctcactgccagtctctgagcttgatccatctccccaagccgaagcccaaagggaa

SEQ ID NO: 338125 - DNA, 1000 bp, Homo Sapiens; identical to SEQ ID NO: 158494

SEQ ID NO: 338126 - DNA, 1000 bp, Homo Sapiens; identical to SEQ ID NO: 158495

SEQ ID NO: 338127 - DNA, 1000 bp, Homo Sapiens
tctagaaagttaactgtaacctgcctaaaggagcccacacacctgcttaagtcacaaagcatctaaacttctgtgtacagaaaaaacagaatgatcagtcttgacaactcatagcagagagttaattaggtaataagttcagttctgctctatcacagaacatgaacgctggggctgccttacaaaccaggaaactagagcccaggcacggtgaatggtacaactgtggtcacaaaattaagttacaggtagggccaaaattagaatccagagatctagtcagctggcctttctactataccacacagatgtaagaccaagtttgttgtttacaaacaataaggaaaataaacattttgcctattccttcagagtactgctcttagctcttaactacttgtctatcagcctaagcttttatcttagactctctcctgaggctttccacatgttgtcacattggcacatatgtgctttgaaacgttttcaaacacttaacactgctgtcatgtggcacttcactggttttccttttatttttgcacctattggtcttttttctgggtgaattggtttgaattttttatttagttggttttacaagcaaaccccaaatatgttgtttacttatgctgagcccttaaattgtgttaaactttgagatagcattttatttcactctgcctctggcctttccatattcatagaactacttccaattgagcactccaggtttttgatgtgtgtcccaatatctcagtgttcttacttagaaaaaccctcagcgccatgtcagtgcaatcctggtccttgtctaactgaaaagcaaggtgaaaaattacctcttcctgattgtttataatggataccaggtgaaaactcatttttgcaccatatccagaaccatttctctaatttatgcctgaaccaaatgagctggctgatttgaaaccacaaagaagtcagtttataagatgtatctctctctttctcagttatt

SEQ ID NO: 338128 - DNA, 1000 bp, Homo Sapiens
agcccctaggactcctcctaccaccttcttcctggtgctggtgactgcccctcagcctcagcctcatgtgctggtccctcttcccttcaataaggaggttgtcccaggctctgcaagtgctctgtttcacacttcagagacgtgtgtgttgtttttctttagcccagtcctgaatttctgctgtagcaactataaggtagaaaattaggccagtcacattaatggctgccatcaggatgaaggttttaaaccaggcggattccggatcctgcttaaggatcaatccagtcaaagtggaagcaattagtcctcctatcattccagttaaagttgaacatgctttaataaatccaaaatatctgggagcaatatccaagccatttataaacactccacccaagcaaaagctgcctgttgcaccagcaagtattaggaaaatgacaatgctgtagaaggtggaactcaggtaaggcaggcagacaccaaagattgcaggaaggagaaatcctgctgctgtgaagagtttccggacagcaattacgctgagaatattcctggtcaggaagaagtctgataactgacctgctaggttaccacagatccaggcaaacaaatagggaagggaagacaagaacccattctcttttatattaacatgaagcatggagttgataaacattggagtgtatagtgtcatgatgttatgtgaccagaaaaacgtaaaactaccaatggaaatagcccagactggaagcgacttaagtatagccttgataggcagagattgtctacttgaactgacctgctggaccagggaggatgtgatgtattccttttcactgatgcttatacatgggtggtctttggggtcatcataaaacagaacgaaccagagaagacatacggcacagccacaagcaccaaaaatatagaagaccatgggccagcccagagattcacagataactccagtcacaagtaggacaataaagggtcccag

SEQ ID NO: 338129 - DNA, 1000 bp, Homo Sapiens
ttttttttttattttcaaatcttcaaacaaagaatagtgtaattaaggtcagacagggccttttcaagtaaaagagattctctatctctttgtgtgctgcattctcatatttataacgtgctttttacatacagaagggacatttgctagactgcttttctgaaataatattaccttgtttatctagtatttaatattgttctgcacatggacacaggaaggggaacatcacacaccagggcctgttgtggggtgggggaaggggggagggatagcattaggagattcacctaatgttaaatgatgagttaatgggtgcagcacaccaacatggcacatgtatacatatgtaacaaacctgcacgttgtgcacatgtaccctaaaacttaaagtgtaataaaaaataataataataatattgttctgataggatgtgggaaaaaataactatttttaccaaatactcttgtgcaaaatgtatgtaatcccacaccaagggacttctcttcagatttcatacacctcaagagaaccatatatccaggtatggcagccaaagaataaatgaaactgctcatcgctgacaagattaggaagtactggagcatcaaggaacagtcaggtcctttgtcgcacagcccaagaactgcagatgaatttcctgatgtttgaatacagctgcaattttggaacaccatgtttattcccgttccaatggatgtctcacaaccagcaagacaagctgacagatatgacaagccattgtttccacacacaggatcccatattttagatggacagttgcaatccacattgcaatcagcaaagatgtcattttccacatataaatcttgtggaattccttcataagaggtatttattccaacaactgaagaattttcacaagtcatgagaaaagataaaaaatagagaagatactcaagtaaggataaccaacatcctatgtgggcagcttgtttgacagtaatcttgaacttc

SEQ ID NO: 338130 - DNA, 1000 bp, Homo Sapiens
ttttttttttttttttattggtactaaagcctttactgtaataaaccaaatatatttacaatttatacaaatgtttaaccttcaacaaaaatacaaaaaaacatttcacaagatgcaaaaccaggaaacaagttcattggagacaccactgctctacaaaggacggaaagtgaggtgaactgcaaggaacagaaaggtaatctcacacttgggcaaggcgtgatccccagatcacccagaaagaaagaatgggctgtcatgtgagtcggcagattccgttcctcaatcctacaacccatggcccctctgtccgcttggccttggtgctccatttggtctatgtagacaggtgactttctgctgatggacttgtcgcctcctctttgtagactcaaagtagttttctgtcaaggtttggaaacaggtgtttgtaattttttttctcttttaaagttacaacttttctatttctataaattcgaaacattttggcccaattcaactataaacgttaaaccacataatgttttcagtagatgacttcatagactgtagccttcttgtcccccgagccagtgactatgtacttatcatccacagagatgtcacagctaagcactgacgaggactctttggactggaatatgctggctccatagggggtccgccaagcattgaggaggttatcttttccagtactcacaaaccatttaccacagtaagcaaatttcagggacagcacgcagctctcatgcaggtgcagctggtacttgtcaggcttgttcacgtgcagcacctccacattgctgctctccatgcccactgccagccactccccggtggggcagtaccccagggagaagatctgggaggtgaagtcgtgctgctgcagctgccgcccctcgcgcaggtcccaggacctgactgtgttgtccaaaccacccgtccagagcttggtgccatcattagaaatgtcaatacagctggctccgtctgtgtg

SEQ ID NO: 338131 - DNA, 1000 bp, Homo Sapiens; identical to SEQ ID NO: 158498

SEQ ID NO: 338132 - DNA, 1000 bp, Homo Sapiens; identical to SEQ ID NO: 158500

SEQ ID NO: 338133 - DNA, 1000 bp, Homo Sapiens
tatacttatgattagttttattataaaggatacaaatcagctccacaagccaaggaagacacagggaaaggtctggaagggtcttgagcacagtgctcccatgccccctcttcgtggaattagggcacactgccctgccggcatagccacagcttcaccacccaggaagctatgctgagctttagtgtccagagtttttattagggtttcatgatgtactgattaaagcactggccagatgattaaactcagcctccagtcccccgccccataggtcaggctgactcaaagcctcaaacctctaatcacatggtcagtctgtctggtgaccagccccagctctgagtcatcccaccttttagcataagctcaggtgtgatcccatggcctcacaaataacaaagacactcctattaccctggaaatgtcaaggactgaaagtctccctcccaggaagcagggacaaaggccagttcaattctttagacaacctccaatccacacctcctggaactcctaccccaattgaaacaaggataaaatccactgaacatggagggcccattgctggcctgaactatttttgtttcttttttttttttaaagctttttattatagacattttcaaacatatacaacagtaaaatgaataatataatgaaccctcacacctccatccctagtaactgattatccgtgtgtggcttactctttgatcgatactctcctgctttcccctagcccccacagttagactgtcccgcagcaaagcccagacagacatcctatcggtctgagaattccttatcaaaagcttcccgaagaggaactctatatagggcaggactaagtgtgctggctataggtctgcagaaatctcaacccttgggagcccttgggtggggcctgggcaggtccctgggcagtagccgtctgtagtgggcggctcatctgctgacaacagtatgacgaacaaatagcattttgtacccgcactac

SEQ ID NO: 338134 - DNA, 1000 bp, Homo Sapiens; identical to SEQ ID NO: 158501

SEQ ID NO: 338135 - DNA, 1000 bp, Homo Sapiens
ttttttttttttttttttttttttttttttttttaatagggcacaaggtattttacaggtcctcatcattctgcttggtattctgttggtgtaacttttgtgtgtgataaattctgctccagagacttatcctctaagctctccaatgtgtctttttagctggagctaatgtgtaggaaggccatttttaaagcaaatcaaaacattaaaaggtttaacatctgttaatcgggtgttttatctagaggacataaaagatatttacaatcctctagcttaccgacttaacgctttcctttatactggatatttatattgtgtagaaattgaaaccattatcacaatcagtggaattattccactttcttctaagacaagcaggaaaatgttttccttttaggttagaatttcatgattagtaaagtgtatcaataggcaatgcggagaggcgaattgaactcaattattatcttaatttctgctttcaacaaagcatactgataaagttcttgataccatttatgtttcatgaatttccatttttagctccttccttaaaatatggatacagttcagaatttaatagcaacaataatcacagagagaagtctccccaccttggggcatttgtgctttaaaccacagtcacttaaaaacaaaacaactaaaactaccctccaagtcaaggccatattgctcaaataagaacttcaaaacattattttgatttcctaggttgactaagcatacgaattaataataggattatgtatcaaatacagtttcatgaatggaacacatcagcattacccaatcttcctcaaacatagattggttgccaagagagatgcttttcaacatatcacaaatgtgctgtttgtataaacacttcctattacaaatgctcttgtttttgtttaaatgggtgtttttaacctgagctattaataatttttttttccttgtggtgcttggctttcagaagaaagaatcttcaggc

SEQ ID NO: 338136 - DNA, 1000 bp, Homo Sapiens
ttttttttttttttttttcagcaaatggaagatcaaagtttatttactacctgcatacaaaaacatattgcacatcaaacaaccgaaataaaaaaaaaaaaaaggaaaaaaaaaagatactctactgaagactaacatgtagtttatacagaataaaccttctggaaattgatcttttcagtagttcaggttatgtctgaatggacatgactaattcagcttagtgttttaactaaagctatgtttgatttttaaatactgtacactttaataaataaaccaaacaaagcctcaaggtagaacagtcactgccaagtatcgcccagtgtccctgcagatgagagtttaacaaatgtattccagtggtctgcagattttcctctacatacagcatttaaaaaacacattaaaacagaccagtttccagactaaactaatgaagaaattacaattcagtgcaaaatattttagactgcatttcattctagttttcctcaggtgaagaagtggttgcatattaaaaatgtaacaaaagcagctaatgctttcataaagaatattacgttagggatcccaccccacccaccaccccccatctctgccatattttgaaaacaaaataacatttcctatagccagcaacttttttttaatgttacatatactattctcaaggcacatctgatgatatattttataacacagtaggtgtcaaagtatgtttaacatatgatttcttcaggatccctcccctttttgaattccaaatggaggaactgaaagtgcgatgtaaagactggcgatccatattctatctttggcaagcttgtacaagcactattgtaaatgtaatgtaaaagaactgtaaactaggaacttcttcagtttatgaaacaccattcaggactgctgcttcttgagtgttttcttcttttaaggtattaatcttttcttctcctggagtacgctgtagcttagaaatgtcatcgccagaagcact

SEQ ID NO: 338137 - DNA, 1000 bp, Homo Sapiens; identical to SEQ ID NO: 158503

SEQ ID NO: 338138 - DNA, 1000 bp, Homo Sapiens
ttttttttttttttttttgtatgagtctgtgatgtatcaagtgctccaactactcaaggtagcgcagaagggaaaacaggcacaggccggggggttttgggtgattacacaaatgggcttggcctccttaccccactgcaaactgctgaggcgcaagggagctcccagccctcagcctggaccctgggacmgtgccacctgagcccgaggctctgaagcactgcgtgatgacagttcccacctgcaactcagcagccagggaatgaatgagagttaggggtggcaggggccccggccatcagtggggcctgcgctgccgcctccgctgcactgcctggcgcagagcctccagcagctgctcctggttgttgcagacattgtaatgtgtcaggtgcagcagcttgtccacgtcctcctggctgtaggtcaccttcgtgtagtggtagggagagtccgatgaagacaggttcacctccccagctgccgcctcctcgggtgtccgccggaccccaggggccgagtactcccggaaggagtcgctgaccagaggaaagtgcagcaccgcaggggctccggggcaggtggggtcggagaaggtgtggcactcccgaggctggagctgctcttcggggctgggcgagatgggtgggaacgggatcccctgctcctggcagaaccggcccaggagctgcaactgctggaaggctccgtggaggttgtagtccaatgacaggatgaggtccacgtcccgagtgggctgcaggaggggcaggcagctggtattgatgaggtagccaacatccagcaggcacaggtggggctccgagggtgtcagctggttggggagcccatccagagtggtagctttccatgtggagaagtgaggatgctgaaagtagtctttgtggaaatggaggccacgcaggaaattatgtgtggcctgggccagtggacgccacgtcagaagatcggtgaaaaactcagctatyctgccggctgt

SEQ ID NO: 338139 - DNA, 1000 bp, Homo Sapiens; identical to SEQ ID NO: 158504

SEQ ID NO: 338140 - DNA, 1000 bp, Homo Sapiens
ttttttttttttttttttttttttttttttttttttttttttttaggaggactcaaggcagagtttattggcccctgagccccctctcccattcctcctcccctcatagccaggccaagactgagatggaggtgacacagacccacaaggactgagaggccctgcctgagggataatcaggcagccacccagggaggaggatgggggagtggggagaggccaggggcgtggtcctgacctcctgctgtagatggggcatcaggggccacctacagatgtcaggtcctctcctcccctcctggaggtgggggtggagcccagtgaacttgggcagctctggggctacgattctctttggccaccagatggatgctaccactgtccctgcccactctgttgacttcctgagtctggggacttctgctctggttccatttataagctccctgctctctgggaagggctcggtgaccccttgtcctctccctaccctcacccaagacatcatcctgagaaaacccgtcagtctcagcctgggaaccagagggcctgcccagcccagaagacggaacttggacatgagactttcacagaaagcctctggaagggttgggaaggcaatgagtcacttggcagttttggatggaggggcagcacctcaggatggaggtgccaggccctgcttgctttggtctggccttgtccaggaccgctctggggcggaacctggggctccggatccagcatccgccggccctcagagggatggggggaatcacagcttctcctcgcctgcctggatgcggctgtaggcctcttggtccagcgggacgtagcggcccttctgggcatctagatagaacagcgggtctttcacaatagccgggtcaaagccctccttccgtagctctgtcttctggaacttgtaggttcctgttttgtgcagctcaggcaggaggcgcaggaagatggggcgcgcatacaggggcagttccttctc

SEQ ID NO: 338141 - DNA, 1000 bp, Homo Sapiens; identical to SEQ ID NO: 158505

SEQ ID NO: 338142 - DNA, 1000 bp, Homo Sapiens
ttttccgtccacggtttttacagcgcgttttattattcataaaaaactcgaggccacgaaggccgttatttcctgtggtagtgcagcctcggggcaagggcgcgttccctatcgcaggatcacttgctatggtaagccgcccaccctgcgcgctcctccgcgcggggaagaacctgcgcggcaggacgtggtgttggagttggggcgcccggagcgtggagtggggagacctgatgcagagagtctggagtcggagctgggggtgctgcaggtaggagcaggagcggggcggagagggaggcccgaagaagaccccacacaggttggcgcacggggcttggggaggcttcagcccagaagtggagagggttgacagacgcctgcctgattagaaaaagccgggagcttgggaaggagacgggattgaagaagccacccggcagggaggccgaacggccagagctctccgggtaaaacccgcctgcggtgatctgggaagtgtgtctccacctagccctgcgagcagcggccttcctcccgcccgttagaagggcgctgtgctggagtacgaacccggcccagagaagccactcgcccttctttgtcacttaaaaccctgtcccgacgcggatctcacgtctagacctctgtctttaaagcggatgtagagcgcgtctaaccgttccctaaccattgtgtcaccgcgaaaggccggggctgtgtggaaccgtcccgcacgtgtgcgatgaatctggctccgctgagaacggatccgtgggctgtctggcgcgggctggggcagcagccgagagttagtctacagagctagggcccgagggtggacctgcgtccgcgtctcgtcacgaaaggaagctctttttggagaggcaaaacgtggtcgcccagatccggcgcagctgtagccgtgggcgctgtgcagtgacagccacacccgccacctgtcacgatcacagttccagggcaaggggaagggtcaagg

SEQ ID NO: 338143 - DNA, 1000 bp, Homo Sapiens
ttttttttttttgagtgttatgctagttctttatttacattatttaatcctcacaacaaacttctaagggaggtattattattggcaaatgagaaatctaatgctcagagacatggagttaggatgcaaccacatctgtctgactccaaaaggatcacataaatagtagaattcaatttaaaaaatatgtaccgggcgtggtggctcacacctgtaatcccagcactttgggaggccgaggcaggtcgattacctgaggtcaggagttcaagagcagcctggccaacatggtgaaaccctgtctctactaaaaatacaaaaattagttgggcgtggccaggcacggtggctcacgcctgtaatcccagcactttgggagatgaaggcgagtggatcacctaaggtcaggagttcgagaccagcctggccaacatggtgaaaccccgtctctactaaaaatacaaaaattagccgggcgtggtggtaggtgcctataatctcagctactcgggaggctgaggcaggagaattgctggaacccaggtggcgaaggttgcagtgagctgaaatcattccagccctggtgacaatagcgagactctgtctccaaacaaaacaaaacaaaaattagccgggcgtggtggcaggagcctgtaatcccagctactcaggaggctgaggcatgagaatcacttgaacccgggaggcggaggatgcagtgagccgagattgtgccattgcactccagcctgggcgacagagcgagattctgtctcaaaaaaaaaaaagaaagaaagaaagaaaaaaaaaaaaagataatccctcactccctgaaggcccaccctacccttgacttttcttttcccaaaaaataaaattcaggaagaggaaagcagaacaggttgtacctcatacataagcacacacacattttcacacacacacacacgcatacacacaccacttatacctatcaccaccaccctggatttcctagccc

SEQ ID NO: 338144 - DNA, 1000 bp, Homo Sapiens
ttttttttttttttttttttttttttttttaattaaatgaaggttttatttcaaaattagtcttaagagtataagctgtttttgagggctgtagccagactacataatgagcggtgaaagcggctgccttcccctctcctgacaccagcaagggggaggcaccatcaccggccctgccccatcatgcatccaatgattactagcactagaagccaacggcaaaggaccccgcgcgcttgctcgtgtttaatccaggttaagctatacacgtttaaatacatgtcggaggttacatggtctcatgcagtccctgtgatggaatgactcttgctcagtgacctcctgcagcgaggctgctccaaagggcaaggttaggtagggcagagcacttttaaaatgtagtccgttagcaaagtaggcaccttctcattatcctccttcatggcaaagagaatgtttgtcagcatctgcaggtcttccactgagggaggagaggctttcttctcgtaaggaatgactgtgttcagatactgtttgtcagttcctgaggagccaaaggtctggcggatgccactctgcagaatgttggagatgccttccatgctgaagcgcttgagaggcatctggtttcccttctctatccggctgctctgcaggctcagccctttctctttccgcctctttttcatcagttctcgctgctccttctgcttgttctgaacctcaataagcaccgtgataaaggagttcttcacttccttctcaaactccagctcgtcccggcgggccagctgctgcaccagctcctccgagaagtcacggatggcaccctccacctggtccagcagctcggtcagctcagacccagacatgtgcctcagcccttcataggaccagttgttgttgaaggtctgtgtcaatgcctgcatctcctgcaggaggaccgagtctgcctgggaggaagtttctcctccatcctcttcttccagaacctcctctt

SEQ ID NO: 338145 - DNA, 1000 bp, Homo Sapiens; identical to SEQ ID NO: 158507

SEQ ID NO: 338146 - DNA, 1000 bp, Homo Sapiens; identical to SEQ ID NO: 158508

SEQ ID NO: 338147 - DNA, 1000 bp, Homo Sapiens
catcttttgggggaatttttagtcataaatttaggattccactgtttctttaaagcaaagccactagtagctgagggtgatggtgtgtgcctgtagtcccagctgctcagggggcagaggcaggaggattgcttaagcccagaagtttgaggctatagtgagctatgattccaccaccgcactccagcctggatgacacggcgagaccacatctcttaaagagaaaaactttttaaaaagcaaaaagcaaagccactaaaatatgttagcctaaagagggcatgcctgcttcattacagacggtatgacacatcttgagataaaaactaggatggctttcttatctgggttcctgactgctccttagctttgagttcttctagcttcttctcatagcgactcataaagtaatcatctggttcaatctctgcattcttcaagttttccatgatcttttccagtctgagcactgatcgggctccttcaatctttcttgtactcaagtacaaggtgaactcctggaaatccaggagcttacaggtgtccacagagcagatattccggatatcactagttctatccaaatgaggaaaaaacaccagtactgacaacttctctaggtcctggaggctcacttggaattcagttaactggggctggaagccgatggcttcattgggtaccacaaaggcccctagcgccagtggttcggtagatactgagcttctgcgggccaggattaccttataaaggtgtgaggggactgccacgttgtcctcgccaatcacctggtaactaactattttctttccatcgcctctagtctgaggtaaggtcaaaggcccagataccacccaaacatcttcaaacctttctgtcagctctcgacagtacatttctattctgttccaatatccagaattattatcaaaatcctgaggcacaatgttagaaaggtaaaaggtttcagccatggctttacttgaaaatttgttatttc

SEQ ID NO: 338148 - DNA, 1000 bp, Homo Sapiens
ccaaaagttctttggggtttatttgagttttaatatttgaattttaaatattaactctatgccactgtcttatcttttgtcttcatgagttccaatcttacctgtatcatcttttctttgacaatcttctttatctgtcattttatttctgggtctttttggctcttcctttaatattgctttgtttgttttgcttctcttagcttttcttactcctaccttctacgtgccttaatgtacttgtgaccatatctattttcattaagatataatttagtattcatatctgtgaagatttatctttttgttcaaattatttcccaagttcagtcagttctcttctcatatatgcttgtagctttttcatttttattctgagtttttgaatttctgatctctggtgttcttttatatccacaattatttattttcaaattcatgttgaagtgtttagttacagtttactgtttcatggtccaagacagcctttttctgctggacaataatgtaaaatgtctttaaaaagtaatgtctaggtggtactagggggagttgtctgtcttcttcggaatcttgggcttgctgttgtatctaatgggccattatctttaacctcttgcttcctttgcgcctttcatccaccatgcctccaaaggacaccactcactttcaagatggcttcatctccatcagaagtgatgcctttggtcccattcattttctaagccccttccttttaacttcccagtagctactgctctgagccactaggtcttaaacctatctgcaggattttgtcactctgggtgagaacatgcgtattttgatttagctggagtcctgagctcagtaaaggccttgggcagaaaaatctggaagagtctgcaggagtcagatcacagaggactttctatagaggcttttgcaataatttgagcaaggaatagagaggtataaagtaaaacaggagggataaagaggaaggaaaaaggaactcact

SEQ ID NO: 338149 - DNA, 1000 bp, Homo Sapiens
tttaaggacaatttactctttattgattaaaaatgaagaaaacatgcagtaaaatacaaagtccaaaaaaaggaggaaaaagttgaatattttacatcttccataacctagcatacatcataaggaggaatctccacttattggtacatcattattctctcctccagattattaaatattatcagctggctctaggatttggttcaaaacttaagcaaaaacccaacaaatcctttagtcgtttagaaagaccaaacatttcacaaatagcattggcacatattactttgtgctatagttagtccctactccagggacaaggggatcctgggacctagtcaaagaggtgcactctgaatcagcattcctagaaaggagtacagtcactcactaggttacgtgctgttccacctgggcagtttctgttcatgtattttctcagtatcactgcacaagccagcaaagggagtctaccacacatcatgcagaagaagtaacactgtcctgggacatggtgtctgtcttctaattcctagcagggcaaacaatgaactgaaaagaaggagaaaccccagcccaattctatttgccatgactgccccactgcagttcacaggtaatgatgggctagagaaagtgaacaggggatgggctgctgctcactcccagctaggcaccagaccatctccacaaagaatgctagaacagagtgatgctgccaccccttggattcataaataagtagattttgatgggtttgaaaaaaaaaaaacaaaactctaaggtaagcggtaagccactagtcttgtgccaaagaagatgctatctcttttctatacctcattcctacctccccatccttgttcctctccgtcccccctccacaaaaaaagaaaaagaaaagctaagtatttttctagcaagctggtcaatcttcttttctccctcctggctcagcaggctccctccttttaccaagactgctgggacgttgaactcc

SEQ ID NO: 338150 - DNA, 1000 bp, Homo Sapiens
ggaactgtatgttctttattgtcctaaaattgcatagtacttttgattgtgcacgcttttaaatagagagcagagtcgcccacttgaaactactctcttgcatgggatatttcaagctgttttactatgggcaaggagcagggaccaaaatgctgccagggcttaaaaagagccgtgatcagattaaacagaagttggagaagtggagggatgtgggccacacacgagaagaaaatgttgaaggaggctgagatttcaactggacttataggaggcataggtggatgcaggaggggctccacggatgtcagagaacaggattcaggagcagcctagagaggaaagaaaaggagaaaggagtccagagggccaatgccttgtgctcacatctgagatgaatgccacctgccaggagcaagcctggacacagagcatgggtagctaggatgaacagtttggccgttaccacggctacagaaagccacatactagaaaaataacttaaaagctatacagtcgtcattataaatatcttgtcttttaaaactaactctagtgttggttataaaaggttcacagttactctgaagagagctgtatctctattgcacagtagtggagaagtctgctctgatccccatgtgtaaacaatgattcccttctcctctggcgacttcaggacacagagaaacagtatctgctgtaagcaaaagcacttgggtagaaggcacgtggaagctgtcaagctctacaggagcacgcagaacatgtgggatgtccacttctcttcccatgtagcatccctgctgttgggacaggtctggaatcagatgaaaggtggtgatggtcttgtcacggtctcagcctcattccacagttacagacttggccagatttctggggaagtcaacgtcatatcctcggagaacagccaggtggaaggacagcagctgcagcggaatcacgctcaggatgccctggaggcagtccacagtgtggg

SEQ ID NO: 338151 - DNA, 1000 bp, Homo Sapiens
ttttttttttttttttttttttttttaagtgcctatgggctaagtcttttaagacttcaaaatatactcaaatgcttaaattatgacagcaaagacttaaggaaggtgttgagaacggagttgatacaaaattaatacgttactttgatagcttagcaaaggcctgcaacagcttttatcaagagtagtgtgacttttgctgaaagcagcagttttcttcatggaaggaattttatagcaggggcaaaatatatagaaacaatgaaaaggtttttagaaaaattcccttaagatgttaattatagaattatcttgatcatttgcacaagaatttttcaaacacttttcaaatgtgtcaactgagcatcttgtcttagcagagaaacgtgcttaaaaatgcaacttgttttatcttccttggtttttctcaacaatttccaaagaaaattctggcttcaaatactggaatatgttcatccgactgaggtctgagaaagaagaaaattaaaattgaacaacttgcttttttcttccttgatttttctgaacagcttccatggaaacttttgcctcatacagtggaatgggttcatccaactgaggtctgaaaacaccagttgataacttctccatcacatcctttaagatacaaagatattttccctgttgtacatttgacaaattccaaacttcatcattcaggaaagctaacgttgctcccttgaggaaaaggcagtggctatctggaggatccaactgaaggttttcttctgttgttacccagtggcctccaacaccaagaagtgtgatgatatcatgtttatgtggtagtagttgtagttttacagctggttcatcatctttactatataatctcactccagcatctaggacaatatctactcccaggccacctgtttcttccaaacagctttcagcaacatgaactttcccattagatacatcaatcactcgggctatgggaggtctgaatctttca

SEQ ID NO: 338152 - DNA, 1000 bp, Homo Sapiens
tgaaggccaagggtttaatcctctttattataactgctgagatcagaagcatgtgcaaatattctttgaggtcaagatggatcccaagagacctctagccagtcactaactgcttctccatcctgaatattgctttgtttacttgaagtttacacatgggaatgagtaaaactgtgacctccaaaaatgacaaggaatcgccgaggagataaatcttacaatccaagtaaaaataaatctgatgatcacaatgagacattaaaaattaaaaagagcaatgcagaaaggagaggggagagagaggattgtaatagccatgaaaaacatgtttttttaagtaacaaaagaatttagattttgcaatgattgcaacacagacagctattttgagttgggggcaagttaattatattcaaaaaaacatagcgtctccagaaaaaatctttttttttttttcagtgaaatagtttagttccttcatatagagacatattacacaatgttaacaaccatgaaaaacaatacaaaatgccctccatttaacaagtagaaaaatataactagtatatatggcaattgtgaatctaatactgtacagaagtactttatggattttacaaataaattataccttaaatgcttttttaaaattctttttcccctcagatgtacaccagaacttacagtaggaaagtttctgagcttagcttattgcaaatcagtgccagtcaaatgttctgccaacaagctcgaagaacttcttatttggctcatgaaaatattcgtgcagtttattgagtagtttgggatcgacttgggggtgcgcccggcctttggactcatgtaagcagcggtcccggccgctgtcccgcaggcagtaaaagcccttggttttgttaaagtagaagttcgaagcattgatctgcggcgacagctttaggaacctctcgaccttttggatctcagggaaggggtccctgatgaggcggtcgccgtccac

SEQ ID NO: 338153 - DNA, 1000 bp, Homo Sapiens
ttttttttttttttttttttggacagagttttgctcttgttacccaggctggagtgcaatggcgcgatctgggctcaccgcaacctctgcctccccagttcaagcaattcttctgcctcggcctcctgagtagccaggattacagccatgcgctaccacgcccggctaattttgtatttttagtagagatggggtttctccacgttggtcaggctggtcttgaactcccggccttagatgatccacccaccttggcctcccaaagtgttgggattacaggtgtgagccactgcgcctggccaagacttggagttattctttagagtatgttgactgatgtttgatcaggaagtatctagtggtgttcatataaattttgagtggagtctgtcttgtttttcatagtgtcttctgggttaaggtagaacccagcacaaaataggtgggcaagaaaactctactgaatacaagcaactgttgtatttttgatatacatgtgaaactcatacttccttatttagatatctgtgtacataatcaaaagaaaggtagcttttctcatatgctgtagatgacatgaaaaccaactccttctgtgtgaacattcatgagacataccaactctcttttcattttttttaggcaaggcatgaaagtatgtggaaaaattggtgaaggattttgcctctgaaagtttatactgttttctagagctttccttggacttccttcaaagctcctgaattgaagcaaatttatgatcaaattgaacaataactggaccactggtgaccattgtatagcaggaaggtgttgaaatatttctctttcaatcctgacccgagtagatcatccattcatttagtgatcagtgtcttaatatttagaaactcgccaatcctccaacccatcttaataatatatttgctctcttcagcctttttccagttagtactctcatcagtaaggcacatgaagtgtgaaattttgggccccaaat

SEQ ID NO: 338154 - DNA, 1000 bp, Homo Sapiens
ggcacgagcaaagtttattcacatgcttttgttttctctttcaagaatcaaagtttcccaaattaaatgtttctaatattactacatatgcctaaaaaaagaaaaaaaaaaaaaaaaaaggagggggcttttaaaatcaggacaggggaaaagagatcgaaaatcatcaaattagtcatcttagctccaaatgaaatgaaattagaacaaaactgttggtttctaataggaaacaaaaatccaagcatcgctctcccgccctacccctgcccccaccccacacaccaacaaatgagaaaaacagctaaagcccaatgcgttgtattctgctcaaaagctgggcctgacccctgggccccatggccagcctcctctgtccagtgggagacagcgccagggatgcctctcgcggtagtacaatctgtgcggctggtggggggtgggggtaggattttcagaatcttcttgaggttcctctgttaagctcctcaccagccatcttcccagcgcctctctcccctgggcaggaatcccgtcaagggtggcccctactcggttgtgggctgtatattgtccttctcttctcggttctctgtcccactctcgtcgtcttcaatctccccttcctccccactgaacttgtcatgggcccacttggggctggtacttgatttccggaacatgaaccggccccgaccccgaggaaaggctcctcggccccggccccggctcacccacttgtcactgccttcgccttcacggtcatcatgcaagtaatacttcttgcttttgggtgtgtactctgggtcccactcctcttcccggtttcttttttgaaaatcgttgttgctgttgttgttattgttcccagagtagttgcctctgccccagcctcttcctctggctcgaaactgaaaggttcctcgagctctgccacctcctctttcacttggacccacaaagtctttggtccccagtcttgatttgtcaaagcccgtgg

SEQ ID NO: 338155 - DNA, 1000 bp, Homo Sapiens
gctagcccaggaatgggattgggaattaagaggaaagggtggggccacatccagtgcacaagcagttcctccaggtggctcagtagcgtccaaatatgttggtactgggctgtggctgggtattagagagctgttgttgaagttgccggaccaaagctgctgtctgttgctgctgctgggtctgctgaagcccctggcgctggaactggggctgggactggggctggggttggggaggagccgcctgttgctgctgttgctgctggtgttgctgttgttgctgttgctgctgctgctgttgctgttgctgctgctgctgctgctgctgttgctgttgctgctgctgccgcaggatctgctgctgctgctgctgccggatgtggtactgctgctgctgctgctgctgttgctgttgctgctgctgctgctgttgctgttgctgctgttgctgctgctgctgctgctcaggtaggatggctgttgaacggacgcctgcctggacgccctgggcactcattggagtcatggtacttatcatgggtgtctgctgcagtgtctggtgtgaaaacctttgagtggaggtcagtccatgtccataggtgggggcctgctggtgcacatagccactgggccgctgttgcaggtggcgggtaggatctacaagagtaggattggtagaagggtgggtgctctggtaaggctggctggagtagctggggggcaccatggtacctgcagggcctgtgtgttgctgcaatcccacatgagaaacataaggagtatagccctgggaagtctgcaaaccgtaggaagagctgggagtcatctgatggacagatgactgtcccaacatgccctgactctgctggagctgttggcgaaggcgctgtccttggggcaccgcaggttgctgctgccggtacacagaggtcttataagaggagggttctaaacccatgacgccagtcatggttgtgggcagcactccagggtaagttgg

SEQ ID NO: 338156 - DNA, 1000 bp, Homo Sapiens; identical to SEQ ID NO: 158509

SEQ ID NO: 338157 - DNA, 1000 bp, Homo Sapiens; identical to SEQ ID NO: 158510

SEQ ID NO: 338158 - DNA, 1000 bp, Homo Sapiens; identical to SEQ ID NO: 158511

SEQ ID NO: 338159 - DNA, 1000 bp, Homo Sapiens
tttttttttttgaaaggttaaaaataacattcttttaataagtttaaacttttagagaaaagagaaatatactgagaaagacccatataactgcttcaacaaagaaaacaacttcttcattatcttcatactttacttcatattacaaattttgtgctactgttagatgatatattaattttattttcattacataaattgaggaagaaatgcagaatcagattcaaatatattacaaggcatttagggaggtgtgtcctgttgctgaacagtaaattatctgaaatctacttttttttttttttggagatggtctcattctgtcacacagctggagtgcagtgtcgtgatctcggctcactgcagcctccacctcctgggttcaagcaattctcatgccttagcctcccaagtagctgggattacaggcgccgccaccacacccagctaatttttgtatttttagtagagacagggtctcaccatgttggtcaggctggtctcgaactcctgacctcaagtgatctgcctgccttggcctcccaaagtgctgagattacaggtgtgagccaccgcacctagcctgaaatctactttcaaaatggaaataggcttgttcaaaagcactatcctgccttctttcttctttagaatataacctggttttcagtaaagtaccaatacatggattaaacatattctctctcacatggttaacattctggatgttccagaaaatcatattcgatgcattcttccagttgttttaagatccttgggctatctgtgacaggaaagtccaagaatggagttcctgggctatcagcaggcagctgtctctgggtcttaaatgcaccatttagagtcatgaagaatggcatcaactgcctgatgctggaaacagaatgttggcgcagaagcgggaattcactcttcatggtgatctcatcagagctactgatttccccaaactttaattttagaagttctagaatcctga

SEQ ID NO: 338160 - DNA, 1000 bp, Homo Sapiens
ttttttttttttttttttttttttttttttttttttttttgaatgtatttctgaaaaacacccagagttttattaccattaattcagcagaaagttcgttgcactgaaattatcactctggctcattcagctcaaagactcttcgctgctcaaacacatagctgtgtgggccatggaaatacatgctgcaggaaacagcctctgaacatcgcatccaagaaaaataaggcaaattccaaaacacaaaagcaaaaaatacaaaacttgtttaaatatttcgttgcactcactaagcacaaaagttcatattttggggggactgtagagagctttaaagtatacagagggacttacgacatgacatctcttaagggaacccgttctcttttgacctcattagcatgacgtgtcctgcactatgctgaggaagaatgtgcagagagagctccaagtctctccacagaactccagggcagtcttcctctggtttgccatatctgggtcctccacacactcgggagctttggtggccatggtctgggtcactgctaggctagagggggtggtctctttgcctttgatgtgctccctgggggacatctctgttttctccttcctgggctttgtgttcccaaatagagtggagctgactagcttaagactggattctggaaaatcctttctgcacactctggttttcacagctgtcttggaatatctacagatgtctttctgtgagcgcagattccgggcaacttgtttccaatagactctctcatccttgagctttaggcatgaggttggattgccagcaaagacacaggaaaattcatggtccaattgagtgcactcaaccttgagagagatgccctcctcctgctcagtagcagcccatctgcagttggcttggtctttggtgacaaacttgcctttgttcccgggcctgcttttctgcttaatctgggtgttgcccagagtgtccttttgttctgagaccact

SEQ ID NO: 338161 - DNA, 1000 bp, Homo Sapiens
actgtaataaaagcagcttgttttctgcttgaacaatagctctgagagcaagaaggctggaaatgcacattcagaaatgaggtaagcaggacccagtgaggcacgacgtggtttactagaagtggccggtttcctggcagctttgtaaatggactctaacctcagtggaatctgggccccggctggatcaggaggcgaccatatggcttttcttgtttcacgtgaagaatctgttgcgctgagagcaccaggagcaggtagaagacccgggcagccatcctgcgggggctgagaggtgacaccaggctgctgaagtcgggctccctgttagcctgcagctccagtgccactgccctgtgcactgcttccagtgagagcagctcgagctctgggggcagcaccaaaggcatctccatgggcacctcagggagttcaggcaccacgggcaatgcaggagcttctggcgcctccacctcaggccaggcccaccgttcttctggtgggatgaggctgatgcgggacttctcctcttcagctgcctctagggagatctctaaagacaccataaggggaacactgggctccagggcctccctcgggacctcaatctcacttggaacttcaatctttctcctttcctcctcagcggctgcctcctcaggcagctctcgcctgagggcttttgggggtggctgggcacaatgggtccagagacccagtagttcagggggtagccagccagagagagttggggttctgaacaactccgcagggcctctgatggtcctctcgggcggctgcaccataggacattcccagcagtgggctctggtttgcagttgttcctggaatttctccggggagatctgagtctccttgtcccagaacagtaaccggcgacgacggcggcggcgaggaggtggggggactgggggcctcctctctgggctgggtggggctggcagacgcagctcctccgggggggtcacctccatgagta

SEQ ID NO: 338162 - DNA, 1000 bp, Homo Sapiens; identical to SEQ ID NO: 158513

SEQ ID NO: 338163 - DNA, 1000 bp, Homo Sapiens; identical to SEQ ID NO: 158514

SEQ ID NO: 338164 - DNA, 1000 bp, Homo Sapiens; identical to SEQ ID NO: 158516

SEQ ID NO: 338165 - DNA, 931 bp, Homo Sapiens
ttttaaacgcagcccgtttaatgatggggcccagactgcagtggctcaagacaggacactgcggaaagccgccatgtgccgccgcacactgtctgagatctgctcagccgatctgctccggccgtagtaatccgtgaagaggccgtcagggttgagcaggtagatggcaatggagtggtccacgatgtagtcctggtcctcatccttggggccggcattgtagtacacgcggtaactgtgactagcctgggcaacctgtttggtggagccggtcagacccaacagtcttgggtggaagtcctggacgtagcgggccatggcttcaacgtcgtcccgctcggggtccacagtgatgaagacaggctgcactggaggcaaaccaggctctgcttccagctgccgcaccacctgcaccagcttctccagctcgtctgggcagatgtcagggcagtgagtgaagccaaagtacatcagcacccactggccccggaagtcagccttgcagcgagcccggcctctgtgatccagcaggtggaagtcgccctggcccacagctgcctggcgcagggcttctgttcgcttttgctgctgcagcctctccttctcagccctcagggccagccaggccccaccgagtccagccccgaacaggcctgtgatcagcagccgggttcgaagcccagggccctggggctggccctgcccacctgtctctgcagggccctgccttgacaaaagccaggacctcagatgcagggcctggcctcccagggtcccagggaggaccggaggcttgagctgagagagcctgtgccaagctgtggggctccgagtcagcagcagcatggatctgatgctcctcgcggcggggccgcgcgtcagtggaccaagcacgagaggaagcgccgacctccagctccctgggctctgc

SEQ ID NO: 338166 - DNA, 1000 bp, Homo Sapiens
gaattccgttttattatcttgctttatatttaatggagtagaactataaagattcttaactttgaaagcagaaatataagttggatagtagttgcagatctttaataccattttcaatttcatttatgagctgctacattataaatgagatgctctaaaataataatcgcttttgttgttgttgttatagaacaatgaaaattcctgttaggaacacaagttgctgtttatatttgcttgttctcttaaatagtatgagaagaagtaaggtggagctgttgggaaagcccatcgtggacctttggagattatcttcttggttcagtcatctccaccacagatttttaagagtgtgatttcatagtctccagaagtatccgatttaattgctgaatatagggaatagccataatgcttcttgaactctgttcgaatgtccaaaaggtcaatttctgatctggacaccattattcggttcagagtaaactcatcagttccaatacccttcaaggctcgatgcagtctttcggctaaaaaggccggcgtgttcctcacacaattaactatggccaacagtaagtcttcaaaatgcccagataattctccttttatgctgtccacaatgtccttttggctgatatttctgtattcatcaaatgttagttttaattgaggaaagctccttaaacacaggatctcagtgaatttgtcttcatccgtgccccatctgttctcaccagctttatagagaatctgggcatcttgtttggccagatgctcatccactttcagactttcatctcttctgccatctgccaaagtcaacagagctttccggaagtcaccagatgtttcggaactaatgtcatctccaagactcttcttgtatactgtataataggcttgagagatatccttcatttgcctgcttgtcctggtagttaagatttcaatcaaggcatcttcgtttgttcccgcgcccttcatggatttctttagc

SEQ ID NO: 338167 - DNA, 1000 bp, Homo Sapiens
ttttttttttttttattgcaacagagtctggtttaattaataaatctttttggaagttttctttgacagatcctacataaataaatatagttttaaaagtggacttttaaacatcagtttttcctttccgtcatggttttcctacgacaaggataaaagacccctcttccttatttgaaaattctcgcaatcaactagaactgaaattatgaacaccaactctgtcaaaactatacttttgttacttcttggtgagcaagagaaatgaagaaaacaaaagaaaatcatgtgctattttaatgtaatttatcctatacttttttcaaaaagtcacactcacgtctgcttgagagttttagaggaatataatgtatgaaagaaaattccaataacataatgtacaaaaatgttgtcacatacagaagagcaaaaatctacgtattggggactattgctgtgggaagaagggcctgatcttcatactcatcttcctcattgagtaccatgaccccttccaattcatccatactacaccatcatctgtgccatgctttgccatgtcccaggtgtactgtccaccccagtagtatctgccgtttggattggctgcatgacatctattataccaccatccaccaccgtcttctttagaacactgttttctgggatctgatgttaaccagccgtcattgtctctgtcatacgtgctgaagaacatgccgttgtgaatggtcatggtcctgttttctcccatcagctgagatgctccatccatgagggcattaccggctgttcctctgtatttgttcactgagatctggtatttgttggcttcattctgtacagtgaatcctccatagtgagcctttactttgtctcctttccagtcctccatttctatcaaaagttctgtgggtcccatcctggtaagctggctaattttatcatttccaagccaatattcacctggtaggccacagtaattcttcccatctgtgtt

SEQ ID NO: 338168 - DNA, 1000 bp, Homo Sapiens
ttttttttttttttttttttaggtttgaaatatctttttgcaatagataatcttatttacattaatacagaatcattttacattcctaaatcagacactaatagatgctttattttagtgaattataaaggaaaacaaaaaggaaactgttgagaagtgttcttcattaacctgtctaacgacagcccgaagatcctgaaacacatggaaactgcgacatgctaccagcagaggctggggaatgggggttctgctctcactgaatggtggggaaccttcaactgcttagcctgtgctttccttttctgaatcaacatttacaaaggaaaaaacaatgattagcactgaataatttaaacacacttcagaaaatagatgtcaacagtgtaagtgggagaaccaagcccctgactagcaacagtggcagggcttcagttcccaaggcagctgaagtctggccagcacagtgctgcaatgggctgtggctcagcagaagggcaggagccctccatgcctggcttacaacaacaggactcaatagtcagggacaggcggccatcctggatggggtgggagcaaggactgtacatcctgacaaggatcaccacccacacggtcagagcagaacccccagggactctctgggcctctacgtgcctcccaggcaccgactgtgcagctgcttggtaccccgggaataaaaactaactgagcagagcagctgatgcctcggcagggcccctcattaggggaggacggtgctggtggggcctgggggccccacgctcccagtgaagacaacctgtcaggaagaactcattctggaacctcccggaggtttgctgagaaggaaattaatcacttcgtaacttgatgcagcttaaggcttcatttctaagctgtaagcatggcctttaactaagatatccacaatattcaattccaaattagagttttagccctgcaagagtctaaccatctccctctgcctgagccaggg

SEQ ID NO: 338169 - DNA, 1000 bp, Homo Sapiens
ttttttttttttttgaacagaaaaggaaaaagtttattgaaaactatatacagttggtccagctcctaccatgggctgcaatctcagccagtccctcccacaccttaggcagtgtcttggcccctcatggggagggatggggctaggcctagggcccagactcccttgggtggcttggcagctggagcccaccgtggatctttgtaaatttacaactctaaatggcctgaaggtagtgggcaggggacagggaatggatccctgcctgatctagtcacagccttgataggggaacactattctgaaacttgggcccaagtagggcccagctaagttgtccggaagtcctgactgctcctctcacaggccttcctagacgtggaggcaaacagcctccctacgaccccaccccatgtagcaggccgcatgggcttcatgggcttgactggggacaccaggtacccttcctcccaacattgactcagggtccggagctcctggagaactccccaagcagaggacttggggttgaggggtgagcgttggggaggtcacagctcccagcccagaactggagcctcctggggtcagggcagccgtggggtcagggtgtcccgctgtaggaatagtctgctttattgtgcatcaccagccggtcatccacgaagtagaagctgtcagactgggtctcatacgggtggcggatcatctcgctgatcagctcctcggagagaggggggaagtcgtaaatgtgctcgcaggtgttcttgctgctggggatgcagaagccaaagtggaagtcgaagcttttgagtagctggttgcggaagtagtgcctctcgatcatgcggaagttgttgacaggcttgtctcccactgtgaactccaccgtggctcccacctgcctcaggcggaggaaggcaggcgtgaactggtagcggacaaagcgcccagcattggggtccaggtcccgccggttgatgggcaaccgttctgagac

SEQ ID NO: 338170 - DNA, 1000 bp, Homo Sapiens; identical to SEQ ID NO: 158518

SEQ ID NO: 338171 - DNA, 1000 bp, Homo Sapiens
tttttttttttatttttctcattaagattttaatgtagctgtaaatgaaattctcgttttaaaaaaattaaagtttccatttttttttttagaataaagatttagtgcacaaatacagcccaaagccaacagaaaaattgctttgccctgtcatttccctaagaaagcactgaagttactcaaaataggctgaaagaaaaaaagcaatcctctgagttctaggtttcacaaaaggaccacgtgttaaactatgtacgtcgatttgatgtgcaagtatgcaataaatatgtacacatacattcctatctgctttacatcattctagagtattcatagtatatcaagatgggatttagaaatgtgaaaaggccataacagtgaaaaggaaaaaaaaagataacaatagtttttagaccagtcgaataataatgcttagctagttaattattttaactttggagcagactaaaaaagttgttttgaaataaatggtacctgtaagtgatgattactgcaatacttgttaaatgttatttgtcagcactgaccggaattatatagtgctagtaacacagctcccactgtcctagaattcctctaaatggccagctatagctaccattatcctgataagcatttcaagagttgtgttgctgagccttttaaaagataactagtttataacctatgtctccttatgtggctacatcagttactcgtggtcccaatgaagtataaaagaggatataagctgctgaagatttcacagaagaaacggagatatcagaaacttcatgatcatcaaacttaaaccaccgttgtcttgctgcatttttacaataggctgtgtagtggcctccatccagcccaccgtagtgatttgaaacagaaaacaaattatatttcttcaaattgttctttggaccaataacatactgtgacaagtcaagattttctaacgggaagtccacagatgtctgtaatttttgtttccacctgc

SEQ ID NO: 338172 - DNA, 1000 bp, Homo Sapiens; identical to SEQ ID NO: 158519

SEQ ID NO: 338173 - DNA, 1000 bp, Homo Sapiens
aatgtaaacactgatttatttaaaaaatactacagaggacagatttggattcaaaaaaaaccacagagaatcatatacagaaacaaaatgcactggaccccgagaagcagagggggagccaccacaggcccccgagggggcagggcaggacgctatgcacacgccacttagaaaagagcgtctataaaagatgcataccaagagatacgtgtaaaatatagtggcacatcacgttaacaaaaggaagggaccagtacctcatggagacaggcagtcgggggacctgggtgggcgctttgctctgtcttcaaggccgctgtcggtgactagtgcctccctccggctgcgtcacagccgtcgggggcaaagaggtgatgtgctgtaagaaccgcataaaacgatccagaggaaaccatttctatcagaaaaataaagtacaagtttaggtgatgagcgtaaagctagggcctgtgcgaggctgctggcacgaggcggtatgaaggggtgggaaggtggcttctcccggcgtgaagcctcaggggcggccacctgcccactgctctcggagttagctgctctgtcaaggtccaggagaccccgggtccctgcccagagtcacagcccccgtatctgggctccggcctggggcagcctcggggagaagatggcaggcgtgctctgtgaaatacgtgaggctttcaggggctccgtttgtggttttcctaaccctccctgatgacccccacagaacatgaggctatgtcactcacggtaattaaataagacattcgcccagttcaagagtgcagccaggaccaggactggccaggccctttcctcccacctgtgcgcaggtgcccagtggcagctctattctctctcagggcggctacacagaggcagggctttgaaatgcttcaagaactcagaaaagtgaaggctgtcttgttccaaaggaaagggccttgtaagaatctactttgtcttagaggagtggggg

SEQ ID NO: 338174 - DNA, 1000 bp, Homo Sapiens; identical to SEQ ID NO: 158520

SEQ ID NO: 338175 - DNA, 1000 bp, Homo Sapiens; identical to SEQ ID NO: 158521

SEQ ID NO: 338176 - DNA, 1000 bp, Homo Sapiens
tttttttttttttttttttttaacattatgaaatttattttattttctacacttcgtctaacttttattgctattatagcccagtttgatttaaaggataataacaaaagagcactaaaccagagagtcaggagaacttcatttgatttctcgatctttccttaagtaaagtgcatgattagggcaagtctgagtgtcaattttctcaaaagcaaagtaggaaaaatagtatttgtttcaaaacattgtcctcaacattaaggtgaaatgatgtaaatggggattgtaaattataaagtactattccaatgtatgttattactatgattctcagaatccttaagttcctttataccattgcagttcttaaaatgtagactcatccttgggcaaaaaaacaagctgtgtatttctgaacagaagttgcaataggtaattctgctaaggaaattatcaggttgagacattgtttggatactccttttctgtattggcaattctctttttaaaatgaaaggatttattaaaaatatttaagattgtactaaaattaatttgttatatgccctcattaagatgcttaaagtccaaaatttaaaaatatggcatttgatacattttagccatgcttttttctttcaacaaatgccattaaaacaatttttatattgaaattagttataaaactgtcagctattttgtacaggtttagttggccactagcaataatcaatttgaattctaggtattaaacctaatatcaaccataaatggactaaatgtcactcaaagtttgaatcttatgcacttggtatcaacccaaatggtgctcagttataacttgtttcatttccagaatattgcccatgtttgttaagaacttcagacacaccacatatacatagtaaatctggtattcatcaggaattcacctagaaaatcctgttttacaagtgcattaggccttcactaggaattagtataagtcataatgactgac

SEQ ID NO: 338177 - DNA, 1000 bp, Homo Sapiens
tggcctggtagggaagaggactttattgggatgttagtagggaaacatgagagggtgaattccagggaatagacactaggaccaaggtggcggtcaccttaaagagccataaataaacttaaaaaataaattaaggtgaggaggtgccacgtggggaggctgctgggactatctgggaattcttagggatggaattttggaattggaaaggggaaataagaatttccagccgtctcacaaaagggtgtgaaatgatcacttcaagactccctgctgccctaggctgggagttggggttctggggctccaggaagaggggaggtctgggctcggctgaaggggtgaagggggccgggtcagggtcgttcctccaggaagcggtaagtggggttctcatagccgtgccgctgcagttcgcggagctgctgctcctccagggtcagcatggggtccacctccaccacgccatggctgatagccccgtagggcttcttcctgcgcaggagcagcatggagaggacgatgagggagcctccgcccgctcccatgatcagcagacccgacacagcctcacgggacacccctgtcccagctggtgccagctcatccctctgaatctccgatgagtggaaagggaaaccccttggaacagacgcattcacctttcgctcatactgttccagcgggttcatcttctctttctcaggggatgcagcatcttgttctgtggacccttttggaagggtcatgggggtgtcatccttggaatctggaggctgcagcccacccttgtcctcgctgctgcccccaggggcaggggcttccaattcactgggacccaggtgttcagagtggaggagttcctggatttggggccgcagctcctgagccaggtgggggttctggtcaagcaggcccaggctctgattcaccctctcctcaatcacttgaaggtgggtatgcacctggaagcgcatctgctgtgccttctcgggatcca

SEQ ID NO: 338178 - DNA, 1000 bp, Homo Sapiens
tttagacaaagacatggttacttttttatttgaagaaaaaaaaagtatgttttaataaatactgcggaaacattgaccaaacaaacatacacagtgacttcaacagtttaaaaaatgcaacaaaagttctgctttataacagttataacttattttctttttacaatatttaaatacagaaagcactcgccagctattttgtaatactgcccaaagcataatgctgcatcaatcaaagcatattatgttggtaaaatgtctgtattttatgggaaatgactggaatcgaattttcttgcagagacaagacaaagtgcttgtaagacatagaactgagtgttgtaattaccttaatctctcctgccacgatttaaggggagcacagcttcaacacttcaaaaacgaagcactatcatgggaaagaaagctcgttttcaacaagcgccaacaataaacaggtcagatctggtttcttctctgaaagaatctctaaaaggaactggtcaaaaatatctgtaaactattttaaatgcttattattttacgtaacaacagagaccaagtgctgaacacagaccttggctgcatctgttcagtgaggttttagcaatgacactctagaaatgccctagtgttatgtcaggactgaaagtttatcatataatcttccactagggattctctaaagcttgggtaagtggcatcttctctcatcaatgttcatttaatgaaaagtgaaataaaccaacagattatcagatgctgtcagttttggagcttcaacccaaaataatagtccttttgctttgtatttttggtaacttaattccagacagctttactcacaaactgtgctttctgctactattctttccttcactcattaccttttctggtgaaaacagtaactaccttttttctctccttggatcattctatgacatcaaaccaagacaccttttatttgactttgcatttttatcaacgatggcaaaaaatc

SEQ ID NO: 338179 - DNA, 1000 bp, Homo Sapiens
ttttttttttttttttttacataatcagaacatatactttatatatttagtaatgtactaggttttctcttacctttgtaatttagaatttattggcagaaattacacacacacacacacatatatataactaaaaaaaggtaaatttcagcaaacaaatgcaaacctgtagggtaaatggatttttaaaaaaaattcagtttatcaaatttcatcttctctgccattttagattggcaactattggttatttagaaaatttagactgctgaaagttcatttcttgctccttgaatatgtttaatttctacaaagcttccagttgtgcccgtagcttccttgaggtcattttccactttctcctctgtcactagatatcgtgcgtaagatatttatccttgatttggaaaagcctaaataaaaagcttcagttttgaccttttaatttataaaactccactaggaaatccatttaatttttatgcatgtccacaaaaatattttctttcttaggaatcaaacacttttattggaataaagatccttcaaagtttttaactcttctattagagttttattttgattttccaggactgcaactcggttttccaggcatttcacatattctttcttctttctgcgacattctcgagcagcttctctgtttttcattaaccttatttctcttttcaattgggggtcatctgtcttagttgtctgagaggtgagagtcacaggagatgtcatcaccacagtttgtggcagagaagtagctgaaggtgtagttcggatctgatatgtttgcatatctcctgatgcagtttgtacgaccacctgattgctgggcacaagtatctgctgtccatcagaggtctgtgcatactgaagaatagttgtaccttgctgagtactgcctgaatttgtcatggttaatgtctgaagtccctgtactccatctgtgcctggacttgccaactgtaaggctccatttggggcaatg

SEQ ID NO: 338180 - DNA, 1000 bp, Homo Sapiens; identical to SEQ ID NO: 158524

SEQ ID NO: 338181 - DNA, 1000 bp, Homo Sapiens; identical to SEQ ID NO: 158525

SEQ ID NO: 338182 - DNA, 1000 bp, Homo Sapiens
tttttttttttgtggtccatgcctgcctcctgctggggaggggagggcaggaggtttattgagcagttggggaggggtgggaattcagagggcgtggacgcaggccatctcgtctcccaagtcctcctcatcgaagcgggagaggatggactcctcgtcgctatagagagagctggttccctgtgccagcaggtcactggcagcattgtccatctcatccagcgtcaggcgacacgcatctgcaatctcctgcttggccagggccacgaaacgtgggtctcgagcaaagaggcccagaccctctgagataagcacagcctccaccaagctgtcggcactgcccctcttcccatggctggggtccgagtgggttccaggcacgtgcagacaggtgaaggtgcgcagtgggccactggatctgccgaggtacccctcccccgctgcgccctcttccaccaacaacagcggggcatacaggagccgaccccgctgaggtggtgttgcccaggaaccctgagccctattgggccctgaatttcgcccacgatgataggtgcctgggatgggtaaatcctcacaactgccctggcgctgcagacactggatggtgaaggagggcttccgacctgcaggtgtggggggcagcagacggcggcgtggtaccaggtgcccatccatgtatctctgagctctgtgaggtggcaaaaggactgagcacgggggagtccctgcctgctcatctaggtaggaaagccgatcagggacttcctcatcctcatcttgcttgttttgccctttggttcccttgggctgagaatttccttcttctgggatggtgaaaatgagagccccagagcctctcctgtgggtgttggatccagcctggggcacactgggctgactggaggtgggagtccccctgtcatcatcactgggcccaaaggagagtgaatctggaagtctgtccccgacaggcagagacacagaaatcccggagccc

SEQ ID NO: 338183 - DNA, 1000 bp, Homo Sapiens; identical to SEQ ID NO: 158528

SEQ ID NO: 338184 - DNA, 1000 bp, Homo Sapiens
gcggtttctgttttttatttggcaaacatctcgtttattaccatcatgaatatcatttggacctctgcaaagactatatacattcacattaacgtacacgctcagcttcaggcctctggcgggctgttcgtggctggttcagtagctgggtcactcccgtattgcactgagttcctagaactcctgatagccacgcacacagatgccaggccacgggccacgccacgcgcacagatgccaggccacgggccacgccacacacacagatgccaggccacgggccacgccacgcacacagatgccaggccacgggccacaccacgcacacagatgccaagccacgggccacgccacacgcacagatgccaggctgcgggccgtgcctgctgtctgtccttgtactcggtgcaagcatgaatttctttatccctttatttccttcttgaaatcgctgaggcagttgagaggagtggagggagggtgggcagggctggaggatgggagggagcacgtctgatagaaaacgtcaccgagacacaccccagggccagaggcgaacgcatctgaggggtggctgggcaggagcaccagggctatgtacacggtcagggtcttccctggggaggaggcagagggctgcttttgtttgtagtttttttgttttttctgcaaaagtttggaagaaaggggagtagctgcggtggggcgatggggccgagaggttggagttggggcgatggggctgagagaggtcggagctggggtgagggggccgagagaggtcggagggcgcggagaggagagaggtagaggaggacgggctggccgagaagcagtgtttcagggaggcctgctggctccgcatgctcgaaaagcagtcgagaatcaacccaaaagattgtcacagttttgtttcggaattatgctctctctgggaagaaaactttagcactttttttccacaagtggaaaacggaaatatgaaaagtcacagggggcg

SEQ ID NO: 338185 - DNA, 1000 bp, Homo Sapiens
ttttttttttttttttctgctacaacaaaagaaactttatttaaaaatatttttttacagacatgggtgcttgaaaaagctctttagttaactaactgtgtatggaaatgaaaaaaaattaataaataacattagtaaaacagacttctaaacattaatacactggcaaaataaaatggacttaaaatgaaaatgaatcttaaagctctgctattctctgtaagaatatttaccttctgtttttcttattctttacaggtgagaatgattaaatactgctaatataaattttttatattaatgacacatttttaaaatagtccacgaaaatctcacctatgtgtttgttttgttttcttcttaacactgatatacaaattgggactcttcattctggagaaagcatcaggttctctccagcactcccaggctaagaatttcaaaatcttgaataaggaggactttaaaatttctgtctcccaattctttattagttaaaggcaggggaaaactgaggaaagggtaaaagataagtaagatgtcattatatagaaaaacttttgctaaagctcactatagtcacattactgaggacaggcttctggtcccatgttccttgctgcccttccctggggaaaccaggccctgcagagggcactagctgcttaatgctttaagtctgaagccttcaaatgaaaggccagccacatctgatgggggctggggggtgggggcaggaggtctagaccagttcaggatccagcaaaaagaaaagacaaagccaccaacctccccttctcaggagagtccatcctatactcctcgacacaactaggtaattaatgtcatcagaaggctaggacacttggaatggtccagagtttacctgggaattgtgaaacattctgtcttttgcaggagacaaggcatgcaacctgataactaagcttgtgattggaaccaaccaaatgatcccagggtacaatgcttctctcctcca

SEQ ID NO: 338186 - DNA, 1000 bp, Homo Sapiens; identical to SEQ ID NO: 158529

SEQ ID NO: 338187 - DNA, 1000 bp, Homo Sapiens
tttttttttttttttttttttttttttttttttttttttttttttttttttttttttttttttttttttttttttttttttttttttttttttttttttttattaaagaaacggttcaactttgtttcttcccttagtattgctgacaaagtatctgctgtagaatacaggaattacttagaatagaaacatagtcatcacaactgttactaaatggaaaagaaaagaattattgagttaagtattcctgtcaatacgggaaacactgctagtaccttatgttggtgttagacctctctgccctacactgagaatatagttttacacaggagcaaggtttgtgaagcagcatagtgaggtagctaaagccatgggctggctctaaaggctttaaatcccagccatgtggcttagctgccatgagatgtgcatttgagaaatgttgtcttcttttgctgttcaactccagattttcagatgataatgtgattatcccagcttaagttgcgtccacttctggtctagtgaattgtggaaggcagttttagagaaaggagtcatgagtaacatgaacagcagttggctatgtctttccagttctctgctgatgtcagaaagacccagaaataccaaggagaaaaagccatcttagggatctaaggaggccctatggaaagttactaccttagacatttgaagatagcttactgcttagtacatacactgtaaacaacgatctcattttaaatgagaactttctcataaatattttacaaatgaggtcaaactagcataaagccatttaaagagattatcagtccaatatgaaccagttaagtctttggactatccctttcctccttgactactgctttgacgtacctaaatcattcgtcttacatgtcagaggaaattagttttggatagttctcctttctgctgtacctcatgggggagtgagagagcagcaatagagaacacaatgaaaaaaatggaatac

SEQ ID NO: 338188 - DNA, 1000 bp, Homo Sapiens; identical to SEQ ID NO: 158530

SEQ ID NO: 338189 - DNA, 1000 bp, Homo Sapiens; identical to SEQ ID NO: 158532

SEQ ID NO: 338190 - DNA, 1000 bp, Homo Sapiens
cagggtgggaagaagaagcttgtttattgtgttacatacacagcacggggctctggcctgccagccatggggacctactcaaactcaggaacaggccggtctcctgaacctcagtttcacttgggggctcagcccagtcgccagggccttctgctcgttgttcctccctccaaggtcctgccctggaggctccaggagaaatccaaggagtgggagggtggagtcaggatgaggagtggacactggtcagctgccccttctgctggaagtagaactggaaccgagactgggcatagtccaagtaaccaaattctatggtggacatggatgcctggaggatggaccacagaccccagaagaaatgggatgccagagcataccgactgacttctaccagcaaatcttcttccagttttctctgctcctcttgggagagggtctcacctttctttgcctctgccaggtaatgacgaataaaatgcaactgctgttcttgagtggggtagtctgtgggccttgctttgtagaaaggccattcctcgtgagtataatcataaacccactcacaaaaatggttcccaatgtcaaagcccctatagttataactgctgtactcgaagtccaccagcatgaggctgtcagcattttctggctctgagagcagcaagatgttcccttcctggatgtcattgtggcagaagacgactggcgatggggtagactctagtaacttcctgaggttgcccatctcatccttcaggctgtacatctccagcaggttcatctcagggaggccagttgggggcaggtcctggatctgttttaggtaccgctccatggtcccaaacagccagtggggctccttggtgaaaggcatctccatgccatgaaattgcgccatcttcgtggcaatggctgctgacaacactggctctcgaagctcttgagttttcaatggccgacttgggatgtactgttccagccggccctctgggaagac

SEQ ID NO: 338191 - DNA, 1000 bp, Homo Sapiens
aaaaaaaaatctgacttccttacatatgcaaaaagtatacttccagagtctacagtaggctgaaagaagtggatattgaagtttttgacatcaatgaggctgttattcattgactgatggtgaaacagctgaaatggttctgaatcaaggtgattcagatattgagtaaatcattgatactactgataagcaatcattttcttacacttactcacacgtaagtacttaaaagtaaaaaatatgacgcaccattaatagtgaaaaaacgtgttcatggtaactaggcagcagtagcatcagcagaatacctgtatcagctgttaataacaacaatcaataacggcaagttttcagtctctacttatgatactgagttttgattgaaaggttactgtccactatatattttttatttttttcctgtagttacataccaatatatatttttttatttttattttttatttcttacatgagaagaaacatcagacacagttgagggatcaggaagtgggtcctccagggaagatgaggcattgtgtttgatggcttttaaacgtctcttctagaggcatctgcctcatcaacaatggtttttgtctagaagtctctgtttgattttataagctgagataatttcttgttctgttatgaatgcgtgctgctgtagtccttccataagcctgtcaaatattttcaccatgtcatctacaggcactttttatgcagtattaatagcatcatcttcattgtcactataatcacaatcaccttgattcagaatcactccagccatttcaccatcagtcaatgcatagacaactggagcctcatcattgatgtcaaaacttcaatatccacttcttccagcctactgacagtctctgaaggtatatttttgcatatgaaggaggtcagacatctttttttttcacttggcatacagaatcctttaaagttaccacttgttcaacatcatcaataaacacaatcacaggct

SEQ ID NO: 338192 - DNA, 1000 bp, Homo Sapiens
atacaacaggttttattgaggatgtgtcaatacagttaacatggttgcttgtcttttcaaaaagaagttccattttctttgattcccaagtgcatttttcctgaatcttctgtgatacagggcacatgataggtatgtagagagctaagcttcctataccaagttagaagtgaaatgactagtggaaaacatttaaactttaatcttaaaaaaaaaataggaatcaatataaaaatgcacaaggtaatgtcgttttcatagttaaaatctgacattgtttatcaaagctagtcagttaagtggacacctgcaactcaaatcccataaacattttagaaacgccaaccacccctcctgaaaggtttgaggaatgaaatttggcagaagctcagctctgtgaaatagctcccgttttttttcttgggaccctacttagttccgtgggctcccattgggagctgattaatttctgccaatcagaacccatccctaacacatcagatgatagtggctttgacctagggaagaagaggttgagcgaagaacccccaccaggtatggtttgagagtccttagttggttttcttgggcgttaggtagtaagaaatccaccaggaaccccagccaaaaccttctcaagtgtcacttgggcagatttgggttatcattcctccttttgaagaagtgagcaaacagcctgctttgtttggagaagttgtgggcaggggaggagggttggcaaggaacctgaaggaacccactgctcagccagtcagaagtcagcagccatcctccattttcaacatggaccgcctggacacagccagacttggagcagtgcaacgagatcacagaccgaatgaccccagttcacacttggtacaaggagtggggctggcctggcgagggccgagcgcgaggccctgcagctgcggggaaagtggccatctttgcacgagcaggaatgtccaccactcccagcactcatctcagccttatc

SEQ ID NO: 338193 - DNA, 1000 bp, Homo Sapiens
aaggcaaaatactgaatttattcagttgatttgaccaaccacattggacaaaagtattgggttttatttgcataatgtaaaaacatactttacataagactactcacatactttacaatgttacaaatatatatatgtatgaaagattcatgaaggcatttgatataaaacatacacagtatgctattttaatatacaaatgcttaaaagaaaatttagtcataagaattacaaaatcatcaataatttacaaaagttttcatttttcttaaaggtcacattctcatcctttgggatgtacaaaaattatgtggtttacacagttttatccacattcaaaacatcacgttttgaatgtcttcagcatagcatgtacagtataaaatgtttccataggaacacaaaagaaactgtcactagtggcctgctgtcagatggcttctaattcatcagttagccatttttaggacactagtccagcttattgctacaatcttcaagttgttctagtcacccaaattataatgaattcaatgtataccagaatttaccaataaaggctcaaagagttatataatatacaccaatatacacaaaacagctattctgagtaaaatgaatattccatacttaaataagaaccaagaatagtaattttaggctactctattatccttgtgattggtatttttaaaattttgagcaaagtgcacagtgaatgaaacagtcagcagacacgatccttctgtgaactctcaaattcctgccttagaatcacgtcacctgagaaatgagaaccttgagacctggtgcatatcaaatagcttcacatgtcaaacacacagggccgcttggaggcacattcatgggtcacaggaggtcacactgctccttcgaaaatggcaccattcactgtacagggcccctgtgtagaggcagcagaaccagcctccaggagatcaatgctgtcttaatttagagcaaacatggcatccttcag

SEQ ID NO: 338194 - DNA, 425 bp, Homo Sapiens; identical to SEQ ID NO: 158533

SEQ ID NO: 338195 - DNA, 1000 bp, Homo Sapiens; identical to SEQ ID NO: 159592

SEQ ID NO: 338196 - DNA, 1000 bp, Homo Sapiens
ttttttttttttttttttttttttttttttttttttttttttttttttttttttttttattctaagaatataagtcatttaatactgttaattttatagcacaaaataaaacaagctatgatccccaaaaataattttaaaagcttacacagaaaatattattgcctgaagtttatgatctttaagttacaggtcaaaagagttttatgttgttgttgttgttgttgttgttgttttaaaacacacagtgaagaccgtctaagaagcaaggccactgttcctcctgtagggacaacgatcctgtctcagagacctgtccttctgctcctttagaaaacagaaccagcacagcgtccacaccgacagcagttactaggggcatagtcctccggtcgcagagggtggagttgaggcagagctcagtggtgtccacagaaagcattagtcttaggtactgtgttaaaacaatcaagaattcattcatgtttaagaggttaataaccataatattaaaggattaattataaacacctggcaaaaaaccacatcatcccttttcaaaaataaaatgttcatattcctctgagcaaacatcacaagagcagtggccatctgcctcaggcctgccttgtctgtaaacagctgtaaaggaaagctagcacagcgccagggacacatgagctcccaggagggcacagctgtccttccctttcagctttccaaacatgagcacagaaggtgtctagtctgggtgaccaaagtcctcaaacggcagccggtcaacacatcgtcttcctcgttaaccatgtcatcaggtggttccacacagcacagacatggctgactcctgtaccgcaggtccttcccgggatacacaagtttttaaccagtcaatgccctctagtacgtaatttgtttccttcccaggtgaaaaaccatagtgagttaatttaacatccaaatatttctttaaacatggtagagcagagcaagtagcagt

SEQ ID NO: 338197 - DNA, 838 bp, Homo Sapiens
tttttttttttttgtaaaatacttgatttaattttgaagtatgagggtagagatggaatgttgggttatcagcagccacagggaacaaggaggctggtgaattgatagtccacgatccagcctgcctatggtgggggtgagggtggtactatcctttagccagttgcattaggcttgactagtttttataagatttccaattgccatcaatttatatggagtttatactctaaagcaataacactgattttgagaaagaaaaggtaatttctgcttaatacaataaatgagaaataattgaagaaataatttctttggaaaagaatgcttctttattgatggttatatttatcagcaaggatcatgactcagtagccagttgaaggaatcagaacactttgggtacatgctgctaaaagcccgtcagctcgtcatccttgtttttgtcaacctggtatccagtaagtaccaagtcctcattttgtccgggaagacttttgaatactttcaagtgcatatatttattatcacctgctcgtaccttaatgtagtaatttgttccagcaacaacttgagttttatactgcacagcttccaattttccgtaagtctcatttgttttttcttcaagctgtggtttaaccttatcaacaatctcctggatttctggagtggcgggtttggcctcagataagcctccaggtatcattttggctgattgcttctttgctggacaggatgctggaaccaaagtgaacagggaagtgtggagactcgtgttttaaaagaggcgttcactagctccgcctatagaatgctttattttccacaaacagca

SEQ ID NO: 338198 - DNA, 1000 bp, Homo Sapiens
ttttttttttttttttttttttttttttgagggcaacatctcgctttatttttatttatttatttatttatttatatttgagacagagtcttaacactgttgcccaggctggagtgcaatggcgtgatctcagctcactgcaagctctgcctcctggattcatgcctttctcctgcctcagcctcccgagtagctgggactacaggtgcccaccaccacgcccagctaattttttgtacttttagtagagacagggttttaccgtgttagccaggatagtctcgatctcctgacctcgtgagccgcctgcctcggcctcccaaagtgctgggattacaggcatgagccaccgtgcctggccacgtccctattttagaaatgagaggagtgactgcacataggaaaaatgccacttttagcaattcaaagtggaaaaacttcttttatataaaaattatcccaactcccaccccttggctctcagtgttgcatctcccacagaggtaaagttgtgccattttcccacggctttaaacaaagcaaaacaaaaccaccaatcctaataacccccctccctgccccgtctccacgctgtgcggagagggctctagcccctcagtcggacttctccttctccttcatgtgcaagaagacgatgctgaagatgaagagccccagcatcatggagaaggcgctggcgtagtaggggtaggccgaggggatgaagcgctcatactgcgtgtgctggagtggccgcacggatacctgagtggaagagtacaggtgtgtgtagcctagccggttgtaatccactttaaactggaatacaccatacacgtcgggcaacttgaactgaacactgtatttgccacctttcttcttcaggaaggtcctcacaaaaggatcaatgcggacaaactccagctgaatgtcatcgccatcaaaggggacccatttgccatttgagagctgctggatcacgatgctatactccactagg

SEQ ID NO: 338199 - DNA, 487 bp, Homo Sapiens
gtaacaaggcatttatttgagatgaggaaaggaaattgagcagaaggtacaggagtaatagcaattccctgtagctctcaaagcaaattttgagctcatttttctttttctgcaagctcagcagcagaatgcccagagtcttccctggtagatgcaggttccatagcgacgttctcctgcaatgcacgctggtattctgcaatagcagtccatgtttttccttgagcctggatgctttggagccaagctttcgtcccatgcaagggaaacaaccacttctgggatgtccgctgcaatctgctccggggctgcagcaacctcatcagctcttgcctggagtggctcagcctgggcctgcagggccaccaggagaatggcagcaaggatggcgagggtcctcatggctggggtcacagatcctctagctaggcagggtgaccagagagggcagacagcagtcctctgtcccaggtcttctatagcaagg

SEQ ID NO: 338200 - DNA, 1000 bp, Homo Sapiens; identical to SEQ ID NO: 158536

SEQ ID NO: 338201 - DNA, 1000 bp, Homo Sapiens
ttttttgcttttttttcttgctttttcaagaccagtttccctgaaggaacacaaatatatagctatatagatatatagatatccttttcctaaggtttgatccccccaagaataaaatagaatatttacacaacaaaacccccgaaacctcttaaaaaccctacagagaaaaaaaaatttcccaaagcaacaagaaaaaaacaaaaattcagtgatcttggttcaggggtttcactggacacgagaagctgggagtggtgagtgtgtggtgaatagaaaataaaagagaactaaagcagacaaaaatgaaaacacacagtgcagggatgtatgaggtaaacaggatcggcccacactgctgtggggccaaaccagacaccagagccttcggtccatcagggctgcctgaacgccctgggaaacgtctgcctctttctgtttttctgatggatttctttgctgttctcacaattcatctctctgaatgtccaaaacctgagaaattcaagtgttccttggttttcccctgttttattaaattcttctttatatatatacgtatatatatatatatatatatatatatcttttttcttttctttttggcgtcagctgtggctcctttctggatatcttccctccccacccgtatcttccgccatcctggcccctgtgtggcccacctggaccccctgcccaggccggcgggctccagggtgggtggcgggtggggagtgatgcggttaaggcaacgagttatttgaggtagatgtggagggtgtggacagccccgctggcccagcctggccgccgctggttccggtgtttcctccccggccgcctgcgttgctgctgctgccgccgccgccgccgcctcctttgttgggagcagaggttggcgtgggggccggcggctgagcaaacagaactcctgtgtacatgatgccgttgatctccaccgacatgctgatgctgttgctgccgttggtgcccgtcaggt

SEQ ID NO: 338202 - DNA, 1000 bp, Homo Sapiens; identical to SEQ ID NO: 158538

SEQ ID NO: 338203 - DNA, 1000 bp, Homo Sapiens
ttttttttttttttttgggtttccacaaaggcttttggttttattattattatttttaacaaacatacattggaaatagtaaaggtttctaattgaaaagagacctaatgcatagtttctctgcagcatagaagaccacctgtttccaaacttcaaggttagggctttgaaacattccctggtaaattatctccagctggctagctagttaggcatattggtgcacattggtatcaaaggtgattattttttgcatttagcaaatgagcgctattacttttttgatgtatttttaattcagattgctcaaaagtcttgttatttcaagggagccttatgtcataccacaaatattgatacctcctagtggaaatggtggctgtgggctccctagtagagttaatggatgaaggctgagatacttagatactgcggacatcagggttatggagcaaagtgttatgaacaatagctacagagagctccaagtctcccaaagcaactcataactataacacagataaagttccaaagtcatttcatcacctatgtgaaaatgcaatactgaatgttttggctctctgatgcattttgttgttgttttatttattattattattattttttgagacagagggtcgctctgtcacccaggctggagtgcagcggtgcgatcttggctcactgcaatctccgcctcccgggtttgagcaactctccagcctcagcctcccgagtagctgggactacaggcacgtgctatcgcatccagctaatttttgtatttttagtagaaacaggatttcactatgttggccaggctggtcacaaactcctgacctcaggtgatccacccgcctcagcctcccaaagtgctgggattacaggtgtgagccactgcgcccagcctgttgttgttttcttaatccagtactttaacgttttactgtcctagaaatgccctgtgttttctcatgctatttcataagagaatatgcta

SEQ ID NO: 338204 - DNA, 1000 bp, Homo Sapiens
tttttttttttttttttagagtggaaatgaatatagttttattttcattgagacaaaaatcaaatactttcttaacaatgctgtaggggctctgactgatctgggagtcaaaaattactttaaaagcaaaaggaacattttgtatgtgtgtgtgactgaacataactgtaggctgaaaatattttctgaaccatttcttccttgataaattggatggggtggatattgactaggagagtttaaaacactgtttacaaaggactgctgttaaccagtcaggttacagggcacacacagattaggaaaaaaggtgggctcctaactagctgaatcttccaatcttccaattgtagagaaattattttaggaaggaacttttttccttctaaaacatctgcaaatgttgtgaaagcattatcaatttcaaaccctagtttcatatttactacctgaattccacactactcataatgctactgtcattcgcacctgtaaaatgccctgttgtggccagagctgtaagtgcttgaatagatgactcaaggcagagacactttttgtgtgacaaagcgtaaggagggggtttgggggcagctgacctggagggaacatatactctttgagtaaaaagcttttgaagtgaagtaaaaggagaaaactatcttccataagtaacacaaactaattttggggggttggggtgatggctaaaggagatttcagagcagcttcatttttgtagtcttctgatctatgccccaaaggacctgatgcatttcatctgagcctcaaattaggagatacgtttttgcgagaacaaaagcggtgctatccttaggtattccacattctcagctgtgggctattggtccaaatgctgatgaatccaatgtgggctggaatccgagttattatttgatgtgtcatcctctcttgctgatttcatgacagcaagacaggggcagcatactgagtttcaaaacaatggaatggaagacaa

SEQ ID NO: 338205 - DNA, 1000 bp, Homo Sapiens
ttttttctcagtagtcagctcttttgtagtgcctgcagccctcatgggtgggatggaggcagaaaatcagttcctgtttatttacaaaaatatatatatgtgtatgtatgtatatatattaacccctcagctccctcccatgatcatccttttacttctacccccacctcccttttaaaacaaagaggttttctggggtgcagagcagggttctcctgaaagtgggcagaagcagcaccgatagcctagtctggcaggttgtgggaaggggcgcagggagtgaccatgagcgaccttggccccgtccttgctccttgcaccctgattgggcatggggtgagaggagggatcagtccttgaatccctgaatactgcaaagaatgcgcttctggtgcccgggcagtgtgattcccatctgcgtcaggtcctcagcggtcagctccagcacacactccatggtgtccagcccagccgagtggaagtgcaggatgtagcgtttcatgcgtatggactcgagccactcagagacggttcgatatgggatcccatctgagccactcaggctgggcaggcgaagagtcatcctggggtcaaagttggcaatggtccgcagggagtgggggttggcaagcagttgctccagatgtgcctgaagcttctggaagtgtggccggcgggcacggtcatatgcccagcagttcttcatgagctcatacagaggggcagggcagtccacaggagggggcaaccggtacccatcctcaatgctcttcataacctcctgattgctcatctccccataaggcttgtccccaaagctcagcacctcccacatcacaatcccaaagctccacacatcgctggctgtggtgaagatccgatgggcaatggcttcaggggctgtccaacggatagggatctttcctccctgggtttcgtatgtgccatcaaagtcatccaggaggcgagtcaggccaaagtcagacaccttgcagcacag

SEQ ID NO: 338206 - DNA, 1000 bp, Homo Sapiens
tcactttttcccttttccttttgatacgacttctgcaaaagaggtgtgaatgaaatcataaagctgtttggcatttgcagcattccccagaatactcgtgagctcgtcttgtgacagggctgctaattctgcgatgttcttaacgtggtgcatcaaggagcggcagtttttggcattcacccctggcatttttaacaagaagtcttggggaccaggattatacttctctgactcgggaagggtttcagaatctgctgtaatggccagtgctgtcgccgcatcaggctgtggcttgctttgtttcagctcctcaaacaactccgccgttgcatgaggagaggggcaccagagaatccgtagtctggggaagtgaagtgtaagaagagtgagtttggaactaatgtcattgctggagatctcctgaaacaaggcacctcgggaagtgagagagaaaggcttgctagggtcaaactcaatcagaagcacgggacgcttgtagtagcgggacatggagatgcactggctgtagaggcggccgttatttaaagagccgattaaatcactgatactcttgcgctccacgcacatttctggagtgaggatgtaatctccaacctctaaagtcacgggttcaatgtcaatgccccgacgatggatcagagatggaagctcacttcgaaattcacgcatatccacaactatgctttgctgtgtaccattctgttcctggccaccggctttccgagtgtcagtggaaacatctgcagatgctgtgcctcttactaggtctaagtttgtttcatctctgccttctctttcttcagggacaaccatgcttgctttttcccttatgagtttttcaaaagcttccttttctttccgcaaagcagtgagatagcgttgttcctcagttgaacctccgtatataagaaagtaaaccctcagaggtttcccaggcctactcgccctgtaaatttcaagctgccgaacaaaggttagc

SEQ ID NO: 338207 - DNA, 1000 bp, Homo Sapiens; identical to SEQ ID NO: 158541

SEQ ID NO: 338208 - DNA, 1000 bp, Homo Sapiens; identical to SEQ ID NO: 158542

SEQ ID NO: 338209 - DNA, 1000 bp, Homo Sapiens
ttttttttttttttttttttttttttttttataatttttctattttattattgtcattaatctcttactgtgcctaatttataaattaaacgttatcacagatacatatgagtggggttaagggaagaaaaaacatcatatatatgaatggagtttggtactatctgtggtttgcgaatctactaggggtcttagaacatatactgctcagataaggggaactactgtattttcttgggcaggagtatgatttgcataaggaaaaaaatcacaaacaaaaaaccacacaacaacaaagtcttttgagagactgctttcaacatcaagagagaatgtggggagctgtgatggaaagctataaccaggaaagtcaagaggggaagccctactgcacttaacaggagagaaggtcaagtaaccccagaatctttttctctgaggatttgctgttgcagatcaaagacactgcttttcactgcaaacatgtgaacctcccccttctctgatcaaggatgctgtggttttgatgatattcacttgataagggagagcttggtagtttcacagaaaatcggaagtgtttgtagaaacaggttcccatctatgaaagaaccactgggctgggtgttaaaactgagtcctgaacgtaaagatcatcacaaacctatgaaacatcattcccaaacaagatagcgtaatagtatctaggagattacaaacaatatgcagaaaagggaaccaaccaaataaaccaaagaaatctatcttgatactgaatagcctataactctccttataagtgagatgacttgagtaagaacattgaggcaatccaaaggatcacattattttagtgtttctaaaatcttcctaaacatgccatgtcttagatttggatttttaaaaattcttttcaattcaaaattaattccctaccaaaagagtttgtatcttaccacttgaccgaatgttgatgaatgggtagttgggcatcaccagc

SEQ ID NO: 338210 - DNA, 1000 bp, Homo Sapiens
aaatcattcagtttaaggtcactagactttagatgagtgaccctgcaggtttataaggcattctgctcagcagtcttgtaaatagtcctatatgaaagagccatgctactgttggacttggtcccactctggtcaaccttgataacgtcatacgtggcttatggactggatagcactggattccgccgcagccctggccatactgtgccacacgttggaagaactgtgggatgtagaatggagggactccttgtcagacagtgacagcatcatagcatatgcctgcgatttggactttctgtgtaacggctgcttaagttcctctggcacatgggaagtactaaaagaagacagctcagcttcagaatattgattatcttccattttcctcattttgaggctatctgtgaagtgccttatatgatctagagcagaaagtccacttttatattcttcctctttatacctcactggggatgtcttgcaactcatctccagggcactggtttcttcatagtcatcctccgggtttccttcatgtaaattacttgtcactggttcctttcctgtttttccagtaatatcatagtcttcatcctcctcatctaacaacacctcatcttcaacttcttcatcatccagcaagtctgaattttgactgggcaccaaagccttttcttctttaaaatgactgccattcattctctcctccacattcctgggagattggctgccatggttgctgttcccaatgaaatttcgaatttctgtgaagtaagcatcttctttgtcatccagaatcgcacctgtactttccagttcagaatgaggcgacgatgttgctgtaccggacatgttcccattctcatgtttctttaggtgtctgtctaaattggtttgttgaccaaaacacctataacataagtgacacttaaatggcttctctttattgtggatgttgcgaacatgcctttgcaagttagaagatatgctaaatgat

SEQ ID NO: 338211 - DNA, 1000 bp, Homo Sapiens
ttttttttttaaagctcaagtattttattaataatttattgtcagtaagaaagactggctaatggtagttttcattaaaaacctttacaagaccattgcatcacaaatatacagacactataaaaactgtgtcatggtggttttggttctaaacaggtatgcagaaggtccccgttacactttccaataatgaaaaatgtttataattctaaatacagcaacccatgtaagacatgttcatgtatctgatctctccttcatcctatgtacagctagaaatgaatgactacactgaaatgtactaacaaaatgtcacacttcagtggaaaaagacagaatgaaaccctggttatagtaaaaaaaaaaaaatcagggtgctagataatggcactgacaccaccaaaattcagttgaaacaaatgcacaaaatatcttggaaatctagttaaaactatgaaaaatcaaatctgtacataaaatttacaaaaaaaagagacaggaaaattaaaataatcaaatctatataaatacatgaatcatgctgacaacacaggactgatttttcgtttgattattttaacacagacagatgtaaatcccaaaagacgttgggaaatggcacagccgatgaaaacctcacgatgacagtagttgggacactggaaatggctagcacgtccagaggcgcaggatccagcgcagccatgcccattcggctcaccaaaaaaagcttggaagcactgctgcaaagaacagcgcggattactcacatcacctctaggttcactaaagtcaggcactttggggggagttgagagtcagacttccgtgtgctgctgggaatccaggggcgggatcgtcacctcttcgaagtggccgtcgtccccgctctcatagtcactcatcatgacctcggactccacttcgcagcaggctgacacgtcagagcaggaggcggtggaggcgtacacagacatgggcatgctctcgacagcgggcg

SEQ ID NO: 338212 - DNA, 1000 bp, Homo Sapiens
gaaggtaatgtggtataaattcattgttaatgagaacaataatgttactctgctggaggacagagtcctgaaggctgagtttggcgccatcctgtcactatgtgagttttctcttgatgatagtgagctctttctgaagttcactgaacttagggcgattttcaggtttataatcccaacacttcatcatgattttggaaatatcctctggacagtgctggggagctgacatccggtatcctctttctacttgctctcttgcttgctgatttgtcattccagggtacggacaaacccctaagctgaaggtctcccagagaaggatgccaaagctccacacgtcactctctgaactgtatctcccataattaagagcttccggtgctgtccatttaatgggaatctgctttaagccagaagatgaatacactccaccatcctcttgacgagacattccaaagtcactgattttcagaacattattttcacctaccaggcagtttcttgcagcaaggtccctgtgtatacagtttttactctcgagatacaacataccagcagcagcgtctaatgaaaatttcactaactgtttgagttttagttcatccttcttccttctcagaaaggtgaggaaatcacctcctgaaaccagttccataatgatgtagacaggctgtctttgtgtgcaaactcctataagtttgacaatattgggatgatcatattgcttgagaattttggcttcttgtaaaaattttattttcaattcctgaggaagatcttctttacatgttttaacagcaacagaagttttatcctttaatgtgcccttatatacttcaccaaaatttcccttgcccagtaattctcccaatatgacatcttcatgactgagaatccatttcttgtccttaggaataggattcagcagaactacacctgatttcttagtgatgacctgttttgttgtatagtgatgatctataagttgaggaatgtt

SEQ ID NO: 338213 - DNA, 1000 bp, Homo Sapiens; identical to SEQ ID NO: 158543

SEQ ID NO: 338214 - DNA, 1000 bp, Homo Sapiens; identical to SEQ ID NO: 158544

SEQ ID NO: 338215 - DNA, 1000 bp, Homo Sapiens; identical to SEQ ID NO: 158546

SEQ ID NO: 338216 - DNA, 1000 bp, Homo Sapiens
tgcagtaggataacatttttaatgtgttaataagatgtgataaaaacataagtctacaatgaacatatgtgaaaaagatatttaattgcaaaatagaaaagtaggccagagtacagttttaagggtaattgcttttttatacagtatagataacctagagggatttcagggttaaacagttcataaagcaataaaacactgaaaaataaagcaagaaaaaggggtttgaagtaatattttaccaaaaaaaaaaaagaaaaagtgaacagtctgccagtgtttaatgtccatacattgtggaattcaacaatattgtgatgagagcaagtcatagcacagacactgagctttcaaaaggaaaagtagaagttacattagacatgtctattgcatcactgtaatacaaaaagttcctgttctacatacaaaagcaatttttttccgtaagaatcatttcctggggagaaataagtccataaaatatttcagaaacccatatgcattgggttttccaaaaacattatcttaaaatcagtgccttaaagtgctttcatgtggaaatcatgatggaaggcacagaatacagtttcacgtccccactcttaaattttcaaaaaagcacagattttgcagaattggcaaattcaagttatcttgtaggctgctccttccgagaacactgtcattccaataaaaccagctgccagcttacttcgtttcaatgacctacagagtaaaggggttttgtttttgtttttttctggtcactttcatcatttctgtgggagaaatacctatgtaagtgatgcattttgaaattataaaacatgcagaatatgtacaaacagaaatttttaaaaatatttgcttcatatacatgtaaatctacttgggtatagctgaaattgaacaaatataaaaattttgctttctaaaaaatgttttcagagaatctgacacaacttaaagctgtacaaagatttcctgggagaaatcttct

SEQ ID NO: 338217 - DNA, 1000 bp, Homo Sapiens
catcggaaaatagtttaattctgtacagacaaccacgggactgattacaaagtgcggtgcaaacaccagggcccatgagcgccagcagcgtggcccaccacgtgccggggctccagaggccacgcccgaaacaccaaataaatcacagacgtgacaattgcgggaggagcatgaatcagctgttccttcgggaggagaaaaaggaaacaacaatcagaggctttggaatgctttctcttcatgtgcctggaacgctgggcgggcggtgacccggggctcggagccccaccctggccacacctgctgtcgcccacggggtcctcacggtggggacccaggtcccacgacggctcccaacctgtggagctgtgtgcgcagccaccaccactgcggcctcagaagaggggccgggagccctggttctcaaactccgaccaggcgtcattcagctccatgaagatcatcttggcgtgctgctcgtacggctgccccgcagccttgtcggggtgcacggccagcaccgcgcggcgatagtgcttcttcacttgctccggagccaccaggtcggccatgcccacgggcgtccagcggctctccccgtcccacagcactgtgtgcagcgtggacagcagggcccggatgttccgctccttgccctcaatccagtccaggagcttcagcttgagtgggtccgtgtctttagccaggtcctgcttcctcatctctgcaatggtctttggccctttcttgtcagacctggaggagaagccttgattggacaacagatcttcaaagtcgttctcagagacttttggcttttgagcaaagctgggtgcgcggaccccccgctcctcccgcgccccgatcacactgaagttcgaggcatagttaggccttggctgtgtgcaggctttggggggcggcttggcctgagggggccatgaggcgccctgggctggcggccgacttgtctgccaggagctgctgcctttggccgtgg

SEQ ID NO: 338218 - DNA, 1000 bp, Homo Sapiens
cattgttcccaaacaaaatgcttatcatctcaaatataataatactgagtccttcccacttataaaaactgtccccaatgcacatggagagtagtaactaaccccatgtgtcaacttcaaataagccaaggtataaaaggtacaaaacggctccaaaaggactatgctttgaaaggaaggccttaaagcattttgcaaacttcacgtgcacttgttttatatgaatatctatagtcacatacagcataaaaagaaagctttgaaaagggaaggaactcactgtacagaagacaaaacaataccctttttatttttaaaactctggtgaaataggtttccataggacatcccattcaaaaaaaaaaattaatgtaaaccaacctgcctgtgggttagtcacactatacagacttcatcagagtgtttacagatacctagagtatttacaaatgctatccgttaggtagtaaagtgttgttgcaatttttccagcacatattccacagtaaaataaagggggtatattggtgttcttgtataaaaattcttaacaaatagagaaaggcaattttcctgagagaagatttgttcttgaaatatttttctttaacaattggaaatataaaatgggatgtagttgtaaaagaagcataagaatgtctaagttaacatttttcttttaaattattttaagtaccattaagttaaaatgtttacattcattataaaaaatgctgttaaatcttatgcaaatgatttaacactgattgctgcaacgcaaattgcactttttaaaaaaattattgtatacatggaagaaaaatatcttgtttgctaccctgtttacaaattccgactgacttcagatcagccacacaatatgaactttgagaaacgtcagtcacagtgtatgttaaagttacaatgcagtcttgcaaactgagtaatatttttgataagagacctcatgaaccgactcagcctccagagatgtgtacca

SEQ ID NO: 338219 - DNA, 1000 bp, Homo Sapiens
tttttgtctttcaaaaaaatgtgaaaacactttaatataacttatactgtttctacaaattagatgtaagaaataatttcatttagtcatagtacaataaatttgattaacaaaatcccaatttacaaaacagaagtaaataaatgcagaaatatattcattatcaaattataaaataaaagtaacagttattgttgagatagcatcagtttattcttcatttcagataatagagtcaattattttggtatacttagtaatgtttttgcaagtattaaaataatggaacgttgagatttaaacacaatgacagtaaaccattgaaatttcaaattcactttatacagccatcatgaatccataagtgaatgttaatcatgtaaaaaaatataaaatgattgtaatataaccatctaatcattaacatatggagttttaagaccactatttaatctgctaatttgctctgaaatataagtagttgcttttctgtgatgcatgacatgtctttgtgccttagtacttaatttgaaatgtccttagtgtaaaaatataccaaagtaaataaaaaaggagacacttatttacaaaacaatattgtatacatattatataaatgcattgtttcagtctttttatacaatattgatagagtcgatcatttctattattttaccataaaaactgcagtgttgcaaaggcagtgttgtaattttccaaagacaaaattacatacttctccaagtatgttattttgacattttgataaaaacaaacaccatttgactgccttttaagataatgcagtttctccaagtatgctacagaattgaaagccaacctctagaaaaatgattcttcttacattaaagaaaatccattcctcatttggaggtgtaggaaaatgcccctgaagaaaagagaaacttactattttactgaatgttttttatgtgataaacctggtagcctcagacattcagcctatcgtattagcacc

SEQ ID NO: 338220 - DNA, 1000 bp, Homo Sapiens
ttaacgacaggtgcactttgtagctatcatatcttcgtactctttataggcaattgagccatcgggctcaatggtcaaaacactcaaggggctgtatttggcaggtacacatgacggtcttggcactgaggagtccagcttctcatagatgatgttctgtaccatggtgtgaactggagagccataccgatgtccaactgcccttggacagtcccctttacagtatcgagggttgtacctgtgcggagccacaatccagttgtcccacttcagctgactaaagctaagtctaaagtcatggagctcacactcattttggggaagaagaaattgtctgaagtattcactcagattgaaggaagctgggcccaagggcttcttcaattcagaactgacagtttcctgacctctgcggtgacggtgatgggaagatctcccatcctcagcagcctcttctcccacaggataggcagacagacttctctcctggtcaggaccctgggaaggcctccttttatagtgaagggaataccagctgtgataagcctgagcacttgtgtcattcaaatataagatcagtgagggggacaccagagtcatgttaaacaaaccattctgtgctgaaggatgctccagctggtctttcatgcaagtaaaatttatagacatgtgaatacttctcttgttggaggccactaaaggttgaaggaggctggtcacatcaatctgaatccatttgtgtttctttccaaattcaaactgtgagttaaaggtaaatgagtatggagctctgccgagagtcctgctagaagactttggctcctttatcattagattgcacacacatttgacagcagaggaaaaagaaactgagttgttgatattgtacagcaagactgacttgagtaagtgttcaacggtagtaatgcgatccaggttaaatagcagttccactgatggaaggattcctgttacctggtctccaggagcctgcttgtgc

SEQ ID NO: 338221 - DNA, 1000 bp, Homo Sapiens; identical to SEQ ID NO: 161075

SEQ ID NO: 338222 - DNA, 1000 bp, Homo Sapiens; identical to SEQ ID NO: 158547

SEQ ID NO: 338223 - DNA, 1000 bp, Homo Sapiens
gttttttcttttgtacaagagtgcagaactgtttacagtacataaacatcagcgtggaaaatgctagtacatatataaaggtgaacatcagtaccagctgtttccacaaagcccactcttggtaagaatcttctttgtggcaaaaaagcttggcatcaatgtaggctgaaatttatatcattagaaatcaatgtcattaaaggagatatgggagttaccttagaaatattaactccttctctagctaggaaaggccagaagtaaaactgttaaaatcatcatcatcatgatcatcatcatcatcgaaaacacagccccagtttgctttacagcccaagttacaaactgtccctttaaaatacagcatatcccaaagccttctgagtttggatggagcactgcatcaggtttttcacagaagccccgaaggatcacaagaagctttcttaaaaggaaaaaaaaaaaatgttccagttgaatggaactgtttctcaactgagctcctaaactggaatttcagctatacaagagaacaggaaacagataacttggtttttgtctttttacatgtccatattgtatttttttaatgcagctatgatgtttctgttaaagataatagggtggacagagcggttaccaccaggaccagcagtgggctcagaccacagcttggaggagcagccattgattttgtggttatgtggctggaagcaccgagaccttctttttcataattaccattggaaatacagaggtgtgtattgcccgacacattggatttcagcttctgtgcctgtaaatttgcacacggtggcaaaacatgagtgggaatttcattctcagaccctgctggccccaggggcttgttcttaacccggagggcagtggtggtagtggcagtggtggtctgtactgggaaggctggctgccacacggtcacatcggagccattgccaaaggcttgaattgcatttttaagacatgtattgtccttgaa

SEQ ID NO: 338224 - DNA, 1000 bp, Homo Sapiens
tttttttttttttttggaaaacgtagacttttaataactgcttttatcaccaggttaagccatgcagttacaaagtagttagaaatttctgaagggtgttagagttaaaaaaaaaaaaaaaagctgactcttacacatatattatctagcacttcatggggacactactgttcaaaaggccctggccaaataactcccaaatgaaacactcaacccaaggatgttttcagcccactgttagtgaagctgggtgcagaatgcaaagcctctaaaaggagaggatacaaagtcaggtgagtaggggccattggcaatgctcagagccagccagactccaaacagggagcccaagtggtttttttctgggacactctacttgaattattgtttaattagtcaaccatagatcttcaaaagagaacaattagttaacatgataaaaagtgactgcattctttggactgtatcataattatggtaagcaaattctgacagttttaatgaaaatagcctccaccattttgcaggtatgaagataacttaattatccacagggcttttaatgtctgctggacaatacatgaatgataagctataaatgacattgttttatgatataaaaatactagtttttttcatttattatttctataggcattcactgtttgagtcaaggttaggcttgttaagtgattaaaggcaattttattacagcagcatgtacttattctattctaaaagaataatattcataaacagaaacaggttttatatttgtttgcaacctgcaaaattgaattattttgctgatataaaatactaagaactcacttgaggaccatgccaccttctgaaaaggccacacacctacttcttaaatgtgttaaagttacagtgtgtcccagactcatccagaaaaaataagcaagcaactgactgctcttgactgttcctccccagcactagcactgattgtgttgggaaaagccacagagcaagg

SEQ ID NO: 338225 - DNA, 1000 bp, Homo Sapiens
ttttttttttttttttttagcctggaacagccgctctcacctcagttcatctggggaaggggctacaaagcaaacaatctttattcacaattggggtggcagaggggagatacccccaggtcagtccaaaagcaaagatactgggagggaagatggcgctgggcgaggaactcagcactcatcctcacccagcagggcataagggtttcggccagccaggctggaccctggagccgaggttggggtctcctcatccccttctccctcctcatccgcatcccggtcctcctctccctcctcctcacaggagctgctcagctcttcctcttcctcctcctcctcgtcacctgctggccccaccctgccctgcaaaaccaccagctccgtggtctctggatgggactcccaggtgcctttctgttcactgtagcctgggggatgaaaacacaggctgaggcggccgtccactgccagccgcaagagactgttggctgctctgtacacatcattccgagccgccttggctgtcttgtaaccacgtttctctgcccaggcttcacagatgtcccaggcacaccaggggtgttccgctgaggggtcctcagcctctgggtggcgcaggtggagcagggcctgcacgggaattcgggaggccaggtagcccacagcagtgtagggctcctggatctgggcgatagggtagatccctgccagaacctgcaactgcctaggcagaagagatgggaagatgaggcctgggcagtcacagagcttcacagagggggtaagaaagtaggtctgaaagtatcgggtatggcccggggttctggagacactcacgactttccgccccaccagcccattgatcagcgaggactttcccacattagggaaacccacacagccgatggtcaccaccccatccttgtagcgctcttgggttgggccagttggctccattgctgaatcagtctgctgctccaccaggactgctgggcca

SEQ ID NO: 338226 - DNA, 1000 bp, Homo Sapiens
tttttttttttttttttttttttttttttttttttctggaaaaaacacgctttattgggtagacaaataggcctgatgggaaggcctgagtcacagtgcactggggagtgaacaaaagtaggcaaagtgcttgaagcttcccctttgcccccaccttaacctcctggggaggcagctctggacactcagtacccagacctgggctcagcaaggcctggggtgactgtgcccctcactcctgctgcctgatctgggcagccccacccttcactggtaagacagaattctcaagggataggcgcagagaggagcccgcctccctggttcattggagagtaacagggttttagcataatgctggccagagccagtgtgccaggtgctgccacacaggaagctgacagccctgctggacgggcgggagcctctcgggccctccggactatttatagctggaggcctaggctgctgacctgtgacattcctctgctgccaccccatgctggagcaaggcaagtgcagagcacactcctcctcctcccctcctgttctttcctcaccccagggagtagggtggttttgattttcttcctcctccttgagtttcccagctctcgagttgctggtgttgtcagtacctcacgagaaggccctcattcagcaaagagagctgcccttggaatattggtgcccaccaacataggaatctgctcacccttccctaccgttcatcagcctttgggccaccctctggcctgctggcttccagatgccaggcatggttagctggttaccctggccggtctggagcagctgaggaagaggtgcagagtttgggaggaagaaaggggtggagtcagggatgtcctctggggagatagcacaggaggggcccagctgacacctcccccagctagagctactgagaaggaagcctgggtgaatacaaaggtcacagggagctgagtgatctgagcctgttatgaaaggtgtagctctg

SEQ ID NO: 338227 - DNA, 1000 bp, Homo Sapiens
ttttttttttttttttttaagataaccaacaattactttaattcataaatgtatatacatagattacataaagaaattaagtacacatgttgcattttaaaaatgtgtctagcaggttattgtacaaaattaaaatgaatttaagaatacattttaacatttttaaaattagttaatcatatatttatttatctattttatttatttatttttgagacagagttttactcttgttgcccaggctggagtgcaatggtgtgatgttggctcaccacaacctctgcctcccaggttcaagtgattctcctgcttcagcctcccgagtagctgggtttgcagacatgcaccaccatgaccggctaattttgtatttttagtagagacggggtttctccatgttggtcaggctggtctcgaattcctgacctcgggtaatccccccaccttggcctcccaaagtgctgggattacaggtgtcagccaccgtgcctggctaatcatatatttaatattaagacttaaggctttagaaaagttattattcaaaaaataactgatattgcttcaaaagtgattaattcaccatggtataattaacaagaatgatgcatttcatttaagttgcagaaaaaaattatgcggatccttcctaagtattttcagttttttaaaaaaaatttattgccacatcacaaggagtcaagaggatccttcctaagtttcatatccacacaaaaatgtgatgcctatatagtgaccagaaacaataactatgaaagtggagtcggctctctatcttggaaacaattttaatctgaaagcatcagtcagaggacccacataaaaagccatatactgatttgtggaaaagtaataacttattgagctgtttccaggagacacagattcttggtttctgagttcctgagctgttcactcactgtgccagaacagctgacttcccacagtgtgtacttgagtatctcagcaactgaggacc

SEQ ID NO: 338228 - DNA, 1000 bp, Homo Sapiens
tttttttttttttttttttttttttttttttttttttatgacaaaatcattttttattgagttgggttggagacgggaacagggaatgcactgggggccataccccggttggcagaggggtggggtgttggctcgtgccccccctcctttagggcaccgcagggtgaggcttggcccccaggccatggctgtggccctggacgccaggctggagtggagctggggttgcattctggtcccagctgcctggccgggctgcagttttccccaaatggccaccagagggcagtcggaccccagcgcagaggaatttttggttgctcaggtgatggcttcttaaaaaaataaaaaaccagaggctggtgtgttccccttccaaacccgaggagggcaggcctggggagaaggctctggtttctatgatctcttcgataaaaaataatccaaaataataacaaaatacgtggtttctctttcaccctttcccccctccaggaactgaggtcagaaatgggggtgaagggacaagggataccctggtatggcctggatatcaaggtgtgggcctcttttttgccccttaccacccataagtaaatttataaataaataaatcaatcataaatagacactgtctttgtatatgtgcatatataatctttctctctcctatttaggcaactatgtgactaatctctctgactctttagctcagaaattcaaacgtaaagtgacatggtcaaggtcaagtttgggggaagagggacatctgggacttggaatggcactgtaaaactcccagcattctggaattgcaacccagctgggctgtgagacatttctgagtagaacactgaccacctgaacattctggaaccgtggagccagctgggcccccatagggatctgaacagaaccttgaaacacccaatgtcctagaactccagaaccagctgggtctggggggtgtggagctgggggtttggaaagaagccctgga

SEQ ID NO: 338229 - DNA, 1000 bp, Homo Sapiens
agcaattccaaacattacatattttttatttacttgtgtatggtgagccctgtgaaggcaaggccaggctgcctcagtcattgttgtgtccccagccccacccagcacagtgccctacataaacctctgttgaatgaatgaataaataccctttcttcttgtcccacaccttcttcccaaaccttctggcatcactcctccaggcagtctgccctgattgcccttcacttgagttctgacattctccctcttcatcctcagtcttgacttggagatcgctgtttatctagaaacttagaattgcggtcttatgttccctggcctgtatgaccaggggctttgcaaacataatgactctatatcggctgcatttctccttccactttcccccgagtcacagacttttatccacttgttggaaaaaaaaaaatctaaccttctctatttgtctttattttctggaaaccaaatgtttgacttaatttatctggccagacatggcggctcacatctctaatctgagcactttgggaggccaaggcaggaggatctcttgagcccaggagttcaagatcagcctggggaaacatagtgagactccatttatacaaaaagtacaaaaattagccaggcatgggtgggctcacatttgtggtcccagctactcgggaggctgatgtgggaagatcgctggagagcccaggaggtggaggctgcagtgagccacgactgcactactgcactccagcctgggcaacacagtgagaccctgtctccaaaaaaatatatttactcatctcctccttcaggaggccctccacaatcgccaaactgtgatgggatctgggagcacaaaggttgaccagtgacacaccaacctcactcttcctaagttcttgtattcttatgaatattaacacagccctttttccatacaatttgcatacaccagaccaggagagaagggactgtgggatgagaggggaaaactggggattct

SEQ ID NO: 338230 - DNA, 1000 bp, Homo Sapiens
ttagagtgacacagacctcttcctcctcctggcaaaatcttctgcatgaatgaaggtggagagagccttagtgaggtgactatctgatgtctcagtgctactcccaaagtcatagtttttcaggcaagggcacaagcagtggacaatggcccggcggatgtagctgtcgaagatatagtaaatgaaagggttgacacagctgttggcaaatgccaagggtccactcacctccataccaagctgaagaatagctgagggtaaatagtgttcttgccgcaacccagagacaatggccaggaacttgaaagtattgaagggcagccaggagacaagaaaggctgccacgacaataaagatgatctttatagatttcttcagctttttgttgtgctttcctgattgctggtaatgggcacacagcttccttgcaatgcaacagtagcaggtcacaatgctcaacaaagggacaaaaaaggtgaaaattaaggccaccagggaccatatgagtttaattggagttgcctttttctctgcacagtatggcttatcatcaatcagcgtgagctccctggacagaagagtaggcaaccccagcaggcaggagataaaccagatgctggcacagactacatatgcacagtctgtccttctgaatttcctggatacgactggccacacaatggccaggtagcggtcaacactcatgcaagtgagcaggaggacactgcagtgcatattgacggagatcatgtaggagctccctttgcacaggaaggagcccgtcctccacagtcctagagatgcttctttatccacccagagaggcaatgtgacaagaaaaatgaagtcagaggcagccagattgatgataaagatgtcgatcagtcttcggctgccgggtttgaaatgcaacgctcccatgagaacaaggttccccagcactccagtcaggaacacagctgtgtaaaagactggaaggaagacagaggtgtaaggaaca

SEQ ID NO: 338231 - DNA, 1000 bp, Homo Sapiens
tttttttttttttttaattcacaaaaatgttttatataagtttttaaaatgaagataatgaatttattttttcaagagaaaagggacttgatagtattatacagaatatccattgacgccagagtagttagtgaagtgaattttgatgggattgaaatgaaagaaccttattattcataacatttcactgtttatattgcttagtgaccgtagactaccagatcggaaactttttctgcgcatgcttcgaaggtaattacggtatagcatgacactaatgactcgagcctgaaattgttttgaaacgatgtagtagagaatcacatccagacacgtgctgaggttcatgaggaaggtggtaaaggctccccagggattgtaactgttctcccccgttcccagcatcaggaaagcgaaacagatgtggaagggcataaagcagacgagcacctgcaccagcagcgtgatgatgatccttatggacttctccttgactttgggtttcagcttagacgtcctgccgtgaaggagattatgaataatgaccaagtagcacccaatcatgatgaacaaaggaatcaagaaaaaaaatgtcagtcgagtgaggttcagcacgttcacagcttttagatagatgatgtcagaaatcttgaggcaggtggcgggagtggagtctttatctgggtctttatagagcagtagcagaggggtggtcgtggtcagggtcattatccagactcccacacacgccagcacggctttgcacgtgtttttaagttctttggcgtacttcggctgtacaatggccatgtatctgtcagcactaataaaggcaagaagccataaagcaatgcttgggtaaaacactgtgagagctccaagaatctggcagaagtactctccaaatggccattcatcttttgcataataaaacattcgaaagggtaaagtcattataaatatcaagtccactaatgccacattcatcatatagatggtt

SEQ ID NO: 338232 - DNA, 1000 bp, Homo Sapiens
tcagatatgacatccattaagagggcctttgcttctaactgtgtaagggtcgttggctgtagtctgacttgcacaagaagtacacatagcccctgagaggcgctttagtcctctttggaatacactgttggagagactataaattacacagttgcagaaactgttactaatagcaagccaggtggtcaagaaggatgcgaagcggttgctgtggccagtggagctttccaacaagaagtagatgatatatggcaaccagaggatgtaaaatacactagtgattcgaaacaggaccatggcatagcgcttatcaggacaggcctgcacttccccagtctccccactctggctgctgaagcgggcttgcctttcgctgatatcctttgtgtgctgttggcagatgcggaagatgttgaaataggtgaagcagacaataagggctgctggggcatataacatcatcacgatgaacagggtgaagtaggagtcggtgtgccaggactccgcacaccactgaaacacatctccatgatatccaggtttgccccagtggaaaaaggaaggcaggaagaccagggtcgagtatagccaaatcaggaaaatacacaggcgtagtctccagggtgtaaccagagtattataggttaaaggtttagtaatggcaatgtatctatcaatgctgatacaggccagagaagccatggagacgctcttcagaactgatactacaaaaccaaatatctggcaagtcaaggactcctctactggaagggggtgatggaggagtgataaagaagggaccacgcagctcaccccaacaaaaaggtcagcatatgccatagtctggataaaataacttgtagtgtgatggttcaacaaaggtgcacagtgaaatacaaaaatcacaatgatgttgccagaaataatcaatacagttagaaagacaataatcaatacttccaaaaggcaaaaattgacagtttccaaatagccaaatgcc

SEQ ID NO: 338233 - DNA, 1000 bp, Homo Sapiens; identical to SEQ ID NO: 158551

SEQ ID NO: 338234 - DNA, 1000 bp, Homo Sapiens
tatgcatttatagatatttgattaattaatagcatgattttttttttcctaaaaggattgctcttctatggtggaatggcaccctggatgattaaaaccgtagcagcaaacaaaacctccatcaagtaagaattcagagtgtgagatatcacgcacagccacgcgtggatctttatatacgtgtcaatgtgtttgattgtatttttgctttcaaagtatgtattgagcatttcttctaggtcctcagtaacatctttttaaaaaaaaaataaatgcttagggaattgttttatattaaactcgcttccattgttatcaacttggagagtgtccctcatacatggagctctctcacaggattgacttttcatattaggagtgtaaataaaagttgttccttggtttgtgtattacagatattcctgaaaacagagtcaagttatatttctaaagtactagcgtctgcttaaagaaatgacaaggtgaagtctttcacaaagtaagcattcaatgtatgatttctctgctatgtaaatctggttgttcatacagtttctatgacataattggccacgaccatttaacagggcttgaggcttaaaaaataattttctacttgttcccttttctgaaaagggaaggtttgcttcacatcagaagaaacgttcacaagttgaaatgaaaaacttaagacttgatggcttctttcaaaatataatggtgatccatcatttgggcctccccacccccacctacaccactcaggagcattctgaaggctctttggagggcacagacacaacaatggatgcaagggttcctgtctagccataaagcaaaaccgtccctcagggggcaaaatcaagggtcaatctagacataccgctcgtgacagatgtttccattgatgaggctaaaggtggccacggaggggttggtactcttgagggaggtcatgcaggttgtactccttccagtgctgtgagaccggatgatcagg

SEQ ID NO: 338235 - DNA, 1000 bp, Homo Sapiens; identical to SEQ ID NO: 158553

SEQ ID NO: 338236 - DNA, 947 bp, Homo Sapiens
gagcgtttcttcattatgatttattggtccctccctgtccctcccacccgtcctcacccaccccactgcacccctggaggggaagggtcctgtggagacagcgagggggtccccatcaccccagggcatcaggccgatcggccggtgaccttcctgatccaggacacgtaaggcgccacagcggtggccacgggaggcttgaagatgtcagtgcagaccctggagctgaaggacaggactccggccaacacccggcctttgccacacaccaggggcccgcccgagtcacccttgcagggagcctggtccttggagtcggccgccaggcagaccatgctgggggagaggctgccgttccagaagcggctgttgttacacatgcgggtgtccagcacttggaggtccagctcccgcagcacccgggacaggcgcccgccctggtgggtcagcccccagccggccatgctgcaccgagtccctgctgccaccacctggcgcttactgggcagggccaacggccggatggtccggctgggcttcactttcccgtccagctgaagcagcgcgaggtcgttctccagggcagggacgggcttgtagcgagggtgctggatggctgccttgatgtggaaggtgagaccggggctgtccagggtgtggagccccagcaccagcctcagctgggccatccgctgggccaggcagtgggcagccgtcagcacccactttgggtgcaccaggacacccccgcacaggtgggagccatttctctgcagtgaggccatgtacgggcgcgagtgggggatcacctcccggcccccgatgatctgggtcccaaaggagctgcctactgacagggcccccagggccagcaccagcagtgaagacacgcaggcctccatgccgctgtggagacccagtgtgggtgctggccccggccccgagcc

SEQ ID NO: 338237 - DNA, 785 bp, Homo Sapiens
tgggtggctctgaaaagagcctttgggttgtgttgggcttctaagcagttggccaaaggaactttctactttttcttggctgccgccttctttggcttggctgccttgggcttggcggtctttggtttagccgccttgggtttaactgctttggccttcgctgggctcttgggcgccttttttggcttggctgctttcgcctttttcgggcttttcgcttttttggctccagcagctgcagccggcttcttcgccttctttggggtcttcttggcgctcttcttgggggtggccgcccccgtcgccttcttgggcttcttcgccgctcctgctggcttcttggccttggccgcgcctgcctttttagccttaggcttggcttccccagaggccgccttcttgttgagtttgaaggaacccgacgcgccggtgcccttggtctgcaccagggtgcccttgctcaccaggctcttgagacccagcttgatgcggctgttgttcttctccacgtcatagccagcggctgccagcgctttcttgagagcggccaaagatacgccgctgcgctccttggaggcggcaacagctttagtaatgagctcggacaccgggggcccagacgctttgcgcttggccgcacctgcagacttgcgggccttcttcttcacgggagtcttctcggcaggggccggagcagcgggcgcggcaggcgcagtctcggacatgttgaaggcaagcgtgagcgagagcaattcgagccggaagcagaggcactggccgggact

SEQ ID NO: 338238 - DNA, 790 bp, Homo Sapiens
tgggtggctctgaaaagagcctttggggctttgttgcggttttcacacgccagcttcctacttctttttggcagccgccttcttggcctttgcagctttaggttttgctgctttgggcttagcggctttgggctttgccgccttcggcttaactgccttgggcttggcaggactcttggttgcctttttcggtttggcagcggccttggccttcttagggctcttcgccacctttttgacgccagccgccgcgggcttcttcgccttcttcggagtcttcttcactgcctttttcgcccctgcagccttcttggccttcttaggcgtggcccccgcgggcttcttagctttagcggcgcctgccttcttggctttgggcttggcttccccggaggccgccttcttgttgagtttaaaggagccagaagcaccagtgcccttggtctgcaccagggtgcccttgctcaccaagctcttgaggcccagcttaatgcggctgttattcttctccacgtcgtagccaccggccgctaaggccttcttaagggctgccaaagaaaggccattgcgctccttagaagcagccacagccttggtgatcagctctgagactgggggccccgtcgctttgcgcttagcagcgccggcgccggcagccttcttagttgccttcttcttagccggggatttctccaccggcgctggggtggctgtctcggcaggagcggtttccgacatggtggcaagaaactgctagaagagaataagctcgaaatctaaagagcaggtt

SEQ ID NO: 338239 - DNA, 1000 bp, Homo Sapiens
ttttttttttttttttttttttttttttttttttttttttatgggaataaatacttgttaaacttctcttataaatatgcattagaatgtccgataacacaagccaagggctgtaaaattaaggttaaatcaagactgaatttcccgcacggaccagcaggaaagccagttacctaaaagagcctaatccccaaatccgctgaaggtgcagggcggcctcagtcccggggcatcttgaactggtccttctccctgcgcacggcccgcatggtggtcaccgggtccgtctcacctgcgtgctgctgcaccgtcttctccctcactctcatgaaggggttgtaggtaaactcctctgccagggtggatggcactgtgggctccccgatgctgtacttctccttggcccaggccagcttctcccggatggcggcattgccgggctccacgtggcgtgcaaacttgaggttgttgatggtgtactcgtggccacagtagactcttgtgtccggggggagccggcccaagacctccagcagagctttacacatctcatccgcagtcccttcatagaacttcccgcagccagccacaaacaaggtgtcacctgtgaacacggcagggggctccgagcctccgggcttgctcacgaagtaacaaatgtgtcctgaagtgtggcacggggtcgccaggcacttgacgttcagagaccccacctgcagtgtggacaggtgagtgatcttgtgagtcagggccccgatacggtcgtcacccccgtacaccttcagtcccgactccagcttgaccagtttctcattcccgccagcatggtcccagtggtggtgggtggtgagcactgtggtcagtttcaccccgtgctttctcgccgcgtccacgaccttctggggctgcaccggatccacaatggcagcctccttggtctcatcatcaatgaccaggtacatgtagttgtcggtcagggcaggcagcacctctaccttca

SEQ ID NO: 338240 - DNA, 1000 bp, Homo Sapiens; identical to SEQ ID NO: 158556

SEQ ID NO: 338241 - DNA, 1000 bp, Homo Sapiens
cgcgataggtatattggccttttctaaaagaaataaaaacaaaaagttaaaatattgaaagtttaaatacttctttcacagaaataaactattcaattttaaaaggtagagagagagaaacattttattctttctatcatgaacatcagtcaaccaagcttcacattttgggcaggattttttaagtataaattttttaagaacttattttattttaaaaaaggaagaacaggtttattttggcagaaaagtaaaatagagaatatgcaaaatttgtctttaagattggcatacacaatttaaaaacacagtacaattatatcaaatacagcacagccacggcctttaaaacttcctttggcatttcatttggtaaagttaaaaagaaaatccttcctaaaaaaaaaaaattatcatctatcaaacagtccataagttaggttgtataggttgaaagaacttttccttgagtttccaaaatccttttcttccatgataacccacataaagcatggctagtgaggtatataggccaaaacactttcaggcggatgcacagtaaggaaaaagtgcataaacaaagaattcatcccattttcatagaaataacaggttaaatctgagtttcttcttgttgatgtattgttttactttggcagaatgaaaataaacccatataaatgtctttgttcaagtcccagcagcagtgatatgtctcctttggtggcattatctgatgccacaatactgtacagcccctagaggaactaaggtgttgtgtgtgactgcaaacgtcaaaacatggaagatcatacatcaagcaccatgtcatattgttgtcccttcttccgcctgccacacttattgatgagaactacatacagcgtcaaaagcatgacccaatagcatgcatagagcaacgttccaacaattagaactgtctgtttggattctgaaaatggccttttagactccttataaatggtgaaaatcacaccac

SEQ ID NO: 338242 - DNA, 1000 bp, Homo Sapiens
tttcgagataaccggcatatgtgagaatctttattttgacaaataagtgcagtataaaaaacttgacctgaaaattaaaaaaaaaaaaaaaagcaggtaaaaataaatatgtttacaaattattgtagaaacaatacaaaagaggatttgaattctcaatgaggaaaaaccaaaatgcgtccaattgtataaaggctcttcccttgcaagaaacggggataaagctgaagacccagtttggttttgctgctgaaaaatgtacaaaataacttagaaaaaccagtcgaggtcaaacgttgtgagcccactacctgtacctgcctgtttttgatttgaggaaagttgacgaccacagtgcaaggcagagctgatggtaggacagccaggagagcctgtcatcctacattaatcttcaagtaaatgctgaagaaaaacaagcccttagcgaagtctgaactctgcacttggctgaccggatttcctccattctaatgctcaaaatagtttaacttcttggccagcagaacgattgcctggatcagctgccttagcaaatgcctgctgccttccagccttcatgggttgggtctgatgtcaaccagcagtcttaccagaaactcgaggtctgtgtgatgtggcaactgttagctacacctggaaaacccttgagttcgtgggagatgaaggaaagcaccagggtttgcccatctgtggctcagagcacaccttgcgtctttgtaggaagcacttggtacactagaggcttgccctcttgtctgctgtccaccttagtgctggttctgcacgggttagctggcccctctgagaaaggacatttggagggcaagcaagcaacccttaagtcaaaggcttagtcaggatcccaggttttaaactcaaaacgctgagaacagcctggattgcaagtcactggaaaatggcttcccctcattccccaaaagcagcagagggaaaacagccaaaaacagcctcaggaggc

SEQ ID NO: 338243 - DNA, 1000 bp, Homo Sapiens; identical to SEQ ID NO: 158557

SEQ ID NO: 338244 - DNA, 1000 bp, Homo Sapiens
ttatttcaaaaaaagtcttttaattgttcaaaatagcacaaaacgacatcgcactatggtaatattgagtcacaggggttactctacaatagtgaacggtgtactctcctcagaaacaaatcaataggcgcgcgagagaagggatggggtaaaacaacaggaccaggtgagtgggctccaaggtgactaaacgtgacattttccacagcgaaatatactataatacaacaaaccagaggccctggaggacacaggctgctgcgtctccaggcagaggtcggtaggggagggctggaaagattggctgctcggttcaaatccttctgacttgctggcaagccttgctcctcgacagaagtttggggtggggggcagaaaactccaagcagatcccccagcctcggagcctggcctgagttccatgctgcacagctgctgctggtggcctgctccattgccctagcctcccttgtgggtgacactacacagtcaccctcccaagctgcctccaaggacgcctggttcccctccattctccaccctttccatgacgatttgggggaggtggagcagtggctgcggaaaccagcagccctgtttgggaggcggtgccggtggtgctcagggagggggcatggggagagctggaaatccaggacaaggaggccccagccctccctcaagctcccctaggctcgaccctatagatgcggagtgatcgcccatgaggaatgagctgtccttcctttgttccagcggcctgaggacaggcaaaagggcagagggcaggggccagcaacaggaagttgggctgggtggcaaacagcaggcccctcgtggcagatttcacacctctcctgccctggctggccccagcttttcctccagaaagatccctgccaagaattagccaagaagaaaaaagtaaaaaaacaaaaacaaaacaaaacaaaacaaaaaaaagagaaaagaaaaaagattacacattctgtacacagct

SEQ ID NO: 338245 - DNA, 1000 bp, Homo Sapiens
tttttttttttttttttttttttttttttttttttttttttttttttttttttttttttttttttttttttacaggtgaaccatagtctcactttatttcgaattttaggactgaacagaaagaaggttcacagatatttcttcagggaaggaaagtgggcaaatagcacaatgaggcaaaccacacaatctagacgtactttcccgggtaaacaaactgggaagcccagagctcacagaggaggagagcagagcttggggtggcagagaggtgttcattgggaaggagtcaggaacacaagagaaatgttcatgagctcatccaggatagagaggactcttggggaaggggacctccttccccatgctgtctctgccccaagcccttaatgaagcaggagagggaagtctgtccagaaactcatctggttagacatttgcatcaggaatagggagggggtggaggcagagccactttggacatgggaaatcacagttgcagtagacagtgagctctagtcactccagaagcttgacataatttgcagggaagagtccaaagtggccatggcaacgtccccgccaccagccctcgtccaccatctcaatgtcagtgattacgtcgtccggatcaaaggaaagctcatcacttccctctccttggtaatcatatagagccacagctgagatccccagagccacagccccagccccagccccagccgggcagcctgatgatccagccagagcagaagaaaaagaagaatcttcaggctcgagcacctcctcatagtccccctctggttcatcctcctgctcatgcctgtccatctcctcaacgtcctcatagtcattctcaggctcgggctcaggctcgggctcaggctcaggctctgcttcgtacactggctcttcctccacctggaggccttccagagtcctagggggcagagctgggggctcctcattgtcctccgggagagtctgcctaatgggcagc

SEQ ID NO: 338246 - DNA, 1000 bp, Homo Sapiens
gggaggattataagctcattatgatttaatatgatgattgatcatctctgcccgccagcattatcctaagaatagtgatgaaggtcggagaggcccatgcctgtcagagctcaagctcaagtcaccagaagatagaaaatatacttgtacgttactccttttttcattgtaaaattcacacatgtggccccacgccctaactttttccataagctgtcctccatgctcccagcctgcctcactgctctacgatttctcagccctggattgttcttccacagatctgctcatcaactctggctcctgaccctctctccttagtgaccccaccccattcccaccccctgcgaaagtgaccacagcttccactatggcaagggtttaggaaggtccaaagggctcttcagtgggtactggcaggcattcagtttaggtggaaggcccgagacacctcccgataggcatttcgaagcaggacataagggaaacaggactccagcatgtccagggtcaggaaggatgactcctccaccaccaagcgcatgagcagagaaatggattctcgatttctggttttaagcttgtcagtctcctggcccagctgcaagaggctgacagaggccaccaccagaaattccttgaggtgagtttcaatgttcttgttgtagagcgtgaagagggcagcagacacctggatgatggctttggtcaagcaatgaatattgttgttgtaaccatccttctcaatgctataaaaggaagaagggtcagtggcaaggagtgggagggaaactgccagaaagatcaagagcaggcaggccaccttatattcctcctcaggagatgaagtatcagctttcagattagcaatggcagccaccaaggctgggtcaatgtcacagcccacacctgcagcagatgccagctcaaagatactcaaggtcaccttgatgtctgtgtctggagtgacaaactccttcaagcactcaatgggacccat

SEQ ID NO: 338247 - DNA, 1000 bp, Homo Sapiens
agagggaacttccagctgcaagctgagaactagctcctgcacagggtcgaggggccaaagccaactaatctgaccggagcgacatgtacctgtgattcccgtgttacctggtggcataaaccttggtgtctgacttggtagctgggacagttccaagaaaagttgctctagacagtggttcttccagccactgggttagagggacccgtattctggtgggattttaggggtactgctatggacggctgcatcagcagacaatctaaactagtctcatttaaactccttgctcagatataaaataaccctgccaagatggctcttctcttctatttctttctctctctctctcttttttttttttgagatggagtctcactctgtgacccaggctggagtgcagtggtgcgatcttggctcactacaacctctgtcccccgggttcaagtgattctcctgcctcagcctccccagtagctgggattataggcgcctgccaccatgcccggctaatttttgtatttttagtagagacggggtttcaccatgttggccaggctagtcttgaactcctgacctcaggtgatccacccgcccctgcctcccaaagtgctgggattaaacgtgtgagacaccatgtctggcctctttctcttatgtaaacaaacatcttttctctagaggtctcagggcactgtcttacaaacttaagtaacagatgcagctgttttttaacttcttgtcgatcctaagccatgattttgttgctgtcccatcttgtcatgacccatttacgctcacccgagacttgtcactagtgatgctcagtgactcatttagaaggcttgcaggttcatttttagctttaagatgtgattcccgttttaatccaaggtgtgtcattaaatagctcttcatcttcatttttagaagagtcacaataggacaatttgattttgtctagagaatggggtagccattctaatctgagctattacga

SEQ ID NO: 338248 - DNA, 1000 bp, Homo Sapiens
caagattattgagaagtcaaatgaagttatgctgacgttatgattcaaaaattatcttccaaacatttaacgattataatttaagataaataacacttaaagaaagcaaaccttttataatatgactttcaatatacagccttactttaattcagtctgattccattacatttttgttattttgtattggtcctaaaaatttaaaaagaattgtatttctatatatagaactgcctgcataaatccacttcaaccttcataaaatggttacattagtgtgtgatcttgcaaaactaataattttcaaacttttgaacttagaatgaaatgtaaatttaatacaaatagtctgactatgtacaagagaaggtaaagttttcaattctcgtattatcagaaacatcataaagaaagctagatttataacacacttctattcctatgtgcatctgaagtatgtacaataaaacaccaacacagctttcatgtgtcaataggggaagtgcaagcaagaatgacttgaagtatccaataaagcaatctctatagaccccaaaatcaggctaaaaactgcaaacagctgactgcatccttgccagttctcaaagaaaaatttcatcactaaaaaataggtgtcaaattcactgaaaaactaagttgggttctttcattaaacctgggaataatgtaacatcaagtatttactatttttgcaagagaaataaaattggcagttccatttttacattacttaagaaaaatttaagagtgtttgaagaactgggacaagacattccaaacctacgacctaaaaatgaagcaagggatacatactgtccttcagcacatttccccacctgatacagagaaatttaccattagaatattagctgtgtgtggcaaggcgggggtggggggggtgaagggggaatcagacactgtcccagtctgttgacaaggacaaaaaggctctgaataggtcaccatcttcaattctgaa

SEQ ID NO: 338249 - DNA, 1000 bp, Homo Sapiens; identical to SEQ ID NO: 158558

SEQ ID NO: 338250 - DNA, 1000 bp, Homo Sapiens
ttgaattttaaagtttatttactttgaagtaaccaacttaaaaaatggcctgagttaagtgtattaaaaagaagaaatagtcgtaagatggcagtataaattcatctctgcatgtagaaaccggaaaaaaagcaagttcagtacttcaccaaaaaatttcaacattgcaaacacaggaaattgagaactgacaaacagaaatactaggaaatgcaaagtcttgaagctccaaaacaaaaacagcaatcttggaaaggcccctaatctacctcctcaatggtggggcctgacccagaccctcccttgggaccctgagccccgaagcccccaggcccgggaccaccggcaccctggtacagtccgctgatgatggggttacacacctgctccagctccttcctcttgtgctcaaactcgtccttctcggccaaggtgttggcgtccagccacgagatgacctcttgacacttgtccagcaccttcttcttgtcggcctcgctgatcttgcccttgagcccctcatcctccacggcgctcttcatgttgaaggcgtaggactccagggcgttcttggctgacaccctctcgcgctgcacctcgtcctccgctttgtacttctccgcctcctgcaccatgcgctcgatctcctccttgctcaggcggcccttgtcgttggtgatggtgatcttgttggccttgccggtgctcttgtccgtggccgtgacgttcaggatgccgttggcatcgatgtcgaaggtcacctcgatctggggcacgcccctgggggccggagggatgccgctcagctcgaagcgccccaacagattgttgtctttcgtcatggccctctcgccctcgtacacctggatcagcaccccgggttggttgtcggagtaggtggtgaagatctgcgtctgcttggtggggatggtggagttgcgcttgatcagggcagtcatcacgcctccggccgtctccagccccagcgacaggggagcca

SEQ ID NO: 338251 - DNA, 1000 bp, Homo Sapiens
ttttttttttttttttttgaagtctatctttttaatattcagtaacagctcctcagaaagagttacagactaggtggtccacggtagtgagagcctttgaggtaagggaagactagccctagttgctaactaccatttaaccctattgccccagggtacacagcactgtaggtcatctttaatggctgtattgggcttggcctgagaccagtattctgctcagggtctgcccaaatgcttttcgggcagtgcagctgaggcctaggtctaattaagagtttggtgttgggatccagttctactagccctagagaattaacctttcagccagttgcccatctataaaatacctatccttgggcagtattggattcttttttttttttttgaggtggagtctcactcttgtcgccaggctggagtgccgggctggagtacagtggtgtgatctcggctcactgcaacctctgcctcccgggttcgagtgattctcctgcctcagccttcagcttgcactaccacgcccagctaatttttgtattttcagtagagatggagtttcaccatgttggcaaagatggtctctatctcttgaccttgtgatccacccgccttggcctcccaaagtgctaggattacaatattggattttatgttagcaccagcctgtcctttattgatcataccatttacctggactcttttcttcaggaacacaatctaagtaatcctaaaccagttttgacacaaaccattgcctttaacaacccattcatagtgaggggatttagtgtagtttcaatgtcaccatccaagatcccaccccagtaccactaatgagaaatttcagggatggagattctgacacagctagggttcacaatatacctttacatcctaaagttacaaatgaaatccaagtgtataaagttaataccagtgatcactcactccccatcatttctcagagaatccaagcagctataaaagcatcattagt

SEQ ID NO: 338252 - DNA, 1000 bp, Homo Sapiens
actcatctgtatttgttacaactttaagcagaatgtgactcgagcactacatttccatccacaagactgggctcgagtatttgaacagctttacgatatgcttaggtaggcttttaactttgctcctccaaacaatacttttctttggaaaacaagccctgtggagagatccttccatcaagttgcttcagtttaacctatttctagaggactagtacatgcagaattgtcaactacagggaatgaaaagttcaaaaagtagatcctacaagatgtaacgaatacttttctaaacatcaagatacagctcagaacacttcaataacaagatttggtctacttaggcatccggcttgacagctaaacactttagaccacacaaagttaacatcatgttacatacgtcttacagtgcacgttaccccatctgtgaaagaaccaacatgaaactcaaaaagcattactagctctgctttagtgcctaaggtatcacagcatcacttagtagacagaaatcttatcttccccttaaagtagttgtcatgccatacagactttttaatattaacaaaaataaagaaaaacatccttgaaaatatattatcagaggaattgtagagtactgaacaggtaagtcatccctcagccagagattagtctacttcttccatgcgtgatgtgtcgtcatctccttcaaggggtggcatttcttcagttacagcagcactggtatcatcagcagtagggtcatcttcatcaatacccagaccaagtttgatcatcctgtagatcctgttagcatgtgtctggggatcttccagactgaagccagaagacaggagcgcagtttcataaagcaagatgaccagatccttcacagacttgtcgttcttatcagcctctgccttttgccttaaggtctcaataatggaatggtcagggtttatctccaggtgtttctttgctgccatgtaacccattgttgagttgtctcttaggg

SEQ ID NO: 338253 - DNA, 1000 bp, Homo Sapiens; identical to SEQ ID NO: 158559

SEQ ID NO: 338254 - DNA, 1000 bp, Homo Sapiens
cggcagtcatcaacagacatttattgaactcctgatgtgtgccaggccaggcaccaaggaggagcacacagaggtattagataaagtcctggcccttgaggaacttctggatgatctgaggaaagaaaagtaggtgggcagaagcttctgtcaatcccaggcttctcccctctctctggtggtctcaggaaatgggagagccagaaaggggtaccttgtacagtgtccaagacatacatgcacaggctacacatgcacaagacatgtgcagagtccacgcaactacaggacacgtgtacagacacaaggtgcatatgtgtcacatgtgggtgggattcatgtgcagagtccatatgtgcataggccatgtgactatggcacaagaactccatctccccaagtcaggctggagagaaagggggagaaccccagggcctctcaaggcctcctctcaaggctgaggctggtactggccctctgtggccgtgaagaagtcctccagcacactgcgcaggtagtcaaaggtgggccggtcctctgggcgctccttccagcacagcctcatgagttggtacagctcctctggacagttgtcagggcgcaccatgcggtagcctcgctccaggttctgaatcacctccgggttggtcatccctgggtaagggatgcggccgtgggtgacaatttccgtcagcaggatcccaaaagaccacacatctgacttgatggtgaatgtcccgtagttaatggcttctggcgctgtccacttaatgggaaacttggccccctccctggctgtgtactcgttgtcctcaatgaggcgtgctaggccaaagtctgcaatcttgcagctcagggtgtcagacaccagaatgttggcagcccgaaggtcacgatgaatataattccgctcttcaatgaatgccatgccttctgcaatttgggctgccatgtccaggagtttgttgatggtcaacttgatgcctgaaggggtcttgag

SEQ ID NO: 338255 - DNA, 1000 bp, Homo Sapiens
taattaaatacttttatttacaacaaaccaaaccgacctgcaagggagggccagtccccgtccctgcggcggtcgccgcagcagcagcagcaaaaggcagcggtggcgtgcaggtccagccgtctcggtgaccggtgtgtgtgcgcgtccccctccccgtggcgagggtctcagctttcgggcccccgccccgcccccttgccacccccgacttaagtaaggcacagcccgcgtccccttccgcccggcccggaaggcattcatgacggaggccggcgcagatgggaacaacaggcttttagtgtcgccccccgcagcccccgtctacccccgcagcccccgtctccccgctcggcccggctccggcgggaggagtgaggacgaggcggatgcgctccacgcacagctctgcggcctggcgcgtctcgcggcacagcgccgctagggtcaggaagccgtgcggcaggtcctccaccacgcgcagcgtcaccggctggcccaggttgcgcagtcgccgcgcgagcatgaccgagtcgtccagcatggggtccagcgcgcacgccacgatgtgcacaggtggcaggctcttgagcatgctgtcgggtgccagcagcggcgacatgaaggggttcttgactatgggtgaggagtagaggggcatctgtgtggcaccctggctggagcgtcgggggtggaaaccctcggggaaggcggcacggacgcccaggcctctgtccatggggctcagctcatttttggcctcagcctcttcccctgcatcctcaggtggtaataagaagttgacatcggagggtgtggaggggctaagtgtctcagctgacagcgacatctcgggggtgtccgacgacgtctcggagtttcccctcaggctcaagtccctcagggtcaggttcttgagggaatccgtgcccagtgggccctggggctgggccagtgctgcttcagacacactgcggcgcatcggctctgctatgggctc

SEQ ID NO: 338256 - DNA, 1000 bp, Homo Sapiens; identical to SEQ ID NO: 158560

SEQ ID NO: 338257 - DNA, 1000 bp, Homo Sapiens; identical to SEQ ID NO: 158561

SEQ ID NO: 338258 - DNA, 1000 bp, Homo Sapiens
ttttttttttaatgaccttctccttttatttctctgtttcacaacaccagttcagctttattgttaagttcttacattctccaagaaaatacctattgcaaatcacagcaagatggaagatttcccaaaatgttttacaaaatggcaaacacttgcacttgaaatggataagcaaaacaacatgtgtggtcagtatcatccatacacttagatgttgaagctaactaaaacttttattacaggaacaatatttgaaaattaccaaagggaaacaaaaagaaatctccaagtcacccgatggaagagaaacctaaaggcagtatacaatgtgttcccttccattcactgtgccttctactactgagaacactgacttctctcatcaaacacagagggaagaatgggcctgatttcacacaggacagggaaactgctgggtgtggccctgaagcatgcattggcccatttccctgcccgctggccctggttgcatctcatgctcagactccctctccctcctctctcaaagcatcttcatacagggatgggtaagaagtgggatccctcccattggcattggctatgtactcaagaactttcatcttgctggtctcagcgtgggcccttggaccccacaggaactcatagcatgcaggatcagtgccgggcacctgccggtacaccaggtacttttcctgcacccaattttgggtaaggagcctcttgggctccccaaagaggaagtgctcccttccagcatacacccccataatgctcaggacttcccacataacctcttcagggatgcagttcccctccatgaagattacacccaggactattatcaggaggccagacttgggcatgctctgctcattacactgtatgccatcataagagaggttgagggaggtgacaaggacataggagtggctagtggggtccacttccttcacatcaatgccaaagagcagttgcatgcatacagaggcttccctaa

SEQ ID NO: 338259 - DNA, 1000 bp, Homo Sapiens
ttttttttttttttttatttattcagatttaatttctcttaaattctcaaagaagccaaggatatccaggtatccatgcttttttttcaaatttacagaatagagtgaggtataaggcaagaattaagtatcttttaacttcttgaggtctttatctcatgtattttactgctaattctttcacaattctaagcacatactttttccactgctgttatttgtcacaattcacaaaatggaatggatttcccaatctgaataaaaaacaacactcttactcctaaactatataaacagcactatgtgtgactactgtcattcataaacttggatgctgaagttcattcaaccatccgttaaaaggaacatttgaacaattccaacaggaaacaaagataaatctcaaagtcatccaatagaacagaaactcactactaacaatactgactgctctcttcaaagagtgaagaatgggcctcatgtcacacgaggcagtggaaactaatggatggggccttggaaggtgcactggcccagaccccctcccactggccctggctgcaactcgtgctcagactcactcttccccctctctaaaagcccattcatgcaggggtgggtaggaaatgtgaggtcctccactgatctttagcaaatggtgcaggactttcacatagctggtttcaacgagggcccttggaccccacaggaactcgtagcatgcaggatcactgccggggacctgccggtactccaggtagttttcctgcaccaaatcttgggtgagcagcttcctgggatgcgcaaagacactgtcctccctcccatcagatgcctccaacacactcagctcctcccagattttctcctcaggggcacagtcgccctcttttgcgattatggccaggacgattatcaggaggcctgtcttgggcacgatctgattgtcgcccagcaggccatcgtaggagaggcccaggcaggtgacaaggatgtacaa

SEQ ID NO: 338260 - DNA, 1000 bp, Homo Sapiens
aacctgaagaattaatttttatttgaaaaaaagaattacaacatgaaatatacagaaaatagcagagcacaactaatttaagttacattaattataagcagaaatccagaaaaaaagtgtgaaaatattaacttttaaatacggcttttgtaaactactctcatgaaaattttatctgggcacatacagacagtagccctgaacaaaatttactcatgccccgaaaagaatttctgggctttgtattgtttcacacaagttaaaacaatgggcacaaaagctgtggtttcaacaaaagcatattaaatcataatgttgtgctttacttgaccttagccattttgcagccgtaattttgacttaattcattaataaactaaataatccaaggcacaccgattgcatttggttacaaagtagagaagaaataattttcaagtccaaaagtattctgagatgagaatctttcaagcacaatatctgacacattaaatacatgattttaaaaagacagcgtaccataattaaaagctttattaaatgaaagaaaagaagtatgtgctgtggtttctttgcgtgtccattaacctgaaaacaacatctgcatcatttgagctcaatgtcttttgcgcagtatttttccaaatgagctgagaagcaggcaggaaagagctacttgccatttgacatagtagcttcatcaatataggagagccatctccgacacaggtctcatgaggggcctattttcttcttcattttcatcataagtagggtagaaatagttgcttgaccattccgcaggttcttcagagatttctgcagattgtgatgcctcagtccaaactgtatttgcttctgcctgaactgacgcaattgcctcacagacctccaccacagtgctggtgtgttccaattcagtttcctcagtacttataaaagctccctgttgcttttcatcattctgctgaagagaaatctgaaacttatcccgttctgt

SEQ ID NO: 338261 - DNA, 1000 bp, Homo Sapiens
tcattcatttagaaaaaatttattgaaggcctactatcatgcaccaagcactactctaggtgctgggggaaaaggacaaataaatcatgttcctttccctcaaggagctcacaatctagtagcaggggacagatatgtaaacagttagttgcataaagcatcacagtgctgtagtagatgtctgagctagagataagaactttggaatggtcaacatatagtaaaggcagagaatagatgggattggagactgttaagaaatggaatcttgaaggactgtaataattggaagaaatgctagaagaggagagtaagaaggaataattataacagtagttcggatatatgaatcatttactatgtcctagggactgtgctttacttagattatctcaatcctcgtcacaactctatggggtgctgttattatccctgttttacagatgaaaaaactaaggctcaaagacattaagttatgtgcccaaggttgcacagctagtaaatgtgaaggacaggaattgaatccagctctgattctagatctagtttattctcttaactactagtacactcagccgggcgcagtggctcatgcctgtaatcctaacactttgggaggccaaggtgggtggatcacccgaggttaggagttcaagaccagcctgggcaacatggcaaaaccctgtctctactaaaaatatgaaaattagctggggctgtgcgcagtgggtcacacctgtaatcccagcactttgggaggcagaggcaggcggatcacgagatcagatatcgagaccatcctggccaacgtggtgaaaaccggtctctcctaaaaatagaaaaaaattaggcatggtggcagacgctgtactcccagctacttgggaggctgaggcagaatggcttgaacccgggaggcagaggttgcagtgagccgagatcgtgccactgcactccagtctggcaacaggcaaggctccgtctaaaaaaaaaaaaaaaa

SEQ ID NO: 338262 - DNA, 1000 bp, Homo Sapiens
ctttgctttcacatttaatccaaggaaaaagaaagaaaaccaatcagtgagaaaactcaagaattggatggctgagggagggaacagaggaagcgcactggggctgggactgaatatggacagtggatggtagggtcctcactctcttgaggtccctcaaatacaagagtccacaatggcagggagggagaacagagtcatagagctgtggtgggggcacacacctgttccaacccagccccagccctgttccaggtgagccaaggactgacagcctctgctaggtacctgggagggctgtggagtgagggctcaggcaggggaggtaggaggctgctcagagaggaaagaccgagaagagacaggagggaagggccccaggcctgccccttgagcatccctagcagtgaaggtgccatgaaggccaggtacccaacccatctccatcagagatgatggtcatttggatcaagggggcagaagcaactgcaacaacagatcttcccctgcctctaccctcaaatcccccagagaaggtaggaaatggcaagtgaccctatagcctcaggtcagcaagaaaacaccccatttccttcccactcccttaggctgagggtgatgcaaggcagagctgaatcaggatgaaaggacactgactaagggaaaagaggagcaggagaatgagtgtgtagtatacgcagagccacaccaacgagatgggggcaggcctggcctttccaccccatgtgtatagtctatgcaaatgcaaatgagattcctagtataagaaatatattctaacatttgtaataaatattctgtttattctccttccccttccctaggaaatgggcacacagtggttcaggggccagctttggctgacgctgcagcgaagactagttagacacttggaagaactgggaggcacaagggtttggactcagggtgtcacaggttgtcccctctgaggacaggctccccccggaaggaatgcaga

SEQ ID NO: 338263 - DNA, 1000 bp, Homo Sapiens
tttttttttttttttttttttttttttttaggtaaaataagggcacatctttattttgctacaaggcagtaagtacaccgtcatatctcaaaagttcagtgctggccatcttgcatcaaatgttcttaaggcagtgactggctatcaaccacagtttctgtctccccagttgcaaacacaggatccatgcaacagttctgagaccatacacttagaaaccacaggggatgcggatcaaatgcagaactcccaaattataaaacagtcaggctacactcaaaacaaaacatagaacatcaacaacacacatctcccaaaaaagaagtgcaacgcatgcttgtataaaccaacaataacaaaaaaaccacaataaaaaatgcagagtctcccaaacaagttttcaaatgtattgcagaaggaaaaaaaatgtatatatatataaaattaaaaagtctgaaatactagtgcatagtcaattacctaacaccaagtttcttttctttctgtccaagctctactgcccctctgatactagcagcatgtctacaggctaagaccatagcagcaaaaaacgtttttcatttggcatttacaaaattaaattactgaataaaaatataattttttataaaactatttcttacagtaataatttttaaagcaagctaacagaaaactcataaaatggtttggtacaataaatgtaccttcaatgtcattaaccataaatgagcatttacaatctggattaaatgtcacatggtattaagtctacacttagagtaatgcttttactgatttttaaaaatatatgcatatgtttagtgatcgagaaaagtgaaatactggagtaccttttaatgtgtcaaatttcaaaaaacccatcacaggaaaaaatactgatctgttggatcctttaaaatacagataaatcattttatgttttttttaaaaaaatctgcattaagatattaacaactggctacaattcattacctaa

SEQ ID NO: 338264 - DNA, 1000 bp, Homo Sapiens
tttttttttcatttaattttaagctatttattttcataaacatgaggtatttcaaagtgctataagatgcagcactaaatatatacattttgaagaaattaaacacagaactttgcatttacccagttctatgcaccaaacatgaacaaatacattaacaggaagaaacaggctaggaaaaaggcatatatatatagtaaatttctttacaaaagtttcttagttcaaaaagtgataaagtaatatctactcaaaactttcacaactcattttcatacgaaaatataagtatcaaatttagttatgtatcagcgtcatactaaagtatacaggcagtgtaagaattagtacagtacataacagagattaacaatatatttgtatacaaaacatgctcctcaaacattgaggtattattacagtacttaggtatgaacttccagtctaatactggccgcaaaagccacctctcattacccaggatgtatacaaaaggcggatgtgtcaatggtatttacagaaatgttccccaggggtatcaaatggcaaaccccttatgtggcatctgctggaacttaagcaccattttaaaaagaaggaatgactttctgttgtttggaaacttggaacacacaaggtgacttcaacagccccagaggctcccaaccgtcaccaacgtttagcgctgtcatggaggtgaggtggaggaggctgcagggccacccagcatcctgggatgcaggctctccaaggtcccagcagaaccccacactggtggtcctactgcccacccagagccgaactcgacaggggaccgatttgaaagtaaaccaacattcttaatgtcaacacaatgtttgtttaaaaaaaaaatcaaaatgtgcaaagtggcagtgactgtccagttttgagaagcgtctagcaagtccgagcgtgttcaattttctttagcaactgctgctgtcttgcctgcaatttttccttttccagcaaaagctgg

SEQ ID NO: 338265 - DNA, 1000 bp, Homo Sapiens
ttttttttttttttttttttttttttttttttttttttttttggcgttgaaggaatttattcatgagaagactgagggtccatcagggagactgtccaatggtgacaagctccagaagcccgcgtcgcaacagccaggagggccaggccaccccaggcaggaggcagtgggctggcagccaccctgggcacagaagagcagacgcagacagtgctgggcaacgaggggctttcttcatgggcccgcctgccctgtccctccccccaggtccccaccttctagggttaaagtgcagctgggagggaggaggcaggcagaattggggagctagagagagcccaagtgaaccctgactgtccacgcaagtcccatgtcctcctcgtcctggagttcctcgaggttcagcgagcccatcccgcctagggcctctggaaccttggggcgagggaggtaacccctcactcccacacccatccgatatttacaaagagcatccctgggagaggggagaaggcggccggctctggcagctttctggggggcctagaacttggggcacagtgcggggcactaacatttctaacagggagaggagggggatgctcgtcttcagggatggtcttggggggttgtccccctccttctggccttggaagactcttccctttccttcttcccctcctccccttcccccaccaggcaagccaaggaagccagagaaaggcccggagagcctggctcccagctcccgcgccacgagtcagcagggtcctgcccaggcctgactcccaaacccctccgctgagggagggccacttcagtgccactggggcgacgcttccctggagatgggaagtggggtgagaggccttggggaaacctgtgggccggagcctcctgtttctgccagtggtctttctagcccagccctccctcaagcctgaggctggcaagatgctcacactaagcccgggacctcagcagtaccatctgcaccccc

SEQ ID NO: 338266 - DNA, 1000 bp, Homo Sapiens
tatgtttccaatatgacctttattgagcaagtactgctgtgacgtttaacatcgatcaacataagattgcaaactgtgcatgtcaacgaggttctcccatgaacaaaagtccattttaaatgcaccagtgaggtaaacataattattcatatatagctttcttaaggctgagttctgtgtttcatttattgtttttggctcagttggtactttgcataatacatctcaagacatccccccttaagtgacccccttccaacagcttaggaaatcggcaaatttcccaggtacatacaatatcatgcatttgaatcccccaaagactgaggagggagcaccctgagcttgcatgcagtcccctcatattgcacaaagtaaaatacaatgtctggagcccccatgggagaacccgttctgttttgaagctgccaatcacatgcattttgaaattgtcatatggcttaaccttttgcaatggactcaaatcttagtcactctgggtgacttcctttactatggcgtgtgaagtgactttttctacctttttagtagacactagtttctcctcaaaggtctcttcatgctcttcaaccttttgagtgacggttacagatttagtgatgtatttggtagcaccatctcccccctcactggtgattttttctaccgttttggtcaccaccactttctcctcacttttatcaccccccttcttttcatctgctgggctcaagtctaggccattggtgacaacgcctttctcctcttccctcccactgcctttttccttggtctcctgctctacctcctcttttccttctacctccccattgacagctatgtcttccttcctggatcccttggcacctttatcactcccttcctcctcacttcctccctctcctcccgctttctccttctctttctcctgctgcagtggcttcccctcttctttggtctctttctccaagtgcacctttaccgatttggtgatggtgac

SEQ ID NO: 338267 - DNA, 1000 bp, Homo Sapiens
ttttttttttttttttttttttttttttttttttttttggtgcgcctctactgcaccgcagggtcctgggacactgtgcgagacaggggaggtactttttttattttttgtagaggtggtccctgtcctccaggagcttacaatctagctggggagacacaactaatgcacacttaaacaatcagtacaattagcgattaccacaatattgaccacaactgcatgagaccagggaaaagcaagatcagtgaggggcaaggggggttcagagaaagtgttttagtaaaggtgggattcatttacttttactgcttgaatagttccaaatcaagtgacacattattttggagtagggtgggcttgggaggcagtgaggaggaaaggggaatcgagagagcaaatgcagcgaggctggaatgcaagtgccctgggcaagggacagcgagagggccccactgtatttcttaaccaccctccttcctcaactgtgccctccagtcccgccacacaggcacgcggttggtgctgcaccaagattcagggcgtcggctggcgatgtcagaatgtccattctgctggctggtgcggtgttttgatttccatggtggggcctgctggcatggccctggcttcggggctgggatggtgctgtcccgactttgtccagatcagaatgcggtgcctatgcccagatctcaggggtctgctccccctatcccccctcctctctcgaccctgccccttagtgggaccggtgcaaaggggttgggaagggatctggtatcttcgtcattgtcggtactgcttctccgggggtctactggcccctcactgaccttgccaagtgctcctctggcgagggaacacaggggaccccacattcctgcgcggcactggctcccgtgctggccgagatgcacaggagcacctgatgatacggccgcccagggctgggagctggggcctcagttgggggctcgctgcctgcgctcccccaaca

SEQ ID NO: 338268 - DNA, 1000 bp, Homo Sapiens
ttttttttttcagaaatgcctcctaagagattatttaataaatcataaaaaccacacatttcagcagccataagaattatagcatggaaaataccaaaggtctagctttcagcagctgagaggtagaggatgctttacaaagaaatcccgtatcaatgatacaagtaattgcgataaacaatgtaggccctaatctccccaagccaaataataattcatttacattcccaaactatttttcataaagattatgtactattaaaatacaaatatcaaggttacccgaagtataagcaaacaactttaaaaaaatggagattaaaaaccctttcagaaagctaatttaacttttaaaaaaccatggaggtaaagaaaaagattaaactgcacatcaggtagtcaataaaggcagaatttactgtgcatgaacccacatgagcaaatcttaagttaatcactgagcagagaattcagcaagtccaaatgagagagaacaaagggtttaaaaatgacaatctgtagaggaataatccaaacagcaagagaattctttaaatctctccagtaaaaagacagatgcctgcaagacctcacgccctcccttgcacttgtttcaacgtgattgccaatgtttgtactcttcaaagttccaagggtcataaaacagctttgtattagctgaatgacttgctttcaacttcggtatcacggattccattcaaattcactgtccttttttctctacctgaggtggaggtgcaggtttgccattaagagccatctgcaagggcgtagtctggcttgcaggaggcaaaggagcagtcttcaacttctttgtactagttttagacggatgctcctcctcctcttcatcagaatcctgaaggccatacttagaaaaatgggagaccttaaacacccaagaaccagtttcaggccggtattctttgaattgagctccctgtttccttgaaactgcttccaatcttccttcatagtt

SEQ ID NO: 338269 - DNA, 1000 bp, Homo Sapiens
ttttttgagacagggtctctgtcgcccaggttggagtgcaatcatggttcactgcagccttgacctcccaggctcaagagatcctcctgactaagcctcccaagtagctgggactagaggtacaacaccgtgcccagctactcaggaggctgaggcgggagaactgcttgaacccaggaggtggaggttgcagtgagccgagatcacgctattgtactccagcctgggtgacagagcgagactccatctcaaagaaaacaaacaaaataaataaataaaaataaagagactggttaaataaattattatatatccaaatgatgaaatattatgaagccactgaaaattatttatttagaatgtttgaaacatcaaagtattttatgatacaacactaaataaggaagagcacagaactaaattcagtaagtactcaatgtttataaaaatattgaaaaaagactgaaaggaaataagctagactaacaatacttccctgcttctaataattttcaatacattccaccctttctactacaacgagctttcttagtcaaaaaaaaaaaaaatgcaccctgtttgttgactaaatactttcaagactcttttacagttagtcaattcctgaaaagccaggaaaatcaaaattgtgaattttaaggctaatatttaattccagattacatttcccctgaccctagaatatacatttttaaagttaaaaaaaggaaaaaaacgcaaatgataattattataaatacatagaaaaaaaggctataaaaatgactagaaatatgacaaaagggattaattttggttggtggaattatatggcttttaagtcttaacagtgtttattacattttctacaatgaacatctatcacttttgtaatttaaaaaaagtatttgctatctttctttttaagaagacaaccatcaagcaaattatatcacatctatacgatggaatattaatagacatttttaaaaagttgtag

SEQ ID NO: 338270 - DNA, 1000 bp, Homo Sapiens
cgatgtatttgtccttttatgtctggtttatttcacttagcataatgacttcaagattcacccatgttgcagcacatatcagatgtccttcctttttaaggccaaataatattccattggatggatagatcaccttttatcttgattgatcattttaacttatttttcagtttcaacctacaacgtttatgaggacaaactgcaaacttaattgctttttaaataaaattgatggcaggccaaatccctgcttgctgttgtgaatacctctacactgcaagaattcctggaacagtgagtgggacacctttattcagacaaatcagatactttgtaatggaaatcaaggtggtatattactgttttgctttgtattttgaagcatccctgggttcactgctgggattgctccaatcatcggcttcaggcgtggtcttgtaatggcgccatgcggacttattaaaaactggaagtctctcaaatgactcacttgaaagagccttcaaataaatgacagcatcagtacccactccttccatggaatacagtttcagatctccttgaaaatatctagcatacagacgggaaattggcaaaccataaccaaatccagccaaaggggcagctctggtaggctccaggctgggcctaggagcagtagaatacatgtagttaaaaagacgatctatttttcgaagtgggacaccaccacctaggtcactgatcttaatggataagtcttctttacccaaagtaacgagggttttaacagcagggtagccctcttttctgtcttcatagagttcaactgtcgctctcattgagttcttgaacaactcaaatagcatatgaaacagatgtgagggcacataaaccacctgaataggtttgtctggcgctttggcattgaattcttcaacttccagctctggagctaccaggtaatactgttcacacagcatcttggctgtttcatatgcatctttcaccacatccgcca

SEQ ID NO: 338271 - DNA, 1000 bp, Homo Sapiens
aaaataaaaagacatatttctattttatttccggatgtgattttccagcaggcaaataaatacaatggggagagggggaaggagggggatccttataaattagaaacaatctcaggtggggggaaggtgggtgggctggcaggggaggtggcaggcagggagcccactgctgggcacagtgcctggctttgcaccctgtgcccccaggctctgccagctcccctcagtggctggctcggttccggggtcataaggcgctgcggtgttggtggatccggcttgctgctgtctgagccagagctcacaggtcagtcactttgttttccaccagggcggcgacctgctgcaggcggcaggccagctgcagcttctggcccacagggtcctcctccagggcactgataatctgatcatagtacctgtggatgtggttgtagagttcttgcagagcctccagacagtggggagcagaagtgtagttcccggagagctcagccaaagcagagttcatctcctggtagctcgccggagagctctggcgaatgtccgcatagtacctctccaccatctgcttgtagcgtgggatctcccgggcgtagagcagtttgttcactggggaatcccggcccactttatgctccgaggtggtacaggagtcaatgaaggtctgggcgatgacagcaaggatggcgtccacattgtccgacacccgtacatcaaagatgagctgtgggttcttcaaggcattcacccagaaccgcagcagcagactgttggtcttccagatgtgcagggtccctgggtcctcgatgccgtgcttctctgctagctcatccagaaggtcaaacaggtacttgacggcgatggggatgggccggttcacgctgagaatggcctggaaggtgtcgtccacaaacttctgcagcgtgcccttcatggacagcagacgggtgaggtagatttccggaatggccttggcccttgctggctcgcgctcccg

SEQ ID NO: 338272 - DNA, 1000 bp, Homo Sapiens
ttttttttttttttttttttttttttttttctgagtgcattaaagattttattaccgcaatagccgcaccacgtttttaacaagggtaaagagattgcaagacgttttcttccacagtgtcgctgctacaaaaattatactcagtcccatcttcaccactttgcactgtgatttgggaagcccccagtttgggctcagatagatttatcccacgtttgttccagaggaatttaactttctgtatttttccaacattaaaatccacatcaatagcacacgtgtgacttgcatctggtttgagggatcctttgaaaatctcatattgtttcgagttttcattacttccatacaaagcaatcctgatgtacccattcactttctcttttccagaaagtgtgactgataccttatatctccaactagtaaagttaccactctctcctgtgttcaggaaaaaggtttgttccacagcacttgttttccccttaaattggtcagcatagtgccccattttggggcatccttcagctggacaagggaaacacttactctcctgaaactcatcgtaggaggcacagggatagcccaggaagccatcagggttgaggacgctgcttgagtaatactcgaagcttcttaggtgattgcaagacacaaagccaccaattccttcccatattccatcaatatcagtaatggttgaaaggacatttttcttacatccgggcatttcctttcctccatttggaaagaaatccagatggcccaccttttggctcattccgaaacctagggaaggaactatgggagaagaatctgtgtgaatcacatccacaaacacggcgtcagatggatccaaccgaacctcctcaggttcatcctggaagcacggccctgctggatccagccctgtgatcctgcccacgcggccccccagcctcctgcccgcctccgcggccgtgtgcgcgcccaggctgtggccgatgacatgcacgtcctc

SEQ ID NO: 338273 - DNA, 1000 bp, Homo Sapiens
tttttttttttttttttttttttttgaaccagtttacacaaaaacactttaattgacagtatacaattttccaaaatatatttttgtaagaaaatgcaataattattaactatagtttttacaaacaagtttctcagtaaattccagtgtacttcagacccctgtccactaagacatatatgatcccccagttcctgggcaaactgttgaacattcactgcagacaaaaagaccaacaccaaagagtcatctgtgtcctccatgctgtgtttgcagcagacctgagggatcagctagtgaccgtgacaaaagctatgctacagttttactcttgccctctctgcctcccccatcatgtttccttggtccctcagtcctgttggagtaagttccatatataaaagctcatccaaaactttgtttcttggcagaaagaaagaattgttcacttacatcttaaacctaaatgattcagagaaagtgtagaagaccagttcttatgtttgtgttcatgccctccctagccttgctagggtaacaactgggaaaggaattctgtcctttgtgtcattctggcaccttcgagtagcaattcttaatttaccgattattccttctgaggcgcacagtctgtggatccaggttttaatcttgtttctgtcctgaaccatgtgattttgaggaagtcacttcatctttgtgagcttcagattatctttttctctagaaaaagattggactagatcttgaaatacctttctccatgactacagggttgcctgccaaccagagcatattgactccaacctttactgaaatggagctgtgactttgctggggagggggcagggttgcattttaaaattaaaaaaacaaaacaaaacacctgatctacaagacaaatactttatcataagtttgtcttgttatatttcattttttgtttaaaaaaaaaaatcaagcaaaaacttgtcatttccagtaagacatttacattcct

SEQ ID NO: 338274 - DNA, 1000 bp, Homo Sapiens; identical to SEQ ID NO: 158564

SEQ ID NO: 338275 - DNA, 1000 bp, Homo Sapiens
ttttttttttattgctgtataatacttttattaaagttttatggaaaaaacccacaacatttctgtatgtatcatatcatataatttccaggtgtgtcagagtccagtgacaaattacgtttgaagaacagctttaaaatccactcttgtctgccactcctttatgaaatattgaaaagcagctctgtacctcagcattaaaggttacaaaaagcaccattaaaaagaggactcacatatttaattcccttcaaagtagtcttatctctcctttctgacagacacagagctgcactcattcgaaatgctgccgtgtaataccaaccaacatgctccaatgtaccaaaattcaaacaagtctcatttatgagacccgtgtagtgattaggactaaccaacaacagtgagctttggctgtcctaaaaccacaagctgggttaggtaagtgttttgtacaggggaacagaaaagaagtaagatcatcaatacctaatatatgacttaatgtaggtatcccttgaccatttaacctgacacctacaaaatccatagtgtttagtatttcacaccaatcttactgcaaaagtgctgtgctacatacaatcaattcaagttaactccaactaatattggaactaataaaaaattaatttgtaacaaagcttattcacttcaaagcacaactgagaaaagcaaatccagacaaagcccaaactagaatcctagagcgattccattgctaagaattggactctacaagtaatagacttgagtttttctcttttttcccttctttcttataatttaaatttggctttttactctaaaagtttgggttcattgcagaaatcacagtccttccatatccaattgtgattggcacttaaggagagacaaatgcttagatccaaagagttttgaaagaccctaatggctacccctcccaggtcctgcattccatgggtaactggagtcagcagcccctggtagaagacagcaa

SEQ ID NO: 338276 - DNA, 1000 bp, Homo Sapiens
caaatgaaaagtactatattactagggaaactgcattataataattcacaaaagttattccaaaggggaaaaaaataaattatctcatataaaataatacatggtatgtgtgaataatcttggctactgtcttcagagagcctgtttgctgccagccacctgcacccctgtggggggagcagatgttgtctggaggtgactctcctccagcgcgatggagctgggtccctcctccaggagctggattggggtgattaaatgagtctggagttttggaggaactggatgaggacttggtagacaaacttgtactgagcgatagtctggatcatgaacatcctctgctccctgaggagcctcagcatcatgggcacttccaccttttcgttatgttccaagcagtagatcatcagctcagaaagaatgagcacgccggtccttcccaccccagcactacagtggaccacgatgggcgggtgccggttcttggtgccttccagcatgctgttggtatggcgacggaccgactggatctcctccaagtaggataaaaatccttggacatcttctggacagccgtgatctggccagtcagtatattgtaaatgccacaccgtcctttcttgcccagacaaaaggtgcttgaccttcaagcccgtggttgcatagcaaacagaatccgttcgaaacttcgtggtgaccttgaacttgccataggtggctgagctgtgctttgaacctagtttgggccagtatcggtggcttttggttcgtccaccctcctcctctgcagtgaccatggcaatcacattcactccctgctcccacaccatctgccagaagtcgtggcacgtgtgtggcaggggcccctgggtggctatgtagtgccattctgccccgccaaccaccaccttgatgtgggaggcattaatgtatcctgtgttattttctttggttggtatcagctctactcgattctcctcataggggacaacttcac

SEQ ID NO: 338277 - DNA, 1000 bp, Homo Sapiens
ttttttttttttttttttttttttttaaaaaaggaagtttattggtctttaaatggctcaaattgcaaataaacaaatcgggtagtggcatcagcctaagacacgtgatgcatctttgtcagttggcttcatagcacctcagtacccaggagaggaaaggtctcaaagcaaagtcacaatgttagtggttaggacccctggttaaataagactgtaataagtacacatggagattgctgggcccgctggccagtgttacattggtaacttgaattccgcacatggcatagcctatgagaaatacgaaatgaaagatgtacatctcaaaccctttaaggacaaatatttaacatgagaagctggatgtaaatatctaaagagtgagttcctaaaaagcctatttttaactttacatacacacctgttacctggaatgcctgaacacatctttgacctgttcaaattaggactgagaaaaaagaaaaaaatactttgttgaatcaactgtcctagccccactgcaaagaggaaaaaaaaaaaatcggtcagtggcatatttcccactgaaattatgtccccaagtagcatgctagaattcttccagcaggtacaccacacaatggtgacacagcctaatgtgtggtcagtgtgtgccacgttttctgcactatacccaggtttgatggcttgatgttaacttctgaaaatgtagctacagtgttcttcattataaacagaaacagaaaagaattactcctaataattcctgtatcaaactgtaactttatgaatataaatttagaaatgaacagatggcaagcatgaatattttcccgaagcgttctagtgcaaaatgcattagcactactgacattttcttcctatgccctgctcccagattaaaaacttaacacttacatgctcaccactagcagaaagggatttccagggaccagaatctcagagaaaaggagggttcattcaaacataactggtgctg

SEQ ID NO: 338278 - DNA, 1000 bp, Homo Sapiens
tttttttttttttttttttttggttaaaacacctttaatgatagagggaaagacactaatatctcccgtctgttcttgacattttactaggttaggaagctctggagcctacagcttgaggagaagccatcgttcaagtcagtcaatagcaaaaccctcactctctcctcctcagaactcctgttccaaatgatcctatgttaagagtaaatactacaactcattacaagacggagaggcagggaggacgccacctggagctgggactcttaagaaccagacaatgacaaagacacaagccccagcctacggataggcaaaatgggtaggggtcttgaaagaggaagataaggaaaatacaaggggccagggaataaaggagggagttatctaaaactagaagcatactagtgctaggaaatcccccatgatccctggtacacctctgcacactatgtcactattagcccaaaagaatattaacgagaatgtccacattcacaagaatttgaggccttttcccttacatcatgtccctttcttagtcacataggtaccagcaagccctatgttctagcaacattccttaactctctcatcattagttcatcaaccatgctgaccaaaaatgctccttaaagatacgaacttcacatttcccaaatatctcctgggagacctcttggcaagaaatcagcttgtttcccaactttgagaggtcatcatgaatgagaagctggagaggtcttggcacactgaccagccaaaacctttaccttaatgtgaccatcaggggatttactgggaaaattttcctatgcccttccttcatttctccctacttcctagggttgggtcaccaattactggagcatcttcagtaccggcaccttctggagcagggggaggaagaaggaatgtacagtttgctacttcttgtctatgatgggcttctcaggcactgccttgggtgcaggaggctgaaataggaggggggctg

SEQ ID NO: 338279 - DNA, 1000 bp, Homo Sapiens
tttttttttttaaaaaagaaaggttgtggtagtttattagagaaaaaaatgactttgattctttaaactagtcttgagtatacctaaattttacagtatataggcatgaacaaagaaattgattagattatgtatttttctaagagacagaattacaaaaagtaaaagtgattgctaggtatacatttgcttatttttcaacatttttctttggtagacaaaaacattttgtatttcaaatgtgtccaagatattgctatcatttatacaaacggatcaaaacaaaaagtacagtaaacacacatatcctaattgcttcaaaacatctcaatgaataaaagttgaaaaacatcaaattaagaccggtgctgctaatttggttatgaaatatgtgcactgttgccagtatcccatagcgtataatttttttcatagtacattttatgaattacatttaatgaattggttataaaacaaaccaaatgatgcataagaatgtttccctacatattgatgtgctacatgatatttggggaaagaagtgtgtatttgcatgaaaaaatgtttgaggaatgctttacgacacatagatgcttttgacttataagggcttgactccagtaataatgtcaatgtctccactgtaaccacagatagtaatatagcataaagatcaatacagacagataacttctagagacagaaatgttctcatagtcacaacagaatagttgtaagcatcaaatctagaaggttctctagcctagaaatgcatgaatgtataatacaacaagtaagaacgtgaaagcactttgtaaactccgatggtaaccagcctttcttaaggtagcttttcctagaaatccatttaattgctggactcctttgggcagtggaattctgattgtcattcattcaggaagactgtatttctgtttttggtcctttcacccacctttcatccttcacataactgtacaaaagttgaaagtcacaaaac

SEQ ID NO: 338280 - DNA, 1000 bp, Homo Sapiens
tttttttttttttttttttttttttttttttttttttttttttttttttttttttttttttttttttttttttttttttcagctttaaggtttttattgaatttatttggacaaatccgtactgtatccaattctgtactgcattcttgcttaatagtattaaccataaaggaggtcaggtttatagggtttggtttacctattaaaccatcattgactatggaaatacttactaagcaatatagagacagacaatattatctttccccttatatcttttaagacagccactcaagttttagaagagtatgatacaacattagagaaagaaagatacaaaggctttattcatgtgtgatagtaaaaatcaggatgagtcttagatatacaaaagataaatggatatttaaaatagttatatatgcttttttagcaaaatattcacgtgttaagtatttctggatcttaaaatacaaaatccacttattttattagttaaaagtagaagattgaaaagacaaagtaatattgttttgagagataagtaaagaaaaaaatggaaagcatgtctttgttgttcttcctccattctaaactgctaattatccaacagaaacccctaggtcatagtttacgtttctattctcattaaagcaaatagaacactggaaaaagaaaaaaaaagacatattaaccaaaagctgcaatcacctttcagttgctccatcataaaaaatatggtttgagtcaatatttctatgacataaaatttaaaatctggaagccaattcagtagatttctccatgtttgcacaaatctaatttctatttttggttcactaatttggtagtttataaaaatgctggaaatgaaattgtgtctagactaaattggggagtatgtcctattttaaatatttagtttgaaggtcattctcacttttttgcctgattctttcagcgtcaactggcactggcttctgtgggtataagctgctga

SEQ ID NO: 338281 - DNA, 1000 bp, Homo Sapiens
ttttttttttttttttttcaaaatacaatttcatttaacaaattgaatttgctgcgcctgctaatcacgtctggtgtcggctctgatcagagacagaaagaggaggctgcagccccgggggtccttgtggtagcggtggtgggagcggagcggtgtacacattgagggagacaaatcactgtttggcccaggggaaccccacccacagtaatggaaactcagggcaggttagcattttattagataaaaacaggaaggagggtgcctacccacccctgcctgctactggctctgaagggcactcctcaacttccccaagaaagaggacgcgtctctgacactgtgatcatgacaggggttcaaacagaaagtgcctgggccctccttctaagtcttgttaccaaaaaaaggaaaaagaaaagatcttctcagttacaaattctgggaagggagactatacctggctcttgccctaagtgagaggtcttccctcccgcaccaaaaaatagaaaggctttctatttcactggcccaggtagggggaaggagagtaactttgagtctgtgggcctcatttcccaggtgccttcaatgctcatcaaaaccaggcatggggaaggccctggcaaactgctccacccgttgcctgaggttggccagacgctgacttgtttctgagtccttaagcaggaaggatttgaaatcctggagcttggcagtcttgctcttcacctctaagccaatgttgaccccttcatctataaagtccacaactctccggaagtcatcctcacggaactgtcgagaagttaaggctggggccccaagccgcaggccgcccggtgtgatggcacttcggtctccaggacaggtgttcttgttggcagtgatggatacaagctctagcacccgctcagcccgagctccatccaggcccttgggccgcaggtccaccagcaccaggtggttgtcagtaccacctgataccagtgagtagcct

SEQ ID NO: 338282 - DNA, 1000 bp, Homo Sapiens
cggaacggagacggcgacttgtttcttactctgtctgttcatgctcattgccctcttgtcctcgtggtggtgattgatctttgtatagtcgactctttaaatcatttttaactagagagaatattttcccagatacaaataaatcgtcatgcaggtggggtgccgggtccatgggaaccgaaaggagaagccgtgcttgtcctagaaagtatacaattgtcacctcttttatgttttctgcccgcaacatcagcgtttgactgtctgttggcgtcggggtcctttggggtggccgtagtggtagatggtggttgggggttgttgatagtttgcggttaatttgttattttcttgttttttatatatttttggctggggtgggagtgtgtgtggacttgtatgtgtgtatggttgggtatcctgatttcggtttgttctggggatggaggaggagaaggaagaggaggaagaggaggagggctaggaggcggaggggaaggagtgggggaggaggggaaggagagggaggagggcggccttggctatcatacatcacattccgagtcgctggaggttaccgagaggatggaggtgccggtgtccgcgcgctccgtcaggctggacacgctggtggtcgggctggccgccgtggacggcgactctgccgagccgtgcgtggggcagccgggctcggccagcgagcgcatgccgctcggtccaatggcctggtgctggagcctgttcttggccgccgcggcgcggtcgcgctgccgccggttcttaaaccagttgcctacttgtgtgggagtgaggccggtggcctgcgccagttcgcgtttcttgctggggttggggtaggggtcctgtaggtaccactcccgcaacaggctccgagtccgctccttgaagcaatgcgtcttctgctcgccgtcccagatggtgcgtggcagcgggaacttcttgcgcacgcggtacttgtccaccgggccgagtgggcggc

SEQ ID NO: 338283 - DNA, 1000 bp, Homo Sapiens
tttttttttttttttcttttttttttttttttttttttttttttttttttttttttttccatcacatattgcagcttttaaaaagtacacaattgttaagtttgcattagaaatataagcagattacctactagttgaaaccatatagtattgttactaagctgatttttttaaaaaagtacaaagaaacatacattttcattcatttggaaaatgtaaaaatttaagtactaatatataatctcttcactttctctgatctacaaatggatagaatgcctagttatcgtcatgcagataaattcttcagaattcgattaccaaagcaagcaacaaacaaaaaaaaccttgtcagtaatacacagatgaatctctttaacagtttctattctttagcagtctttgatgatttcagaatttgcagctttagctcttttatcatcatctctaacttctgtcttgcttcccgttcctgtctgagttcatcttggagttcttgcctatcggcctcagcatggtccaatctctgcctcagttctgccaactgtcctgcatattcagcctctttgtctttttctaaatttgagtcacaggtacatttttgcttcattatctgctccaattttttctctaagtctttctgttcaacataaaattcttccattctttgagcatgttcattctgcaaagattcaagctctttctgtaaattctgctgttcttcagtgagttccttcatagattttgaactactcaacatttttacttccatctgaagttgttgcttcttttgcaaaatcaagtttagtttttcctgttgttttaaataagttctcattacttcttccatgatttttcccttatcatcctcacaaatgacatctttcacaagaagcggagatgaagcggcagcaacaaggccaattcccactttgtttatgtctctgactaagttgcaagtggcagactcagatttccttttacttgtagaattatttga

SEQ ID NO: 338284 - DNA, 984 bp, Homo Sapiens; identical to SEQ ID NO: 158565

SEQ ID NO: 338285 - DNA, 1000 bp, Homo Sapiens; identical to SEQ ID NO: 158566

SEQ ID NO: 338286 - DNA, 1000 bp, Homo Sapiens
ttttttttttttttttttttttttttaatttgaaatgcttgtttatttttaatacaactctaacaagatgaataatctgtgttactacatcattcccataggttatagttgtgcatgatatttataaaaaatagaaaagaagaagaggaagcaaaagaaaaagaaaacaaaatttaagagatgatagtaggaaaaaaaagtttcttatttctcatatgcatgtacagctcaataaacatgttacctgggccaggcatggaggctcaagcctgtaatcccagtattttgggaggctggtgtgggaagatcacttgagctcaagggtttcagaccagcctggacactatagcaagcccctgtctatacaaaaaatagaaataaaattagttgagcatggtggtgtgtgcctgttgttgcagctacttgggaagcttgagcccaggaattcaagaccagcctggacaatataataagacctcatctctacaaaaaaacattaaaaaaattagccaaacatggttgcacatgtctgtagtcctagctacttgggaggctgagatgggaggatcaattgagtcaaggaggtcaaggctgcaatcagccatgattgtgccactgtcctccagcctaggcaacagagtgagactctgtctcaaaaaaaaaaaaaaaaagttaaacaaaaatttaaaaagaaaatgtcaacataatccatgattatgtcttttctagcaatctaaaataagaaaaagtggagaataatgaaaagaaatctttaatatcagatatgttaagtaaagaaagaccttcttagatctcagttcgaaacttcagtgtagattccttcatttgctgctcataatgtttatcaaatttttcattcagggctactgtaaagtgatttttccagtctcctgtaattccctttctcatgaagggcgacaatttctggttcataatttcgtctggcagtgttgtgtaatttgtggatggattgttcttc

SEQ ID NO: 338287 - DNA, 1000 bp, Homo Sapiens
ttatgaggtcgtgcctgatttatagacaaaatgccataatgaaatctggatcatgatgagaagaagcgtccagacttgaagttccattgaagaattagaggctctgcagctcttgccgtcctcctgcagggttcctgttacacagctgcagagaggcccatccacccggctcgtgcaaatctgctcacaccctccattgtcctcacaccagtccagcctttttctcctaataggtcccactgaaatgatctgttctttgggctcttttgtgtaatctgtggcaatcctggaattgtgtgggcaagtgattttacaggagtacttttctgagtcgcagagtgacactgcacagtgaaggtgaacttcgtcgtaatcccctatgaatttaaagacggtgacgtgaaagcgacaggtcagggagactgcattctcctcgatgccaatggtgttatctttgaggttctgacaccctccttcaatgatgaaatatcggagcttatcattgctatctcgggtgggtgtggcatagcatttgttgagtgttaggattaaatgtgtggcgtcagctccaaccacaaaaacccctacatacagcacatctcgagtcgtcaacactacttcaccctggcggtaaggatgtttgtaggaggcgtttttgtagagagccatcttggtgatgaagctgccttcttgggttggaactgtcaggttaattacacttagcataggcttcacaacagaatccaaggagatcttgatatccagctcataagcacatgaaaattccacattgatcgtgcggtccctggtgatgatgttgccagtgttgttggcgctttcgatccagagtgtgtttttatacatgatatgcgtgccattggactgcacaatgtttccacaattccctttggtgttgttgatctgaaaggagataaaatcttccccctcgatgccggtgcactgtctgtcattgatcctcacgccctccctctcaaaaccg

SEQ ID NO: 338288 - DNA, 1000 bp, Homo Sapiens
tttttttttttttttttttttttttttttttttttttttttttttttttttttttttttttttttttttttttttttttggagcttattagaacatttatttttttctgaatgacaggccgggagtgggagtagctgaacagggcatgttagtggtgtgagtgctggcttaagcgaaggagctggagtgggggtttgtgttgggggagcagtgggatgggaaacacacctgtggggcagctgaactagaaagaaggatgcccaggatagctatgagacacctacaaagcatgggaacccagttcccctaagcccaccccatccccagatccctttttttctcccttaagttaaaaaaattccttgaggcagcttaagtcagaggctgtaagggtcagactggtcacaggttagacagcagagtttgctccggccagcagagccacgttctggctggatggcagctcaggcctcctcagctgtggcatcaatgcccgcgtaagtgaagttctcaaacagcgacatgttcacataggccttcctggcttccagcatgcggcctagctgtagcgcaatctgggcaaaggggggtcgctcatagggacggtcccgccagcactgacgcatcagctcgtacacttcatcgtcacagtttcgaggctgctccatgcggtagccctggggcagcttttcatagagctcggcacaggtcatgccacagtagggtgtacctccaaggctcactatctcccaaagaaggactccaaaggaccagacatcactcttggtggtatagacactgtagttcagggactcaatggccatccagcgcacagggagacgccccatcgtcttcttcacataaacctcctctccccgagaaaggccgaagtctgcaatcttggaggctaggttctctccgaccagcacattccgggcagccaggtccctgtggatgaactgcttctcactcaggtactgcatgccattggccgcatcac

SEQ ID NO: 338289 - DNA, 1000 bp, Homo Sapiens
agcatcaaaaagtttattacaactgtttttaaagtcagctatgatcttgacaaatattacgggtaagtctgtagcaagtttctaatttctgagatacaaaagacaataaatacagattaaaattcagcctacaaacaagattctacatctaattactggtactgtagcttagtttcaatatttcaaacatatgtataattcttaagatgctacaaaaactcatataataaagttattgttcactgacaaccaactaacgttcttcactgacaatatacaaggtgtgcagtgccttcgagccttcagtgagccccaaggcctgctggtgccggggacaatcagagacagcgatgtgacggcactggtcctttctggcaggaggactggtttaggagcagctgctgaaaacactcaacaggacagagagctgatttcccaactgcccaataaatgatcctatttactagacaggattcttgtagaaaacaggattgtcgctgtatacttatctgagtgctacacgggacacctttgccccaacacagtatggcctgctgacgtagatgctttatttcatcacgctaaatgtcctctaatggtgaattcttcaatccttcattctcttctagagacattcttcatcgctttcaagctacattgtcattaaaataagtcttgtgaaatttttgccaaaaataatcgtattacttcttcttaacagagattaattcttcattgactaaaattctgtgtggaagtttcaggccaagctcctttgtcttggtttaattcttgggtacagtcccagcaagttacgtggaacatatccctccttatcattaaggcgcgcccaccaccattcgatttcatcttcgtcttccctgtggatgattgtcatgcagtctccttctttcatgggcagctcatcatcattctgaggttcataatcccaaagcgcataaatgactcctttattcattatgcccatcttctcctgaac

SEQ ID NO: 338290 - DNA, 1000 bp, Homo Sapiens
tttttttttttttttttttttttttttttttttttttttttgcatccattgaacatttatttgtcaaaggcctggtctgtgccaggcagcatgtggaggcactgagtggggggtggagggggttgtacggtgggaatcaagggggtcaccactgtgcccatggggaggccacgccactctgcctgctgggtggatatttcagcctgtgcagccagatgtgttcccaggaggctctgctttccagccagatgtaaggcctggccacagtgtgggactgggtctgcacagtgtgggactgcaggacagggtcctgcaggtggccctgccaggagtcctgccatatccctaccagaataccacccagccaggccagggctgagctggacgcccagacccccagggccaggatacaccgggaccctccttcctctcaacctcggatcctctttgcccagaactgtgttcccaggtggctgacgagcctgtcacgtgccagccctgcgctgcctgcgctcctctgaccggctgtggtgctggcacaggccacactactagagacaaggcagtccccccacccccaggctctcctggaccctgacactggaggttggtgggatatgctttctccaccttgtaccacactgaagttttgtggggcacagtgtgtgccgaggtggggcccccgggagccaaggacccagaggtgggtgaggaggagccgcctgcctgcagccccactgtggcctgagtggtgggggagtaaggactgccctgtgtgcaggagggaagaccctcgtgggcacggtcccaaggctgagggggtctgaggccccagcccagggggcaggcctcagacgcaaccccagttgggcttccatatggagagaagaagcaggcggctcccagggagtcactgtaggacaccccaggctccagccctgagaatcacctctccccaagggccagctcagcagtggggaccaggtacccagcaagcggg

SEQ ID NO: 338291 - DNA, 1000 bp, Homo Sapiens
ttcaataatgttctgaatttaataaaggattgattaaattctgctcagtagttacaagtaactgaacatttttttctcaatggaagaataaattcagaatatatcagtttttaaaaaacgaatgagaatatgaatagcaactaaaacgattaataggtgcattcaatgagaactttttatttcaattatccacaaaacaatattacaatactttataaaaatattaagtttaggctaccattattcatttaaaaaagtgtgctagaaggctgtttttgccaacttccttttttggtaagggttaacttccacattaagacactgaagacgaaaagctgttggaaaatatctccaaatttacaaagttgtttttcttggcaatttaaaaatacagaacaatttaaaatgaatacacattaagttagtgttttatccctactatacaattgttattatataaggaactgctccattcagttaaaacctaatgaataccatcaacttttcctgccttactttcctgattagatttagtacataaacgtaattttgtcacccttttgaatatgcttagaaaaattacaatatcatagttcacataaagcccttaaaaaatctcatgtcacaagttgttgataagaggaaataatgacagcactcttcttaggaagaccctcttggtagagagtgtcaatactaagcaggttacgtaaacagaaaaaacaaccacaatttttagtaccagaaccactgccaacttgcatgaagtccatcttcacattttaaaaatggtttgaatttgaacatatatgccatggcacagaatttcgaatctgatgattaaaatcaggtaaataatgatagttaagaattatatcctgaaaatagaggggcctaatataaggcttaatttaaagtgtgactatatgagagtattttaaaacatatacaccagaccttcattttattcatcaatttttcctttgctagacactcaaac

SEQ ID NO: 338292 - DNA, 1000 bp, Homo Sapiens
acattttaaaaaattatctttatttaggtttctgattcagcacatgtatcaaagactaatcaacataaaggagtaaataagacattaattgaaagtcttacatctctctaaactctgaccaagaatgtcaagattgccactattaccagaactccaacctagtcaagttgtagacaagctatcatgaacaacatacagtgtgcacagatatgcagaggcaaaaggcatgctagcgcttggctctcctcttttccttgttgacatctttctgttggacagtccactttcgctttccaggctaagttccaaatcaagtccaaagaaggctcagggtcaacctgaccagatactcttctggaggaatgcattcttaaactgttgtgcctgcaactttgtttttgccaggatgaagttcagaccgagatgtacaatacaatctagatgacggtgcagactaagtcaagaactaaagttgtgcagtaacccgagttaaggcatgaatgcagacacacacatgcacacacacagcacccatgctatcaagacacaggattttttcagttgcctcatgagaggcaacctgggcttggcagttaatcagaactgctgagcattccagaaaatgccccccacgactttatgctaacagctgtgtgtatgttttaatcaaaaaattaaagaagaaaaaaaaaccctaaaaaacaaagaaaaaaacaaacaaaaaatcaccaaaaacctagaaaccccttaatctcttacaatggctcttgagcatggaactcatgtagcagcatcaatggctggctctttaacaatttggaaataaaaggttgttttactatgtatttctttggtagtcatcactacaaagttttcagtgttggttacctataagacaagtactagacagaagatcaagttacacagaaatatttcttctgtactgataagatacaaatattgagctctcaaagcacaagttactatgctttttcttgcc

SEQ ID NO: 338293 - DNA, 1000 bp, Homo Sapiens
tttttttttttttttttttttttttttttttttttttttttttttttttccatggaggtgggctttattaggtgactgttgaggcaagggaggttctagggctggtggactgatggggggcaagggcttctccttgcttttgaatttagtgcatgttgcctagaggttagatgtgtgagaatagctgcagaagtgagaggagaggaaaagagaaggtcatagaatggacattttccttgggccagaaccaggatatggggactgggggtggagagggagggtactcttcacataggagactccaccaaggtcaccatttgataccagcttccctaacgcccacctgccccatcccagttcatgccccagatgccagccctgttagctccctcaacatccactggagaagaggagggaggaggagatgagaaacgatgatacccttctgccctccagctcccctgcccagaattgctcgctctgcctgccctaacttcccagccaggatcaggaggtcaggaagcctgggcgcaggcaggggaacaattgtgtccctcaccacccctcttcacactctgccctctcctagcccctcacatgaggttgcagcttttggctcgatccttgtgtatctcgccctcattcccccggtctggccgtcctgacagctgagcggatcgctgcattccccggcgtgagtcagttcggcgcagctgcctatggccacggccaagggaggccactgtagccacatggaagacatccctgacgctgcgctcagaggaccgggaggagcactcaacataggacacagcccccacctgcttggccagcacagtgccctgctcatgtgtaacagggataagcctctgcttggacagctccctcagtgtggccaggtcagtccgcatgtccagtttacagccaaccagcacaaccttggcattggggcagaactcttgagtctctccttgccacttcttgagaacactgtccagtg

SEQ ID NO: 338294 - DNA, 1000 bp, Homo Sapiens
tttttttttttttttttttaccttccaaagtttaatcaatcaactccttagaagtgaaatctaacaatcacttcaaatactctaaaattcgacagagtaaaatctcaaattactttctcatcttcctaattcttattgaaaaggagtccctccatgaagtgtgtgcactttcacgaggatgccagggaggactcactgattttcacactggataacgttgaaccgctccagtttcagaaactcatcaaaaagaggatttactacgttaaaacgttcatgtcccaagttaaaaatggatactgaatacaacagcatccatatttctggagaaaaatcagtacacatgtcacttctgttatagaaatccatttacagtgtgtcccgctccatggaagccctggtctcaggcacctccagctttaccgtctccctgcacacaccgggagcctggtaggcttcgagcagaagccgaggtcccatcaagggtccagactttccgtgcctcctttgttttcatcgagtctgggccgctttagctctgggggactgccctgagcgtctccaggcgtctctgactgaatttcttctgtagaaggggtggaaatcacactggttggtacagaacttggtggagtgtccgtctttaagggtgttaagtttattctccggggtgttgtcttgctccaggcttgcagtgtgttcagagtgaccctccgggatgggtgggcttttgtgttttgactactgggctgcagggtcttctcctccgaaggccccggcaaggggcttttgacagcaggagtgatggagggagggtccctgatgactgttggggctggggcctgtctggcctgagggggagtcgtgccggggctgctggggtcttgggttctgctggcaggggttccctctaccggtctgggtcctggcgaagaccctcgatgtgtctgactcttggttttctttgctgtatcaggagttctcatgttcaaaactggct

SEQ ID NO: 338295 - DNA, 1000 bp, Homo Sapiens
ttttttttttttttttttttttggtgactccttagcttgctctctcctgagtcccactggccaccccagcacacagcagaggcctagcaagtctcaagtgaggcaatcctggactagggcaaacatggcttgttccaaaagccgggggttaaggaatcaaagtcaggtgaaactatcactttcacaaaagcttttcttgactcctgggcctagtatcttttgcccctggcagaatgtaacagcaaaatgtctccttctgaaacggaaggcacagccctctttcagaagcaaaacaccttaacactcggcttctatttgcttaagaatttacaaatagaaatgagaatcaaaggttttaactcatctgatagcactgggcacccaatgttcacagcctgcttctttgaagggttagtgtctccccaataaataaatacagaaccttggatacccttcgaattttaaaataccttaaagtcttccattaatcttattttttaaaaatgctaggtttgtttcagttacctgcagcaatcaaaaagctttggcaccttcttttagagaattgcacaaaacaggatgcatcaaggtggaaggcaaacatctttttggcaacctaggcaaagaagacaacaaaaaacaccaccaagtccatctgcaaaaagttagctaatttttgaggttaaaataactctttagggagttgtgtaaaaagcataataccctcccatgccttttgaggtgtctttactatactcttcagcattaatgtcctcacactttatggagggtgaattttcattactggagttgctaggagacagccgccttcgcttacaagcactggtgtatactcctgaatcattggaatctagagatttgatggaagggggtgtctctatccaagaagagccaatttcctctttcactttctccttggagagctgatcttcagagaacacagtggggcttgttctggaggtccatggtagtccagctg

SEQ ID NO: 338296 - DNA, 1000 bp, Homo Sapiens; identical to SEQ ID NO: 158568

SEQ ID NO: 338297 - DNA, 1000 bp, Homo Sapiens
tttttttttttttttttttttagtcataaaaccgattatttaattgaagctataaaaaaggtagtataagtgataaaataattaggaaagaatatttagcatgtttcaaaacatttaaaataggagcagaacattttacaaaaagttgtacaggaaattaaattcttaaactatcagtacaaacatgacattacagagtatcttataaaatacaaagacaaatataaaaggactatgatgctttaagtctgaaaactattggccaaatatttaggtttaaatttacagttcctgggtatgagaatcatattactatatacatctcccaaaccagtaggtagtattttccaattaaccatgtgtggtatcatcttctacaaagtctttggccatctctgctgtgatcacatcaatatgactaaccttatttctgaactttacaccatagaatttgtcagctgactcaagcagttcaggcctaaaagtagttgtaataaactgagcatgtacagcaagttccataatcatatctgacacagcctttctgtgctgagcatccagagcctggtcaatttcatcaaacaagtaaaatggagccgggtcacatttctgaatggcaaaaatcagagcaagggctaccaaggatttctgtccacctgaaagctgttgcatttctctcatttcaccttgttttcctgtaaatgacaccctaattccaactccagtaaactggtcaactgatgggacactgctttgtgagccagaacccctctcactctcaccactcccttctccttcatcttgagactgactgccctccacatctcctttcttcatcaccaaagtagctttgccaccaggtactaacttctggaatacttcactgaagttcttagatacctgtttgaaagttaactgaatagcttcatatttccgaagttcaagtacattcatcagttccatgattgatttgtaacccctatctaactcttcttgacgc

SEQ ID NO: 338298 - DNA, 1000 bp, Homo Sapiens; identical to SEQ ID NO: 158571

SEQ ID NO: 338299 - DNA, 1000 bp, Homo Sapiens
tttagatggagggcttttacccaaacttggagaaaatgcatcacggaatattagtagtggaaaggattttagcaatcatctaggtcgggtccgtcatttatagatgaaaatctttagatggagaaaggttttacaacttaacattctacggctagttagtggcagagctgagacaaggtctcaaacgtgtaccaataactagactaatatcatttcctctatcgttctaatttaaaactacgtttcaagtcacctttccctgaaaatgttatgtacccacttaacattttcagactgaataatcagcatctttgctgttgtggttttgcttttcaaaggtaatagtgggatagctcttcaagctgaaactcctgggataaaggaatcctgggagccagcatgtaggatgtgtccatcttcatgctccgtcttcaccttgcactggcactcctccaccagcatcaccaccttgatcacggaggaaagttcagtgcagttcagtggcaagtgcatcgtggtgaacttggcaggcaaacagtgagagcaggaggtatgggagtgctgcgcggctccaggaaaatgaacagacccgcatttcccaaagcaaaggttgttctgaacaactactttttcacagccttcgtgggttatagtctggctgaagggcactgtcctgcaggtctcccaatgtacttcatggcttttgatgggcaagatgaccccctgagaagccggagtttttctgaacatgaagtggtgccagaatttcttggcttcttcccgaagaggagatttctccattttcattccatctatcggctggatgagggactgggtcccaggtgggaagggctcactatctgagtccctggatggatgcatttctctctcaggcttcttccagaacctgccaaatctggacagcatcttctctctctgcctctggccttcccctgcagggctggtggctacaaggtgtggcactgcgacaaacagatct

SEQ ID NO: 338300 - DNA, 1000 bp, Homo Sapiens
tttttttttttttttttcagagtttaaaaatctctagtttatttctaacaaacaccacttgatgcttgactcacaggctttatttacatttgtctacagtatcatttccttatgaaatgaactagtacagcttagttaaaccaaatgaaatcataatcatcagaattgtctgtaaactactattagctaaattataaccttgcatttgcttagtacagccaaagttttaaatacagaaagcacaagaataaaccaatggtaacatgtagaatctagatcgtcggggcaatttagaaggtagactttcaaaaagtctgaggcacaattacaagtgagtaaaagttcttgtgcaacctacataaacgcagcaaagaaacttaagacataaaaacatgggaaagctcactgtaaaaatattatcaaaatatttctacataagatatcttgctttcatttttagatcagctgaagagaaaaacattcactttaaagtaaaaacatatatttttgtttggtttgtctatgaaatatcttaaaatgtcgtaatttttatttaaattgcagcagacaatgttacggaaaaaaaacaagaaatcaatatcccataacaaaaagcccccaagcacaactgttgatttcctttgatatacttaccttgcattgtcactggaaatactgttaagagaaacctttttattttttaaaccagaaaacaaactaaagctcatgtgaccagattttaattttgagaaataaactccaaaagcattttaagccataacttatttcaaatgaataggaaaaataatgacttttgcttacatcatgcagcaataagcattcatttgttattcagaagaaaattgtatgcagtgtgtttatagttaacatcttgaggcaaatgttcacttaaattcacaatgtctccattggcctttcaccaaaagagaaatatactttaaaagcttacttcaatttgctcattaagtatgatttagcc

SEQ ID NO: 338301 - DNA, 1000 bp, Homo Sapiens
aaagacgacaggttttttccttttattcataaaaacaaatttgcaacaatttattaaaaatcgataccatgcagtaggggtacgagaaattcctcatttacatttgattctggcagttccagtctaatttaaagcgttttgtgcactaacatcattggaaaatgccttcaggccgaagcctcttcagaaatggacggtgtgtttgctgcatataaaagaacagaaccattaagtagctagagtcacttctgtgggtcttgttatttgcgaggaaattaaaaaaaaatgggtgaacctacagtatcagtaagacagagaatgtacttcgtgagttaacctagaagacagcgcacgctcaggagtcacaaagggttacagacgcacaggctcacctccgacagtccaatacttttgtttgttttcctgctatgctggaataatatttctacaggtatttttttttttgtgtgtgtatacattatgtacaattaattgtctctttccctttgaaaaattaatgtggtcctttaaattaaatttggttttggtgaaatcaagaaagcaagtaaatactggtaatacacagtgagtgacaacaccgatttttagtgcctaaacagagaatgacttcaacttgacctgtgatgtgttaacattttttttttccctaaaagctacagtacctccataacctctctttggggaaggggagcagaaagctatgctacgtgaaatagggtgctttgaaatgttggcattggtaagattcctgtgggcccttttgtcaaagcctggtggagaaaacagtttattcctgactgcagtggttctgggaagagattattgcctgcctgttgaagctgccaataggtttctttagggagtgagcgagctgctcagttgtgcagacatcctggacattgtcattcaggcctttcttgagcaaagaatgaacctgtctaggaatgtcagaaaagtcactgggagcctccctccagcc

SEQ ID NO: 338302 - DNA, 1000 bp, Homo Sapiens
ttttttttttttttttttttaataagcaaaataggaaaccattttaataaccaaaaaacagaaaccagtctgaataaaactacaatagactaggttttaatattttcatatcataagcagggtttgaaattgatcccttattttacatgaaataaaaacaatttctgttgcggcaggtttgatttcaacacagttgaatctgtaaaaaccaaagctcgtttctgatgcaggacaaatatccacaatatttaaaactgcaagcaccatgcggttcatacaatcttgttattactgttaatttatcaactaatacaaactcaaaaatgcatccggccagcagcgccagcaatttcaaatgggaacttaaaaatacacttttattttggtatttttgtcagtgcaacttaaatccttttactgacctgcagaaaaaaaaaagtaataataaagaaaaacacccatatcttccctataactactatacaactgaagaattgaaggggggggacaccaccaagaactcttcctactatctcaaaagcagggaaagaaacgcaatgcattggtctaaagaacgcacttgaaagttgcaaaattacttgccaatgtttgggtttctggtacattctgagcatagcagttggttcagtgcagtgtctgcttaccagtgcactgccagggtcagggatggctaagcctctcaccctaggagcgctgtggctcctacaattagcgcaggcccagagggttcagaagggacctcagggtgattctggttacaataaaaagcagaggggaggatctgttttcctttcctttcctttcttattaagggtatcaatttgaccataagacaaggctgtagtccagaacactcctctggggtgcggagcttggcagcttccctgccctgccctgcccttgtactgggacctctcggttctctctctcagcaccaacaaggttgaaaactaaagcgagagaggaaaaagaggaccga

SEQ ID NO: 338303 - DNA, 1000 bp, Homo Sapiens
tcaaataaatgagtcactgacacttttatttattacagtttactttcttctactttcttacgtaagccaagcaaaccaggtatgtatctttagttttcaagaacaacagactaaaggacctgaggaaatgcaaacattaacaatcctttactttattccactatttaactgcagagttccttcacagtttcaagaaaattcctacagtaacaccacattaacctgtgacacatcacaaaatgaggcagaaggttttcccaatgtggtgtgtttgggtgtgtttttgtttttacaaaatatcaaactgttactcttaaaccagaaaaacagcaatacatgtgcgactcatgtgcataaactaggattctgaagctatttaaacctgttattaataggaaaagcatttgaaaaatacccaaaagtaaaacaggtaaaccccataactacccatatggaacagaaatgcaaatagcactgtgttctctccagcctcaaccaggccctccaccacgtagaaactcgactgcccccttcaaactcagagggaagaatctgccctagacttcactcagaagagaagctgggggacatgacactggagcttgcactttctgtggcagtcgaatcatctgtggtgtcaattatggcctgggctctctcttccacatctttcaaagcatccttgtaagaggatggaaaggtaatagggacggtattctttagcatggccaaaaactctactactttcctcttaatgacttctgaatgagctcttggaccccacaggaattcgtaacgaggaggagaagagttgggcacctcccggtactctaggtaatgttcctgcacccaaactttagtgaggagctccctgggctccccaaaggcaaagtgctccctcccagcacgcacccctattccactcagcacatcccagatgacctcctcagaggcataggtgccctttatgaagatgatactcagaataagaatcaggagg

SEQ ID NO: 338304 - DNA, 1000 bp, Homo Sapiens; identical to SEQ ID NO: 158573

SEQ ID NO: 338305 - DNA, 1000 bp, Homo Sapiens
tatacaaatacctttattttgcttttaaacatatctaccagtaaacatgtgagtgtgtaggttgctcaagtccgggagaggaaaggttacagaagacatataacaaatattcacaagaaatcatgatgggaataatatcttttcttcttttttgagacaaagtctcgctctgtcgcccaagctggagtgcaacagcatgataatcagctcagggcaacctccacctcccgggttcaagcaagtctcctgtctcagcctcccgagtagctgggactatgggcgcccgccaccacgcccggctaatttttgtatttttagtagagacggggtttcaccatattggtcaggctggtcttgaacttctgacctcaagtgatccacccgccatggcctcccaaagtgctgggattacaggcgtgagccaccacatccggcctaatatcctttcaaaaaataagcgcattccatacaaataagaaggttacaataaagtacttcaaagctcaagagccacagtactgaggtatgataactagcatgaggagtcttccaggcttctcttttgtccagtactcactgaagtctcatccgtttttcaggggggcctttagcactcactgtctgttgtacattctttgtggtctccttctcctcaggttttacagtttctggtataggttctgcctctttctttgtttgatccactggaacaggcttttctccaggctttagctgcacaaatttgggtggaaatttttgtctgaggtctaaaagtaaagcatccacacgttgtctctgaaaaatagagcttggttcttctttccttttggctttaggtctgactttatcttgctcttcatgatctttgaagtgccaccaataccctttggaaggatgatatcgacagtatgacatagcttcatcaaaagctgactgaataccatgcactgcagtaagcactctagagtttataactgatcccaagtctggtgcctgatag

SEQ ID NO: 338306 - DNA, 1000 bp, Homo Sapiens; identical to SEQ ID NO: 158574

SEQ ID NO: 338307 - DNA, 1000 bp, Homo Sapiens
ttttttttttttttttttggtaccagtcactagatgtgatttatttgaggggctgttgtagggagttaggatacacagcatgcagggagaggaacgcagactagccaaggcctaaggtaccccaagactcactttcgccactggtccttggccttgatgacctgagttggcatctgaggttggcacgcatcccatctccacccacctgccaccaagggcagttggtggttttgccatcccatccctgtcccctgctgcccaccctctgccacctaagcaccaggatgagggtgagttgcattagggcttgccactcccctcagggacctcaagctgttgcctgagaagcttgagagggtcctgtggtagtgccctcttctggcaccaaggaagaccaggacatctcaggaaagcaggcaggagagggttggagtaaagggagggctgaagaaagagggctggggtcagaggtcagccacaggcctcagggtggctgccgcaccctccagggctgtcaccacaatgctgagctgtctctggacctcagcccaagcttcagatccagaagctgtgtccctggccctggagcaggcattggataggcccgggaatgtgactacggagcccgtgcgaggtgcccagagcacatggctgtagtagcgttcctctgggaaggctctagggttcagaaaggtccgttccaagagcatcaactggtcattgagcatccggacctgcagggggtcagggctgcccttctgcagtgttgatatgcgttggcccaaggctgcagcttctgcctcaaacttctccactgcagtcaccagaggccccaggctgatgctgtgctgctccagcagggccccaagatcttgctgggctgcctgcaggaagctgcggagtgtctcactgtagtcactgactttgaggggcaggaagaagctgtcactgagccggagaatcacactccccgctgtccgggccacagcctgatggctgc

SEQ ID NO: 338308 - DNA, 1000 bp, Homo Sapiens
ttttttttttttttttttgcgttccatattttatttggaagtttgggctgggtggtgtctaaagtcctatccacgtaaatttctgaatctgttgtcttcccatatgtcacatctccttaaggaagtctccaccttctccctcaagaagagatgaggaagggcttgagcaacagggctcagcacaggtttgcagagcatcaacataactgcatatggcagcaaatgtgttccatgatcctccattcaagaacccaaaggcttttatttttattttttcaaaatagaagtaccttttttccttttattatacaagtaacatacttacggtcaagtcagtcaaatattacataaatttatcatgcggaaagggaaaatcacctataacccaattcctcagagataactgctgtcagaatattatttcagagttctgctatacacaaatacgcatgtttcaatgggtacttccagggaccgcatggagatcccttaagttgaaactggacaaacagaacagtggatggttctagctgagatctgggatagtttctgaattcagaagtgttcaccagccacattgcatgtattagctggaaccatatatgaaactacgatactcagctgtttctaacctacaaacacagtgattacatatggctcaacttaatgtatatgaagcctagaatgtcagaactgatagagccttagagactttcaagtctatttcattatgttgaagaggaaaacggatgagggagagaagtgtccagcctaagatcatacatcaccttaagtggtagaatcagggctgcttctcttcctactggaccatgtacctgtctctcatactctgcttcttttaatataataataatttaggtgcgatatcagtcttttttgtttttgtttttgtttttttttgagacagagccttgctctgtcacccaggctggagtgcagtggcgtgatcttggcttactgcaacacagcctgggtgaca

SEQ ID NO: 338309 - DNA, 1000 bp, Homo Sapiens
ttttttttttttttttttttcaagattttggaaactttttaattcacatatagcaatttgtacattatagcaaaatttgcattattcaagaataagttacttgtacagtacataaaaccatacataaaaatttgccaaataccttttgcctataatgatacaagatggatccactttatgttatcacaatgtgctgtatattttaaccaaacacaggatgtcagatgtgtccttgttaatatacttgcaagttcctttagcttgtgggagatgttagagctaacacatttgcagtaagggaattagtcctgaatagaaagcatgaaggaatttcaggcaaccctcagggaagagtccaaggccttgactttaggttaagaaactgttatgtaaaaatagtgttctctggcccaagattttaatgattgctattcctttttcctacggtccagaaatgatcaaaggcagaagatttataccagataaagccatatggattgctggtttaaaattcaaggcaggttagttgacttaattctttggtgctggtgactgttagtttgtaaaagttcaataagtcagatgaaggaagggatggtgccgggagctgtcaagctgtactggtggggtctgtaattagagctaactggagggatcatgatgtctactgtccagtttggtgttgagccatggctctcggtagaagttgccggctggggcctggtcaggactggaaggagagtggtgggatgtgctgtgcctatggtgggctagctgcagccagtggggtgcctgccccacaatggtgcccaccccttcatcagctgattttgctcccacataaagaaaggtgttggcttagtgtcactttttcctagagccatgggagttttctgtcagcatgtttttgagctgtcctggtaacttggacgggaagcagtctggacgtgggtgccctccaaatctctgccacagaatctgaacttgcactttgcagcct

SEQ ID NO: 338310 - DNA, 1000 bp, Homo Sapiens; identical to SEQ ID NO: 158575

SEQ ID NO: 338311 - DNA, 715 bp, Homo Sapiens
tggtttatagcatttttattgcaattttgcgcagcatttgaaatttcaaagcattagtagaatttgaaaagaacagttcattaaccttggcaaagggagaaaatagagatcactgtggtttcaaccgctcagctataccttttagaaaagaagttttgcctacccaaaagccatcattttaataacacaatattagtgttctaccaggcagtaaaacactgtaattaaacatgtgataaagctctgccacccattgggtatttgctcttgtcttagcaaagagcactcaaatcagtcatggaacagccatcagtgcaacacaaagtttgtaaatcttgtcttgacatcactgaatgcttctttgacttccaaagctcttcagtgggcatctgtccaccccaaagacggtcttcccctgaggcatccaccttcggaaggttttgcgctggattttcctcagaaaactcacgtttatgtgggagctggaaggagtttcctgtctcagcttgctgagcttgagggatcccctcctgatgccttctccacctggagctagcacagatatagatgactgtccgtatgtattctagcccacagagtctcacagactccttgctccgcacttctgagatggcaaataggacagagaataaaaacagagtgaaaatggagcccttcattttgctgaggactgaatgtgaatctgatatggtaa

SEQ ID NO: 338312 - DNA, 1000 bp, Homo Sapiens; identical to SEQ ID NO: 158577

SEQ ID NO: 338313 - DNA, 1000 bp, Homo Sapiens
ttttttttttttttttttttttttttttctgggcgcagagggcgtttattggacctgtccttcccagccgctgcttgtccaggttcagcgctctccgcgggtgaggcaaggaaaccgaggagacgcccgagccgggtcaccacaaggtccgcctggacccccggccgtcacggacggtcctctggatgcagatggtccagggatctgggggtcctgggagagtggtgtgtggactgcgggcccagctggacaaaggcaggggcttcctcagaagctctgctggtcacgcaggcgtccggcccacggccttcaacagccaggcagttcttgatccagcgctgctcccactgcttcaccgccgtggttctgttgggcgacttgagcatggtgacacagccgcacctggtgcaggccttgcattcctccgtggggcaagcgccaaggtgcagcctccgcaggtggtcgatcttgggctggcctggggccctggcgaggccgtcgagctgcagggtggcagcactgccaggcagcgtgggcgcccggccaaactgcagacgaaggggctgcttgggctgcaggcggctaaccaggccgtcgctggctggcagccagtccaggctggggataagcagctggctgggcagcaggcagcattcatccaccagcgcctcgtccggctcgctcgctgggccctcatcgcgacagcagatccagagcttggtgagcaggcggaagagcagggacatgctgtcctgggtatccgaggtggccgtatacacgggcaggcagctgggcttcagaaggccccagatgcggatgaccaccatcaattcccgaagcatgcccagcgaggtgccgtcccgcagaaagctgtggcccggcctcagcagggaaccctggttgggtaggctggccagcaggtacagcacgaagtcgcccacccactgcaagagctgctgcagcgcctgcagtgtgttcatgtccagcacaaattcctccg

SEQ ID NO: 338314 - DNA, 1000 bp, Homo Sapiens
tttttttttttttttcatctttgcttttaattaaagctgcaggattccatgagtgaccagcagtaaaatattaatacattaaagaataaaccaaaggaaaacatttggtacaatgtaagtggtccaacaatagaagactgtgaaatgaattaaatattcataaagtgaatactatgcagtcattcacaatgtatttttgagagggaaaaggttgataatacattgtaaaatgaaaaaagacattacaaaatagtacattccatatgatctccatattgggaaaaaatatgtgcataagtcaaaagattgggaggatatacaaaaaataattaaccaaagttacttctgttagtgagaatttaatgtcttcacaattgtttcttttccaaatgaaaaggggataaggggaaattactattttcaaaaacagtcaatgtattctgatctctgtctcattcgcttttataatacacaaaatacaaaactggaatatatttagtgccattaagcagttgcattaacaattatttttctttaagttataaaattaatagttgattcaaatttagtttccttatacttatttccaattcatacaagagaaacacatttttaaaaatatataatgacataaattattatccaagtttgcagtcctccatgcattcttcattcatcatcaagtctaaaaaatgaacttcatatgcttaattccataagttttgaagaaaaccatgataataagtgcccataatcccagaataaagcccccaggaggatgccagtctttcagcttcggtttctggtgtattatctgagctacaggaagttgttcagcatatttcagaggttccattagtttctcatccatctggtcttccttatagctgctttccatgatttctgaatcctgttgcaatttaatagtctctgttgtaatttccactttccgtacacttccaaagaaatcagttatcagtacatttttaggatccctctg

SEQ ID NO: 338315 - DNA, 1000 bp, Homo Sapiens; identical to SEQ ID NO: 158578

SEQ ID NO: 338316 - DNA, 1000 bp, Homo Sapiens; identical to SEQ ID NO: 158579

SEQ ID NO: 338317 - DNA, 1000 bp, Homo Sapiens; identical to SEQ ID NO: 158580

SEQ ID NO: 338318 - DNA, 1000 bp, Homo Sapiens; identical to SEQ ID NO: 158581

SEQ ID NO: 338319 - DNA, 1000 bp, Homo Sapiens
tcacagctcgctggagcggacagcaggttccagcttgtgggacagggcagtgaggaccttgtcgaacttctcatagcgccgggcctggctgctgctggcaccctgactgccccagagaaggcgcatctggaactccgtgctgaacacctccaggagctccggccgggcctggaacccctgcagcttgacttcagcattggtgtggtacaggcctccgtggtgtgccactgtgcgggcggcctccaggtgagccagcaccacctccacgccgtgctccgtgctgccccagggctcagggccctctggtggggccgagtcacactccagcagggtgatgaggggcagcacatgaggaaacgtggtgttgctcagcggcgggccttctttgccctcgttgaggctcttgagaaaaggcttgagcttcttctcgtacaggatggcaccctctgtgtgtcgctgccgcagggtcacccatgtctgctccagccgagaaatctgagccatgtccagggcacccatgaccgccgcgaagctgaacatgttgcccatagtcccccgtagctcggccgccagctgaatggtcttgtgcagcagcgctgcccgctcctccgcagagccggtgcagcccaggatgtccacggccagcatgatggacatggtgtggaacctttccagcaggtctaggcgtagctgccggccatgggggagggtgagcagttccatgccccagcggactcccattagggtctgcatctccttggtaacgcccagtatcctagcaaccaggcagtccaccttggtgacatgccgggccagcgtccgggcatccacttctgccagcagctccttgaccttgcgcagaaggcccacctccagtggccggttatccctggggatcagtagtgactggaaggtggccgggttgaaggaagaagtgacttccacgatggggactgtgaaggtcttgccccagtccccttcaggggccccattttctgac

SEQ ID NO: 338320 - DNA, 1000 bp, Homo Sapiens
ttttttttttttttttttttctgtagaagtaaatttttaatggctggttaattatatcactacattttattgcaatatagtactcatttaagcacttaaaaatggaaggtgtacaaagattaaattaagacacggtaaattgactaaatatttggtttttatataaataaaggtcataaccacaccgttgacatgtaatactgttataatacaacagttaaacttgtgagtctacaacagaagtcatctgtagttaaacaggaaacaaagttgaaaaagaccatgttaaaacaaaactactgggactaacaggtcgggattgtaagtagcaacaaacatattcactcagctcctgagtatttcaagttttacagtacacattaaaaatgatttcttccatcaacactataaattcaaactgtcggatgtttatgcattttgcaagttacactgattgaatgcttatatgggagtgggggtcggaacatctcccaatttgaagtttacatcacccacatgctaacacaaacacaacttgttccatttccttcccctctctcccccctcccccacaaagaaggcaggatttttggtttcttttaggtaattgttttaaaggatttgtgatgatcaatttgaacgtctgaaattcagtaatatttaactcttagacaactaagaggttaaagatggaaaataatttctcctaacactaagttagaaaatcatttgcatcatgctgtaaactaggaagcaatgtaaagcgacaaaaacctgtccccagtacataatttaaaaaatctaaatttcaaatcagcagagctggtctacttccatgttgactatatgccacaatataagtgtgagctcttgaaatgcatagctaatgtaggtagtcttccactgtggcaaatgcgcaggatccaattcctgatcgagccatcagtcctagacattgtgtggcctgtcccattgctagggcaagtggaggttgctttgg

SEQ ID NO: 338321 - DNA, 1000 bp, Homo Sapiens
acattaatattcatttagtgttgaaatggttttgctatcttatgatcctccatgctgcccatataggggctttaacaaaagcactacacacatttctccagacatttgaagtgaggttagggcagtgtgtgtcttacatacatctttgggagacattttaggttaatgaggtgaatgttgaatggttccacattgaattgaatcctactgaatggtgcgtgggattccaacagtcagaggggcaaacgaaggcagatatcatgggtcactgtccaaaagcagtgctacatgaagaactgttggaggggctagaagagacactgggcaatgtctgttcactaacatgttaaagatctgcacaaagccaaaaagcagatgtggggcagaagtcaagatggccagaaagaaggtaactgtccaaaagctaactctggaagcacaggtattccagaggcggctctgattccaaagctggcatccacagaatgcaagttgtctgaaagagttaaagtgtactatcttgctcccattagttgcagacacgttcattcctcttatcatgatggaatcattattgttctttcctccttgacatttttcaccaacaatggaaaacactatgctttctgttgtttggggctttcttttgaggacagctcagaggattcatgttctgcatgttgggcgcaactcccttgtgattctcagttctcggtcccaaggtctggcttcctcttttgctttggaaagaaattgtccccagcccctgatgcttttactaggataacagtggaagagtggagaacacagaaatctcaacacacctatgcttttagtagcttgcagttaaataactagcgtgttttcttcccctgtaaaatttccaggcatggtaaaatctttagcgttacatagtcagggtctagctaatggcttatcagtcaagcaggcatgaaagagaaatgtctgtgagggaaaacaatgatgaactaagcaccag

SEQ ID NO: 338322 - DNA, 1000 bp, Homo Sapiens
ttttttttttttttttttttgctttctttaaatctttatttaaaagtccatgctaataatgtgtttacatttttacagttacattatgatagaaactgttggattttttaaatatctaaaacaatggcccactgaagaaaggaacaattaactctttaattaattccttaggataaatacccagaaatttaacagctagggcagacttctaatacaataccgaaagtccttccaaaaaccaagtggttgccaacttatgtcccttagcattataacattcttgagccaatagtgtaaaaatacgctgacaattttataggcaaacattactcaaggtatcttactttccacttattactaaagtaattaacccctaaatagatgctcctcaacagtgggactacatcctggtaaacctatcataagttgaaactatcaagttgaaatgcatttagtacccggataaacctatcataaagttgaaaatttgtaaattgaaccagtgtaaatcagaggccatcttacttcatactcatgaagcaactatagtgggatatttttcaacttacgagatagcctaggcttgttgaaacactgtcctaatttactggctctctggtaattaagtcataaatggtcaaacatcaaattctagaaaagcatatatttaaattctcatcactataattcagaatgactggtttacaaaaatatgttcatagtatttgggtaataactgtggtgattgtctcaactggcaagctaagtggaatgccttaaagaatctatccaagattagttggcaggcatttccagtgttggtaaatcaaaggcccacgaaggtatgctgagccttgatagcacaaccttgcttaggactttgcctcaactaacatactttttagtttggcaagttacctgaccctccaggtaactcatttttctccatagtctgctacttacaagattgtcatatttttgtaatctagaagcaattata

SEQ ID NO: 338323 - DNA, 1000 bp, Homo Sapiens; identical to SEQ ID NO: 158584

SEQ ID NO: 338324 - DNA, 1000 bp, Homo Sapiens; identical to SEQ ID NO: 158586

SEQ ID NO: 338325 - DNA, 1000 bp, Homo Sapiens; identical to SEQ ID NO: 158587

SEQ ID NO: 338326 - DNA, 1000 bp, Homo Sapiens
tttcatgaaaccacacaaacaggattcttttgttttattgataacagaaactgtgcataattacagatttgatgaggaatctgcaaataataaagaatgtgtctattgccagcaaaatacaattattccatgccctctcaacatacaaatatagagttcttcacaccagatggctctggtgtaacaaagccattttagatgtttaattgtgcttctacaaaaccttcagagcatgaggtagtttcctttacctacgatattttccacatttccattattacacttttagtgagctaaaatccttttaacatagcctgcggatgatctttcacaaaagccaagcctcatttacaaagggtttatttctttctactcaatttttcttaaaaagaatttcaagaatcactacacagctaagatatctgagacttgcaatggctggagtctatcagtacaatagtaattgcaatcagattcagatacaagagaacaggttctaacaatttcataattaagttgatattctgtttctatctataagctcacatttaaaaactacttcctcgaactacttatttttcctcagccacaagtaagcgcaaatccttaaaaacagtgggttgagccccagctccatgtattaggtagctaggtatattgtgggattattccttgttaagtcaccccaggaaacatttgcagaatttagaaatgcatccagatttgtgagtttatttttaagacctgactaaaaatctgcactcttcaaaaacttattgatgaagtacaaattgaggcagaaatttacattcctttcttaaccctgagaatgagtttaatgatcataggaaactagtttgaggaaactgcaatgtgttattgcacattttagttaaaaactaatagtcaaccaatttccaattcagtaaaccttccacctatcaggataggagatagtaaatagtatctctaagggaaaaaagtcacaatctacttcttg

SEQ ID NO: 338327 - DNA, 1000 bp, Homo Sapiens
atataaagtggttttttattaatgaaacatttcattgcattaagggtagaaataaacatgtcaagaaccgcatgaagtgaaccaactgtataagctacatgaagagcattctggtcagtattcttgttaacaggcacaagcaatttagtgataatgtccagagggccaaggatgcggaccaccttttgcagaactcatatctcgagcagtttaaattaaaaattagcctcccttaagttaaaaaccccaataggggttagtcgtgtagtgcttgttccacttgaccattagtgatctttctagaacatgaggaaatcaagtctggttagaaaagcctggagctaaaagtggcaaagcccatttcctgtcctgtgctcaactcctaattttccctgagagaagtgagttaagctctctgtcttggtttcttcctctctaagttgaggatcatggtaccagaagcttgcattctgtgatcatgacagtgcttacaatcacaaagcctttgggggtctttctaagataactgccgcaagaaaatgagcatgagaaataattcatcttcaacttaaagccaaataggtgcattcattcctcttaatctataattttgactgtagtttgtagatctgtctcagacttttcagaaggatagtatcaaatgtgatttaaaccaagtaactattaagaatcataaaacaggccaggcccggtggcttacgcctgtaatcccagcactttgggaggctgaggtgggcagatcgcagggtcaggagattgagaccatcctggccaacatggtgaaaccccgtctccactaaaaatacaaaatttagctgggcgtggtggcacgcacctgtagtcccagctacttgggtggctgaggcaggagaattgcttgaacccgggaggcagaggttgcagtgagccgagatcatgccactgtactccagcctggcgacagagtgagactctctcaaaaaaaaaagaatcatgacac

SEQ ID NO: 338328 - DNA, 1000 bp, Homo Sapiens
agagggcccatttgccacagcaaaaggtagcgatttactccatcagccagtactctgcaattccctctggagaaacccatcagttcaggttagaagggaatagtctttgccttgcaatattacctacaacttcattcaagcactgctcagagttctcatcagactgactcatgcctgcaggcaagcctggtgtgaggaaggatgcctcagcccaggtgaacccttgccaggctggacttgtctagtgggagagaaaaagctgcctgcaggatgagaagctgtctttccactgtgggtgtaagccttcctcctgacactggctcaggaatctcttactaaaatacaattttaagtaagctctgaatgtggaaagttcattgactctgcatttcaccatttcatttttctacagagcatcatggagatcatgatccatggtggactgcgtgtaagatgagctgggggtgtcagcagagtaaatttggaggagcccacagtattggcagagcacaaaaaggcccctgcaggttttgaagagctgtaggatgtacttgcgaaatttctcccccagaaaaaagtagatgatgggattaaggcagcagtgaacaaaagccagagtttctgtggcctggatggcatagtccaagtatctttcaaaggtgcagtcctgaaggacttctagctccaccagggtctctaggaagagcactatgttgtaaggtgtccagaacccaaggaagaggaccaccacggcaaagatcatcttcaccgccttgttcttcttctcatttttacaatgctgcaaggtcctgatgatcatggagtagcaaaacagcatgatccctaaggggatcaccaatccgagaatgttgatttccagggagctgagaaccttccacgtcgtggagttgagagagtacttggttttgcagtaggtatggttgcgctcagtataacaagtgctgaacagaaagccaggaagggaggcgaacacagccac

SEQ ID NO: 338329 - DNA, 1000 bp, Homo Sapiens
aaagtttctgcatgattgtttatttaaaatattatgactctggatgtaaatacatatgggcttacataatgtatgattatccatataaatgctcaattaaaatatttagttcatccttaaacaccttttgttctaataagcataatagtaaatattttatctcattggaagtgtttaaagctgtttgaatcttgatttgtgaagaaattactgaaaaataacttaaggttaactacatcaaacaatactattgtttgcaatgctgtcagatttctccatggcaaaatagtcgcatatggttattgcacgatttataggtacaggttattatgtgcatataaactctctacataatgacagtgtttgcactgcaacttgctcaacacatttaaaattgttgaaatacaatttacaaaatctttaacaacatacttttaagataaaagtatcctgaggatattacaaaattcattttaccagcccttcatttctttgctttgactctttaatttccaagataatcgttgcccatattttattacataaaatgctattattatatatttcctattaaacaaaatatatttaagttaaatagtacataattgtcccataaacacttagtcccatctgcctgtagtctcattggttaaaatcaagtatttatcaagttttctataattctgaatcagaaaaggtacagcacaaaacagacagaaacagggttagcacatttaagttaaaagcattgtgcattttaaatattttggtcatattttataataaaatattttggcaaaaataaaatataaggtttagtttattttctattaatggtagatctggagagtattttacatttctaaatagtatctacttaatttgactgctttcacatttgtttctgaaaacactgctattcgcttttcagaattttgagattaaaagcacctaaaaataagataaaataaaatttaagtaaaatatttgtttgatgctc

SEQ ID NO: 338330 - DNA, 1000 bp, Homo Sapiens; identical to SEQ ID NO: 158588

SEQ ID NO: 338331 - DNA, 1000 bp, Homo Sapiens
cagtataaaacagatttattgtcaacattcagtcattaacacaacccaggtaaatgaaacatcactccatacaaggctcatatattctttacatgtgtactataaaatgataaatacttaaaaattacaatgcaaggaaaaatattgtaagatatacaattgttacagacccttgtgtgaaagttctttatttttaaagttctgccttagggaaaataccatgctacatatcagaacccaaaataaactgtttcctgaggttacaatgctcaatggtatactggatgcaccctaaaatactgtgtctgacaaaattaaagagagacagccttcaatgatgtttagaaagagggagagtgacagagagagagaagagtaatcaattattctgttgatttctgctggaatggcctcattaaacaatttatagcactgacaagaggtctgtaccaaagggaacaaaaccaggaccagtctcagctttacataaaggatttccaaatcagactaactgacacagttctaaggcactgttaccaatgcttgtcactcttcaacccttcacagagactttttgtcttacgtccatgtttttctaatttcttcctaagggtttaccaattatacttctgttttctatcatcctaaatccaaaccaaaagacattaagcaatacaataaaatctaccagtctggtcagttctaaagacacaaattctggtttagacattaatcataagactcaagtatatctctcccccttccacacacgctcccacctccccttacatattgatccatctcaattttgaggaaatgctcaaattctaagcaaaatttcaggattttttcccccaatcagtgatttgactgttggcaagctgctttggtgggcagcagtataagaaattgtttggaatgcctggctagaacagataaaatggatgtgatcagtgaattattgtaacctattgtagtaaacagatggatgggaaggatt

SEQ ID NO: 338332 - DNA, 1000 bp, Homo Sapiens
ttttttttttttttttttatttttcaatttttattttttgagatggcgtttcaccctgtcacccaggctggagtgcagtcgcacaatcctggctcactgcaacctccgcctcccgggttgacgccattctcctgcctccgcctcctgagtagctgggactacaggcccgtgcctctgcgcccagctaattttttgtattttttagtagagacggggtttcaccgtgttagccaggatggtttcgatctcctgacctcgtgatctgccctcctcggcctccctaagtgctgggattacaggcatgagctgccgcactctgcccaggttcttatttttaatagaaaagagaacagggaaggaacacaggtcagtgtgaggaagggggtcatggtagacacagaggtggactgtttctctacctcctcacattgtgctaacagggacacagacagattcagaggcccttgcaaaaagagaagccagagtcccctaagacacataggggaggcgtgaggaaatcctgcatctcagtcgcacacaaggcagctgtgcatctcagtcgcacacaaggcagctgtctcaggctttacaagctgtgagactcagacccctgggcactgtcgctccactcagccttagagtagctccctccttttccacctgagctcttcttcctccatatcacagcagcaaccacagctccagagaccacagatccaaggagaaccaggccagcaatgatgcccacgatggggatggtgggctgggaagccggcttccatctcagggtgacgggctcgggtagcccctcatgctgcacatggcacgtgtatctctgctcctctccagaaggcaccaccacagctgcccacttctggaaggttccatcccctgcaggcctggtctccacgagctccgtgtcctgggtatggccctccccatcctgctgccaggtcagtgtgatctccgcagggtagaagcccagggcccagcacctcag

SEQ ID NO: 338333 - DNA, 1000 bp, Homo Sapiens; identical to SEQ ID NO: 158590

SEQ ID NO: 338334 - DNA, 1000 bp, Homo Sapiens
tttttttttttttttttttttttttttttttttttttttcctctttctctctttttaattgctatatattagcttagaacaaggtacaaaatttggagattcacaggaacagcacagaagtttaacaatattaataataataaagttctaacacatgacaggaaagtttatctggatcttgaaggcaacagctgatctgcatgcacatttctggagtccagtgattcaggaagaggtcttctctccattgctccatcttgctctttcacaaaggacccctagtccatagcaccataagcccaggacagtgattgcagcatggagaggaatgaagggcccgctagagatggctcctcactctacagggctgatgcttatggggctactatgtcgattcaaattcatttaccagctaagagtgggatcttaaaaatatgattcacggggagaagctctgctagcatacgtttcccaggaagctttccatggatctgcagaacacctttagacgggacgccgggcatactttcggcgatgctgctcgtccactcgctccaggtaccaagtacctgggaaaaggctgtttgtgtcaccaggtggggagaaattcaccttatggtagaattgctctctttggttcattatttctgtgaactcctcaggagacacacactttcgggaggctaggcgttttggcaggtctgatgtgctggacaccaacttgtccaggggagagcctggagcagcatcctgggatactcgaaatgaaaagaaacttgctgctaaaccagagccataagagaaggcaccaatcctggagccagccagttcttgggcagagtggtgggacagaagcgaggccaggcacccgtacagggatgaggtgtacatgttcccattgtgagtggagaggtaaagggaagccttggttttcttgtcgaacatgtcctgagaggcctttagaagtgctttatccaggtccttgttggtgtaggtgtct

SEQ ID NO: 338335 - DNA, 1000 bp, Homo Sapiens
gcagtttttaaaaggaggatttatttgacaagtttcacttagcgcaatatacctaaaaggaaatcacaatacaatgaaagatttaaatcaaggcctcagaatttcatacaaacaccaagaccaaaatcctaagtattggtattgcgtctcaaatttttcccattaacttaaaaaaaaaaaaagcttaaacttacgtgccttacaggttattaaatgaaactagaattaacaaacatgccaaaatgtttcacttttaatagtagacacagctcctatattgttttacaaaaaaaataaaagcatgtctttcaacatgcatccaaaacagtgttcaatttaacgtggcaaagggcaacatttaacataattcaactgcttttacctaaatacgcttactgcttaagtacatcctataactaacttgagaaaagctggaacttaagtttaacagttatagtttactcagcttcactgttacatcctagatgagtattgtattcaaaaatactgggccttaagtcttcataacaatcctgatttccacttagagtaagcataaatcacaagcttgtattgcagaaactgttaaactgaagttttcttaaagaaaaaaaaaaaaaaaaaaaggttgaccaagagtcagtgatcaggatcgatcaattacattccccatccaccactcatactggacatgctagacaaccctcccattccgttcacgcccatagatgcacggcttccactactgtagtagctgctgttcactgctccttggttacctatgcaatgtttgattgaaaatcactggagttttcctgtaaaacttggtcgtatccactcatgctgctctggccaccgtagccgcctccgtaacccccactcagctgctggctggctgggcccccgtagctggactggtttgacaagcccatgcctcccatcatttggctaccataagcaccaccgcttgctcctgctgtagaattcaagaagagttcta

SEQ ID NO: 338336 - DNA, 1000 bp, Homo Sapiens
tttttttggcggggatagcaccgtttattaagaaaaatcaagacaaagaccacaggagggtcccttctaggacacagaggccaggcgtcccaaccccacagtctgggggccactggcaggatggcacttgagctggatcttcaggctcctgcagatggggcagggtggtcatatccccctcctctctctctcagtcgtgagtcctgccttcccccacctaaggcactagctcttcctgagcaccagcggcatccgtccgtccgttgtctgttggaggagtccctgggccttcacttccagatgggtggggatgtggcctggggtgggcggggcccggtgggcggggccctatcagtgctgggctctgcctgtagcagctcctggtaagagttggggtgggccttcccttacagcccctgagggagggaccccaggctgtgtgctggcaggagggggtgggaatgcaggccaggaggacgtggtaggagggggagtctgccagaggaggtgccaggggctgggtggaggtgggtgggggtgctgaaaaacgagctggtggggatggggaccgcctgcccaggggtgagctgccttttgctccacagccggcactaaagacaattcccaatcctgagtgggtggcagagactcctgcgatgcccgtctcaggtagctgtggggcaccagcccacaagccgaggttggctctcctaggagtgagaactgcccaagggctgcagaaacaggccacccagctctatctgggggctccatcggtgggtagggggacagtgggggcagttctgggcccacccagccactgttcctgaccccaagtcctggtgactttctgaggtgcccactcccatccaacctgccttgctggccagccttgtggctttgcccagctgtgtgtgtgagggtggcatgcccacctccagtccagcccagggcggtagcagcaaagcgtggcatcgcctcggtttcttacaaaaattca

SEQ ID NO: 338337 - DNA, 1000 bp, Homo Sapiens; identical to SEQ ID NO: 158591

SEQ ID NO: 338338 - DNA, 1000 bp, Homo Sapiens; identical to SEQ ID NO: 158594

SEQ ID NO: 338339 - DNA, 1000 bp, Homo Sapiens
ttttttttttttttttttttttttttttttttttttttttttttgtgttccgctgaaactttatttatggacactagaatttaaacttcatataatcttcaaacagatggtgggctgaacttgacaagtgggcagtaatttcctgacccagggtctgaatacagattcttttttgacacgtatttatttgctggcaattaagtaacttctacttcattattaataataagtgagaacaataatacaaaatttgcttaaggctttgtctaaattgctggtgtataaatttttaagacaaattttaaaagttacttatgtcaaaattaaatatactactagaggaacaaactggccaagtttcatttatttcttcacgtaacatttttacagctcacatacagcaggaagcacacctttgcacataattgtgacattagcttcacaacagcatctgctgactgcacttccaattataatataacaagtgcaagttcatttggaaatgtacatttatacacctgatataaattaaagatgggtacactatgattggtgatagcaaaagcatgacttgaggttccttgactagaccacttaagagaagtgtacccaagcattttaaaatggccatttggggaacaggccaatagataaaatatctgtcatgtaaaatttaaccatttacctttttaaaaaataatcttcaaactttaaacctttgttactgaattgttatatggatatacatcatggcagcaagaaacacatttactataggctgtatttttggcgacatggccaattaaaaaaaattgttcataaagtaataatattacttgtattaaaataaaaaagctaaatgaaatattttccttccacatttaatgtgttaggttgagtttagtccccctcctcccgcaagaaatcagtctgagacttaagtgttgaatcaaacctatatttgtagtttctaaaatgctgatccacagaccactttctt

SEQ ID NO: 338340 - DNA, 1000 bp, Homo Sapiens
tttttttttttttttttttttttattttcaccacggtcaattttattgcttaggaaccagaccggtcacttccaaaggcccctcagaacgaccaacagctgaaacccgcggggcggactccgtgttgaaccgcggacagcggcaaccacagcagcgacacggacctgtgcttccaccaagaacagattccgcagcggacagcagtcacttgcagtggtagtatttatcccacacaaacacccagctaatgccttcacccggtccaggaactctgtagtgttctaaagtaaaatcaataaaacatacatttgtgtttcatcaacagactctctaatcaccttctaatgctgtacttactgctataggagaaaaatatttgcaacaaggttatgacatgggttgtctgtagcggagcaatgaggaaatgtacagttttgtttctctttaatatttttatatacagcccatgttaaaagcagtttctattggaagcaaactaggctatttctatttctcccatgatattattgttgtaacgtaggatacttggcaccataaaacagtaacaaaagacagacaaacggtttacaaaattcttaaaaggtacacccaggctagctataaacttcacattcagttcttaatattacacagaagaacggcatgggagtaacggcccgctggtgcagacgtgctgtggggccgattttacccacgatggcgaggccatgtgtgttttttacgaatttgtgtgttgatggacacacagctgagctcctagactccaatgccgcctgctgatgggactctcctgtgcgttcatactggaaagtatatttagcataagttttggtaagatttataaattatttttaaaaagtatatatttatatatatttatatatatataaaaatggaaagcagctgcagtgtgattcaaaaaccatgtgacacggcgcagagtcagtgccgcggaaggagcatcggcagagacagaccc

SEQ ID NO: 338341 - DNA, 1000 bp, Homo Sapiens; identical to SEQ ID NO: 158595

SEQ ID NO: 338342 - DNA, 1000 bp, Homo Sapiens
tttttttttttgagtgagaaaggcacaatttattggttacgcagacttccatcatgggaatgtggggtgcattcccttctgcattcacacacaccactggatttagctccctacattaattctgctatgttgaaaaagcaacataaggaaagacatcacccatctattctcctaataaccaaggaagcagagctgaaagccacagagataggaagaaaaggctgcactatttcaagagcctggaaccaagaggcccaccctccctggcagccaggctggagagcacggctttcgggagcaacagcaaagactcttctaccagcacgatggaatacatgttggggggcttggcttaactgtggctggtgatggctgcccacctcgaggagggcacagggaacctggcacaggccttggcatctctagcccaagctgaggccagatctctccactggagaataggagctgatttcctgctccttccaaccaaagaactgagaagccaggtagatccctgctctcagcctagccatgccggaacccgcgggactttagctaaagcagcttgtgtcactgaagctggacagaacaggcttcttgtaccctaaacaagctacccagactcttcagctccttaaggccgagcccttgtctcactccaggagggcactgggcttcttaatgctttcacccctccgaacacacaccgttttaaactggtgggtttgggcacgtggttttaggtggctagagcctcagctctcgaggtcatcctgatatgacgaatgttcgtaaagcacttagcacagcacttggcacatcatgagtgttcgatccatgtggccattattattattaatattattattatctatatctccaccctcaaatcggcgctgcagttcctttcttcagaatggcgccctcaacgaggcactggggtcccaagtaccaagagcgagctggggacccagactgtttgttgcccgtctggtgtgcg

SEQ ID NO: 338343 - DNA, 1000 bp, Homo Sapiens
tttttttttttttttttttttttttttttaaaagatcaacagtatctagtttattatgaatagaaagacatttccagaatttacaaacgcccacattgttcattccaaagagagcttttgaattgaaggaatcacccatctccttctgtttacaatacatgcaatggaagactttaatttcctcttcttataattttgcttccattcaattaccaattttaagctgacatttgaaaacacccagccaaatatatccttcttcagtttaattaacatggcctattgtcttacaggaaaaaatacaaaattaagattaattcttataaggaactcagctcaacatcaggtttatatgacaagagatagtatcagcaaatataactatacaattgagaaccatctatggcactatgattcttatattatgttttctgaattacaatcttaaaacaaggatcataccctattctactcttttaagccttgttttaagcatttgctccactctttacaacagaacattgtatacctccatcccacatccaaaaaaaagatgtgctgtaagaaaagttacattttcatttaaaaaattacacatataaatcaaaacctatgttaaatatttaatactctctccacccaacgtgaacagttttgtatgaaataatttacaatgatgctttgtcgtacacagtttcagcagcagatgaaatgtatcttgaaaatgcattgagagtaaacccattctctcatgacacggtggtgggcacatcagctcactgtggccagctaagtccttaaggttgaagatgaagtttatgcagactcattattctggtgtcacagtgcatttttttttttcgcttggcacaatatagaacgtgcagttcagtcaatgaaatcctgaggattggataaagtaaacaaactgaaatggatgcatcgtaccatctactgatgaggaagatatgaggtcctagttgtgaatcatgaaatattt

SEQ ID NO: 338344 - DNA, 1000 bp, Homo Sapiens
atttgtaacatttttattttgaacactagcagtgactgtacattaataaatatgcatctgatccaaatataaatacatagtctcaaaaggtacaaaatgcaaaatctacgaaataaaactagaaccaaaactctgtataagggagttctctacaaacacaggggaccatttaaaaaatgtgagaagagaaaaaccaggcaggaagcccattttgcgggatagggcaccaggaggtgaagaatgtacacatgtacagttgaggattagatgaatctgagcttgaaaaaggtaataccatgcacaggggaattttctaaaccaaaccacagagatcagtcaattccaatgttttctttctagactgaatgttccagaaatcatctctaattaaggatcccaaaagataatgtacaaaattctaaaaagtaaacagagataattttggataagctgagtaaaatcatcttctgaatgacagagttttatcttgaggctctccacttcacaataattataattaaaaattatgcatctgaatctcaagccagtcaaaacgtcacatgatttagaaagagccaattgcaacaccatcctctcttatatcagggaatgtccctcctcatgaagtgttcaagaagactacagctgaaagttggaatgataattaaaggaagaactcatacttctacagaagaatcttttaaagttgctttgaagctcgtctataaatggcttcaagcaacatgactggttggttgtgagaattaaagggtcattaactgaataactccaaagtcattaacatgaccaaggtaaggatacagaataggaaaaggaaaatcctattccaagttggagggccatgccatcaaccacagtggtctgtgccagagcaacactattcgctagtggttctatactgacttctttactggctttccatctttgtatttattccctctgcaatccgtttcattttcagtagaagccagtgtcgaat

SEQ ID NO: 338345 - DNA, 1000 bp, Homo Sapiens; identical to SEQ ID NO: 158597

SEQ ID NO: 338346 - DNA, 1000 bp, Homo Sapiens; identical to SEQ ID NO: 158599

SEQ ID NO: 338347 - DNA, 1000 bp, Homo Sapiens
ttttttttttttttttttttttttttttttttctaatgatttaaatttttgaaaagttgtaaaccacagctttaaggggttaacagggcaccaggctgatgttcctagcttggttggttctagattctctgatggttcaccatgctccaagctcataggagccatgaggtccagagcatgggggtgggggttggagggggcttgtggggaaggagggtaggcctggccctgtatgtggcagttcccagtcaccaagctaggactgctgagtggcaagccaccaccttaatgtgagaagaggggggatgaggaaaatgatgatcctcctcacacacttcaggtgacctctgctagaaagcaaggcctccagagaggaattcgcttctaaggtctcatcagtctcttacacctgagagtaaatgagtttatcagatccttcctgagaacaggtttttcagagaaagggtaagtggttgcacacaaaaaggcacttagctcctggccatggcagccggccagggaagggaggggagaaccaagcagggagacggggcacagggaagacgcacggcagctccttctcccctggccagagcgggcctcagtggctgggagcaggccccagggacaaagatgggtgggtccaggcctcagagaagggggacatcatagacaaagaggcacttgctgggagccgatgagacaggtgactctggagttcttgaggggcgccgtgccctgactgtggatgtgagcaggaaggagcagaggtctctgggcaggacataggccccatagtgctgatgtgcacttgtgctgtgacctgggcagagactgggtcccagcatctgttgtgcctgccgcagggtgagaaagtcccagccccaagaggctgggctgggaaggagctggctgagtcttgcaaatattcctgaccccagggaccctggccaaacagatccacaggcaaaaagggaacagggacaatgagaggaaaggg

SEQ ID NO: 338348 - DNA, 1000 bp, Homo Sapiens
ttttttttttttttttttacattttagaccatttaatggaggtatttgttgcacatgtggttttagtgtaacgtaaacacaacatctctccccagaaacacttaacctgagttggaaatgaaatatgaactgaagagattcttaattcacacatacacttctcctcaaaatattagcaatgattccaactgaggattctgcttgaagttcaggactcggtcccaggacaggaatgaaggaaaactccgtgcagttcgaacgctctgctgaagtcaaaggactgcacctgcgggctcttaatcagagctagcttcctcaaacacccgcggaacgaggtctggctgcgcaggcatttttgcttcacaccagcaggatagccaccaacataaatgggattgttggtgtccactgaggtagactgggtgtgtggactttcagcgccaactgcgttcccgtcaacaatcagagtgatacggtgtttgcttttgttagcttgaagagtgtgccattttccatcacagagcacagtggcggttttgggctcatatgcagctgttatcctgccagcaccattgttgacatggaacaagaccttgccgtccacaagctctagtccaatggcatccactttggcagtgctgatccccaggaggacgccattctgcgaggaggttcgaaactccagtgtgatgttcacatctgactggactttgtagccctctttgacaagagctgcatatccgcttccgtcaaagtatgttccttcctgggccactgcgtagcacctgttcaccgtgaaggcagacaccgggctgtccttgtccagctgtttgctgttaaccgtcacatccccaatgcaggcagggatgctgtgggtgatatttccaattttcctggcctggtactgggagggcaggcctcctaggtagaacaaaccctccacatccagcatggttccatctcccaccacagtcaccatgggagactctcggccgtcgac

SEQ ID NO: 338349 - DNA, 1000 bp, Homo Sapiens; identical to SEQ ID NO: 158600

SEQ ID NO: 338350 - DNA, 1000 bp, Homo Sapiens; identical to SEQ ID NO: 158601

SEQ ID NO: 338351 - DNA, 1000 bp, Homo Sapiens
tttttttttttttttttttttttttttttttttttttttttttttttttttaaagcaaaagactattttaatcccagaagttatctcaacatgcatttgtcttttcataaaaaaattacgtaaaaatgcccccaggaaaaaatactaaataagagtgaaattatatttttgaagcctcttaaattattgctgctgagaaaacgaggtttagtgattttcaaattacatgtataaaactaatgaatgcctctgactgacagaggtttggctgtaaaaaacaaatcagttttatgtgacaccaataactattactgtttcagtgttttaaaacttgccccaaattgtttctgtagctgtgtaaactactgtattttgaaatgggcattaaataatcttttaaaaaatgaattattacagtgcactactagacttcaagtgtgaacatgactcatgcactttacaaacattgaagaagaataaataaattatgggatagttgacagtcttcatttcaaacactgtttttaaaggaaaggataaaacccttgtgttcatggggaggggttcagttcagtcctaagtgtttgtccattgaccaaggctgattgatctcgtgttggcaacagaggcaggaggacggttcatttgctcggctataacttgctatgggtaccctgcagcatgcgttaatgtgcactggtatctggaacctcggtttttcccatcaatgagcagaagtggcattttcctgaagtagtcaataatatctgacacagacagaaagtcctctttccctcggagtccagttcccaacaagtaaacttgactttccttctgataacggatctggatgttgtaaactttatctttgtacaacaccatgaggacatatggattggttgttgtttttttagagctgtctctgaccagaaatgtgccatcctggtttatctttctaagagcagcttctgcctctggtcgggtaatataagaaacgtac

SEQ ID NO: 338352 - DNA, 1000 bp, Homo Sapiens
ctatttttcttaaataaaggttcatttctgtacaaccacgaactccgcagaccgtgcgagaccccgctaccacacggccgcctcgttcatttcgggggggtgggacaggtggtttccgtagctcgccccaccgttgaccgacagcgacgagaagggcgggctgggtccgaagacctcggccgacatggagtgcagaggcccgggcaggctgggctcggggctgggcgagtccccgggtgggtgcgccaggatgtcggtaaaccgctgcgcctcgctcgacgggtggtggcccggcagcgggtgctccaggccacccaggggcgtcccggacggcccagatgacggcacgaagggtaggtccactggtgtctgggcctgcgaggacggggggccttgcgggaagaagtcgtagttgcccccgggcccgtagtactcgctctggtaatctccgtagaaggagaagggaccattggggatgagctcgcccggctccaggcggtccaccagcggccgcatccggcgcggactgcggaagaaggcgtggcgccgggcgcccagggcgctcagctgcttcatcctccgctccttggagcgccggttctggaaccagacctgaatgacgcgcatgttgaggccggtctcctgcgccagctgctcgcggatgtggcgggtgggcttgggtgtagcagcgaaggcggccttcagcgtctccagctgcttggctttgatggtggtgcgcggtccccgccgcttggcgcccaggttctggtcgtcattctcgttgctacccgcttccttgtccgacacgttggcgctctccgagtccttggcgtcgtcctgcgacgggtcttgggaatccggagacaaactggggtcactgcccgtggtggccgagtgaaggctgttctctttggcaacactgctgttacttaggtaatcctctttgcagacgaacttattctcgtcgatgatgtagagttcctcgccagtggagagctgc

SEQ ID NO: 338353 - DNA, 1000 bp, Homo Sapiens
aaatcagtataaatcagctgtgaacagaattaaatttgcatcttaaaatgttatttacagactgtttctgtaatacccagaagtatgcacaaagacataaaaactccttccagtctgacatttcaaggttaagtttactaacaagtgcttcacaatgtcttagttctggcactaaaaggaaacaattagaagtattcactgtttttcaaattttgccttcaagaatcttaaaactgcctctactacagcctccttgatttaaaagagtatgcaaatggtcactaaccccagccagcatgaagtaactaatgtaaaccagaatgtagtggcaggttttgtgaatttaaatcctcagatcatcgaatttgacgtgaatttacatcgtgtagtaaagggagaaataaattcttagttacaaatataaatataaaaattattttcataatattgacctgaccccattggaatgaagaaacattcaagaatatgggcaatcatgaatgaatacattaccaggcaaaatacctataaaagccattctcagaggaatatttccacccacaaggttttttaggcaaaaagcagctatattttcctccaaaatttcctttaaaagtgaaatatatcattgataaatagaggaaaaaaaatttcacttaacattttgaagtctattaccagatccttaaagctctcagacaaaatattctttgatttcaaaggaagttgcattaagatgaaaggactgcaggcccaggcctttgattaggaagtctgacctctaaaaaagactttggttacaaaataaacctgatgggacttcttaattagacctcatattctgggaggcatgagggcaagtgtgtttacgttatacagggaaacctgcaatattggagacttagggggtaacattcatatccaggggttgcccccactttatttaccctcttactggtcaatatctgctcagaggctgcatcatactgaccagaaattc

SEQ ID NO: 338354 - DNA, 1000 bp, Homo Sapiens
aaagttccaaaacattctttaatgaaaagatttttggcacggggaggctggggagaggctgcccccaggcctggctgggtggccccagtgcaggctcggcctcagcggcggctaccactcacgtggtggtgatggagcaggtcatctccatcctcatcctcgtcgtcctcaaccacagtcactgagcgcaccagcttgcgcatggccacttcttccccagtggagttgatgagagccgtacgcaggctgttcccgcagccccaggtgttctgtgccttccacaccaggtcggtaggggggctgtgggtggccccagctcctgcagcccagatcgtcaccacctgcccagccttcagggtgaactttggtgggaaccggtaagtcagcaagggatcatctccattctggcgcttgatctgccaattgcccatggactggtcctcattggacttgttgcgcagccggacaaacttgccctcctcatccacctcctccacggccacgcgcccgctagtgcgtgcgtgctgtgagaagctgctgcggctctcagtggactccagtttgcgctttttggtgacgctgcccccaccctgtgtctgggatgagtgagaggaagcacggccacggctgcgctgcgaggtagggctgggggacaggcgtagcctctcctcctcgccctccaagagcttgcggtaggcgtggatctccatgtccagggccagcttgatgtccagaagctcctggtactcgtccagctgctgctgcatccttgcccgcatctcggccatctcccgctccttttccgccagcagccgccggctggtgtcccgctcacgggccagtgagtcctccaggtctcgaagcttcgcctccttggctgccagctgcttctggagctggctgagctgggcagagaggctgtcgatgcggatgcgcgactgctgcagctcctcgtgggcagcccccaccaggttgctgttcctctcagcagactgcctgg

SEQ ID NO: 338355 - DNA, 1000 bp, Homo Sapiens
gtgttaccaaaatgcttgccacgaatgtagaaatactaacctaaagtatatctacggcagggagtgataaaggtgtacagatctggggactatcaccatttatgaataaaataattataattaaagctaactcagtttggaacagtttcctatggtaacgctataaaagatgaaaaagaaagtcttaaatattcaaaaaatttaaccttttggccttgtttagcttttcaatacaacaaaaattttaaaaatctgtagcacctggctattcggcaggaaaaaaacacaatagttacagacattatttaaactttttttcagaaaaataaagaattaatcaaaaccccaaatcaaagtagatctgcacacctgaggtcagttcttacagtgcatgctttattgtcttcgttaccatattcttcagagctaactttgtaccacattccaatgccatctatcaataagaagcaacagatggctgacaaaccagcggcctgaagtgatggcggctcttagggtagaactttccttgttttactgtgtcagtaactttctggatactgaggaatagaacagaattccaaaacagggtttttgtccccatctgtgtatcttcaaagtagaaaaattactcattgtttttgtagatggttggcatttaggtgaatataattttgtaataaataactacatactgcccaaagacacttcagaaaagatggatgaaaaatacagtcaggccctgagctaactagaactccaaagagtgcaaacaacttggcagcgatcctggctttaccttggcttttgcaaaagcggcagagcccaagcttacaagctctctgaatgggcaacaaaatgaggtgcggttgtgcatgctacagccaccatgtgagacttttgaggttcttctccatccactggatattcaactgaatgacttccaaagcctcctggacacaacgaagccggaaggttgcctctgactgattttcaaaga

SEQ ID NO: 338356 - DNA, 1000 bp, Homo Sapiens
gtagaaaaaccttgttttattcagcccagacctgggcaatctagctctgtggtatggccaaagtataaaaaataaaaaccaacaacaacaaaacaacactgtagagaaaagtgaagtataaaatggggtctggcgtccggaatccctgtggttttcatccacgttcgctccctgaggccggcagggagggatgcccctccgtgcctgtgggttgggggctgggcccctcggcgggaggctgcccggggagcagggcctgctttggaaggggagagattggccatctgtccctcccggagatcaggattggacaattttgcagtttgttgcagaaacgtagcgacctgtgtagtgaatgttgcatctcaccacgttgttggtgaagtcagactccaaaacaatatactttgggttcacgtgcaccttgaggatgtagttcccaggctgcacgtcggttatgtcgatccactggcagtcgatgtccgcattgtaggtgtcatagcagcctgggctcaggccctgggtatgagaggtgcatgcatagcgcttgaggttgccgaagtcacaggtgctgtcctccaggcagaaactggccttgtggccctcggccaccttcttgcctgtggctgcatccagtaggtcgtagtggctgaactcgtccatgctgtggtaatgctggtggcagctgtgccactcccaggtgtgccgtggccggttggggaggaagtctgctgtgccctggttcttcacgcgctgggggaagcgcagtagcacccgcacatcgtagtcggtggcctcaggggcataggctgtgctggccagacacttctcctccgcagcacagcgcagggagtacaggtgggctctctgcacataagtggatgcttgcacatagttggggtctgggaccaagtcagggagaccgcggccgttctggttgggccggtacacgctgcccacgctgaggcggccctgctgcgcgccgttccgctccccaccc

SEQ ID NO: 338357 - DNA, 1000 bp, Homo Sapiens
tcaaatcaaaataagtgcagagtttatttttaacaaatgtcatagctatgacaccttaatacagaatttgtcagtcagaccttaaaagcttatacacaaaaataccaaaaatgccaaggtttggcatagctggtagctgggaacagtgtcttcgtttgattgctgtctattatttccagcatgctaaatccttacccacgtttcagcttctaagtaggttgatgcttcactctgtctcccgtccaattaattatttctcatcattccctcaatccaagtaacaaaccttgaaacacgagcatagacaccaggcttattggggcgtgcacagccaagaccccaagaagtgactccttgtaaaatgtatttgtccttctcgaagcaaaccagaggccctccactgtcaccctggcaactgtcagtgcctctggccaaatgctcagcacaaatatacttatagtgattgcacacttcattctcaataacaaggagctgggcttccttgagaaggccagtcccaaaggtaccttgggtttctccccagccagtgatgtaacattcagtcctggcggtgaccatgtagtctggggatggcagacaagctggcattactttgtcagtgatgacggcaggcctgcttagctttagcaaggcaatatctgcttgtgtgggctccaagaacagcctagacacttctatttcctgaacatgagattcgaggttcacttcttggtgtgcacccaggatgaccttgtaggatgaaggccttgaggacttcttcaagcagtgagcagcagtcagcacccactctggggatattaaggtgcctccacagaagtgctttccaaaccttgttctgagactgacttgccagggccaggaatgtgggtgggccacacacccccctacaatgcttccaggacatttcttcggctccacttgaggcttcccacaatcaaatgaagaggatgcacagagagggatatcacagtagtcaaaa

SEQ ID NO: 338358 - DNA, 1000 bp, Homo Sapiens
attgcttcagacttaaaaaaaaaatcttaacctagtctttgaaagattactttgcatacagctgagaaaactagatcagtcacaaatgaattttccaagaatctatgacctcagtccctgatgaaaattcattaacatgaaacagaaagactctattatctcatttcactttacgaataaatacaacctaaaaaatatgcccctataaaagaagattttatggatgccacatatattttctggtagccttccccttatgaatataatcataattccctaaaatcataatgcattgatttaatttacaaaaaatccaagtacagcaacactaataggtaggatggaaagtaggaaagaaaataagaagaggaggaaggaagaggaagaaaggaagggaggaagaaagcaagagaggaagaatccttaccaagtcatagtagcttcagtcaggtaactttttaaggtttgaaataaggctatgctaaccaaacaacagcctcatgagaaaagtttcattctagttatctgtcaagtgaataacttggcctgaaatattcatggttgcaccatattaatgcctcactgagaacaagttttgaacttgtctggaccactattaagcaaatacaatgaagacaattaaaaaatatgctgaatggtggtaaagaatcaagttgaagtctctgtcctcattatctgactaaaactactgtaaaatcaaataaaaaacactaacatccattatatcaccttctggcataaaaatgttttactcatttaaagacctatgagatacttccaagacaaggaaaaaataaatactactagaatatattaagatgaaaagttgacttctctctctttcttttctttctttcttttttttttttttttacttttttactttttggtgagtatatttttgagatttggtggttatcatttacatcattgactcttcagtggaatattcatagtagtgtaaatagattctttgaaa

SEQ ID NO: 338359 - DNA, 1000 bp, Homo Sapiens
tttttttttttttttttttttcctatgactgctctgccatgttgctttgccgacctcgcccctgggaaggggaccgggcaaggccacttccagagggttgtgggtgatttttttaagggtctgcgggtcccttgggggtcgatgatcacccttccggacccccgagaccttgcccctgacgtcttcactggtccttcttcgggggagttcgctcccgaacatgcgcagcacgtccactgccctttccttgacggccctgggccgagtccctggtgccctccggctcagaggtgctgccgcgtgcggtcaccgcacctctgggctcaaagcggtttgctccatcttgatgggccgggccgctccaccggggctgccgtcggggtcggccgggggcgcgggctgcgagcgcgctgccgcctcggccctgcgtccggatccccggcgggcgccgtcgtctgggacccggtgcaccggccgtttgcgaggcccgggaggggtggggcctgcggccagagctgcggcttggtcgcgcagcagccgcaccaggaagccgatgtacttcatggctaggcggagcacctcgttcttgctcagcttccggtcgggcgggtgcgtcggcagcagcttcctcagctcggcgaaggcgccgttaacgttctgctgccgccagcgctcccggctgttggtgaacacgcgccgggccaccttctggggctggtgcccctcagccaggtccagctcacagtggcttggtctccgcttcaaccggctgctagggaagatgctaaaaggtcctgctggcccaatgtagacactgttgaggaaggggtgagggtggtagtgcagggccaaagtgggcggggcagttcccagggtggagagttgcagcagcgggggccgcagagtgcccagctctgtggtgggcatggctacccctgggggcctgctgtggcccaggctgatcactggtacaccaggtggcagcctggggggcgaggag

SEQ ID NO: 338360 - DNA, 1000 bp, Homo Sapiens
tcttttttataatgcgaatactttattatcgagtgactggtattagctttttgtctgggcattaatatctcaaaaaccatacaccaaacccaggcttttccacctagctctgctgtatcattttctttatatatatatataaaaagtaaggaagaggaaggaggaagagaaagaaaatatatctgtattgaaagaattataagccaaagtgcgtctttcttgttttgtccatatacacacattgcaccatacataaataattacattgtaaaaatgactccataattacaagtataatatatatttccatataatatataaaactttatattaaatctaggtagatgatatctggggggttttgtccgtgggggctgtgtctctgggcatcggcccctctcgaggccggcaggtggcggtggccgcggcctcccacccgcccctcccgccggggccgccactatctggggttgttgaggaggatctccagccagcaggggcaggaggtgatgaactgccgggagtagcagggcccccagcccttggcgaagctgatgcggacgctgttggggtcgtaggggccgtcggcggcgtcgggctcgggcgcgtgctgcaggcccgagcgctcgaagtcgaacaccttgatggagtagccggggggcaccttgcgcacgaccagggcgcggccgccgggcgcgtccagcgtcggggagttgacgaagatggggtgctcgccgcggttgtaggcccacacgccgtcgggctccttgctgagcaggatgccgaagccgatcttgctgcgcgttcgccgcaccgactcgctgcgctgctccaggttgagctggcccaggcagaagccgctgccctgaggtaggtcgtagaagatgctgacggcctggtcgtacaccgcatagaggcggcccacgcgcgtccggtgctcccagtacgccacgctgcaccagtggctcggcttggtggcgtccggagacatgctggcgtc

SEQ ID NO: 338361 - DNA, 1000 bp, Homo Sapiens; identical to SEQ ID NO: 158606

SEQ ID NO: 338362 - DNA, 1000 bp, Homo Sapiens
gaattcctttttttttttcaaggttctgcttgcaagatatttttgttttcccctcttaaaataaaactaaagagttaaaccaagataaagctattctctaaaaaaaagttacaacatatagctttggcttatataaataattcatagcagaatgtgttcaaaagtagtgaatataattttatatatagtcatcaattcataagggtgttttctttcatataaaatatacatgagctaaaatcagtttctttaatttttaagatatgaatgtaaaaagaaacttctgacatattccaattataacttaatatattaattttcctttgttaatgctctatatttctaggctagtattttctgaatatctcatgcgtgttttctattctctttctttattagctaaagatcacttcttgacccaatacatttttgcacgtgcaaaacagttatgtgtggggcttttttgttttgtttgtttttaatatcaacagccctttcccatgcacccctttgcaacagacacccatgccaggttggaaaatataaatgacattttatgtacagtattgctttcttggttcctgcttttctactgctctgttctacaaagcattttctcttaagtaactacagtcactgcacagttaaataaaacaagtagggggccctctaggtttctgcaagctagtgtgggagaattatatatgggtacacgtttctctgcaaaaactggttatctttacgaaacaagtagtccaaggaagtgccagacttgtctgtgcctacagggtgctttgtctgccatgggacacacatctgcagacctacaaggagtttgcaggtaagtgcctgattctgtgtatgtaacacacacccacacatacacacacactcacacccacatacatatatatgtaaagggatatatatatgtatgtacatataaatatatttaactcatgtccttatttaccgatttagatatgtagggcaggtcact

SEQ ID NO: 338363 - DNA, 1000 bp, Homo Sapiens
ttttttttttttttttttgctaactcaatatttattaaatttattaaaggccttctcttagaatctcagaggaaagcaaatgctgtgcagcctggctcgccagaagtacctttatttgaaatctttaacaagatcttaaaagagtgatgacactactgtatctaatgaaaaatgagtatttgattctaacatattcaacataagaatttcatcatatatattcaatctgcaatataaatgagagtttctatatcttagttattcattcatttattgttttattcattcaaccattgttgagtgccaacaatgtgccagccatgcatctaggcactggggccagcacggtcaatgagaacaacatgtgcctgccctcatggagcttacagtctataggaaagacagtcaataaaacaagtgatttacaatgaagtgtgatgagtgttgtcacaggacacactagatacattaggagcacatagcaaagtaacataattatgtggggcagagagatgacaagggtcacacatggggctggaggcttagtccttggaggtcctatccaaagcaaggctgataaaaaagctgccccaaactgcattgaacatgggaaagttaaggcctgcatggaggaggtgctgctgtggtctggccaatgccagcaggcaggtcacttccttggcctttgggaaaggatggcgatgatggagaaggtcaagaagatcacgccagccgtgcctccgatcaccatgcccaggacactgccgtgcacctcggccgactgacagcgctcccccgtgtagaagaaagcatgtccagagatgcacctgcagctcgccatccccttcacgttcacacagatgccgtcattttggcaagggtttgggtcacatgggtctctgaagtactgtggccagttatggtcctccagggggcctgtgttctccaccgaccgcttctgtcggctgggctgcccctggctcaggctgacaggtagggc

SEQ ID NO: 338364 - DNA, 1000 bp, Homo Sapiens; identical to SEQ ID NO: 158607

SEQ ID NO: 338365 - DNA, 1000 bp, Homo Sapiens; identical to SEQ ID NO: 158608

SEQ ID NO: 338366 - DNA, 1000 bp, Homo Sapiens
ttttttttttttttttttttttttttttttagtttttaaagggatacaagtttaacaataaaaaacataaaaagcaaaaatagctcccctttttcttgcaaggctgttttttaccccaataatttagagtcctggggtgaaaggactagaaaaacaaaaatagaattttcaacaatctctatcttacaaagatatttagctatccaatgaaattgcactttactcaattcaaaattcgattgttttgattgattcctgtcagtttctgtcaaaacagaccatcttccccatttccatgtgaatttttgtgtcattgttgaaattgttgaaaaaatgttgttgttgtttttttaaatgtaagtgcagcatttcaaaacttttaaaaaactgaacagtagtagtagtagtttgccattttcggaattgttctgcaatgtgagtggattcattgtccttgcgggccatgttatatacttaactgctgactgctgaaccaaaacaaactaaaggaacaaataaaaaaggaatataactgcattttctttttccaatatgttacagaaaaacattgccctttgactgtcccgttatatattgcagatctcagctactacaaaagatttagttctccatgtgcctcctcaatgctcaaggaggatcacacctgtgtgggtaaattcatgaaatactgtgaaacagccaggctccgtaaggaaagtgtgttacaacaggaagtcagtgagcaagggtagtcctccgctagccacgtcacctaatgctcacgctaccatggaaacacttcaaatgttacaaagcccaaccatttccagcaccatatgagaaattacaacagtccctaaagtatttaaaaaaaaaaaaaaatcccaaaaggttatggcctttgctgtttgaccataatgcttgctgtttccatgtacaagttgatttgaatcggtttttctccccttccgctgatagtgaagttgtaactgcgctgggt

SEQ ID NO: 338367 - DNA, 1000 bp, Homo Sapiens
taagagtccccaagggcctgaaggaccttaataatccatgaattccccctttaagaatataaatttaataaattgcacttgccctctgttaagtgtttcttttgtggggaaaatattatattaatttttactgttgcatgcagagagaacacttcacctacatagaggcatttcttccatagagcctttgtgttcaaactgtttttttccttttttctttttttcctttttttttcattttttctttttttaagatttcaaactgggttacacactggaaaaggctgggttaagggccgaaatttaataaatctgtactgataactaaaggctacagagatttcatatattttttttaacttttagaaatcagagtgcttataaaatggctggctcatggctctgtcacccagcatctctgacgccgcctcctagccttcgttggtgagataaccaggaatagtgattccatgcgtaaacaacaagaatactaaaccaataaaactagcttatcatgcaaatattaaggcatctagaaagtcagttaaaatatattgtcatagagacagaacatctatttcccagcggacttcatgtaacaaaggctacgttgcaggggctgcgatctaccatcagtgaaatatcatcgaccctttttatgtcattacagtttaaccttaagggaattagtgattgtaagtgctgcaattgctggtctattatcttctttcttcagtttctttcctttctgcctttgtgttgttttgtccagtcttcctcttttccttttttttatttaaaaaaaaaatttcttaaactattgttgtgtttctttttccctcagttgcttgtttctgcttgaaggaaaggttctccaattatgttcaaaccgtaattttggacattggccggtaagatgggtgtcctatttgacacttggaaaggaaccaagctagcccaggtaccaggactggctggtttgtggactggatgggtcata

SEQ ID NO: 338368 - DNA, 1000 bp, Homo Sapiens
tagagacttctcctcccaaacgggcgggcgcgagggctgaaagagtccccagcgagacagcgagtcggccggcgctttgggaggggcttgtggggaggccccgcggcaggcagggccccctcgaggggcagcaggtgcctgggcctcacttcctcccctggccagggctcgcaagcgccacgcacccccgcgacaccactcgcctgccccaccctgcccgcctctgcggtctccgctgcccggccggggtccgctgtgtctccctttccccccagtggctgcgtcctcggtgggggctgaggggccggtccgtgtccggcagaggcgcgggggcccggggagaggtggccttgctgggtgtcgcgcctgtcggccctgggcacaggctccaggctgtgctcacctggtctccggacagagccagggcctccggggcgcgggcgggcggccggcgtctgtccttcccgagcagcaggcggagaggagatgaataacttaggaagacgccctgtcccgggtctcccgtgggggtggcggggcctggccctccagtcctgcggccttggcgtcccgagagttggaaacgttgcgtctttaccttttgtcttcttgcttgggtgggtttttatttcttcttcttcttcttctgcctttgttttttcttttcctcctgagtgtgtgcgtctatgtgttttgtctttttggccgggctgggagtcggcaggggtgttcttgttcactctaattttccaccgaaaacgtgggccgggggccggctgtgctgccccctgggattcctgggacgatggagaaggggcgagggaagaagacctttgctatcccagataccaggacggtccaggttgctggctggctgggtcgcaggccagcgagacaagatctttgagcgggtcctgggggttgagatgaggtgggtagcggatggccgtgtgggggaagtaggtggaggccgtctggggtaggatggacgtcgtaggga

SEQ ID NO: 338369 - DNA, 1000 bp, Homo Sapiens
tttttttttttttttttttttttgactttatgattattatatttttcaatgccagtgctgctcagccctcagcagaacttcagtttccatgaaataaacaatgactatataaaattccacctttctgaaactgcagtctgacctcaggtgaagctcaggtgaaagtttctttcccaagcagcccatctgtgttccatcaagagagtcaaggttctccaagtgaggggagctgtgcctggatcctgcctccaagtcacatgagcactagctcatagtggcagggtgggggtgggaggggcaggtctaaactcacagaagtcaagtcttaagacagtgggtgacccagattgccatagaggtcaggcctgcggtgctggaacacaggcaggtgtcggcgcaactgtcgcagatagttgaggtctattcgggcaaggcagaggcctggcccctcagagcagcgggccaccactgttccccaggggtctaccaccatgctgtggccataacttgctctcttctcatggtggcgtccacactgtgctgctgccactacatagcactgggtttcgatagcacgggcccgcagcaacacctcccagtgggctgggcctgtaatggatccaaaagctgaaggataggtaagtatctctgctccagcttgagccaatgccagagagagttcagggaaccgcatgtcatagcagacagctagaccaatcttgcctgctggtgtgctgacaggtgactcaagactgggcccaggcatggtagagttgctttcacacataggcccctgccctggaatctctacgtcacacagatgtgtcttcctgtaagtggccactactgcccctttgctgttcagcagcacgtgacaattgtagattttctgagtctgctcccagtcttggccacgctcatggaaaccacccaaggacagccagagtccacattccctggcaagctgggtgtattcttccaaaagtttcccacccagtgg

SEQ ID NO: 338370 - DNA, 826 bp, Homo Sapiens
ttccagccaaattttgttgaatgaatgaagaaacaagaggaggggctggggaagggctggaagggcgggcagatgtgggaccagactttcccgaggctccagatgaggcctttggaatacaacgctcaaaactcatcttgccgctcttgccttctgctcacaaggtttcatagccaggacggggaccgccacagtgagcacccaggctcagggcacctgtacagagcaagaggatagctgagacccagcccaggtagaaggaccaggagaagaaggtctggatctgggggtgtggaggctggtcccaccgctcgctggtgtacaccgccatggccaccaccatggagatggctgcagcaaaggctgcggtggttgagacaagcgggccgtggcctggggggaacagtgaggggaagcaggacaggaccaggaagctcacggacaccagggcccacagaacagccataatgctgaaggtctgcgtcacgtggatgtagcctgatatgatgtccccatgccctgttggccagaggcccgagtgagctgagtgggtgggacccacagcctcaaaccagaaatcggtgctcaaagcaatcaggcagaacatcaggcccagggagccccccagcagggccagggaccggcagagctccatggggataagctcagggcttctgggtcctggaggaggaagaggctgctgatcagactcttgaatctcagagagaaggaggctgtgcacccagactcctgggtccttagagcccaagaaagagagaacagcaagcagttggggcagtgaggggtcctgcgctttgtcacatga

SEQ ID NO: 338371 - DNA, 1000 bp, Homo Sapiens; identical to SEQ ID NO: 158610

SEQ ID NO: 338372 - DNA, 1000 bp, Homo Sapiens
ttttttttttttttttttttttttttttttttttttttgttataaagattatttattgtcttcaatatctttgtgatgaatgcaattcacacacacacacaaagtcctgagagtctttcataaaaaaatagacgtgctttgtggccgcatcccagcctgggggtaagggatcagctgtccccggtgcgcctgtactccgcggtgccatccgccacgatggcatcaagcggcgagcgcttcttgcggatgctgcgcccggaggagatgaggtccgcgtagccccgctggtgcgagaaggcgtaggccgagcgccgcgttgacacgccccggcggaacacctgctgccgtcgctgccactgctcctccgccttcaaccgcttgcgatgcttctggatcttatcactttctgatggccagatggtcattgacaggaatcgaatggcaacgacgggtagtaagcacacagcaacagtcaggatgatagttaaccaaatgtatggctgtctcagagcgtttgaagctgtgcctgtaaattgaaatgcagatggaaagagaacatgtattccagcactatgaaagtcaaacatgatgccaaaataaagtgcaatgcttccaaaaattgaaaaagcattcacaaaagtccaataagaagtatccaagccaatctggaaattgactgttattacaagagcagaggcaatggtgacggcaaaagactggtagtcggaaggtgcctctccatcctgccctacggtttgcagataagctccaagaggtatgaagaagaggatcatcgatgttaggaccccatgcaacaagcttacaaagaatctcttatagttgaatagtaagtctctttgtcccactatgtataacccagggaatcggaggctcagtttgtcactcacatcctggtcgagcagccccatgaggagcacgggcaggctggtgtacagcacgttgtagagggtgatgaaccaatcctcgtatgcagtctgcg

SEQ ID NO: 338373 - DNA, 1000 bp, Homo Sapiens
ttttttttttttttttttttttttttttttttttttttttttttttttttttttttttttttttttttttttttttttttttttttattgtgcatttctgttttatgtagataataaaatattactttaacataaatatataaggatctctgcgtttttattttccccacaagcacaaccaaatgtaccaaaacaaagtattttttaagagactgaacaaaaaaattacatcccatatagattttgctcacctattcatttaaagctacagaaaaacagtttccagaacctttttgtttcaaaagaaataaatatacattgaggcaggccacttaaaaatgatatgaaaatatttccctgggtagcattaaaaaaaaagaaaaatagacaaagaaacatttaaactatttctgcatttcaaaagacagatattaaacatatatacatagtggtaaggttcagtggtaactttcatcttagtaaacctataagagtcagagaagctgtagacacattctctgaactccagcttctgaccttacctacttggtaataagtatctggaaattcatttcctccctttaccagtggctatttgccctgctctggatagcttcactaaaggccagttcccatacctcaggaacgagcagcgtgatgcacccgaagcagctccgtgcccatctccttgtgacattcattgggggaaatgaaatacaggcaaataaatatgcccattataagtcaccatttatcttgcaaaaacatggaaaatgaaacaatcacaggtgtttgaaaagacaatataaagcatatttcctaaaaccttaaagactactgagtgcaatgctaatctgatgctgaaccataattttatggtagtgagactttcattttttaaaataaaaatttatctaatacctaactggaaaaaaacccccaaacttttaagattaataaaaagtgttttcccttttagcgcccttttgtgctgattttt

SEQ ID NO: 338374 - DNA, 1000 bp, Homo Sapiens
tttttttttttttttttttttttttttttttttttgaggtttccaaggcccttttattaggggaagttcccctttatagcacaagacttcacaaatgtgttgacaacaatcagattcatttcttaaaattatggagaaaaaagggaaaaacaaaacagatgcactttttatatatattgaacataaattaaaagaatttataaaacagtcacctttttacagaataaatgcagactgaattataaatgcacctccaggttgaagttgttttgagttgcttttcattttccaataataaataaatagaatttgttcttgagttttagatccacctgagccacggcaggactctaagtcatgaatgggctttcttcccttggtcgctcctgtgcgcagcatgtgagtgtgctgaggttacagatttcattggcccaccagcgtgtatgctatcctttcggggtggcattcgctcattaattcggtccagacctcgcgcttcttcaaaactccggatcttgtgctgaagcgagaaccctctgatggcttcccgggcctctaccgcttctactgtggctgtctcgatagtctgcttgcctcctgagaggacgcccagagggagtgtgcctgtgggagtcaggcccttgagagtcagcacactctcactttcttgccgaagaattgaaaagacccgtgccatcttcccaatggctctgatcttattcctgatgatctccttacgaactgtagtgcttccttctgcttcatcatcagaaatcagttcgtcatcagagcatatgttgagcacatttaccagcatctctgtgactttttccccaacaaaaggcaaagaccatgtgaaaacatccataaagtttggaagccagtaggggtgtggagaacagttaaactgcctgatattcatgacattgttttcatatttcaacacagcagctttattgttatagacatctaggtaattgggggcagagaaaattgtaat

SEQ ID NO: 338375 - DNA, 1000 bp, Homo Sapiens; identical to SEQ ID NO: 158611

SEQ ID NO: 338376 - DNA, 917 bp, Homo Sapiens
ttttttttttcacaggctgaaggagttttatttcaaatggttgcctgatgcctgtggttggggggggccgttcccgtggtgagcggggtacacatggacttgggaactggtagggggtgacagtctgaggcatggtcatgtgggctgggggtccagtccagccatggcatcttgggaagcagaggcacggggagtgagcggctgtgacagggatgggacaccaagaccggcctctacagtgcggtgacatggaggccctggcccccagctgccctggcgctgtcatcccaggctgcgctgccagcaaaggcgtgcaggtcactcagcagggcctcagcactgccccctgcgctcgctggtcctggggagccgaggaccaggtcgccctccgtgtcactgtctctggcttcctcagcccgcacggggacctgctctgggctggacgcctctccacattgctgctcgccttccccagggtcagcctgcaggccaccatccgcgacgtggtcatagtctgtgtcctgctcatcctcctgtcgctcaaggtcattgtctgtggaccccagctcagctcgggcctgcagccagcgacctggggggctggcccagagcaggcgccgcgtgcggccccacagcgcggcacctaggcgggccgggtggtagtagccccctgagtcacggctgaggcggcgccaggccagtgctaggccagtggccagcagtaggagcagcagcagcagcaggacaacggtgacagagctggagcccacgctgtcctccgcgctgccacccgagcccaaggcccctggcagggccagcagcatcccgagccctaaggtgcagggcagagccattggtccgcaggcccctccgtgccgggcacccacctccagctctggctgtgtcgagcgagaagt

SEQ ID NO: 338377 - DNA, 1000 bp, Homo Sapiens; identical to SEQ ID NO: 158612

SEQ ID NO: 338378 - DNA, 1000 bp, Homo Sapiens
ttttttttttttttttttaatttataaatgctttattgaaaaatacacttatcttcatataaaattacacgtagcagtatcttgagaagttttataaatatttggggagaacactattctaattgaacaatgtaagttccatatttctctcagcaatatgaagttacctagtaactttgtttatactgattcaatttacaattgaattttctccctaataagattattaatttgacttgaaaactgctggaacaatagtgattaataaagatatgtatagataattcagctgttaaataacattttctaatttgtataaatggtactatggtactaataaaaacctaaattctccaaccaatttttttaaactgccaggaacacccaaaaatatttttaaatatatcaccttaatagacatttcttttagataactccctcctaaaggaagaggtcataagttttcatattaatcccctcaattcaacttgacttaaaatcttttcttagctggttgatccctatataacaaaaaactggagaatttaaaacattcccaaaaggtggctataggggttttaacattttaaaaaaatataaaagcattaaagaaaatattggatgtttagcctggaagttttgtatttaataaagttcacattgtagaaagtgctatcacaaatatacagcaaaatctgggttacaaaatcatgcattttacagccctaaagtgcctccacttatacaggttcactcagacattgcacacccgaacaatcaaggacttttcacactgcaccacaccgaatggggagagggaagatgtgcacaaagggaacgggagacgagggctaatgacctaggacctccaaacctgggtgtgctctcctttgtcaggaatgcaaaaaatcacacactcctaccaggtgttttaggacaaaatacctaatttttgttttgctttttatgaggactacagctgaccacaaaacaggtagga

SEQ ID NO: 338379 - DNA, 1000 bp, Homo Sapiens
tgaaaccttgttcaaagtttcattactcctgcccttgagctgcttcttcaagatagtacacattaaccaaatggcgattgaggtgtttgctgtaatcttttccctttctgaaagaacgatcacagaagatacaaacaaaatctcccttagccgctttgactgccaaggcttcctttgcattttttctgctagattcttgtggaactggccgagccccatgcaatccagaatcatcactaccctctgacatgttgtcacttaggtcacttccttcatggctgtggatgccttcatcttcatcaatttcctgagactcatttgctgccattgtagcaggaggtgatgccagtgcagttttggacactgcttcacgttcttctactgctgaagggggaagcattggtgaaactggttcttcaactgttgaatttataccagtgagattctctcttgtgttctgatcagtgtccattttcatttcacaaactatactgtcagtctgatgtttaccatttaaagtttcaccctctggcgtattcaagttttgtccagaggatgaaatatgggtagattcgttgatattagcagcaagaccaggtaggctctcatctgcctcttctgctcctactttctgaagaggggcttctttatttccttcacctgtgttgagtaatttttggtctcctgatgcctcttctcttaaattttcctttggcagtggtggtgatggtggtgagagatcctctgtgcttacactttcctttagaagccagctatctttaacaggcactaagccaacttcaataaggacttgctccttccgtgccctttcactctgcatgttagacttttcctttttatcttttcggagaggaggctttttggaaattggctccatgtgaaggggaggctctctgggaggaggtggctccctctgagcaggctccttctgaaccacccccatgggaggagacaactccatctgaacaggctccttctg

SEQ ID NO: 338380 - DNA, 1000 bp, Homo Sapiens
ttttacataaaataatttacttctcattcagcgtgaccttccagacctattagtaagacagcagtctgtgagttcagatacaatctgaaagtcatgacaattataatagggcaagaccaataaagttacacatttgaagtcaactagagacaaaattgtggaactgtgtataacagaaaatgacactgatgaggaactccagggatattaagggcaagattgccagagagacaagaagggtacaattagaaaacctgcatctttaatacagtgagatttgtatgcatacactctggtgtcttcattttgcagcccattatattggcttaaaagccagaaaggtgctcatgcatgtaatttatactggagcaacgaatgcagtgtatgtggacgcgtgtgtgtgcactttgaaaggcagtagttttagaagaatgagaagaaaattacttcctgggcattcattaataattcaggtgatatcctgtacctccatttataaaacaatataataataataacacgtacaaaataacatcataaataacataaatgagaagttttcaagtatttcaatgtgccttgaaaagtttcaaacagtaattctcacaattggttagacaatcatttttttttcttttcttttcctctcatttagtctcagagcctaaaaagaaatgcctccagtctctgttagccccgatgtttggaatgaaattaacaagattctaccttaaaagagaaaacttatgtgggcttttcaaattgtgaaaatttgttccctcttataaaatataatctttcccctgctgctggtttataaatatgggcatatagcccagagccattataaagaaaaaacaaccaaccacaataaactaaggagcctcatctgatggctaaggttctcaggaaaaaatgagaagagcaccttgatcaggaaaggaaaaaaggatagaggataaaaacagtaacctttaacttctatgccctcactcagcca

SEQ ID NO: 338381 - DNA, 1000 bp, Homo Sapiens
ttttttttttttttttttttttttttttttcagaatgcagcaggaagtggttttattgctgtgaacacagggcaataaagcttggcaaaagttgcagggttagaaatctgaatctttctttgctgtcttccctattcccttctctcgaaaagtacagaactacaaagcagaaaataatcttatttctttttgtctcaactctggtctggcatcctaggcactcgaattctccaaacacctttcttctttcttctacgggaacaagaaaatcaacaaaagaaaagaaaacgtggatgcaattgtaacagaagctatgtcaaatgaaaggaaatgcagtggatgccttagagaatactatctaagtgtacaggaaccaacttgtaggggggatcgctcttctgaggggggtcacaggcaacaatgaagaatttgtactgggcagcagcactatagcggcactggggatactttcctgaagtgagtctgcagtcagtcatgttgacaggctttgagctctggtggcagttgtgccgacgatttttgcagacaatgctgagcaaatcacagacagcagccacattctggaaagagtcatgcagaaaggtattttgatgcttacagtgctgggtataattgttgatgccactcattgccctgttgcattggagaggacttggctgtatatgctgaatttcaaaccagtgagccttggtgagacgcttaggccaagcatgaagtggacacactggtccccatagaaccagcagcagtaaaagaagaggaaagcatagcaccatcttttctggtctcagtgttggggctcctgctgagaacagaggctgtgattagtccaaagctcagaagctgttgtctgcctttcttctctaacccttcgagccctgtgtgtatagggaaggggaagaaatattctgagctttcagaaggagaatcctagggtttggcagattaacttcttgtgcagagtctggattaaactctt

SEQ ID NO: 338382 - DNA, 1000 bp, Homo Sapiens; identical to SEQ ID NO: 158615

SEQ ID NO: 338383 - DNA, 1000 bp, Homo Sapiens
ttttttttttttttttttttttttttttttttttttttttttttttttttttttttttttttttttttttttttttttttttttttttttttttttttttttagttttaaattatatatatttttttctttttgaaattttttttcaaaattccatagttatatacagtaacatcaatttcaacaacagcagtacaaagcacacatttgacttacaggagcactgattgccaaagaataccaaagtgtttcaccttgatgatccatgggaggaccccacaacactacagacaggtaggagggagaacaatgacattttgccgtgaacttagttgagctcacaggaaaacaaaaacaaaaaacacatcaccaggattttgcattttacattcactaggatgtatgacagatagagttaaaacatcaacaacttaaatataattaaatactttttaagaaatattatgctttaaattatttaaaaataatctctttgtggatgttataataaaataatgtcacactgcacctgggggaggttggggaaaataaataagcttttcttcaagctctgactctcagtccatgtatgaaggctcatggcttcagattttgaaatatttggtccagatgcttcatggaatccctgacccatctctccttggggtcagcacagacctccttgccccgtttggtcttgaagatcacagcttccttgggacattggatgttggtgattcttgtgtagctctccagcctctggataggaattttcctattgatcacgttaaagcagcaggtgattggaatggaaactgaatctggctgagcaagtccctgagggctgaaagtggctgccatgagcagcaggcacagaagcgctgcagaaaccttcatcttggagggcaagggtgtgagcttcagcatgagaggtgaaggtttctgggttgttctcaacctctctgctcctcggtggctctgcctgccttttatagggagca

SEQ ID NO: 338384 - DNA, 1000 bp, Homo Sapiens; identical to SEQ ID NO: 158616

SEQ ID NO: 338385 - DNA, 1000 bp, Homo Sapiens
ttttttttttttttttgtaaatatttttcaaggttttattgcaaaccaaaatcagtttatcacacacaaaaaaagttgtgtgatgggatgagggaaggattgtacgtattataaccatgttaattacagtacattaaaatggtggtttacattacaaataagcctgtaagtttaaatatactagtgttataacccaatgtacagacgttctttatacaatacatacaattatcaggaatgcaaaaaaaaaaacataaataatgcccattttacaggtgacattttaaacaatgaaaaacaccaacggctctgactgacaactggggcattggtccataaaaaccctttctaaaaatagaaatatttgtagcagcaatgctttctttaagcatctgaatacgagtcattgcaagaccatttcaataaattttagttattaaccgtatcttacaaaaaagtctacacataaatttatcttccaaatatggaagaaacaaacaatgtcccacgttgtagtgtcctgcaagtgtcacattgatgcttataacaaaatccatctgtgatcaggcataccacactcacacgacggttcacacagcatatccacaagggaaaataaagaactgaaacactgcgataggaaaagctttggagctaacacaatctcttcagaaaaggcacatttcataatattcgtcatcacagcccagacagatctgcaggagaccttttttagaacagcgtccgctttctaacgaaactcctgcctccgtctaaggcggcactctaacgctcgtttcagagatagcaccacgttggaaggaagaataaaaatgaaaacctcatgagctcactgaggagaatgtgctcttcaaaaagcttccagcgaacagtgtgcaataagattgctaagcttccagagatgtgcaaattctcttgtaagatgtcctgtcagctggcggctccaccaaaaggctaactaaaacattcggaaacacac

SEQ ID NO: 338386 - DNA, 1000 bp, Homo Sapiens
tttttttttttttttttaaatagttgacactcaattttattgctaaaaaaaatgtcctctggagtgacagcaggtatttgtcctcagcctctccccagagtccctgggagtgtttctgttattgtggagggaataggggatctggggacagggtgggacgtaccatggggacaggaggtcacagaacacacacacacacacacacacacacacacacacacgtgcacacacacatccccccacaactacagccgccaaaataaccagcatggtgttgtaacatccccccagtgggggctagaattccccatggtgacctgtgacctgctccctgagacaggggaggccaggcaggtcacggtggggacgcagcagaacattatttctccatcttgctgttttctagccttgagttggggacatgagtgagaactgggggttttgaggagtaacccttgtgaacacatgtactccagcagccaggcatcccagatctcctgtcctggagggtgctggggcccctggctccccagagtgtgcaggcagacccccagagccctagctcatccatttatccattcctcataatccagtgtccaaagagcacccccagcagggcagggaaggtccctcccggggtttacatgactgattccttctcagaggcgaccgtggcatcccctgcgggcccccgatagtgtttgaggagggggtttccttcctcagtggggactggcagcggatccaggggcagctcactcttcacttgtatcaactcaggctctgtgcttctcgactccgtacggtccacataattttggaggagtcctgcccccagagcgtcaccttctacattgaggacggtacaggaccggtcgactagccagtccacagccaggatcaaggagatatggtcgaccgggaggttgactgcttcgaggatgatggccagagtgaggacacctccagcagggatgcccgctgcccccacgctggacgc

SEQ ID NO: 338387 - DNA, 1000 bp, Homo Sapiens
ggaaaatgacatgtttttattgctatgtctgcagtggctttttagcacagtagaatgtccccgcaggcccgccaccctcacccagccccagccctgcagcctctgtctgggtgtcggggaagcctttcttggggtcactcagccgtctcgggactggacgtgacagacaaacgtgggttaaagctgctacacagaagactggaggtgcgggaagtgcatccaccttaagcctggacgtgggagccgtgtccagggtcccttcctgggggtgtgccccgcacagggtgggaagcctgagcaggccaggttagcagcccagacacccaggacggaatattgcagcctcttgccccacagacttgtggcaaagggacagcgtggggacagccccgaggcccccaccatgcacttttccaatccagtctggggctggggaccacacacgcacatccacacaacagactcacacacgcaacagctcgaagcttttgttttgcctatgaaagttagatctataaattcacactccttggctaggggcagaggggtaaggtagggctcacagggatgggagtggtaaggagaggatggtttgggctccttcctctttttagaaatatacaagcagaaatctcattctctcaagtttttataaaatgtgcaaaatacaagcctcctttgcccagaggcgccatttacatctggcattcacctttgctaagagatagagatctatatatactctccgtactcacgcacgcgtgcactcgcacccaagctcacacaattgatactggtggcgattggcgcaggaaccagaaggttccattgctggctggctctctaagcttctataacagggatggggagaggggtatagcccagctgaaatatttgccttggttctgctgcccctcccctgcctcccttctcctctctctcctccctcccgtctctccctccttcccttcctcacatttcccaagctgccactgctgct

SEQ ID NO: 338388 - DNA, 1000 bp, Homo Sapiens
tttttttttttttacctcaatagcaaaattagaatattttaatagtaatataatagaataaaggtttgggagtgcaaccaatcttctagaacctgaaggttggcattcattgttcataaactcagctgaaggcagtgccttccaaatgtggttaaattgccatgggaaagaccagggttagttgcagggcatcattttccaagcagaaccatttcaaatgctaaaactggcccctgaggttacattgagcctcccttcctgagtgagatgtttggaaatgaggtggctttggaaataagcttgtctgtaacagtggtttccacaaagacttcagtctcatggcattggactttgtttggacattgacataaatattttggcatatcaccatatgaggcttttccagaggtggcttccagtatgcttctggagggggtcttccaagaagggtggcacttaagggtcatgaatggccatgacccatgcccagctgttccagaggacatggggagacagagctgtctggcaaagggccaggtgcagagtcagtctgggggccatggatggcatggatagtcaggtcaggatccttcatgccaatctgtggcttcttgctgtccccacctctcctcctgctctcaccaactcccacacccccagtcccacactgcccaccgagcacaccctgggagaaggccctaatgtaaatggagggaggtgaggtaagagctgagggaagctccatggagaaccctgattagcattgctttgcacaaagtcggtctccaataaatatatttgttgatgaatgacctccttcgttggcttctgtctctcaacatctatcacgtagcagctgtgtctctcaacccaggcatccacctctctggaggcagagaagaggctgagaaaatgggaatggtatgagcatgtctgaaaccaggaaagccaacctgactggctgttttgtgggccgcagcttgccatccagcttggtgac

SEQ ID NO: 338389 - DNA, 1000 bp, Homo Sapiens
tttttttttttttttttttttttttttttttttttttatacaaaaaccttttattgactgtatttcttctccccataacctggaacccagccagcatctatggcttcctgctgtctgattcttgaaagtggggccttgggaacatgtttggaggctatggaaggtgggaatctcctcacccaccggctatgcaggttgaaggaagctttcttgcctggctgaagctacggcagcttcccagggtagcccctcaagtctagaggacccatcccccactaaatgggtgtgaggaagagatgatgcatctttcagaggctttgtcactcactgctcctatcccactccagactgaggccctagagccgaaccagtctctcctgtggagatggggcccagcagcgaggggagggggttagaggtgagtgtgtgcagcagctctgggtcctcatcaacaaaaaggaaacgcaaagaggttggcaccgctgaaactgaactgaaatggaacaggagaaggaggatataggagaacaaaagatgggtttggggtagtgccacctattaagagaggacatggcccctgtgggagcaggtccttccagccccacaaacacctgggagaggaatacggtgccctggccctacttagacaaaggactaatgacacagtcaacacttttggactgagactgccaggaaagggcacccatcagcccagaaaacggcagccagccctcatctgccagacataggctaggctgcctccctggccaccaaagcccactctgggaactgtcacctctgcctccaccgttcctgccccaccacaagctctgcataccccctgccccgatggagcagatgctgccaaccaggctgcagctggcagggcagaaacaaggaccctgagctccagggccctgtccctggggtgaggcctccccatggagatgttaggctctttcccacagtcctgctgctttgagccagacatccagaactc

SEQ ID NO: 338390 - DNA, 1000 bp, Homo Sapiens
tttttttttttttttttacaaaacaaaacgcttttatttggtccattggagcctgagtcggaagccactgtggagaatcctatggtaaaggaacgggactgacaattgataaaatagtctctgtgtcacaagagctggccgtatttacagggttaaaaatattcacagctcagagtacagggaggccaaaggggagtgggaatgtttctccaggtgaaaaggccccggaagcccctgccggggtaggagggggagtgggggcgaggccggcccgctgccgggagtgaggggccaggagggcacgcagaaagctgggctcagacgtccacacactcctgggcttctgtggggaggtgggagcggctgagccctgcccgtgcccacgatgtgctggggtccctctctggcagggccgggccgagggacagggttggctgaggagcctgctggtcccagtgtgcccggcagcagtgagcggtgctgagaactggtgcccacccacagcgggcctggcgcccgcctgcacccagtcatggcttcgatcctggcgggcactccaggatttgcatagtgtcgctggggggctggccaagggccccttcttctgagacaggcaccgccccgggactcgccgctccacaccagggctccagggaccccgcctgccctgtgggggacagggacccgggctctgggggaaaactgaccttatgccccgtgaggggtggtccctgatcccaccccagggtcttggcctctgacacccagatttggttttgcggacagagctcctggctgcctagcccgcaggagaccctgagcccacagggaggggcagcctggcctcggcccccgtcgggtgttggggctggcaggtgagcggggctggttcacagcccgcctggttcgaggtattctgcgtggcggccaggaggcctggccaggcggactgtggggttcagggaggggaaggaggggggcggggggcccatgggaagct

SEQ ID NO: 338391 - DNA, 1000 bp, Homo Sapiens
tcaggaagaatgggcattctccaacagtggtggtccatctctgtgcatggatgggtgtgtgtgctcccttttgtaagtttttggagggagtttagggatatgttgagaagtgctttgtcgtggaggaacaggcggcccagcaatggaatgaaggtccacttcttgtgtcaatggtggtgatggcagatgccttcttgtgccgtgaggagaaggtgtttgaggaggaggtggtgtaaagggggaagggctgtttgggaagaaggcattgccatggtcactttttttgcccaaagggggaggttggagatgtagtggtgagcttgagaaaacatcaggtgtcctcacaggttctcgtggtggtaataagggagggctttcaggagggtctgagatagaggtccggtctgatattgaatatcgtggtgaataggcttttgatgtgggttgcctaggaggaatggctgggggactgtccaaatgcttagacataatcttagatggtgaagattctgctggggcagattctggtcgtcttcgtggaggaacaggaggagggacaggcacttcatcagtgcctttggttaaacttatagatgatacagaagcagatcttgggccatggggcagagtaacttggataaagacggtatcattgcttgagtgaaaagggctcgaatgatcggaatcaaatacactgcaaacatctgtggtactggaagcaccagaagcaggcggaggtgttaacggtgttcttggagaatttggtgcagatgctgtactttctgtttcactttcagggatcctactataactaattttccttggctcctgctgcagaggtgtgggatgcctcatggtacctggtcttgggtttgatggacgaacaccaggagattttaggggatagctatatttttttggaaatcttgggagaggcttagggtttcgtggttctatttctagggatttgttgaaaagataatctgtaaattccttctcc

SEQ ID NO: 338392 - DNA, 1000 bp, Homo Sapiens
ttttttttttttttttttgaacgtttgcaaaggtttattaactgtcagtgactgatacaggggaatcggatgaggggagtacatgctgaacaggaaacagagtgaggggggcttgaccaggacgcatggcaatgggaaaagcagatgggagatgcttatactggtacttggtgtgtgtgtgtgcgtgtgtgtgtgtgtgtgtgtgtaaatgcagaggaaaaagtctgaaattaaacactcagaactgccctcagtagtcacatctggggagagatgaggatagtgctgttctatggagagaatacctgacaatacttgttttctgacgtaggtgcatggatacacaaaccgaaatatgcattcagtatgtcttgctcatcaattataaggatagtatctaacagaatggcacactgtaagaaaatacaatggaaacactaacatcgaactcttggcacactaagaaaaatgacgctcaagtttcaccgttgtgaacacttgctttcacttgctatgcacctgatgacgagggagccgcagccatgcccatgttcgtgaaaggtcaccacgttctgcttctcatcaagggcatgtgtcgtatcccccaggggagttactcgtcatcttcctcagggtcactgatctcttcataaatcaccagctgctttctctcacgcagtctgtgggtccaggcatgtttcccccttttgggtccagatctcttattaatcttctcagaaatatttgcttttcctggggggtgcagttgtttcccatcgttttgtgggccagatgcttctgacactcccttcgaatcattttcgtcctctgctggcttcttgggcatgatcttcgggatgattctgtggagcctgccgaaagtcatctgaggatgttcaacctgaatcctgcggttatggtcattatcaaaatcattcccctggaagtctgtggcctgtttattacacatgaaaggtgggagggtgactttgaaacctag

SEQ ID NO: 338393 - DNA, 1000 bp, Homo Sapiens
gaattccttaaattttattaacatcttcagtttgtgcgtcatttaaaatgagacatgtgctttaaaaagcattcttatacataaatagaccaaggaacagttaggtaattgatccctaaaacatgcacatcaattttattcaggtgtgtataagaaagggaaataagctttaaacctttttctttggattaaaaacatttggaaattattcaggaatgccaaatgtttttctggaacagatgtattttccaataggaaatactgatgcaattaagaggcattagtgttgataaagaagactggaaaaacgtttgtgctatgctagataaacaagaaaagagttcaagtgggcctaagatctatgtcaaataaatgaatcaggtagcatgaattgaaaggtttggatagaagaacaggtaccatgagccagattatgggacacatatatgttcaaggcacatgactaggctaaacaggtggctagattctacagactaatttgttcattcattgagaaagtgtaaaatgtaatataatttcaatttaatggcacttattgataaataaatgcaattggatctagggtagaaaatgtcttcctttcagatacacaccagaaatgcatactagataacagatgccagtagcgatatgattacagtccaattttcttacactgcagttaaatggttgttaaactgttttgtattaattctatatgtcatactgtctattctctttcaagtttcacaaaagaattcatcaaaactaggcagatttaagaatttatttaaccacaaagaatgctcaaaactattattcaacaggaatcaagcccaaaccctggagttgactgctgaccgtattcggtttgggcttttcccagaatggaaacacttttcccacactacctccctttgcacagctaaaatgctagcatatccactgtggttcccttctttttctttggcaagtcagaggaatttacctccccaccccc

SEQ ID NO: 338394 - DNA, 1000 bp, Homo Sapiens
tttagtttttgaaaagacgtggtgtgatatcctgaagactgaacatgaggccaatgcttagttttcctccattttgttttgatatttgtgaagacaaactttcatttcagagcatcactactgtcttgtggcctggaaattaaaatggatcacagaagtgaatgggacaaaaggctagatgcagtgtgggataataggctgcccttccacgaaatggttgtctaccatagtggggaaaaatatggaatattgcacagtgcttgacaaaatgctgtgttccaccccattctatgtatcttccttgtcctatgcatagcttttcagttctgaattggtcctttgtaatgagaactgtttgtgctacacacaccttgggcagtgcagtagaagggaatggcagtattgttacaatatcactacggaataaattgagtgctatccactgaggaaactacgggtctaagcacacacggcagtcacagtgtacacagagcagtcctttaagactcttatggaatgactagtagcttcataatagtgtcatttactacataataacattgaaaacgtttaaaaactcctcctaaatcaagcatctagtatacataagaggttgcttcagttttctagaacttgttcttggtttgtttcacctttttttaaaggacaaattaaaacttaagtaaaaagagcatataaaaagatcactagctgtctgttttggcttaattgaagtgcattcagaactatggctaattgttgttggtttttgtttttgtttttctttcatcttttgatgggattacaatactgtctgtttaccacaaagtaattttgtgtaataagcacagattgttgtgttaaaaatatcctgcattccttctaacctggttttatataataaaatattttgttacaaactctaatgtgcaaaccttttggaattattgtaggtgtgaaatctggaacagaattcacaggatgtacattttgtataaag

SEQ ID NO: 338395 - DNA, 1000 bp, Homo Sapiens; identical to SEQ ID NO: 158617

SEQ ID NO: 338396 - DNA, 1000 bp, Homo Sapiens
ttttttttttttttttttttttttttttttttttttttttttttttttttttttttttttttttttgcaagttggaaaacagtttaatgatcactcaccaaaatccacaggagaatcttaaatgtttacaagcaccaattattctgctattcctgccattaccgcatccttcatggtagagtatcacaagtaaaagtttctggttgtttcatctacttaaaaccagatataagaaacaacctaagtcttagcaacttcaggcttcaatgtgaaaccattaaagccctcggcactttaggaggctgaggcaggaggactgcttgaagccaggagttcacgaccagcctgggcaacaaagcaagaccccatctccataaaaaataaaaataagttagctgggcacagtagtgtgtgcctgtagtcctagctactcaggagactgaggtgggagggtcacttaagcccaggagttcaaggctgcagtcatgccgctgcactccagcctaggtgatagagcaagaccctatctcaaacaaaacgaaaccaaaacaaaacaaaactctcttggaaaggttttctctctgaaagcagttcccctgtccagaagatgcttatggcccacgtatcttcttccaactggtcaagacagttaaatacttcaaaatgccccaagaggtcccaaaatttagtcaaggcaagtatcaatcaggctacatactttctaggtgtgacaaatatcagagttttgagaaagacattaaaatcatcatggaatccttggaggcctgagatactaaagcaccaatgcagacagtcttataggaagtctggaaccaatacttcttccgtcagtaacataggcctttctagactttggtctagaagaagatgatttttttgtgcttcgagttagggatctgtccttttgactttaaccttctaacggcttccctcatatgtttgggttgtagtggtggcatttctccccacttctcacaca

SEQ ID NO: 338397 - DNA, 1000 bp, Homo Sapiens
tttttttttttttttttattaataacttctttattctggaaaagcaaatgaaatgaaagtcatattcatataaacactgacattacaaagtacagggaaaagggggaagggagaaggaaacaaaaccctttacaaatcctgctaatactgtcttacccaaaaagaccataatgctttgtcccatattcagtcacttatataataaaccacaaataaaatcttctctggaagatacattgctcctctttgagatggcagggaaaagggaccggaagttggggtaggaggctttattcttttggcagatcctctcagtcattatagatattgctgcactgttaataaaaaatatatgcttctctgtaaagcattaaaaaaaaaaatccaaggatgagatggctgagttctcagctcaagtatctccaaatacattgctgtccattccctgacctttccgtgtgttatttcttggttgttttccggatcaatgccattctctgtttgtgagcttctgtggtgcaagcttttttgtagggtcggatttcttcagaaccaaatcctgggatccacatgttccactggcgctctaaatgcagctggacatctttcacctccagggtgctagacttgcgatgccgcgcaagctgacaggctgctgtcaccacactctcgataaaatcatcagcaatctgcagcagcatctcctccacatcttcatccaactgctcattaggatccacttctcttactaagtcctgtaatttcttcttggtcaatacctgattgttttcagggctaagacgacctcctgccccaggagtgcctggtatctttaccactgcagtactattggccatggagccttgtggaggggtgctggctggttccggttttatggatgagaaattggagaggttgattagggctgaggggccaaactggttcataatctgccgagctttggacttcagctcatagagcttatcgagatcctgtttct

SEQ ID NO: 338398 - DNA, 1000 bp, Homo Sapiens; identical to SEQ ID NO: 158619

SEQ ID NO: 338399 - DNA, 1000 bp, Homo Sapiens
ttcttttttaatgaaatccatgcataagtttgacatcagggtaggaaaaggacaaaccccagagactgagaggtagttcataattcatttttcttttattttggtccttttctctaaaaaggtacaatttgatcaagctattaaaatgctataaaaatattaccagtttggtggtcttctaatgagaaatctaaagcacacctccccacccactcggatatctgtttctgatgatcacgtgacatctagcatatacgtctgtaggaaaagggaaaaagcaaacccatttcacaaatggctaaagtcaatgtcttcaattgtaaattcttcatctcaggttatttttttaagtgtctgacaggcacaaacactttcctcatatctattatatagctgaggtttatccatggaattaaatacctaatgagggctaaattattacagtttttttcacatccattacatttattacatctctctcaaggatgtattcttcgatgagctttggtttaaggctttcacacatacaaatctactttctaggggtcctcttcgatatgaattttataatgattagtaagggatgacctatggttgaaaagtttcccacatgtattacattcatagggtttctctccagtatgaattctctgatgtgcaatacgtgatgagctttgtctaaaagtttttccacatgtattacatttaaagggtttttctcctgtatgaatccttcgatgctgaataagagctgaactttggccaaaagatatcccacattcctcacatcgatatggtttctctccagtatgaattctctggtgattactaagtgatgagttacacctgaatgttttcccacactcgttacatttatagggtctttctccagtatgcattctctgatgttgaatgagagctgaactctgtctgaaggcttttccacatactttacatttacatggtttttctccagtatgaattcgctcgtgaataataa

SEQ ID NO: 338400 - DNA, 1000 bp, Homo Sapiens
ttttttttttttttttttttgaaagattaatactttattattttaaaaattttgtttgaaagcctttgtacagaataatataatgtactgcataaaatatttgaaatagatgaagtttacaagtttataaagatgaaacaatgagatagtgattacattaagtggttacattaagtctcaggggaaactgatttttaataggaaaacaccctatgtacaatgttactatttaaatgtattctttctcatcttaatgcttagtcttgtcacaaacaagaggtaatcaaattgtttctagaattaaatcagagcatcgtggtgctgaacaatatatgcatacatatattcaaactgtatttatgaaaatccatagaaaataaaaaataggctgtgaaaccagtattcttcatagattttgcagacgattttaatctgattcatcactgctgaagtaggagctatcacagtattctgctgtatatagaaatttgtgaatggttgggttcatcttcggtatccagtgtcggggaatcaggtatgttgaaagattaaataaatctacaaataccttgtacctatcactcacagttgatcgcaggtagtgatagcctgaggaaccaccggtgccagctttgctgcccagcattctgtgcaccatgcacacatggttatatctccatttggtcatcagtgaatctatgtccataagagaagtcagcaactgaaaaggcacctggaacctaggctcttccctgtaaaaatatatcatcaatgctccctgaagtgctctgtatgacagccgtctttcacctttactaaggagatgttcatgacgtttctcatcaaataaggacagtagcacctctttttgcttctgaaattcagccacctgttcctctttttcttcagactcttctttagcctgaatccttatgaattcctcttccaggcctctggtgatatttttttcaagctttccccagaagttaaatccatgtgg

SEQ ID NO: 338401 - DNA, 1000 bp, Homo Sapiens; identical to SEQ ID NO: 158620

SEQ ID NO: 338402 - DNA, 1000 bp, Homo Sapiens
tttttttttttttttgtttttcctcgccaacgtgctcacagatctgatcctaaaagagtctctttttcccatgctttgtagctcggattgtatttctgctgggtgggctgctcctgtctcggccctcctccctcccacccagcctgcctggcccgctgcacttcccggtgtccccgcggctttggagtccttggcccaggtgggtcctctgagtctctagggggacggggcaggtgggaagcgcccaaggtctaggagcactggatggacatgtaaggccagttgaagctgctcccagacagtaacatatcgcggatgagagtttcgatgggggttttacctaccaaacggacgaagaagagctgctcgatgacggaggaggacacggtgcgcagcgagggcagtcgcagcagcagtttgccaaaacggctgggctggttggggtactggctcctcacgtactcctccagtgcgcactgcgacttctcctgcaggctctcgatgtgggccgcatccgacaggccacaggcgtctgacgtgaacagcacgatggctttgaggcagctgtactcggctgagtcgacgtgtagcgccttgagcttctccacctgctcctggaagatgcggatgtggtccatgaaggccacgacgcggtcggcagacatgggcgaggcatgcaggccggcggcggccagcaacggcgccacgtgcagcggcatagagcactgggccgcgttgagcacgaacagctcgctccaggtgaggcgtagcagggacacctggtcggtgatctgcagatccgggaagaaggggatgttgcgggcccactcgacggcgctgaagagcaggcgcgcggccagctcgcagatgttctcgatgcccataatgttgttgggctgcatgcactggctgccgtagcgcgacgtggggtagggctcggcgcgcagcagcagcgagatgtagccggacaggtagcagtggccgttgagggggtccccgt

SEQ ID NO: 338403 - DNA, 1000 bp, Homo Sapiens
gaattctttattgtaaacaagatataaagtacaacaaaagaaatattgtgcaaattgtaagtcacaaggattttttttaattaaaacttttgttttccaagggtccaagttttgatgtcagaaatctacacccaatatacaaaaacaatgttaaatgggaagatatagtgacatttttcactatatattttaagcaatgtacttttgttttgccactgtgtatatcatccactatataacagaataaaagagaaatactgttaacaaaagtgaatgttctaataatttttctacccaactacctccacatccccaaaaaactcctataaattaacaggacaacatttgtccacctgtgaataatggtcactaattttctaattcaataaagcacacattatatcctcataacataaaggtactttactgatgacataagccatctttttcaagaagttatctaagattcttaatatcccttctttacaatatatatttcatcttcagttttttttctaaacaaagtgcagtgtatcttagagtctacagaaaacacattggtatacaattttcaaatctacacaagaaactgcaggcaaactaaagttcaaagcataatgaaatgcctagatacagtcatttgttaaactttcaaaacaaaaatgcaaaaacaaattgtagctatgcttcaaagcaattaaattaaggaggattccaattctttgggccctcttagcaatatacagtcgttcaattccaaatattcacaatagtgtaaaaatgatagttctagatatatttaatcactacatccacgatgttgactggaaagactaggaataataaagaagataactctagaaaaagatgacaatatttgtaataatacaaactcattttacatctccatgtctgtaccgtaatgtttatttccttccagcctccatattcttgaaaccagtgctttagaagaatcacattgaaaagttggtctcaagta

SEQ ID NO: 338404 - DNA, 1000 bp, Homo Sapiens
tttttttttttttttttttttttttttttttgctttgaaaaaaaaatcgcataatttatttgcatgatattcattttcacaattgaactttacagtttaaaaaagatacaaaaaaagacaaacagttgttcacataaataagaaggggcaataaagaaggaagacgttttcaccattacaacaccttttaggatgtgtcttggggagcaagcaccttacagtgccaactgtttccaaggtccctgggaatgctgctctctacagaggcatgtgcacagacggatcctgcaaatgggattgcaagactttccatttcaaggttaagtcctagctgtagaatcattcatttcattcttgcaaaccagcctgcttggccaggaggcagaaccatggtagagtagtgctcatggttatggcacttggcaatgcaaaagggacccttcccctggttggaaacccacagcattggaagggaccacagagagtccaaaacaaaacacatctttctcttcttcgccgccaccatgggcactttgcttcagcacattcatttatagaacgttaagtcaggagccagtcattttgtcaaagcagctgaaataggccaccactcttacttggcaaaggtgatacagtttcaaagagttaaatgaaggtggactacttggagacatcaaaagctaagtttccaggagcactgaggtagcaatgtgtagaaacataacatggaaacagtgtaccttaaactgagcatccttgatttcccccatggacctcaatttccagtgactagcaggcctgaagaggccaacatggtgccagacttggcgccctgccaggaccaaggggcatgtgcactctccagggtgctaggagcagggtcagggaggatgaggaggaaggctgagtctccctcccaggagccccacccaatgtgcaggtggagacctgcaccaggagtgctcagggcaagttccttttcaattgcttccctcgcacc

SEQ ID NO: 338405 - DNA, 1000 bp, Homo Sapiens; identical to SEQ ID NO: 158621

SEQ ID NO: 338406 - DNA, 1000 bp, Homo Sapiens
gcacttaacatagagctttgttggaaaagaaatcattcagtgtcttaaattatcatctcatcctgctttcaataggcccagggttaccagcaggtgctctgtgggcagggcggggggttggggggggggcggtgggcactgctgcatctgatgctgtctacactccagttcatctgacccttctgactccctcccccatcctgccacacagaccctgccctcagccaagacagctctccgttttcaagtcggtactcttcccttttccccatcctctgcatttcacaatattctcaggctgagcttaaaggcctgaagccttccctccttcaccagctggatctgggattctgtgctttctctaagcttctcctactctcaatcataatgatctacttatctgctcatttcctccactgaactaagagtttcttgagtccagagtgcacatcttgcctttctcccttcaatgtcgaacacagttaacaggtgcaggtgtcaatgaagctttgctgaaagaatggctgcatctcatgctctttgaagagagtatgtatctcttgccatcagaaataggcaatcaaaagtgtagagtaacagctgtttctcatgggggcttgttctacaaatccccccttgggctcaacactcggtgagtagggatcaagaggttattgctaggacatcagtttcagggcctagacccatcactcgctaggccagaccttcatgtgtgacatccagctgtcagcaggaagaagtcagtctccactgcctccacagtctccgctgccacgctgtcagccgtgggaacaataaaaagcagccccagaatgtttgctgctgtcgtgcatggacgacaccattgcacataaaagcactagtgctccattattgcagttgggcctcctgaaaacccctagagctggagagggcaagggagaggcttcctctgatcttcagctgaaggactaagcatgacaggatgccaggcttagag

SEQ ID NO: 338407 - DNA, 1000 bp, Homo Sapiens; identical to SEQ ID NO: 158623

SEQ ID NO: 338408 - DNA, 1000 bp, Homo Sapiens
attttcccttttataatcttgttacttttatgttgaactcttttgtcaaaagccccttgttgggaaagtctagagactttgtatatcaaatacaaagcactgtgcctctgagcctaggatttgctgttacaaagaattaatgagaaggtggctaaactgcataggaaaaccatttctgtatttatagagtaagctattaatgccattgtaagaattaccaatatagtgctttgtaagtcctctaagatctgcatctgtcacatttggccagacccacttgaacagtccttttcattagatgctaattactggcttctgtgcgagggacagaaagattattcacacaactcacatccacacaacagccaatcctgttaggctttgaccttcagctttcagctctgtatttactttattacataaacataaatattatattgtgatgtatattcttttatatatttttttcaaatacataactcttatacatatatatttttatatatataattcttaaatatatatttccaaatataaattatttcatgtcaagctaaacaggataaaaacatgtaaacatatacacttggttttggtcaagtaaaacacaaaatcacaagttcatcacagtttaacaagtgcacttgaaggggaaggagggaaagaacaaactgtaaacaaacagatgagcagctgcaaagccctgcaagggtccatttgttaaggctattatagcacaaagctactagttcaattaaaacttctcctttcactctgccacatttactcttgagggtcttcaaaataagtgtggaaattcagtaaacactacactagaactgagttaatcctgttgacaacagagatgacaaaaaaaagccataagctgacattaatattaatttcaccaaaacagtaactttaaggacttattttttaacacagataatcaccataatcctagggggaaagatatgcagaatagacaagaaaacagaag

SEQ ID NO: 338409 - DNA, 1000 bp, Homo Sapiens; identical to SEQ ID NO: 246458

SEQ ID NO: 338410 - DNA, 1000 bp, Homo Sapiens
tttttttttttttttttaatcttctggttttaaaataatttatttcataggtctgttttaatttcatgtctcacagcatacattatttaaccaagaggtgctggacagagattgtaaaaagggaggaaacatttaggataagaaaccggctcaattccattagaatttgatcctatcttgtaaagtcttgctaggataaatttctataatacttcttttgtgcttacaaaaaaacattaacttctgaatttccaatgttgtaaataaaaaaattttacaattaggtatgcattcaattaacacacaaggcaaccaaataaattctgtcatcaacattagcataatgtgtatttcccgtcactgcactaacattaaactaaacttcaaaccacaaaaacattgtgactaacattaaaaaggcaagctgtaagatactcaaagcttataaaggacaaattgcacatggttaagatgggacatcatttgacaagggctggtgttgtgcatatggctgcttttttttataagaaggccaccggcaaacagggcaacaatgtcggcccccagccaaccacatcacaatgcaattctgatgaaacacatgaccacaaggcaaccccattagcaaacatccattttcaaaattctctaggcaaacaacacattcagtacagtgcagcatatcagcaggccaagttaaccaatcaggttccatatcttcattagtgttatatgatccatatgacctccccttcctttcacatgggctggtctgacaatatttattggcacatgaacaagcctcagcatcacagtgacttgctgttcctggagaattgtgaagtacgctttgcttatcttcaaatacttccttctcactactcaaagtgtctgtgttctcactttccgagtcattttcagtatcttgagacccctccgacatttcctcttcagactggactccaagacatttaaatcgccacattggtaagtttttaat

SEQ ID NO: 338411 - DNA, 1000 bp, Homo Sapiens
tttttttttttttttcagtgaaaaaaagggattaatttattttacaattttacaaatgataaaacaataatacccggttgctatacacaaacaataagaaaacagtgttgaacagaatgaacttgaacttgacagaataaacctcatctttcagttccacaaattctataagaaatactcagtagcaattattctgtgcagcaatgctatctctgtaaactctttttttttcctgctatttacatttgaaacacttgtgcttttgcctacacaaagaaacggtttttattaaaaggtgctacttaaatgagaaacacaaggcctggagccacaatctgaaaactgtaattcgaatacattgctagcttgaagcctttacttttcttctttattattaagatttggacatactagacccttactgtaactctacgtatgaacgacatagaattcagttataaagtagatacctcttaaagcacgttagtaactgaagtctcaaaagaacttctttattctaaagtggacttacttatctccaggggagttcacagtgcagaccctgaagatgttagcataacacaaatttagtgtatacatattacagactcagtgtgtatacagacatatacacatatataacattgtatatatgcatcacacatgtctatttgtactatataggtatatctatagcacatatataataaaatatctatttctaggtgggctttatttggattttctttcatcaaatacaaataataaccctcactcaatttttaaaacattggtatattgataatgtttgatgggaaaactttcaaacttgtagagataacaactaactatacacaactcttcccataccccttccacaattatatatactccctacaataaccacatgaaaacaactctttcatgaaccaaatatcacgttatatgcattatgtctaactggctcaattagaaataaattaatttgttcatccttttt

SEQ ID NO: 338412 - DNA, 946 bp, Homo Sapiens
tgctcaggctgccattcagggagccccacgaatgtgaggcctggccccttcctccaggcctccaggccccatctctggagactcccaggaactcacgtcgactcttgtcctccagttctactcagtccacttcatctcagcctttactgggccctcctgagtgcctgtcccctgctgggtgcgggggacaccacggaccagacctggctcaagtcatagatggggtgggcagggaaggcttcctgggggaagaggtgcctgagcacagggttaagggtggagaatgctgggccatggaaacagcagcagagagggttggaggggccatctgcaggcggatctgtgtcactagagctgatctgccgggtgggagtcctggagagggccatgggagggtcagggtgggggacaggggtgcaaacatacatggtcagacttgcgttaggatgtgcctcaggaaccaggacaggctcccactgggccaggtctgtgaggagtggcacagaggcctggggcaccacacccagtgtgggctgcagcggggccccccagagcctatagctggccgggtccccagagcagcaggccgagtgcagggagcagcgcaaggatggcggcagccggctgcagggcatgggccccgctggcgttgcacaagtcggtgtcacagcacgtgatgttcttcttgcccacgtagtagtcctgtgagtcatccacgcagttcaagctgcagcctttgctgatgacggtcaggaggccaactgcgcggatgcgcgcggtccagcactgctcccccagctgggtgcagttctccacctgcaggcagtcctcgttgctcacctgggctttgcaggagtagcacagcagggcagtgcctggctgcagggccaagcctgccatcaacagggcaagcagcacagccttcatggtcactggtgggctgtca

SEQ ID NO: 338413 - DNA, 1000 bp, Homo Sapiens
gaagagaaaccagagtttcaatttctcagagaatgtgaacaaagggaaacatgccctgcttgagaataaatataaagttcttgccgttaaatgctgggtagaacaagtagttgaattgtaaagtacagacacttttactctacccatctgagaaacaagaacaatccattcattgtacagcataacaaagtgcttgatacttaaatattttgaatgagtgatttttcagtgagggaacatatctaaataacccttacatctctctcctttgtaggaatataaagtaagagtgatactaaatatttaacagtttttacagtatgagcgctgtgaagacctgaatgggctaatgtcagttagcgaggatctttcttgtgaacccgctggtggctgtgaaggttggagctctggctgaagcccttcccacacttgctgcactcatagggcttctctccagtatgtactctctggtggatgaggagtttggaactctggctaaatcccttcccacacttgccacagtgatagggcttctctccagtgtggactctgagatggatgcgaagatccgagctctggctgaaacccttcccacactcatagcattggtaaggcttctctcctgtgtggatgcaccggtgaatgtgaaggttcgagctctgactgaagcccttcccacactcaccacacttgtagggcctctctcctgtgtgatctcgctggtggatgtgcaggtttgagcgctgactgaagctcataccacactcctcacactcatagggcttctctccagtgtggactcgctggtggatgtgcagtttggagctctgactaaagcccttcccacacttgtcacatttataaggtttttcgcctgtatggacggcatgatggatgagcagacttgagctcctggtgaagcccttcccacacttctcacacttataaggcttctcatctgtgtggactgcctgatggataagcagactcgagctccttg

SEQ ID NO: 338414 - DNA, 1000 bp, Homo Sapiens
tttttttttccaagatcatcaaagcattcatatttgttttctactaatacttttatatttttacatatgaaagattatgtttagatctttgatccatctgggatttactctggggcataaagaataatgaagggatctagtttaaaaaataaatttagctttaaaatacgatgagtatacatttctggatacaattatacaatttgctattgttttaactttctcttagaatgttcatactctgaaaaataaaatcaaatgaagctcacctgctttacaatatacatttttctaagcacacttgatatatatgtaaatatgtgtcagagtctatacatatatatgcagtattttccacaattctctggaatgttatattaaaatctgatgttattatcactattaaaatatttttccagaaagtttctatttcattttctcaatgtcgtctcactttcttggatcttgatttctttctttttacactgtattttttctcaaaaagtttcttctcaactaagctcacttcttcatggagaagggaagtctttattctgagcaggaaggagaagagatttagtataaactgataactcagagaataatttgattcttcataggttgtcacatgtgtacaatagcatctgcagaatttctgtgtactaagccaatataatgaattcttagtcagcagtgattggcctttctctttcaggactccctgaaggctgtgtccatggaaacacgttctatcagtgtcctcttcagtccagttgaactgaaaacttgaagggcttttttttccagcagttgctgttgactcgaccagtgtgctaaattgtttctgtagattcaccaccatttctctttttttatatgctactggtttgtcgacaaatgagtagtagagtggcttttcacttttccacaggtacttggcccttgcttcttcccatttttgttttttctcatcaaaagctttcttcataatttggtacca

SEQ ID NO: 338415 - DNA, 1000 bp, Homo Sapiens
ttttttttttacaaaatccaaaataattttattcacattttcagatttttgcttccacaaggtgttcagcaaacatgctaaggcgacagaatgtctagttggtcacgacatgcaacgctgaccattcaattgatgacagcagtgaccacgcccacctgagctaccagccccacagcacaaagggggtttgcgggaacacaccaaaccacacagcaaccagcaacctgaggtaggtctctttacagtacaaaaacttctacgccagtgtgagacactgattagcaagagctgcttaaagttgcagactttgaggggagagagagagagagactgtgcgacgactgcggtgagaaaggaaaacagacccacgaaatcctgagccctgccactgaactgtggaggtgtgggaataggcaaatgaaaaagtgccacctcaaaaagcagcagttggctccagggcttggaaccaacaggtcttggagctggagagctctgtgcagtggccagccataggaacctgaggcagtgggactctctgtggatagactgattcttgtttagaaacaacagcaaaaagaagaaggcaggaaagaaactccccggctcggaggaatgtctctgtgatccccattcttgatggagggagtgaaaaggggcctgggcttcgccccgctgctctcctgacagaaacagtaagtgacaccaggacagaaggcaggagccctgagaactcacggcgctctgcatggtctccagccgcccacccgtctccagccacccctggagcggccgtggggaggcggcagagggggctgtcggagggcccactattgccacacgtcttcctttggacacccagaaaacctggcaccgtgaaaccaccagctagagaagaatgaaatgctactcttcctacagtctaatagcaaaaccagatctctagtacagcaaactgtacaaaaatgatagaaaggaatatgcactgttattagcacagtgc

SEQ ID NO: 338416 - DNA, 1000 bp, Homo Sapiens; identical to SEQ ID NO: 158626

SEQ ID NO: 338417 - DNA, 1000 bp, Homo Sapiens
ctacttgttggtcatcaccaaagtggaaaaggggccattcttgtgggcgaacaaatttgggacagtatcacactccactaaaataccctcagaaaagactaaaacaaggcctgcatccataatagaagagacacggtgagccattgtcaccacggtccggtctgcaaaggctgtcattactactttttgcaaaatattctctgtggccatgtcaatggaagctgttgcctcatccataataagaatgctgcttttgcggacaaaggccctggcaaggcaaaatagctgtctctgtcccacgctaaaattctccccaccttcagtgacaaccgcatctagacctccaggtagagatttgaccatattcttcagctgagcaatttctaaggcttcccagagtctgtcatctgtgcatttgcactctggatctaaattaaatctaatggaaccactgaatagtattggatcctgcagaatgattgaaagtctagaacgtagtgtgtgcagtggtaatttggaaatgtctatcccatcaatgacaatttttccatcaaatatatcaaccattctgaagaaagccagagataacgatgatttcccactgccagtgcgaccacatatgcccaccttttgtccaggtttgatgtaagccttgacgtgcttaagaacaggtttcagattattttcatatctgacacacagatcatgtatcttgatctccccttcttgtggccaatgttctggaacttgagaaggatccattgtgccttcatagttctctgactccatagtcaggaaactgttcaccttcttcactgcacccatctggacctccaggtcagccaagttcctcacaacccaattcaaataattggttatcgtaagtgcatacagaagacccaagcctaccaatccagaattggaagacccactaatggatgctatagatgcagtgaggacaatgcaagctcccagataatccgtcctgacctccagccat

SEQ ID NO: 338418 - DNA, 1000 bp, Homo Sapiens; identical to SEQ ID NO: 158629

SEQ ID NO: 338419 - DNA, 1000 bp, Homo Sapiens
tttttttttttttttttttttttttttttttcagaatgcttatattttattagtatccaagactggggagagggatggggtgggagagatcaagaattggggagcagatgggaggcgctacctcactcaggagacacgagttcttatccaagttcaaggtgaaagaagtgagggcaggaagagaaatctccctgctagcaacagcgactcagggagaaactctgggcccatagctagctggaggcagggtgacattgctcccaccaatgggccatcttcttagctacacctttgtagctgtggtgccaggcagaggaaccacctggaaactgagctaaggcaggttccttcttccaacagaagacacagctgggcagggactgtgcagactcaacagggccaggccagctagtggccagtcagtgttcatgtctctcaccagtgcctggagggtccccagccaaggacagaactggtcagttcctgccagcagcttgagctggaatgccctgggagggtcagtagagggtggtcacttgaggagcttcacagagaggcggatgtcaacatcgcagaggaagatgtccatgaggtcatggcctgcctcctgtgctatctgggagatcacgtggcccttcggaccaatcaggagtttcacataagattctttgggcaccagaagcttctgttggataaccagctccccacctggtccttcctcccacactgctgtcttctgctgtacattgtaaggcacctcctggggcaggtgttctaggagcttctctcggataatgttggcacagatctcttctggtgtctggctagtgaggactgcactgtggtactcccagggccctggctgggcctgtgtcagaaggtattgctttagtgttttcacgtcctcctggcttagggctgacaacatgaagatctccttgaagtggggccagccaatcctctgaggatttcccacagattgtgtgtttgggtccttaac

SEQ ID NO: 338420 - DNA, 1000 bp, Homo Sapiens; identical to SEQ ID NO: 158630

SEQ ID NO: 338421 - DNA, 1000 bp, Homo Sapiens; identical to SEQ ID NO: 158631

SEQ ID NO: 338422 - DNA, 1000 bp, Homo Sapiens
ggctgtcaatgctgaacttacagtgttaaagttcatttatttttctctgtttgcttttttgttgaaaatgtagctgtcttggggtttggcccgattttacaaggaaaattattttctttcttccttttttattttaaatgagaaaaaaaaaaaccctcacaacgtgagattcctttacttctgcagcataaaagcaaatgaaggtaagaaaatctcctggtacgaaaaatttgagtaagaattctctctagaataaacaaggtccccacagatagctgaaggaaagaggaagcagttcagtctggcacccggtactctttgggaaaacaaaaagggaggcagattgcattactgctctcttctcatagaaaacggtaagtttttgtggcatggtccattgtccaagagtgtaagaaaagaagtgagttggccattcagatagctaaaatgcagtttcatctgaccaaaaacccaagattatctgcacagtctctgcagtgccaggacaatgcaggtgagagaccaggagagcagggagtggccacgctgggctgcagaagagtccacctctctccggtcgggatccactgcgggggcctctgtggtgacaaactcaaactccgtgggacacacgtcatccatgcacccactgccactccctgagccactggattcatcacttgtgtcctggaaattgacatcattgccattgtaggcgttttttagtttgttggtcatcacacggagagccataatctgctgtctgatgaaagtgtcaggccgagtgatgtccacatccacctcgggattattgatctggttggtgagcccatcattcatgatctcaggcaagtatctggctttgctgtgcccgttccagcattcctcctcgttggacgtgcccgctgtcacgctctcgtccttgcagatagtgtagggtaatgctgaccagacctttttagagagcttcaatttctcttttatgtctgtgaccagccgg

SEQ ID NO: 338423 - DNA, 1000 bp, Homo Sapiens
aactccacctgtgccttcctgggaaactaccaccagtttcaaatctcaataagatgttagtttcacaggaaatgtggagctgaacaaagaaatgatgagtatgcttggccaaactatgcagcactatattaatatttctttgctaaattttttataaaataaacaaataagccgattttttaaagtaaatataaggatatgtaattaccatctaaatgaagatttaaatttaaagagacatatatattttttgttcttttgtgcaaactgagagtatgggattctttatgaagcaattatttggaaattaaatagttatggcttccttcaaaaataaaactgcagatttaattaacgaatattaaatacagatcaatctactgataggcagtcatgttctacatatatgagtaaacatgacacttcttttagtcaactaataggaaattcaattagaaaaaaattgaattattcaggtaatatacaatattaagaatgtagaatagaactaaaagaaaaagaagtcacataatctcttattagaaataatgaaagtaaaatgagaattataatatcagtactgcatgttacatattcttctttaaaattttgtaataaacattgacagtgtttggtaggcacagggaaacaggataacgtagagtcattacagaagaaaaaaacttattgctaacattgcagtattccttttatcagaattaggtgagtattgattgtaaaagctctatcaactcttgctcttatttgatgactttgagacttttttactcttgctataaaaagaaggctactttctttccctaatatatttctaccaatgcgaataattcaggaaacaatgagagaaaagtaattcacacttaatgtgttgttacttaagagatttgacggataaaataaaatcaaattaaatcattgaaaaggcaggcttagacccccttaaaaacaccgttagttgcctaccataatttgagcactt

SEQ ID NO: 338424 - DNA, 1000 bp, Homo Sapiens; identical to SEQ ID NO: 158632

SEQ ID NO: 338425 - DNA, 1000 bp, Homo Sapiens
caaacacagattgcttttattttagctaagttaatgtttcagttccatatatatttttgaatttccatcaacgtcaaacaccatttttttctttcttcttaaaaaaaaaaaaagatttacaagcacttttacggcactcaagaaagtaggctgaaggttcataataataattttccttttaaaaaacatccatcagaccaaaataaaatcattttaattaactccttcctgagtaactaaaaccttggaatgtgctgaaaggttataataaataagacagtcaaagatcaactagcttaaaaggtattttttaaattaaactatgtaaaatgtacaatatgtttcatgaagtacaaactgttgggcccagggccaaaaaaatgttgtcatgtttgccaaataaactgaagtaccttgacttttaggacctagagggtgttggctgggacaaaataacattaaggccctgtaagtaaatccgtcagcatctttttttgtgaagttataatgatcactgctgaaaagaaatgcctttgaacacacaggtaaaagtacccagataaacttgcagtaagaggatgaatgtttttgaacgaccaattgtcccaatgttctgacaagagcagagaaaacacagccaactcaactttattttcagattgtgagattgcacagtgtgtaaacttatcatcattctttatatggaatttcatagaaatgactcacagggtaccaggcagcagttcttgtactggttttgaatatgattgatagctgttctccaggttgcttctgaaagtatgcctaatggtagggccctggtctctctgaacaggacaaaggatatttcctcctctaagaacatttcccttcatcacttctctgcccccgtcctctgaggcagaaagaaggcccatgagcggccaagtgctggactctgtgcctctgtggtccccgccttccctggactcctgtgggctgcagccttcttaacacacat

SEQ ID NO: 338426 - DNA, 1000 bp, Homo Sapiens
tttttttttttttttttttccaacagcagatagattctttatgttcaagacagcaaattcagatacaaaaacccaccgccatcgtccctccctccctcctgctctgggccagggatgggcctggaaggagagatgggaggtggggaggaggttgcggggttcacagcagactcgtgtcaaatgcggaggtaacaggctccacagggagggggctcctctcaggaggggtgagggcattattgcatttgctggggggaaggacaaccctctcccctgtattccctgcgtcaggaaactaggaaggtcatgacccccaaacagaacccaaggccccagggagacagagggaccagtttggcagctgatggtggaaagtggtggaggcgggggtggccgcccaatttggctgatccctcccctccctgtgcctgacccagctgaggtaggtggggaacagggcacaggggggccggggaccccggccagactgggaaccagggaggggatggtaccgattggagcggggcagggggcctggccccacctcccctcaccatcgtccttgggctgctgagctaggctcaggctggaggctcgggtcctgacgtcagtgtccctgctgggggcccccaccaggttgcgcccgggtcatcatcgcagggtccgggggcagtcctagtagcggccgaccttggcgtccccaatggcgccccagacgtcaaagacgaactcgtcagggaaggcaaagtcacccagccgttcgtccagggcctcggccagctcatccgggttccttttgtcctttcccagctccaccatggtggccgccagctccgtgtccctgatacccatgtaactctccagcaggtcatccaccttctcaatggccttctcttcaaaggcagagggcagatcctccaccgtggcggggccccgggatcggagccgcagggtccctcggccagtgcccagttgtgggccagagccagggcggccaccc

SEQ ID NO: 338427 - DNA, 1000 bp, Homo Sapiens; identical to SEQ ID NO: 158633

SEQ ID NO: 338428 - DNA, 1000 bp, Homo Sapiens
gacctcatgcagccccaaaggggcaaaaagagactttaattaggggagggaggatccaccagaatcagaaaagggacagctagcgtgggagcagaggagccagaacaggcaggaggagggcccggccaggaagctctggaggactcacctcgccacctctggcacaggcactggcactgacggacaaggcgaaacagcggcccctctcaactgggagggcacccaatggcccctgtagccagaggttgcccggcttttgggccccaggtcctaggcatgactggtggtcaccaatttggcccttgtccccaaccagtgctggggggccatctttaggcagaactcaggaagctggcagagagttcccaacacttatactggggccaaggaggcttgggaataaaagggcaagggagaaactggagtctgaaacctccctccctccccacctggggtggcataggagagaaaaaataagtcgccttctggctccaggcccgcccagacccacagcaaccaataacgtataatcactgggaccagtcacagccactggaggtggaggtttaaaaaaaaaaaaaaaaaaaaagacaaaaaggttacagtatcctacaagcacagagtttaagtttcaagacgttaaaaaaaatctgtcccggcccaggggactgaacatcagaagccagcctgaccaggcacgtgtggccttggggcaggtccactgctgctttcttgcccagctagcaagcacaccacccacctcccgcatcaaatgcccaccccaacccaactccctgccgccgccgcgctgctcggggagtgactccaggacgccttcgtggagacatgggtagtctgagggggaaggccacgagatccagccagatggtttaaaaattcttaaggaactcttcagccacaatgcgggcacgggcattgactgacagcttcatctcactgatctccttgtcaatctcctccatgaagtggatcacaaagt

SEQ ID NO: 338429 - DNA, 912 bp, Homo Sapiens
tttttttttttttttttttttttttttttggaatgttagaaatttctttattattacttattcttattaagcgccagctttaatgctgcagaaaatttcaaatcacccttgataacccactttcttttctcccacccaaattcttgatcaagagtttttcaagtaaagacatgctcttctctcttctgtataaaactttacgaaataaaggcaaaagattgtgtacatcttgctggaaaatgctgcccagggctctggagacggtggctgcccgggctcccttcactgtccaggtcctgaaagactcttgttcatgaactgtctcttcacaaagcaagtccaccacttgctgggtttatcattctgagggtcgaaaactttctcacaaagtctcagtccagtctcttgccttagctgttgtaaataggctctcatcacttcatcttcctgtttgtttgcaggtttggcataaattgcgttaagtggaaaaccaggctctccaggaatgggaaaattagtgattcccagcgtatacatttctttctcaccttggcttttggaattgcacttttgcagtttcttcagacattcagaaatgtagagagttatatatatcaaggtcctatcagcttcattcttaatttcatagtttttgaagaagacattggccttgaagtaatagatggcttcatccacaatatctgtatcttttgtctctctgggggcaggtcctttgaattgacttctgataggcaacagtgccatgtttccgatgagtttggtatcaggatccatgagagaagagtggtaagccggcatcttggcggcgcccgggtttcaacccagaggagcaggatccaggtacagcggagcgcttccggtctggcagcctgggcgaggtaggcggaagcg

SEQ ID NO: 338430 - DNA, 1000 bp, Homo Sapiens
ttttttttttttttttttttttacacagttgcattttattacctccacattttgaagcagttcatgaccagcatagtgctttgggggcattttttttttttttcaataaatgaaagcatttaagaaaaaggcacgtattccttgaataggtaagaaaagctccccatctgtcccctccctttttgagggagcagcccctatgggaactcgtattggtaccccagaaacattcagcaaagcaaccattagcctccctgacccctctccccgcttccccagcagctaggatgaaggcaacatattcctcacaggtcatttgatcttgaggtccttcaaggctgactccaagctcttcacatcccagatactcatgccgccatccatgccagtggtgcagaactgcgagcacttggccttgccgccgctgagcaccgagatctggctgacgctgttcttgtgcagcgagtctaggcccgcgcccgcagccgtgccaccctcggagctcgccttcttgtccaggttctggaagcgctcgcgggccgtcaagccacgctgcgagctctgcttaggaacgtccagccgcccgccgaagctcagcatccccgcggcggcgtcataggtgaacagcaccgggaagcagtcgtggcccgctgccaccaggctgttgtctgtgatgaaggtcagcgccagcagtggtagtgtttcagaggccagagtcgcgacggccatcttcttgtcggcatcagccaggcagacggtgctgtcgtggcttacccaggccacgcggctcccgctggctgagaaacagacgccatgtacccagccgcagctactgctggattcgaacatcagttccccaaagggcatcttggagccccacggggtgggtgccggccgttcctccacctccttgatgtaggctgaaaagatccgacacttgaagtcacaggagccggcagccagcagcacattgttggggtgccagtccaggctgaggacg

SEQ ID NO: 338431 - DNA, 1000 bp, Homo Sapiens; identical to SEQ ID NO: 158634

SEQ ID NO: 338432 - DNA, 1000 bp, Homo Sapiens
tttttttttttttttattattaaaaaggtttaattggcttatggttctgcaggatgtacaggaagcatggtgctggcatctgctcagcttccagggaggcctcaggaagcttatgaccatggcaaaaggtgaagggggatcaggcatgtcacatggtgaaagcaggagcaagaagggggcagggggaggtgccacacaattttaaatgaccgtatcttgcaataattcaccatcaagaaaacagcaccaagccatgaaatacccgtccccatgatccaaacacctcgtagcaggccccacctccagcactggggattacagttcaacatgagatttggctggggacaaatattcaaactatatcgcctccttatgcagctgagggaaacagacttggggtcactaaggggaggagctgggattcagggtggagccagtgctcatggcataggctatgggtgctaaggtcgtttgtctgagcctcatctctaaggcagggaggacaagttgccagcacgatgacatgaaaccatccacatgaacgtcctgagcatggcatctgccacggcgagctcagtaaagatcagctccaagtcacagacccctcttccagaaaccaggtaccagtcttccatagaaaataggatttattttcacatttaaggtgaacacaaatccatgttccagaaatgttttatgcataacacatcatgagtagattgaatttctttaacacacagaaaaatcaaagcctaccaggaaatgcttccctccggagcacaggagcttacaggccacttctgttagcaacacaggaattcacattgtctaggcacagctcaagtgaggtttgttcccaggttcaactgctcctacccccatgggccctcctcaaaaacgacagcagcaaaccaacaggcttcacagtaaccaggaggaaagatctcagcgggggaaccttcacaaaagccctgagttgtgtttcaaaagccaagctctg

SEQ ID NO: 338433 - DNA, 1000 bp, Homo Sapiens
tttttttttttttttttttttttttttttttttttttcctggaaaggttttttaaacccacttttattaattaattgtaagtaatacaaatattccaaaaatataaacagacacttaatggcgtcctgcatttcaagttttggaatacaacaaatttatcaaaccatgaatctgtaagcaaggtagtcagaatcccatagcccagtcacagtgggaagcagatcccctaccctccaaatggcatcttgaagggggaaagcggcacgaaatggaacatgataagcaaaaaagctcacgaggcccaaagaggagggtccgctccatgggcaggccctacaacgttaaaagaatggggcagctggcccgacctctggcctcctcttccctggctgaatgtaaatatttaccagcatttagaaaaaaggagaaaaaagacagaactaaacccgtttaggaaaaagggaccgagggacagcagtggttaagtaatccactgaggacctgaaggggaaaatggacttacctttctcatatacttggcctggctaggacactgggtgccagacagccttctgaggggattttctttctaaatgaggcctcaggaacaggtaggggcagcagaatagaatagcatccatttcccagagaaagactgcctttacatttcccatgcttttagcacaaagcagcgtctgggccactgttaccagaggtgagtttatacatttacaaaatgcttaaaatctttgggaagcaagaggaagctaaacagaaggtcccatgttaactgaaggcaaattcactcaacctctctagtaagggacccatgggcctacagagtgttccctctacaatgtgcagagtggaaacccttacctgacccttttccaaactggtcctgtgtccaaagctccccctatgagagggacacgaacatcaggcttttgatttagaagcccaatcagagagacacactgtgtccctgaagaggcacctt

SEQ ID NO: 338434 - DNA, 1000 bp, Homo Sapiens
ttttttttttttttcaataaaaaatgtgaacaataatatctttaatataactgtttttgtgtgcatagaaatcatataagtaaataaaaaaaaacaacaacatgagattacataggtggttataatacaaaagtgagaaaaaagctagtgtctgagtattgcatcctggatataattcctgatatatggtaaagcataaaagagacctatttcttcaggagagtagctgacccacctcagggccatgactgctcttctctttccccacagccttagtactttttgccaaaaggcccagatttgagtaaaggggaacgccgtgagcgtaggatccgggcataagggctgcagtctgttgagctttggcaggttggtgttcggggaagtaaatttcgaaggaatggtttcttccctggtggttgttggtttggttgctgattttcctggttggtaccaaggcgctttttggcagaaacctggccttggagtttcaacacagtatgatactgctcagcaatacatgctgccttcttccgaaggtccagtttcactagcaccatgttgttctgcagttcagccagagtctggtcctgtttgattaagatgtcatcacaagtggtcaaggcttgacgaagttttcctgccccagtgctgtggcaacaagctctctctgctgattggagagactcaccaagtttctgaagctctgtccgcaacagccttatattcttctggccctcttctaacttcttgtccacatcaatggtgaagggcttggctgagggtggtggttctaacattttctgatacttatgcaactcttcagtggtagagtttagctctgctttgcactgctgtaatttagctttaacctcctgaagctgctgggtggaggcagaagctgccaacctttgtgaccgccgtagggccaattcagaccctgattgctgatgggccactgactgttgtctggcttcctgcaagagagcttctagctctt

SEQ ID NO: 338435 - DNA, 1000 bp, Homo Sapiens
tcacatatatggatactggctgagttttgttggactcagtggaaatccagtatatgcaggtgatgctgcaatgtaagaatgtggtgggaagattggtttgtactgagtctgatgaatggttggggatggtaacagacggggatttaagcccactgggacttggtgaactatgccactgggatgggagatattataagttggatgctgtaacataggtcttgaggtacacggagaggctaacaggtgggccactggtgcagcactactgagggtggctgatgatgggtatggaagtagagtaggctgtcctccgaggtgtgtatttccagccaggtgggcatgcactgctgtgtgattgggacttccatgagaaagagtgaatggattactggtaacactagtaggaatataagcttgctgtcttctgtgcccaaagtttccattccactcttgatgcccagatccaaagtgctgaacctgactgaagttcaaatgctgctgctggaatgctgatgtcaatttttgctgacgagtacccactgcagaaggctggtttaatcttccaggggcagatcgtccttttattaatggctggcatatagaatctgtgtttgccatatgctcatcggcatttaagccattttctagttccactggtggcaccacaacagaacagacagctggcttggtttctgtgtcagcagaggataccaattctgtgttttcatgagtgtcctccacaaaagtgctctctgcaaatggactgtcatgcccggaagagtcagatgtcggagagccatccaccgtatcacaactactttcttgctcttcatctgacatactattcggtctcttgcagggggatgggctggactgccctgaggagctggtactcagagtactatcaggactacttaatgaacacatccgatcaatattcaaagtgctctggcaagcttcacaatctagactacctttacattctctgagtgaatgtctc

SEQ ID NO: 338436 - DNA, 1000 bp, Homo Sapiens
ttttttttttttttttttgattgtataaataatttatttctgttcacagcatcatatatgcattataaaaggctatggaaacaaaagagaaggatgatgagacagagaattacagcagtagaaaggaaaacagaaaccagggcacacagttccaacaccagaacagagaatttgggaagataattgctctgaaacagaactggcctccctgtgtctattagaaaacatttccaaagctcacggagggaggccaacttcccctatgggaaacccattcactcgccaaagggcagaaggcatcataaatcacccattgatacattggtggggggctccctgtccccctggtgaccactccaaggtgatttgatctgtgcttcctctgttgggtcagagacgaaacgggctattattaggtcaaacattacagaaatcaactgagactcttaactagtagttgatacaccacagggctttactttactgcacaattactaacagttgattgcacccttaagtattgattatgcaaaaaacaaaatcatctcgcatcagttttaaagcatgacagggtttgaacagtgatcttgaacctaagtattgttatcatgagaaggttacagtatttggcatctgcaatgtcacaaaataaatatattattctctcaatagtgtggaactaccaaaatgtcaaagtgcttaagaaattgtcgcatgtgaagaaaataaagaaagatggattttttttttaataattctatacagaatcttcagatgatgggaccagcccatttagaaatcagtggatatgctgtcgatatgtaaactgaaatcttgcaggcttttcaacactgcttagctagactttctctactgagtttctacaaaaagaccagcattggaggggtaccaaatacaccgacaaaagagaaaaagcagatgggctgctaggtttctgcttttaaaaaatttcatataagaattgggtttcaagcaggaa

SEQ ID NO: 338437 - DNA, 1000 bp, Homo Sapiens
ttttttttttttttttttttttttttttttttttttttttttttttttttttttttttttttttttttttttttgtagggatcctaatgtcttttatcatataaatattacacaaagaaaacttacattaggtatcaaaaaactttacaatctgtacatttgtttttttcttgcatttctatattatacattttgagacagaaattcacaacggtcagtaaaaaggtaagtcagcaaagaaaatgagaagtgaccctgctgttaatacaacaagatttgtccttgttttggcagataaatacctggccaaactaaagtcgtgtgagatgcagaaatttacactaggcttgataagccaaagcctttttttttttttttccagatttctgtgatcccactagccccatgttgctcaacacaaatactattaacttgtatactatacctctttggcccttgctggactgtaaaaacctgtgactaaactatttcctcttatccatttcagtgataaattctgcagtacttgatactgtttagccattgctaatttgactaattaagtggactgtgacaccttttgaatccctatagattatttatataaaaactaactggggatctttacttcgaatggagaggaggaagaatgaaaaaaattgtgttccattactgttttaaaaaattagagtacaccatctttggtctatatcaatcaaaggaaaacaagaatagtgaagaatatgaatttttagagtttgtcctaactcatgcttgtcctattaaaaagaaagtaacaaagtgttactataagtttatatgccaggtagtgggcttaagcaggcctgctttgggtatttctgagtttaaatttggaaaacggtaaatacgtgtgtaaaactattctttataatgtaatgaaacactaactacaagctagttctatatcactaaaactcagtgcaaggaggaactcaaatgggaactgatctttcatcaa

SEQ ID NO: 338438 - DNA, 1000 bp, Homo Sapiens; identical to SEQ ID NO: 158638

SEQ ID NO: 338439 - DNA, 1000 bp, Homo Sapiens; identical to SEQ ID NO: 158639

SEQ ID NO: 338440 - DNA, 963 bp, Homo Sapiens
ttttttttttttttttttttttttttttttttttttttttttttttttttttttttttggaattttctgagagatctttattctttattcaggatgtgggatcgatcagcactgccagctgggccttggttctagtggcttgctatggtctcctcaatccagtcgatgaaggcggagactcgagtgaacaccgtgggcttccagatgaagttgcagccaaagccagaaacaaagctggtcacaccgtggacctgccagccaccatcctctgtggggcagttgaggggtcctccagagtcaccgttgcagccggagcggatgtaccctccagcacacaccatggttttcttcacggtggaaccccaccagttccacctggagcagtgcttatagtccaccacgggcagccgggcctgctgcagcttgtctgggagtggcccattggtatagagacggccccagccggtgatgtagcagggtgtcttgttgggaaggatgtcaccagcgggagggagtgaggcgagctggacggcatctcccagctgggcgctgcgtgagagcttgatgagggcgatgtcattgccacaggccacacacgagcggttccagagtggatgcacaaacagctcctcagagttgatggggatcacctgctcggggccctccttcacagcaaggttgtactcacccaacaccacctggtaggtcagatccctcgagatgcagtggccggcagtcacaacccaatcgggggcgatgaggctaccgccacacgtgtggtagaagcttccacttttctcatactgcagggaaacctgccagggccagctgtaggggaccgcatcctcaccatggacaacgcggctggaagagtgagaggaaggtgggccatagcctgaggcaacggccacaaggaggagggaactgagcagccggagcatcatgagttttgtgatgatagga

SEQ ID NO: 338441 - DNA, 1000 bp, Homo Sapiens; identical to SEQ ID NO: 246403

SEQ ID NO: 338442 - DNA, 1000 bp, Homo Sapiens; identical to SEQ ID NO: 158642

SEQ ID NO: 338443 - DNA, 1000 bp, Homo Sapiens
tcttaactgcaaatttatttcattgattttaacatttttgattttaacatataaatacaagaaaattaaataaatcagaaaagaaatattgcaaagacaagtcagcactcacagaaatgtgtattattactatggttagtctgagatccaacattcacttgaaatatatgcaagagaaccttagtgaaagacttaactaaaaggggtttgaaatgttcctaataaggatgtacttgaggcactgctcaagcagatgtaggtaggaagcaagatagaccctgtatataactaggagcaatcaaggctcgatacatgtagcaacaatagcagtgtaggacagttccctgttcccaatagctactccccttgtcactgtgcattcttcaagacacatttaaaaaacaattatagctctggctgggccagagtgtaccagtcataacaatcaacaatgtaccatgcagttgccttttaaagaacggcaatatgatttttttccatatatatgtacctttttaagagaaggaatcctagtctactctcctgttcctaaaggctctggggatttgagaagcggcagtgtatgtacctcatctacgttcacaattttcctgacacatggtctggatgacagttcatccctctctgtggccaaggtataaagctaaacatcttggtgcagattctataatctgactactggggatgcggtcaggggatgggtattcatattggatgctgtgtttggctgtacaggtcgtgcacccaagagggtgagtggggctaaaatatggtctctcactctgtttgtcaaaccatgacccatagggctgtgtctgcccagtgggggcatcttttcctaacttgctcaaaggcactgtatgagctaactgtggcactgtctgcttacattttctcagtctggctgggatcattatttcttgatttcactgaggtttctgtatttcacatcctatatcatctccaaaaggagctttag

SEQ ID NO: 338444 - DNA, 1000 bp, Homo Sapiens; identical to SEQ ID NO: 158643

SEQ ID NO: 338445 - DNA, 1000 bp, Homo Sapiens; identical to SEQ ID NO: 158644

SEQ ID NO: 338446 - DNA, 1000 bp, Homo Sapiens
ttgctttctaaaagctgtgcatgtgccttggtctcttaaaaagacagtgcccaaagtggaacctatgtgcaaacaacaaattaacgacacagagtagctcaagcagccattttgctcccaagtcgtctgaagaactttgccagattaagccaggccccagagtgcttacatccacttgcatttcttcttttcatcaaataagacttttacatgcaagagttgtttctgagcttcttccagccctcgttctctttctagtttatttagaatctcatcaaaatattttacgatgtatttgtaaatttctgtcaaggccacttcttcattaaattcattttcatgtttcttagattcctgagttaaaaattcttccatttctgaggatgacaatggaggcaaatccctgattgctttgtaataagattttacttcttctttgtaggttgggatatccttggcatagagaagcttattagttggtgcttccttccctagttgctgctctgtgagagaaaatgcatccatgaatgcctgggcaatcactgacaaacagccgtctatatgtggtgtcttcttaatgtcaaagacaaactgagggttcttcaggatgtttacccagaagcgaagaggaaggctgtttgttttccaaatatgtacgacgtcaggatctgtgatttttttgttttcagcctgggcgtccaaaaagtcaaaaaagtattttatagcaaatggagctctgctgttgggtaaactccaaatgcttctaaaaagtttttcaagcacagaatgaattgccaccttggtcgacagcagctttgtcagatacatttcttttactttgaacttgtgcttccctcgatgtctctttccttgcacatcttggaatgcttccgaatctggtaaaatcaaatggcagtggtcatccgagtactccacatctgaagtaaaatttgctatcttcttaaagacttttatagtggatccatttgatatctcatag

SEQ ID NO: 338447 - DNA, 1000 bp, Homo Sapiens
ttttttttttttttttttttttttttttttaactggtgaagtttttattaaatccacagaagtaaaaaccatatcgtgaggaactgggggatggggccaccagggagtgggagtcaggccaccaggggagtggggatggggtgacaggacagagaacagagccaggctgggctggccatgggggctccagcctcaggggccatcaccagggccaccagacagctcctgggaactcaggccagcaccaggcaggctcatcggcgggggctccaccagcacagcagagaacttggtgtcaccgaaggcctcgttcatgcgcgtctcgaagaagcgctgcaggccgatgatggactgcacgtctgccttgtcctcagttaacttgttgaattgcttgaacatgcggcccacatcctgggcaaactcctgtggggagctgtagggaggtgacaacttctcctggaggcgggcacggatcagggtcagatccagggtgccaccgggctggtccagggagaaggtggagtcggtagccagctgatgcagggggcggcagggttcgtgacagaatagggccagcagtacacgctcacatttccgctggttggctggtgagagcttggccaccacgccagtgctgtctgcaccatccaggctgaggctgccatcctcctccttcaggtcagggagcacatggcagagtgagcagctccactcctcccctggtacatcctgcagggccggcaggtgacagtccaggtggaaacaaaactcacactggttgcacataaccagatcgcctggcttctggcagacacggcaaatggtggcactgtcatccagggttcccgggccaccacctggggctgaggtaccctcaggagccaccacctccagccctgagctggtgctgccactaggtgaggccaggcggggaccctcagcaccaggaccctccgcaagagccataagcacaggtttggtctcagggccctcagtggca

SEQ ID NO: 338448 - DNA, 1000 bp, Homo Sapiens
cactgcactccagcctgggtgacagagcgagactccatctcaaaaaacaacaacaacaaaaaaaaaacaaaagaaaaaaagtggcacaataaattaacaaatagcatgatcatcactttcacatacgtatttataaaatacagggtagaattattaaagttctctgttagtggcttgcatctcctgttccaaacatttccatattaaaataaagatttatagttcaaaaagtacattgtgttaaccaaaacatattatgctttatactttaaaacagcacattagcaaacccatttatcacacacatgttcagaggtgtattgcctgggaagaaaaaaacaaaatataattcccaattatggtttaattgtactctgtgtagtatatataatgccttctgctttaattcgctccaatattggtccatagatctcctttgaaaagggccccattaggcctttggctccaatttcaccatcaagcaacattttggctgccatggcggtgggtaaccccacggttttagccatggctgaaaagccattgatgtccccataagccacaagatcaatcgttttatgttctaaatgtccagaaggatgtctgattccaaagctgtctctcatcacaatcatatctttttcttcaggaccataggaaagcttcatgaccaaatgcttggagagggcatccagaatggactctgcctgaggaacttgttcatccccaagtaagcccaaccattcagcagcctccaactgggtattgtctcctcctagtttcttaagaacagcttccttcaacacatcatgctcagaggagggtgaaatcccaactaggtcacagaggagttgtttccaggtgagagggttggcctcaggtctaaaggcaggaagcgcttctctgtttataagacctaattttacaaatccattcaaagctttcatatatcccttatatctcagtgtcccccgcaacaaagtgtgagcagaagaaatgc

SEQ ID NO: 338449 - DNA, 1000 bp, Homo Sapiens
tgaaaaactgaacaaacagaagtgattttatctaatacagttccaaggtagaaaaagtggagcaggcagggccttgcacccctctccacccccccatggggggggtggtggtagcggcacatacacaatcatagtaaattggcagaagaaaaacacaatagattcctggctagatggggagagataaggcaatgtgcatgggggaatcagaggggagatgtgagcccctctgctcctcccacaagagtttcccctttgggccgggcacggtggctcacgcctgtaatcccagcactttgggaggcggaggcgggtggatcacttgcggtcaggagttcgagaccagcctggccaacgtggtgaaatcccgtttctactgaaaatacaaaaattagctgggcatggtggcgtgcctgtattcccagctacttgggaggctgaggcaggaaaatcacttgaacccaggaggtggaggttgcggtgagctgagatcccgccactgcattccagcgtgggtgacaaagcaagacgccttctccaaaaaaaagtttcccctttggccccaaatgaagacttggctggcagcagaggcacagctggaagcatcgatcttccacctccctggcttttccattctctgctctggggcaaaggagtgctgtgaaaagggagacgagtagtttctgcaccagtcccgcacaggccaccagggaaatggattattccatcttctttaacttctctttccttggcaccattgctttgtgaatataaggcaatatgaatagtaggctcaggaagaagatgtggccaaggaaatagatggatttatacaccttaagccatttgtcccacgtgaagaggcagaaggcagtcatggagtaacccatgaagagccagtggatggtctgttgcaccaaatagtagaagggctggaggacagtaatggcggccagcttgctcagggtggggctctcttgaatgagcctggcagcctgtc

SEQ ID NO: 338450 - DNA, 1000 bp, Homo Sapiens
aaatgaggagatttaatgtctttacattatacatttcaaaggaacaaaacaccctttatgaattttctcatggagatagcatttacatcacagagctgttgtgaaaataaaataagaatgtacagcacacctggaatataaaaaacatcccaataacttacttggagccccgcagccatccatccctcacatataaatacaatgaaccagatgaagatccgtgtccgtgtccatgacagcaatccattcagaagatcaaagataaatagtctaatacaccaatttctgacatttgcttagcactgcaggactcatgaagagctgccactcatattatctcatttaatccctacaacaaaaaccaaggctcaaggaggtgagtccttgcagaaagaacagtaacagactccacaggtttgcaaaacagccatatgacagagggctgaggaagcctatgatagtaggctgaggaagcacagctgaactgcagctatgagactgttctagcagcacgactgtggcctgaaggcacattcttcctccaggtaaggcaagggagctctcatggtgactgggcccctcctgggcaatggcaatgccactggagaaacagctggaaaccatatgctacagggatgtcttttatttgtatattgatatttcttcacagaaaattaagcaagtggctattctgtcctggattaatccatttggacttggtcccattggtgtccgtggcagcttctgctttgtctgtaggcactggggccttatcttgtgatggttatcacttgagggtcttgctaaggttggagaaaccaatgccaacacaggtcatcagcactttatccccacccttgagttcttcaccacatggcttggtttcaattttaaacataatctggaaaaagctcttcaaatgccgcaaaaattctatcgtgtagggagagagagggcctagcaggactttggaaacatcctgctgtccaagggtcatgag

SEQ ID NO: 338451 - DNA, 1000 bp, Homo Sapiens; identical to SEQ ID NO: 158647

SEQ ID NO: 338452 - DNA, 1000 bp, Homo Sapiens
gagtcttaatttcagagttttattgtattgcactaaaggaacagcaggatggttatacaattttctctcattcagttttgaaaatctgtagtacctgcaaattcttaagaatacctttaccaccagattagaacagtaagcataataaccaatttcttaataagtaatgtcttacaaataaaaacacatttaaaatagctttaaatgcattcttcacaagtaattcagcatatatttttatatcatgtttacttatgcttaagaattaaagcaagtatatttattactctgatggaaatatgggaaatctctcattcatgcaatatacagggataatattcaagcgaagggaaaattcccgctttttatttttgtaaatgtatccatatataatcatcgacatgacagatgaggaaacccatgaagtttcccactagtcagatatacattttcacttcatcagaagcacctgatatctacagctaatttataattagatactgtttcaatgaaaccaaaatgagccctacaagttcctataaacaaaagcttccaatgtactaggacagtcagtaattaatgcatcattcagaggattatggctgttccttaagaagtgcaagttcaaacctgtcaacaccagaggtaatcattttatattaatttatacgtaataccatttaaaatctttatctgagtataacatatgaaaacagtctttccacaagcaaaaatgtggaaacatttaaaaaataaggagtcattttttaaagtaactgatcagattccacaggctactcttggacaggatcttgctggatagaatcccttcatttggtggctttttgcatgcacttaactggaccaattcttctgtgtgttgttctaagagctcaccaaaacatagatcatgccatataggtagtaaaaaaatgctagaagataaaaagctaatttgcaccatccttccttctgacaatatgctagaatatctgcattc

SEQ ID NO: 338453 - DNA, 1000 bp, Homo Sapiens; identical to SEQ ID NO: 158648

SEQ ID NO: 338454 - DNA, 1000 bp, Homo Sapiens; identical to SEQ ID NO: 158649

SEQ ID NO: 338455 - DNA, 1000 bp, Homo Sapiens
ttttttttttttttttttttgaattgcaaaatctggtttaattaagatctggggaggggagcacatagtgaaaatacatatgcacaggaaccaaatcaatgctagacaatgtattagtttacaatataataggataactacaagtttgaaggctcaaattgagtccatcagctgtaaatacaattttatatttggctcaagtggctgttgaatatcaagtggtgccgagtccctccagagcacctactgaccccctcagccttggaaggagtttcaccacagtctcagaagaaatcccagtcgtgcctttaactcttttggcccttgggagtcattgcaaccccaatacaaatgccggcccagggatttccagtggccacaagttattgcacagagaggtctgttctaagccagactcttacagctaaggaggtgtgagattagcccttaaatactggtctagcattagcatggtctataaaagcatgttaagaaatagctcctcagtgattatgtaccagctactagttatcctactaagagaaaaggcaacatggcagcttcacatttcacatgaaagactagcattaactgggcctggcgtgcgggcttaactttgacataacactagcgattattttagacccaggaaaaaatgatttcataccagtcttttcttcacataagatttgtgtagcattaaaattatgggttactgaataagccatgaaggcaaaaatgtggaactctccttgccaaaacagaaacaaacatccctgttttgactcctgtccagtttccaaaacaaaacaacaaaacatacatacacctttgttattgcacatctttcacacaaacttgtgtatgtataatatacatatatatttttaaatatgctacacataaaaaaagactatggcactttacagaatatatgtttaacaaagatcattacaccacagatgtttgaaaactatacaaaaacccttatacaattaat

SEQ ID NO: 338456 - DNA, 1000 bp, Homo Sapiens
ttttttttttttttttttttttttttttccagttacaggtattttattgagcagagacagtgaagttccttatgctgttatttcaaaagtgtttcctggtttctttttaatgaatgtcttaaaatacaagcaatcaggaccctttaaataaggcagtatgttcacaaatcaaaatagctttctgctggcatcagttgattcaacatcaacatgcagtgtccagaatgaataagcagttctttaatggttatttaaatatattccagaagagcgtttataattcatttacaagtgcagtattgcgctagtaaatgttacttgacctcttgtataaataatgccgattaagaattagtcctggaatagttttcgaatttctaactctgtagatctaaaacacaattgtaaatggtataaagatgtaagaatcatattgtgataaagtcaatctcaaaaatagagaatccagacccttcccagataatttaagaactgagttttcctcaacttaaacatgatggccacacagaaaacagtaaagacacttttcgatgtgatacaactgtataaaactcgagaatatgagtatttaggtgaccaatgtatagacattaatagaattttaaaaacacatttaaatctgaagcagaaaaaaaaagacaatttacaaagaattattgagctctaatcatcatcagagtctgaatcatatttctttcctcggatagttttcttttccagctttgtgaagtttgttccaaatttcttttggttctgaaatggtggctccattaaatttccactgtaattaagaatgtcagaagaaccgagcctccattctaaagtttctgtggtgaagtcatctgtatttcctaggtcagtaaacccaacaacataatcttgtgttttcccatcttttagcagtgctagtgtgggaatgactttgatatgcagtctctcacaaaggaaaggtgctttttccacattcagcttcaaaaat

SEQ ID NO: 338457 - DNA, 1000 bp, Homo Sapiens
ttttttttttttttttttttagagagttgagtaaaaggtttattattagtgcagtcaacaccatggaacagcacatacaacacaaccagcaacctgcagagacactagtgcaaagggtagggaagcctttcactgagcttcctggctccatctgagggtaaggacaggacagtatgagccttggttaaggcaggtaggggaaaggggagtggaagaaatgtagtaaccagagtaagtatagcagcgttttcaaattcctgagcacaatgtcccagagctggaaccctactcccctcaagctttccaccccaatcccagtggagccatgatccaactacccagacctgcagcaagctagcctggaataaaattctgagaggaagccattacatggtggggaggagcctttctatctccaaccacactcccacctccatattaaaataatcacacctattatctctccccttctcttactctgccagtcactctagggatcaaggtataccccaggtaacctgaaatggaactgaagtccccaggggggtgtgggtgagacacggcacagcctgtacttagagataaaatttctgatttgcatggtgaagcttagaacccagctatacagctccaaggaaacttggggaagggggagttgccttcaaaatgaatactctaaatccagagttttatgataaggccctggaagggctaggaggaaatttttccagagggcacaggcatcgatgctggactgtcatatccttcacaggaagagaggaagctcctcatttcagttggggttacagaggtttggggcagatatcgtaagttcagccgaggactcccttggctcttcctatattaaagccaaaggttgtgctgaaaaggaaaaaatataaaacacacccccatccctgtcccaccctatccagaacccccacaataggaacatcaaaagaaaagtttcaagtttgatttttttttcttttttcctttc

SEQ ID NO: 338458 - DNA, 1000 bp, Homo Sapiens
ttttttttttttttttttttttttttttttttttttttttttttttttttcaagctgcaggaactaaattttattcaaaaattgtggttttacattatatacacagaaatttaatataaaatgacaatataaaaagttaaaagagaaagcatacagccagaaggtacaaagaaagttgaagagattaaaatggtacgatatgtaacatacaggagtttttaagctgatgctggcaatttacaaggaaaggactccaacgtttgccccattttttttcatttaccaatgcagcacgctatagaaaggtcagcttgtaccaaagcttacatttgtaaataactataaactgcaatattttacaggaaaaaagaaatagcatttttacacatttttaaataatagcttgcatacttttttttttgccgaaagtggcatttttcagcatccagagggtttgggcatagtggcgagtggggtatctgttgttgttgttttttgttttagacatgtagaggtgtggcttccgaaccccgtgagtcctagacagctttctatcttcccacagctgcatgcatgtttcctcacaaaccagttctgcatataaaagctcattttttaattattaaataagttttgtgtctgacacagcttttgatctgaatgaaatgcctttaagcctttttttcttcttttttttttttcaagtgaaaggcacagaaatgcaattacagtcctcaaagggttaaatttgacactaccaggttctatgacctttattgtcatggcaacttcaccattttaggatgtctttttatcattgttatttgtgtctttctttactgctaaataatgtctctgagtagtgtgccccactatttcctacaaaagatagcttaacaccaagaacagatgttgaaaataaaggtcagactttgactcacggaaaaagaaaaataacatgcacagatcggacagagagcatataaatatacaaaatatg

SEQ ID NO: 338459 - DNA, 1000 bp, Homo Sapiens
ttttttttttttttttttttttttttttttagtaattgtaaatgacaactttatagactgcttagtaacagttacatgtttaacctttgcacataaatctggtttgaaaaagataatacgttagtaaataagtacatatttatcccaatctttaaaaactttcatgaaacctaggataaatgtattgaaattagatttcctgggcagtactagaaatctataaggctaaggaatagtcacaaagagggaagaaactacaaaatgagaaccctaagtatgctagataatcaactaggctgtctgcatatatgatttgtatatgaaggctgaagctcttttccatattttagtttttttatacaaatctttattacatcctgattttctagcaaatacaattaaaaactcctcctcagaggagtccataataaaatgtgtagtacctgtgttactagtttaataaaatatccaaataactaaccaatttgtttaaaatttatagtaagaaacttattaaaaacaaaagactatctctcttccaaatataggccaatgtaaatgattttcaatatagataaactcaatgtgggagttacatttggttaaatctggtggagcaaacgtctaagaaaatgattacgtggcagaccatgaggatcagctgattctcttcctcagctgaactatgtcagattcccacaatgagaacttctctcttattgaggaggctcattaggaaagggtccatcatccatccatctgctcacataaaaccagctccctcctgctgacccactctacccccacattaaaaactacaaggtagtgtgcttttatggctgtttcactggagaccataagtttgagttgaattattcaacgtgagggtcacggtgagagaacgtggatctttcttattcttgtgaactgtgacctttcctttcaaggcttcacctgctttaactgaaaatggtttttccagtagaaatactgtttgttt

SEQ ID NO: 338460 - DNA, 1000 bp, Homo Sapiens
ttttttttttttttttttgcaaggtggaagatgaggaaactttatttcagagggagatagattcctaggcagccctccaagtaatttgaaaaccaaaactaggagtctcctcaagaaactgaagacattattcaggaagaattagtataaggtaaagaaaatgactgggtaggacgcgccttgaaccagttcattccttacacatggaacgatagcagcctctactggcagttcatgggtatcactcgggaaggaaggaactaggatcttctgaaagtagggagagaaggcagcttaggtctgggaagagctaactttcccataattcagactgaacacaaatgaagcacccaaccttgctcagtaggcagaagcctcagtctttccactatactggggaaaagattcagctcaactggcataaggacacacaacagggtggctaggtgtccatggaggtgggtgtccaagcgtgcacacatatgagcatgagtacatccctagccaccagagcattgcaccagggtctgcggctttagaaagaggtcaaagtacctgtatttttaataatttcttgacatggtaaaagaattttacattacgatccatgggtgatagggtgaggaggaggggcagtggaacagtccaacaaacgaaacgggaaactgagaaacacatggagggaagggggaagggttttagctggaagggatctggagggtgggtgggagcactgcccaactaaaatgcaattggtttgttactgagtactattcgtgggaagacagcatcctgactccctctctacagaatattgggagtaaaaatgatgcatccccggtggaaatattattgggggttggaagacagagacaggaaaaataagtcagaaacagacactaagagtcactggcaggctgactgcaggtatcaactctccagccgtggtagaataaaagagctaggggctgaaggggattaacacaaaagctgttaacaa

SEQ ID NO: 338461 - DNA, 1000 bp, Homo Sapiens
ttttttttttttttttttttaaggttctcaagaattttattataaaacagaacaatgacacaatataagcttacacattaatatttacattatattcaaaatatattacagctttaatttatgaacagaaatatcctgtcttttcttctttttcttttctgttttctttgcatcattgatttgcatttttacttgatcttgtaatttagaaaagaatgcttgagaggactttaaggccttgtctttaccttcatcctttatgaaggaagctttgccagttttggtcagctgttttaacttctccgaagctactgttttgctgtatttccctgcttgatctacactgctcttttcaagcagttttctccgcttctccttctcttttattttcatacgcttttgatatttctttttccttcgctctcgtttcttgtctgtagctgttttttcagcagctgtttttatatctccagctttatttttctccttgatctcctctggggccaggagagctgcatcactaacactcactggggctacttcctccatggttatggctggcagatttgacacaactttaatctctggtacaggcggtttagggataaagtggaagtttgagagggcatccaattttaagaagagggaatccatcatcttctgaatttctacatgttctggattttcttcttctgctgttttttgctggttgagtttgatgtactcctgttcataaatttcagcaaggctcaatttactcttctcatggtctaaggttaaacgctttttatattcatatgcatcctctttaggtttttctttacgtactacatcatcccaagcctgatctcttatcctctgtttaatgatatcttccagttgaagggtggtttcctctgtaatcacaggtgccatccggacagcatggtcaaagtgtagggtctcctccaggaggctgttctctggcctcttctgtgctgtcacttccccctgaagctgc

SEQ ID NO: 338462 - DNA, 1000 bp, Homo Sapiens
ttttttttttttttttttttttgagacagaatgtcgcccaggctggagtgcaatggcacgatctcggctcactgcaccctctgcctcccaggttcaagcaattctcctgcctcagcctctgagtagctgggattacaggcatgcaccaccatgcctggctaattgttgtatttttagtagagatggggtttcaccatgttggtcaggctggtctcgaattcctgaccttgtgatccgcctgcctcggcctcccaaagtgctgggattataggcgtgagccaccgtgcccggcctggcaagcttcttcttgaagaaggatgaacagttctcagcaaagaggagtcatcattcttctgaaccaccataaacattccagagaagaggtagatagaaggctagatcctggaggatgtgctgtggtgagctaggccctcaggcaggtggtggtgcccagcagaaatggcactgtaagccaggcttccctggtcctaggagaatgttttagactagatgtctaggagaagtctgggcactaccactggtcttcatagacctgcatcaggctggtcctaggcctcctgttccagctacatagtggacacctccctctgggctatagcacacagggccacagcgcaactggggctcttcctcctcataccagcgctgttcactgaagtcagggaagaaggctgcaatctctctgctggctgaaaccacagagtccgaaccatgggtggtgttgcgggtgtcagtgaggccgaaactcccacggatagaatctggggccacatggcgtgctcggaacactctggtgggtcccatgagcgtcctccagagctggatggcatccttgtgggcaaggatgtaggctcggattggcccgctggccatgaactccaccagcctctgatagaaaaaacgcccttcatgctctcggtaaaacctctggcaatcttcctttctccacagtagttctctcattcgtacaatcaggaac

SEQ ID NO: 338463 - DNA, 1000 bp, Homo Sapiens
ttttttttttttgaggataaatttgagtttattttaggaaaaaaaatgcttaaagcacaaattacagagaggaggagctgaaatccttcaaaggcctgagcttctactcctttcccttaagattcctccaaagcaccagctccataaaatccttcagctccccagacccacaccaagaaccccacatgttaattggatcagccaaatctacaagcagataagtcctaaggagaatgccgaagcgtttttcttcttcctcaagcctagcatgagtaagcccccaaattgctagtctggcagaatggcagactctgcctccagatccaaatgatcacctagacaccccctcaggctcctgggcctgggaccacagctacgcagccgcccccactcctctcagagccgagtggagtagcctgccaccgcaatgttctccccgttgacgtagctggcatctggagagcacaggaaggacacgattcctgcacagtcctctgactccccaatcctctgcagctgatgatgttccttgaagttcttccagagagactcattcccatgaaacactttgctgaagtcagttttgataattcctggaaccacgcagtttacccggatgtccttgggggccagctccaatgccagtgttctagtgagacccagcagcgctgtcttgctgacattgtagacacccagcgccactactggattataagctgcaatggaagagaccaggatgacagcacccctcctgttctccatgtagggcagcaactggctcagcagcagggctggggacttcacgttcacacttaggatcttgtcccagatctgctcactggtccccagagtgctccctaccagagggttgacccctgcgctgcacaccaggaagtcgacgcccccacagtgctccagggccttggccaccagctgctcccggtcctcagccttccccacgtggcacacaatgcccgccacactcagcccctccccctgc

SEQ ID NO: 338464 - DNA, 1000 bp, Homo Sapiens; identical to SEQ ID NO: 158651

SEQ ID NO: 338465 - DNA, 1000 bp, Homo Sapiens; identical to SEQ ID NO: 158652

SEQ ID NO: 338466 - DNA, 1000 bp, Homo Sapiens; identical to SEQ ID NO: 335741

SEQ ID NO: 338467 - DNA, 1000 bp, Homo Sapiens; identical to SEQ ID NO: 158653

SEQ ID NO: 338468 - DNA, 1000 bp, Homo Sapiens; identical to SEQ ID NO: 158654

SEQ ID NO: 338469 - DNA, 1000 bp, Homo Sapiens
tttttttttttttttttaagcctccaatttatttttttaatgttccaaagttttattaaataattacatgttgagcaggtgatatttaccaatctgtaaacttcatgtagacagatttgtataccttagatatataataaatatgtgcttatattttatatttattgatttcttccttaaatccaaattaagatttggaaaatatgaagtgttatagtgttatattcatttgttgtatctctacctattgccattatattgttaatttttttatacaacacgataaagctttgtgattatgttttagctagtaaaagtgtaaaattttaatatttccatgttttccaatataacttttagattgtacttgtgtcacaaaaagagggattaatctgcttgtaataatttccattgaagttgtagaatacccaacagttttatatccacaatgcctagatattttttataatgaactagggtaagtgaatacactagttttgaattcttaaaagatatattcaatttgattcttttttcttttacaggtgtgagccatgcaatgggagggagaggaggaataaacagaggaaatattaattaaatggtctgtaaacaataacaactgtgaataagattatcaaatctgttttagtgtaatgattgtcaagtttaaaaacatttttatatataaactggtatactcatgtcaatattctttattaataaaatgtttttcagtgtcaaaatttattattcatttcttcattagttgactcctcctttgctcatcagtctaaggacagttgtaccagactttggataaggtctgcccagaacgagtagtaattgctcttgctgttctactaggcacatcaatgttatagtattgatctttagaaaaggcatagtaatcatagccgtcaggttttctgatgttgggcagtgatatagctgaggtaaccacatttggaagtcctctccacagtatactcactttaac

SEQ ID NO: 338470 - DNA, 1000 bp, Homo Sapiens
tttttttttttttttttttttttttttttaattcatccatttatttatttaatagtcactgaacgtaagcactatcttaggtatttgggatatagtggtagataagatacagtccatgtttttaaaaaaactatgaaagataaagagaaaaagattataatccaggatcatcaacactacagaattatggtctccttcatcactgtaccttctctccttatgtatgtccaaactctactgaggagaaataataaagtttttcttatttttgaggccttagtacctaagataatttggtgatccaaccacataaactgtttctgtaaactttcctctatgaaaatgccttatcgaattgactgctatcttgaaattaatatgcaggtcaaacagtcacataatggaaaagatacaatcacacattggttcattcaaccacatatatgcatactcagaaaaaaaacaaaatcagttaagaccgggtttttgcattacgtgtgaagagctcagaaggaggaagtaccaccttgccctcactcatttcccacaatttatattctcacattagcatttttttttttttttagagatggagtcttgctctatctcccaggctggagtacagtggcacaatcatagctcactgcagcctcaaactcctgggctcaagcgaccctcccacctcagcttcccaaatagctaggactacaggtacacaccagcatgccagctaggtttattcttcagaataaagcttgatctgcaaagggacactgttaggatagaaatataccatcagggatcagtaatgtacagaggagtacagcaataatgtacttctctagtacacaagcaatagtatatattggcatagattttatcagattagctcagaatatcatatgaaaaaggtatatttttgacagagatggttgggacggggatgagagtggcagcattagtttccatactgagaaatacaaaaaacaaacatctattt

SEQ ID NO: 338471 - DNA, 1000 bp, Homo Sapiens; identical to SEQ ID NO: 158657

SEQ ID NO: 338472 - DNA, 1000 bp, Homo Sapiens
tttttgcctgtatgcagttgtgggtgaagtttattaaggcaatactgaataccagagcatttcaacaaggcttaccacacaggccccagtacctttctactctacaatgaggctcagaagctcagtgtaccaccccatccccaggaggcccacttagaccagaaatcccaagtccattagctacaggctgatattcagggacatcggtgtaaacaaagaagtgggatatgaactatatccctgatttttttttctttttttttttttttgagactaagtctcactcttgtcccccaggctggagtgcaatggcgcgatcttggctcactgcaacctccgcctctcaggttcaagagattctcttgcctcagcctcctaactgggataacagacacctgctaccatgcccggctcatttttttttgtatttttagtagagacggggtttcaccatgttggcctggctggtctcgaacacctgacctcaggtgttccgcccgcctcagcctcccaaagtgctgggattacaggtgtgagccaccgcacccggcctatattcctgatatttaacaaggaaaaaaaattctgcaggggagaactttcctgaaagatattttttctggacatctctctctactgactgatagggtgaggctcagaacaggcttcttccaagctcagagaggctgagagatgggtcaactgggtgatgcccgttttgagagccttagcttcccaagtggacagcacagaagagctgggaggagtggctagaaaataagtttgaaatgagccccgggttgaggactccagagcacagctgcattatagagacggggcccgctgagtcctctcctctccccctacttcttctcctccggggctttctcagtgattccaggggcaaagggtcccacgagccacgtgacaggtgtgttctgggccacatattccaccatgtggtccagggcctcgcgggcgctggcgacacgctcacggc

SEQ ID NO: 338473 - DNA, 1000 bp, Homo Sapiens; identical to SEQ ID NO: 158658

SEQ ID NO: 338474 - DNA, 1000 bp, Homo Sapiens
tttttttttttttttttttttttttttttttgcacttttgtgtctgaaaatttatccttcgctgctgcctttttcggcttcgcttccacttttgcaggaggtttagctgacaattgcgctgatctcctcttgggctcttccatggcagccccttcggtggagctgacctttttcttgggcatcctggcagcagggaaggtgggtgccaggtgcctgctggccgcggtgtgcctacagccttcgcgaagctgggctgcctggccgctgccactcctcccgccaccggagctgctctcgctatgttggccaggctggtctcgaactccagaccttagatgaaccacctgcctcggcctcccaaagtgctgggactacaggcatgagccaccatgcctgccctcggagctgctaaatgaacagccagatgaagagatacacagggtgaggtctggaagggtccttgtggagttggggtgcaccatcctcccggcacatggatgtgttcgccaacccagcagctctccatgtcctgtctttcaaggatttttctggaggctttgtcacgcaggcatgatcgagctccagctctgctccccaccccagaggatggggaatggggctgaaagcactaagcttccaaccatagttaggtatttttggtgaccagtccccaaataaggagcccaccaagagtcacctcatgagaacaaaggacgctcctatcatgcagaaaattccaagggatttaggaatccttgtgtcaggaaccaaggtgaaggaccaaacgttagaacaaaagatgtgcaatcataaaaaagaacaagatcatctcttttgtaggaacacagatggatcttgaggccattatcctcagcaaacacagctgatttccagaggatggaagaagtcaggaaacttgggacaccgctgctgaggtccttgcagccccacggtccccaggctggtgactggtgggggagtatggagtccagctgaccac

SEQ ID NO: 338475 - DNA, 1000 bp, Homo Sapiens
cattcaccagatatatttgaagtctaagctctttgagctatacacgtgcacaaatgattcagttggtggaaatcttccccttccccttcattgttaaagttttcaaccttaaaatagtgctaaagagatttgcataatgtgcgtcatggaaatgctgaggcgattctgactttcacagtgctaggaggttcccttgcaacacttcaaggagtctttccatttcttatcgttctcctaggaaaagcccctcttttcccccctccccaaacccaacctagtgaaggaattacttgatctgagacaggttaacattgacacagagcaataagttttactaagactaactccagaggccatacacttcattgtgtttcttttatgactacacagaatggtcatttcaacttttactaagttgttaaaaatgtcagatgtgtcttttaaaaaacatttaaaaatcattttcaaatactttctctcatctagatttctttagaacctgcattctggaaattcagggtagcttaaaaaatcaagtcaaatgacccacagatgattgagaagagtcagctttgaaaggctggatgctgcagtgctctgcatctgaatagcggagctactatttcttccactagaggacaccatttctccactactaagtctgtagtcgtttatcatcaatgaaaaaccaaaaacctccacagcaaaggaaagtcaaagcatatgcttattgtacactcctcagattttatttttaaaaggagttttcattttccttatggaaactcaggattttacaagcaatgctctcctcagtttcaccagtactgtgtccagtactatattgctatattcacagtaaaacggactttaatttctgagtgatcagtctatgttttaagtttctgatgaaactaacatacaccttagtcaaaaaccacaacaatccctcaatctgtttgctgtgttattgttcttgtgtgtttttctgaggcttggg

SEQ ID NO: 338476 - DNA, 1000 bp, Homo Sapiens
taaacatgaaccaagttttttttctttattttctaaaagcagtaaaaacatttatacaggacattatgaaagtctaatgccatcattaggacccaactgctgcaggttaccagtgtggaattgcatatcaccagatgctgttccacaaatggacaggcaagcaggatgatagcattctcttgattactataatagtcacaataatacttataattaaagaaagcttcctttagctggattaccctgcataaataggcaacacagttaatcaaatgtaaacatatgttttctaacaccagtatagaaaatacaaaactaattacaatcagaacaatttctaccttatcctactatagtaattattacgctttgcttctttgcggtgtgatctctatgttttttttcccattcatcatcttctgtgtcttggtcaaatgactcaggatatgctggtaacttgtctttggggcattcttcatagtaacttctaatatattttcccacagaccatcctttgtattcttcaggcgttttgcattccaggccattaaaatggacattgtagtggtgctttaaccagtagtagaggtagtgaatgttgtagtcacatctccaagggttatctctgagccacaagagtttcaaaaaatacaagtcttctaatacgccatagtcaaagttttgcagactgttgtttgataaatctaattcttctaaatgtgtgagccctaaaaaagcggcacagcaaaaatcattcacgtaagtctacttgcagggtttcatctcaaagacccaggatcgatgaattcaatgccattgctgctgaggtttaatttcttcagctcatgaacatcttcaaattccttgggtcgaagttggttgattttattgtatgacaagtcaagtttaacaatatctggagggatgttgtttggcacttttttcaactctttccttttgcagtccagtgtttgtatgggaaacacataattgtggcaaa

SEQ ID NO: 338477 - DNA, 1000 bp, Homo Sapiens
tgaaggttaattacacgggcctttttattccatctggaaaatacaaatattcacaagagtctgtacaaccttagggacaccagccctggccctgccctcagctgcatgccaccctcatatcccacccccatccccagcctcctgccccgacacccccaggctccctgctctggttgaagtattttctccaaggcaggaatgagtccttgatccaaccacagcatctattacaagtggatgtcaaacaccccatcctccaccgtctgtacctcctcctcacggatctctggaggcctggagcctcgcctgccagggcggggcagagagaagctgaaggcgcggtgatggtggctgtgcatgggtgagggtgagggtgcagacccctccaggctcacactctgggccctgcgccgacactcaactgacaggcgatccttgcactgcttgtggcagttcactccacaggctcggcatttgaggccctgcttgtagatgcccaggatcagggctttgcagtggcggcaggcgacggggcgcaaggagttgctctcctggaagttgtgtacgaagcccatgcgcccccccaacacagagctggagcgcaggaaataggaaaccatctcctccctgctgatgcagccatcctggttctggtcgaggtccccaaaggcgctgaggtaagggaagttcccacggatgatctggaattcttcctgtgagatgtggccatccccatcgacgtcaaagttccggaacacagactccaccatcttctcgatgtgctccaccacgagggcctgatccagcttgggtttggcagccgaggtccactcctccagtaccgggggccggggtggtggggtgcaactcgtggggctggttggcgaggacttggagcgcggctcccgctgcagggacagctggtacagctcatcctccgtctgatactgatccagagacaccgtgagcaggctcagcaggtcggggttggcctgtactg

SEQ ID NO: 338478 - DNA, 1000 bp, Homo Sapiens
taatgttttgaatagattttttagttttattgaaatcttacatgaacaagaaattggaaatacaatcacatcaaagaacaaattgtcacggcttttgacgtttaagccaaacaaattttgtagggcagatttcaaaaaggtgtgaagttataacaatttaaaaacacagttaacctacttctaggaatgcaaaacatacaatcataggttattttcaatacaagaaaacttaaatttgtttgctttaatttcttaaaactactaagacaaagcactagcttgtatttttatttacagcatactccatactcctatgtaatctatcccaaatccaaaaaaatgaaactgtccaaaaccaaaggttctgcaaaatcatgatttaacagtgtgcccagcttgttttgaagctaaaatgaagcctgaaacgataaaagcattgtaatccccagaataagggaactctgcaagcccaataatgtccaagagcatttatgaaaagaggaaaaataaaaagacttgagtatatacacaatagtgatttcttcagcccaatacaaatggcagcaaaatgctacttaaagatgaaacagttaagccaatttttttttttgaagaatgtagatctagagccaatcgtatcttgccagtatcattttcaagcccttacttgtctacttccactgttgcccataagtatcctgataaaattcctggttgtcattattgtaaccatagttaccagaatagtcaccaccttgctgaagcggctgctgagcgatgggttgggaaccccagttctgttggttgttggtctgacgacgcttggaatcaggctggttgtacccatctgcctttctcttgcctcctacattgcccccacgattgccccgagatccacgggaaccacggcctctctgctgttgagcaggaccccctctgccacccctagagcctcttggtggtcccaaaggtgcccccctctgtgaatagccagctctac

SEQ ID NO: 338479 - DNA, 1000 bp, Homo Sapiens
tttcagtcaatctatacatgttcaagttttattacaaagtatgatgggcagaaaatacggtacttcttatacaggaggctgaaacagaatgaaagggtgaaaattaggtttaatttacttaggaaacaagaaatagaaagtcatagctataacactccactttcaggtgcccatgaagtagccttcaatggagattccccatagttgtttcacagcacagtgttaaaattttattacaagccctgtgtacaatcagtcctgtgaaaatatttataaaagaaaaatattacagtacagttctgcaaggggcagcttcctctacacctgaccgtggatgccacaaaacctataatatagagggaaagtttaaatatataacaagaatggaagttcagacatactaggctaaaggacacagaaatggatcagttagagcttaacatttcagagcaagaaatctccattttctacatagaggtttatacaatcatgctacaaattcactctgggtggggtggggaaggaaggtcactgacaagaggggtagtaaaatacacaggaaccaaagcaagtgagtcagactcaactaaatcgattcaaagcttcagctcaacaattttcataacacatggtataccacaatcaacccaaggtgagaacatttcttttaaatagtagatatcacatgttcataatcactgggttgtcccaaaggtgggtgcctataaactttccagctgttacatagactgtcaacatctttcttcttgagtttaaactttctttagcttatttgtttctcgttggatataccagtccaagcctctttgggaaggcacctgcatgtttccatattttaaaaatgacatccagaaagtagcctgagaggacctggcccatcccatgtggccacacatttgactttgaccattagcagcagtgacactgtgagagggggagaaggtgcaggtgggtgaagtgggcaagggtctgcaacacg

SEQ ID NO: 338480 - DNA, 1000 bp, Homo Sapiens; identical to SEQ ID NO: 158660

SEQ ID NO: 338481 - DNA, 1000 bp, Homo Sapiens; identical to SEQ ID NO: 158661

SEQ ID NO: 338482 - DNA, 1000 bp, Homo Sapiens
ttttttttttttttttttttttttttttttttttttttttttttttttttttttttttttttttttttttttttttttttttttttttttttttgagaggcaatatagcaaggtttagtgcacataagaattatttgcattagtttcttcacctaccaaagtaggagaaaaacagatatataatgcagaagatattttggaggtataaaacagctaatgttttacttaactattctgaaagtaactgacaggtaataaaaatgtgggttttattagtccactacagtcacaatacaatcgtcatagatttccccttctgtattcatcccaccaaacaccaaacagagcagtgtagcagtctggctttcctcatgtgagtcaccactgtggctcattactttgtcagctgaatcctctttctcagcttcatggttcagagtgagagagttggaatcttctttctcagaagcacacgtcactggccatggaatgatacacatggaatggtccaatcgtccagggggtagaagagtatcaaatttaagcaaggtccaatgctgctcttctgtgtgatactggtacattgtgtccagtgctcctgcaggagtcattccaccaaagatgtacacatgttttcccatggccacagctgagtgggcagcacagcctgctggagcagccccagtgggatttagcttctgccatttcatgtcacttatatcaatgcagtggaggtcatcatagaatctgtcccccgccaagcctccgtggatgaagagctttgtccctgctgccaccatcacatgaccatgccggggagatggaggatttccaagtgtctctggctgtgaccaggtcagagtgtttgcgtcaaacacatgcagcttcgtgtcctgcacgggctgggcacctctctctccgcccccaaagacatatagctggtttccaatggctgccgatgatgtgtggaatgttcttggggatggtggggggctggtca

SEQ ID NO: 338483 - DNA, 960 bp, Homo Sapiens
tttttttttttggcatttcaaaacgggctttaaatactcatcagggtgccacacaaaggagctggggtgagaacttcgtacatgtgagtgtggggctggggtgccctgagagagaaaaaggggacccatctgtcagggcagctggggtgccccacccccaccctgggactagggagcagagtagaaaccctctctggagggtcccagggctaactgggagccagccctcccttcgaggtagaccatcggggagggaaccgaggaagtagctcccatggtggcagtggcttcctcagtggtactgctgatagctggggtagcctggggccggggtgccatccttagggggcagctggctggggtcctccaggaatgggggcgcatttcggaactgctgggctgtgtagcgagtgaggaggatgccaacgccctcaatgagggccaacaggatgccccccatcattgctgagcccaccatggccagtgggccactgcgggcagccagcacagccccggtcaatgctccactggtgatagagttccagggatcctccttgccccgaagccgcaccaggccacagtcaatggtggagaacaggcccccccacactgcgaagctacctccaatctggggggctcggatcctcacagcattggcactacctctcaaccggtgccgaattccaacaggggcattgcggaaacccttgatggcctggaagactccgccaccgatgacacccatagtgaaggctccaccgcaatcatccacaattcgccatgggcagggctcccgagcgtactcctccatggcgctggcgtctggccgcgcagtcaggccacgcccccagcgtagacgcacaccggcgtcggagctttccgcctgcacgagtgtattggtaacgttggggtgggtgcactcttttggagctggaggaagtgctgccctctgctccccca

SEQ ID NO: 338484 - DNA, 1000 bp, Homo Sapiens
tttttttttttttttattttagcatgtaaattttaatagaatttaatcacataaataaacgtctatgttttacaatgtataaaaaataataaaaactttaattctggggattatagctttacagttctgatcggtgctgagatctgtaacatatggctacaattccgagcagatcttctctgcatccaataacctgccccaccatgaagatatttatcagtgatcattttcacatgaatttttatttatttagtactttccaatgaggaaaattcaaaggccacatgaattgacttttcaagtttgtccagctgttgtcaaccccgggcgcatgctagaaacctctaaggagtatctaaaaattagtagtatctgggttccaccccagaccaattcattcagaatctctggagtgggtcccaagtatcagtgtcttataaaggctccccagggaagactaacacacagccagagttaagaactgctgagtctatggtcaggaatatggagagaagtaaaaaatgtttaaaaagttcatgctcagtaccacatttaagtttgtaactttatgtcctcagaggcgggtaagggtcctctctttggcccagtcttgaagttctgcttgtccaaacgtgaggtaaaagaccaggccaaacatgttgactgcagcagacaggaaaaagacattcctccaaccagactcaaaatcctgactgatgaggaatccagtggcagtggaagagatgattcctgcgatgagcccaaatccccttgagattcccatgaggaaacttgcatatcaagagatgaaaagagctttcgcacagtgatcaatctgagaagattcctggacaaaaggaaatctgccagctgacctcctaaaattgtacagcttgcagcagcaataaaaggcagggaggacagaactccactatctctgatgttaacatggagcagagtactgatatacgttggtaggtatgttaggatgatggtgcat

SEQ ID NO: 338485 - DNA, 1000 bp, Homo Sapiens
ccaaaggaaatctgcctattttatttccattagaaaaatattatctatataacattttgttccactatcttctccttgatctcaaatttaaacactttaattttactcaagtaaaagcagaatcacataacggacatcaaaactaaatagttcacatcattagtttaaattaaatatgttcttgattatttctcaggaatagtaactcttctttcctacctggtatttctcttttgtttactgagtaactatgtaatgggtatctctttcctatattcagtaatacaggtgcacacaggtgtaatttaaaaaagtaactggattccttctctaatattcatgttcaactctccctattacatggtatttccataatagcttcagatattttcatcaaactcacactgtcatcaattgtgaaaattaaaaggttaattaagatgttacatcaattgtaaaaattaaaatgttaacaattccagactacacagcactgggcccacttatagtgatgccgttgtcagtggtccttggatagctactgcttcaatttcaattcggctgcctttgggtaaagcagcaacttggtaagcagctctagcaggaaaattactcttgaaatactgtttgtagatttcattgacagtattgaagtcatttatgtcagccagaagaacagttgttttcaccacgttagtgaagtcacagcctgcagctttcagaatttcacccatgtttttaagagcttgtttagcttcttctgctacccctcctgacacaagctgtccacttgaagggtccatgcctatctgtcctgaaatgtaaatggtcctgtcgactaatacagcttgactgtagggtccaatggcccctggggctttcgcggtgctgatcacccttctgatcaaggacgacatggctaagccttccctcttgcagccccttcaggagaagaagccccagcaccagccctgctggcttcttactggactgaccaacc

SEQ ID NO: 338486 - DNA, 1000 bp, Homo Sapiens; identical to SEQ ID NO: 158662

SEQ ID NO: 338487 - DNA, 1000 bp, Homo Sapiens; identical to SEQ ID NO: 158663

SEQ ID NO: 338488 - DNA, 1000 bp, Homo Sapiens
tttttttttttttttttttttttttttttttttttttttttttttttttttttttttttttttttttttttttttttttttttttttttttttttttttttttttttttttttttttttttttttttttcattaattaatatattttctgcattatagttaacatatgtactttcttcgtgtcaccttattttccgttaagtattgatattttgttatattcaaacatgagtacatttcaacagtcttttgcaataaataccataaaataatagagattcgcataataaatattctttacaataaaaaagtttaacagacttttgtcttaaaaatagtcagaattcaactttgtgatttatacataaaatatacaaaaagcaccacaatttgtggttaaggcaaggaaaacacagaagagattagaattactcagctgttaactatccaaggggccaaaaggaccattaaggagccaagatcactttaggcagcatagttctgtgacacatatagattgatcagctataaatatcaacttgagttatccaagtgccctcaatgacaacaaaaatttggtgagaagcatggggtgaagaaggaaggtggctgagtccttcacaaatacgaaggctagagtgaagatgggcaaggtccaaccaatattatctccaatgtgaagatttacattgtaaggcgaatctaaaattacatagaaagaaaaaatacacttggcatctccagagtaagacaacaacaaaactgagggggaaagaaccttgaaggagaaagaaggagagggcagtggttaaaggaaaatttttacgttatagcaaaaaatatatcccccatgctacttaaggggcctatgctaggaagatagccctaactggagacagatttaatacatagcttatttaagcaattaaacagttgctttttaaaaaaccaatttccctgctcccacggtacccaatcaaaacaactctaaatcactgtag

SEQ ID NO: 338489 - DNA, 1000 bp, Homo Sapiens; identical to SEQ ID NO: 158665

SEQ ID NO: 338490 - DNA, 1000 bp, Homo Sapiens
tttttttttttttttttttttttttttttttttttttttggagatgaaaactatcatttatttcaattgaatttagtttcattaaaaaattctatgataacattaaaacagaaacaggacgtttatatgactgtctttaacctcaaaagtccaaataaacatatagacattttgaatatagctatcgttttaacaaacctcattatgatcactgatgcaatttcagtcacctaaaatacgaaccatgactattaataaacatttactgtgtgtggtttgttggactgaacattaaccatacgtgtatttctaagtactaggagttgaacagctactacggtcaatgtattttggcagttagctgtgtgtggtgtgtgctttttaaggcttcactcaataaaacatctgttgctctctgctgatgagcaaaaaacttgctatacgaaggacaaatatatgtatacaaacaaatgcacacgtgtgcatgtctatatacatatatgcaatttcagggaggtgacaccttattctgagaggtcatgagactccacttcaaaccataatagtaaaacctttagtaaactgaactcaacatattacagccaccatcatcaggaaaaattaaagactcatagttcaaataaagtacaaaaggtcccaggaagtattgtggtttgttgattcattcaacagaaagcccaaatgacaatgctattagtggtcaggagtaaactaacctggacaggctcatgaaaatgaacccctggatgcatcctgagaacgtactgcataattatagtcaatgcttgcaataattttcagtttgtctcatcacgttagcagagcctattcatgcaatttagaaaggatttcaatacagcccaaaccaaaaggcttacagtcaacagagggttagccttccataaatgagaaatccaaaaaagaataatgccacgtatttcaggaatgtcggttagaggtttggccttcttgggaagtg

SEQ ID NO: 338491 - DNA, 1000 bp, Homo Sapiens; identical to SEQ ID NO: 158666

SEQ ID NO: 338492 - DNA, 1000 bp, Homo Sapiens
cactagcactgacattttaaaattcattctcccaagtaataaaaaatatatatatagatagatatacacagagagatctgcagctgtactaattacttcaaatagcagcagacaaggaaaatacacgcttgcttgcttaagtttaaattcattttaagtttgctatattaaatttaaaaattaaaaaaatatcaacttactataaacaatttaaaatatgtataatacaacttcatggtcaaaacatttgaatagtctatgaaaacaggaaatacgttcatctgacatttctgtttagattccattcatgatttttcaatctgtctcttccaaaagaaaccataaagcagttgtcatattttatggcaactaattttgtttagggatttcctcatcacaaaaatactttatttcctattacaggggagttaaagaagaagaaaaaagaaatgagaaacaaagtggctttctccccacttgtcactattctcttcttcaaacattctgtacataagctgtctgagtcttttgaaccatttacaaattgtattttcaaaaattgaagaaaaaatatttagagtctaaaagtgttattttatacactgactatacaatatacattgaatgtttacacatacaaatacatcttaaagataaggttctccaaaggtttttcgacattccatcacccctgtacttggtggtctatcacagttgtgtgtactcttgacttgactaggtgtgagacgatcgtatgccatcttgtactctttatcaaaagcatctatatcaatgttttctcttcccagtgccacaagtgagagaaatagtatttctctgtataaactcctctgtcttttaaaatgtggacacttattcagtgtctctaaaatctgactcattggtccatagacatcattcattttaatgctttttaccatacttttcaacagttcctggttaaatgagttatcacttttttgcaataaatggaccattg

SEQ ID NO: 338493 - DNA, 1000 bp, Homo Sapiens; identical to SEQ ID NO: 158667

SEQ ID NO: 338494 - DNA, 1000 bp, Homo Sapiens; identical to SEQ ID NO: 158668

SEQ ID NO: 338495 - DNA, 1000 bp, Homo Sapiens
acatttgcgttggcaatgtttaatgtttcacttttgcagaactgaaatttgtattcaaaggcacagaaggaaggaaaggcagttatcagagcatgaagtcacagataaaggatgctgaataaaagcataggactgctcctctttagccttaggaaaataaataatgcagtattaaactagatttttatttttattatatttccatgtgaagacatcacccaaatgtcagcggagcaaaagactttatggtcagataccaaaggcgtacagttgatcccactttggaataaatgcccagaaggtaataagcattatcagtgagtgagagctctaggcacaaaataagttctcattcagaaagtggacagagatatgaagcagtgaaacatatagctttaaaaactggaaatcattcatgacatttgttttcaaagtaaacattatctgcatttcaagaactgtaattttcaaaagtagaatcaggcctgattaagtaatatttatgacttacagataaaattacaaaaataaaaatgaaaactcttctgcccttgaaagagatagaaaactatatttttttccctgtaatgtcacagagattcatcagtatttcatccttatgtcgcttaaaaaatgttatttttaattcgtctttcctgttctgccacttttaacatagcaaaacgtgtttaatatggccatctctgctgagtgaaaggatgtattatttactgcatgaatgagaagaagctacaatttacctccaatgggatcatatctaccacgtgggaaaaaaagataaagacacggattttccaaaaaacaaaagaaacaaacaaacaaaaaaaccccacaaaactcaatgatttaaaatatcctatacataatttctaacttcaaagcactatgagaaactcttgatcactgtgtagcaagaaagggaagaaagaaattaaaaatttggtagaataggagagcatttttctaactactttcattt

SEQ ID NO: 338496 - DNA, 1000 bp, Homo Sapiens
tttttttttttttttttcttttcaagcagtttatttccattttcagttctaatgttgactttttcataaatattcacctggaatctccactaaggctcctcatgagcagggcccaattcctagaatgtgcttggtgagttagcccctggtatacagtagaggctcggcaaatattctacagcctcctttctaatgatttcccagtggccagcgtttcccaacatgtgagatgtacagttcaaaaggccacagggaaactgacacagcagggccatttcaaaaggggaggatcttccaattcttctgattttaggaaattctgttgcgtgctaaccttgaacacatgctagcctccctttctcagatttggaaagatctaaagtaatagttatttctctaaaatgaaacatatatttcattttatatatatatatatattacagataccttctatctatggcaatttatgttggattattccacctatggcaatcacatcaagttttctttcctttttttttaagagatggggtcttgctatgttgtccaggttggtcttgaactcctgggcttaagctatcctctcaccacggcctccccaagtgctgggattataggtatgcatcaccgtgcctggccaaattctctttgtaaatacatttgagtggtagtaactaattttaaaggaaaaaaacctgaagtaatctagaggtggaacacaaatgaggtaaaatattagagaactgattcagcaaggactaaagattgggacgcaatgccctctgcacagtctggttcttgaggttgcggtgggtgtgtttccagtggcgtaggtcggtcagatacttctggcctttgggagtgcgtggatgtgacgcggtcagtgccacatgtgaaccaggtgctgcgaagtcctgtgaaagtcacacaccatatggtgcactacaaaggtataggttaaaggctgaagcttgaaacatacaaaaaaaaatcctctata

SEQ ID NO: 338497 - DNA, 1000 bp, Homo Sapiens
tgatagtcatgcagcagtttaatgataaaaatatattaatattttactatacagcagcaagaagttagttgtcaattaaaagcacacaaacatctttaaaggaaaacctgtaaaagactatcgttacaaacaatttcagtttggaggacaccagcttggtaaagtgctctcctaaactttgcattttcataccctacaccttgaatatatgagttatagaacatacttttgatagaaggcttgtacacttggggaacacaaatacacttagcatataatgtagccagtaataactagcaccacagctacatggaaatcctttacatacaccaacttggctttcacttttaaaacaaaactcagaatccatggctcagtaggataactataattgtgttgctctgctttttaacaggtctacataagttaatagcactagcaaaaatcaaagaatagcttcagacctcttacaagtttaggagacagtgctagtgaccacaaatagactcactacctgatgtccaagtacaggttcactggaaattgctgcacgttagttttttaaaatctttctacacataataaaaaaaatatattatgaacgatacaagtacatctcatatacacaataatgacaaaacgcctactcagtcaaagcaaacagatgcagaaaaatattatgggagatctcctttttctttctttttccttttactatttgaataactttggttccaaccataaaaatcacaacttagcaaatttcatttaaatgccttttttaataatttcttcatgttcacagaagtttcactgaccatttttataagtttaaggtccagatgcaatgcatattgtataaaagagagcacttattgtttaccttgcatgaattaaacctacgtacctttaactctacaaacttctgcataacatttagacaaagctcagacacacagcatgcctagccctcatatatatacacatctctaatcacagg

SEQ ID NO: 338498 - DNA, 1000 bp, Homo Sapiens
aaaaaaaaaaaaaaaaaggcttctttgagtctttatttccttggtgaggcagggccccagggtggggtgggctgcctggctgaggctcctgtagacccaccaacctaggggcacttttctgggcaccacaggtaaggcactgcctgggggctggaggaggctggaggaggatgcccaagctccccacactcctcaccccagaccggggaagctggatatcctccgtgttgtcctctccccatagctggtctgaggctgtggtttacacgcaggcacaggtaggcgattctgagcatcaacgcagatggaggggagggtgagccgtcgtgggagaactggcccaagaccagcacctggctggtgtcgccagccccggctgcattggtgggtgaggcaggtctggctggagtctgggtctgcaggcctggccggggcaggttgtgggggaccaaggagccctgggtgtgaaccccactgtggaggcagcaggcacctagtggtgccactgggacacccggctccaggactccggatgtcacacatgcgtgagtcttggcgtctacacccccctcggggccagtgggtgagcagtggcccgtggtccccgccagagctcccccagagtggacttggctccgccggacacagtgccctgctctgagctgccgctggctgctccacgtctgagaccacgcgacgttgcctcatgaactgacgtggacagcagcaggggagacgctgggtggttctgtggccaagcacagcccgtgtcaggagcacaggccgtgccctttcccagggggcacactgggcatttctcaatggccttcacaggacgcaaaggggcacacagaggcagtggggaagctggagttcttgggctggcagggaatggtggcagccttcttggccttcatgaagggcctggcttgctgggctaaggtcacagtgttctgaggtccccacacgcactcagactagaccctccgtacacacccag

SEQ ID NO: 338499 - DNA, 1000 bp, Homo Sapiens
acagacttctatgcagcacatacttctataatcagtaaacttaattcacaaaattagcgcataagggtattaagtgcatgggaagtaaacacagttatgttacacttaaaattacttttgaatgattgataaaggatttcttcatgattgattatcttaagaaaatggaagtctgtgtaacttgaatttggcagggcatgaaataagtggtaaaaacagcaaactgataacttgagaatcattttcgttttactgagaatactttatttgctggtagaagttgctaaaaatgcacagaacaaataccaatagaaaatgcactgtatttgaatctccctagtctatataaaatgaacggtgtacagcatctgttggaaaaatggctgcatggacatttcttattttatgcccacttataaataaaaataaaccttttattcaagagtatataaaatctgggaattcatatccatatccacagagggtgtgtggtttttggcagagatgtactatgtcagaatttcatcttagcttgtcaatgttctgctccttcattatttgtgttccacaaaggtcaaccaaatccagtgaactccaaaacactcttcgcaattaggatgagctgcttactcataggtttaataaaaatggttagcttttaaaacataaaaaggcaaaatgttaaaacggtttttaaattgtacaacaggaaaataaagttaaaaatatgtttttttttactcaatgttgagttttcataaaacaggtgtataacagtgtttatcttgacagctgttttaaaaatttaaaatttcttcctccctccagaaaaacacacacatctgtattgggataagtccaatagtaggacacaaatgattttcaggtcagtctttctgagttgacattcaccaacattcccttgggtaatttacatgctcctcttctgtcactgcaaaaagggattgaccttaatcatttgattaaaaaacaaatcaga

SEQ ID NO: 338500 - DNA, 1000 bp, Homo Sapiens
ttttttttttttttttaatagtatcattcatttgtacagagaaatcatttggatggatctatttacagtcttttctgattatcatttccactggccaaatatatttcacagaatagtcaacactgacttgaattgatcaccattataatcgggcttttactcctcctcccccctttcaaagatgatgatcccattttaacagaaacattttgtaataaaagattcaccagtctttttccatcttatgactaaatccaccaaaatttatctaatatggtcaaatttttaacacatttcattgtttcttttcaaactcattatttgcaggtattgcaaaccaaggcaaataagtccacgtcccctcgagccttctacaacttactacacgccctcaagttgagcttctcctatctcctttcacacttgtgaaatgtctggcacaaccagacattttacttgaagacaaaactactctcttttcctctctttttcttttaactcactaccaatcaccttccctcttgcatttcagacaacactaaaactttcaacaaaatctttgaagtggttttctttcagtagtctagaatacatcaagccatttcatgggtctttaccctgaaatgctacactttaaaaatggcaattttcttaattggctcaaaaacagtatggcttggtttcacttggtaaaattaatgtgatttaaaaaaatatatatatatacacacacacacacacatacacacacatttttaatcaggaagaaaaatactttaaagacatgccaatttgaaaaggcatcaaagtaaaaaaataaaagcaaatgctaaaaactactttacaataaaaaaattaaataatcggcaggttaaatgaatgtaaaatgaggaatgtacagtgaaaaacaaactaatataaagcattccagttgataaaaacctcctcaggcttatggtttgttttccaaggaaattatgtttcaatgtaaagtttgaaa

SEQ ID NO: 338501 - DNA, 1000 bp, Homo Sapiens; identical to SEQ ID NO: 158670

SEQ ID NO: 338502 - DNA, 1000 bp, Homo Sapiens
tttttaatgccaagaactttatatctttaatagtgtagaaaattgatgacacccatttccttgagaagagggtcaccctctggatacaaactaataccacacagagtttctggatttcattctcctcaaaatctctctgccccagtccacagtgggtgcgagtttcttgcctctctctcagctgccactcttctgctgaggcagagaagttttctcatcctctgggtctccactataaccccaacttccatgccccaaagacacgcacacccttcccaaaaacccagcagttctctgtgagtctggtagaaagtccccattatttgtggacctactcagccttggtgagtggctggtcccaacaggatccacaagaaacttgcatgaccgcaaggcctgggcacaagacaaacccttccactgccatgctgccattatggctgttgtttttccatatggtctcacatggcctctcagcaggggacgacactgatgggatttttatgggtctgtaaataaagctctttctttcccactggagttgtaaactgagaagtagacacaagaatcagacagatggagatcaaaacgtcagctttgctgctgatcagaaggaggtggctggatgtggtttatgccttcaggttgatgggcttgcgcttatctgcttgtcccttctcccatctgatttcttgtggagcccatggaggtaaagttggtatttccaaatcagacattttgcccaaaattgctgcccctctctggttatgattgtggggctggcaagtccagaatccgtaggagaagctggcaggctgaaactcaggcaggaaacgatgttgcagactttaggcagaattttttcttctctgtggagaggagaagctgaggcaggatcaggaagcggggaagtagagtgcaatgctggtgaagcggcatcactgtctggggtaaatatccggggttcatcatctctcgtcaagatgattaacgacatgga

SEQ ID NO: 338503 - DNA, 1000 bp, Homo Sapiens
tttttttttttttttcgactaatatattttatttaaaaatttacttttgaagcctataaatggataaattccaaaatacagaatatttaacaatatttaatattttttactcaacagtctgcctttgtgtttttctttccataaacaaatacactggattaaagcaataatactcttatcttcaagttcaatgcctgagtttcttgcatactatttccatttaaagttcagtaattacttaacttcacattattctgtcacaaatgataaatgtgctacctatgtagtaaaaatcataaaactattataagccaagtcaagagaattcataaagttaatatgaaataataactatactgatacacatgtgcaatgggccctaccagaaatatgccaaaataacaagttttatttaaagaatgaggtctttgggcagaaagaaatgaggggtcattatcatcaaaaattattaggaagattgtaggtaaaaagaaatcagcctacaattttaactaaataaaggaggagaagggagtatatcattacagttgatgcagttaggaaaattcaattaccattttaccacaaactggctgactacttcaagagctcagagtcaggctctccaggcattctgttactctcccactaagtttccttacatgggacataaacctgcatttatgattacaacaaaatattataatgctatttaatctgacagttggcaaacaatagaaaaacaaactggaaattagtggagccacaccctctcactacccctgaaaataggggctaaaatgagtcattaagaaacagtattcaaagaccactgtattaactaatgtgatttataaaataagcaaaattcagcaattttcaatggaaaatgccacagtatttgaacactaggaatgttttgatgctgatttttatcaaagtggtactgcaagccattaagttggaacaaattccaaattcacaattacatgcatcacct

SEQ ID NO: 338504 - DNA, 1000 bp, Homo Sapiens
tttttttttttttcatatttatattctatattttatttataatattttattatattctgaagttagtgaaagggaggtttcccacaaatattctttctgtaggaacttcttataaaaaaatcttgaaaaggaagccttcatatattttagggtaaaaggacacaaacaggcttgcagtctgcaatggttaacatgtaatgtggaaggaaagttattttatttcagatttagcaatataaaaggtcagctaggaaaaaacacatgtaccagtaaccaaaagcatttgcttacatcattccacaatttgcaaaacaagataattgtttttcaaaaccagacaacaggttcaaaaatacttcttttcacacccctaagtgatgctgttgggaacaatggctgttacaaggccattgtaggcacatttccagcaagttctggttatcattattctcattttatcttctttcttttttctctctcatcagctttttgctttcttccctccttcttttattcactggattccgaggatcatagatttcaaatgtatctgagtcttgcatgcttgcatctttcacttttctgcttttatcctcaaactgaagtacatgtgacatccatccttcatcatcttctacttctgtttcaggaatgtcattttcaggcgtttcagcaattgcttgagtgagtttagatttaaactggttcagcagtgcaagggtctgatcttcccgggaagttcccttctttgactgttgcttcctcaaagcttcatacttttgcttttctcttctgtattcggcaacagcaccatctggaggggcttcttcctcttcacttcttttttctgcttgttttgctgcattttctacttttttttgttttgctgctaagagttcccgttttaattgtcttgcttcttttctgagctcttcactgcggctgactgatttcttctccacttctccttctccagctgatttaacattcgcacttgtgt

SEQ ID NO: 338505 - DNA, 1000 bp, Homo Sapiens
agattggaacgagacgacctgcttttattgagaagtctgttgctttaattaaaaaatgtagggatattagttatttcgactgcagaatcaagtgagtcccaaagttcccagcatctcctcatggtctttgttaggggtccaggctgactggggttcattggtgtccactgggggcagctcccgtgccttcagcagtcctgagtctccttctactgagtgtggagtctgcgtaccctccgggctagtggatggccagggtggcgtagatgctgggctcagctggaggttccctttcctgggatggaggaggctcagttgccttccgtctgagggtcaagctgtgcagctgggcgtaggtcacatcctggggggcttcagatgcagcagcccgagtgtccatctccaccccatcttcaggctgtgtgtccttcacggcagcatagaggttttcttcctgggcgtcggcagctgggctggacctccactgcaggcctctgtctgtgggctctggccccacagcccctgcaggatgttggaaatcagcctttctctgggtcgatgtccagtgtttgccctgacgtcgatgtcggaggatgaggaagaggaggaggaggaggaggagcagtaggacgacggccaccaagatgccgatcacaacccccaggtgccttcccagaccactttggggatccgacccagtgggggtgaggggctggtcctcagggcctgcaggtgtggagatgggaccggtgggtggggggctggaacccatggagggtcctgagaccacgagctccaggggctcactggggtgagacagcaggtaggggtcggagttgagtgagccgtagcacctgtaggtccccgcgtgggctgaggtcacaggactcatggggaattcagcctggtacttaggatattcgtgtattgatcttagacggagtggggcatcagctgctcccgccttggtcagaaggaaagtgtggaactgccgccatga

SEQ ID NO: 338506 - DNA, 1000 bp, Homo Sapiens
tttttttttttttttttttttttaggtacaaactggactttatttgagttaagaaataggtgtttccaaatttctccacgctcactacagtggccccctgcccctgctcctgcaccaaacttggttaactccctcattcccagacagagcaccccagccctgacagagaaggagggggccccaaatgggccctaaacctgccagggccagggctcagccaggctgttcatcagcacagagcctggggcctctggcttttggtcttttgtgaaatagaaagtgttgtgccattcgaaacccatttctagaatggtcagtgtcctaacccttcctggtaaggcctttgtcaacagcccctgctccttgggcccctccatgccatgccgtaatctctcccactctgtctcaccccacctcagctccgaggcatccttccctgactgtcacagacacacagacagacaaacagatagacaggcctgtagcagcagtagcacatgcactcgcccggtgctccccttcagggagagactcggggggttgatacccctcgcagccgccccttcccagcactcagtccatctgtgggcctcctggcctgcacagccatgtgtccacttggggagggagggtccacaggggcccatgggctatccccctgggggctgcatggggtggggaggggaggctgggacgggtccgggccggcaggcctgggtctgtgggcaggaggcagtgaaacacagcgaggtccgagaggtgcctgagacaggggcgcggctcggagggtagcggggggagcacaggtggccccctgagctcactcgcctcggacctccaagcgggcctcgcactgccgagcaccatactcattgaccgctttgcaagtgtagaaaccagcatcgccacgctctgcagccaggatccgcagccggcacagcccaccctcagcctcctccgcaaagcgccgctggtctgggcgcacgggctggcggtttct

SEQ ID NO: 338507 - DNA, 1000 bp, Homo Sapiens
ttttttttttttttttttttttttttttttttttttttttttcacctgccctccccacacacggggcccgagagggcattcaaaatgtgaactttaataacaggtcagagtgggggttccccaggaacgagaatgacggaactggtgctggaggcctcaagggtgcccacttccctgctctccaagttctggaggcaagaggcaatggaccctgttgaggcagggcagtgcccagctccatgtaagtccatctgtctgggtccctgagacccaagatgcagcagtgtgtggtagcagggggccgccctgcctgacccgggaggtcctgcagggaatgcggcccaggctggtcgggtgagcaggccaaaggctgtggggtcagatccggaagctttcctcccggccatcgatgtggcggagccgcaggtagacgtccgtgccaatgccctgcagggactgcagctgcagagacccaccgaggtactccgcgtaggcccgtgacgtgggcaacccgaagccaaagccgtgcatgggtcctgactgggcgccactatgcatgtccagatggccaaagagggggctgatccgggggtcctgtgtgctggcctcagcagtagtgaagtggtagtccatgacccggtccagatctttgtgagcgattcctccaccacggtctgagatcctgatgatcagatcgacatcattgttggcgatggtgatgaccacatctgggacattgtagggagtgtctaggtgactctccattgtggctctcatggcattcttgagcagctccggcaggatgtagtccagtggcatagggatgaaggggaaccgggcagccacatggccattgatgcggacacggggcgcattgccatacttgtgctcacacaggcgtctggcaaagtccacccacttctcaataatcttctttggtgagagacgagtacagatgatgccgaaaaagtcaggcttgtcctcatgcagcgccaggtga

SEQ ID NO: 338508 - DNA, 1000 bp, Homo Sapiens; identical to SEQ ID NO: 158672

SEQ ID NO: 338509 - DNA, 1000 bp, Homo Sapiens
ccaattttgcctaggttggcctcgaacgcatagcctcgcctccttgtgtgccaggacaaccggccggagccaccgcagctcccgataccgatgtttttaaaaatatgttttaaagtaattgcttaccacttagggaaaaaattgttgaagtataaaacagccagaacacattgctctttattttggtagcttatgtttggctgacttgcatatgttaaaaaattctcagattttagtctatggattttaatactatatgaaaattcttttatagtttctgaagacctatgttatacgctttctatgagaacttctaaattatcgttcaaaaacaaacactacccttacgatatacctttagcattaaacatttagatcatgtacccaaccattctatttttctaaacttctaacctgaagctttggttatgagggaaaacaaagtttgtaagggttcagttctctgagatttttcagaatgtttccaacgaaatacattcctatgttaaaaggccagctcagccaagcttccttctggacaaataatgaattggttttatttgaagttttattctgtaaacaaaaagctttggaaactttgggatttcctgatgaaaagctaggagaaatgcacacctagtcctcagccaacgaggcactaaccagcgagaccagatgttctaaccagtcttctctaatgctgtcaatctaagaccacaaccacatctatacttcacaagcatctcagaagtcctaaatccagtaagatgcagtacagttggtgatgtcactctgaaagatttatgaccttgcaggactttcggccactgctacaaaaaataaacagatagttgtgtgtggaaaagagaggatgtgggtgtggggtgggggcgggcgggggggctgactcatgaaaatcttcatttggactttttttctctaagtatagacatgccccactgaaacccaactcccaatgctgatcacactaggaatatta

SEQ ID NO: 338510 - DNA, 1000 bp, Homo Sapiens; identical to SEQ ID NO: 158675

SEQ ID NO: 338511 - DNA, 1000 bp, Homo Sapiens; identical to SEQ ID NO: 158676

SEQ ID NO: 338512 - DNA, 1000 bp, Homo Sapiens; identical to SEQ ID NO: 158677

SEQ ID NO: 338513 - DNA, 1000 bp, Homo Sapiens; identical to SEQ ID NO: 158678

SEQ ID NO: 338514 - DNA, 1000 bp, Homo Sapiens; identical to SEQ ID NO: 158680

SEQ ID NO: 338515 - DNA, 1000 bp, Homo Sapiens
ttttttttttttttgcagtttgaatcctggtttatttaagtagcattcaggagttatactgtaaataaacatcattatggctaatgactaattaaaatcaccattcattacaaataccaaccaggttagataatactattaactatcttttccccttcggtctggggttcatattcttccttttctggaagtcattttcatggataaaatatttagcattttttgttacctcttccttcaccaactgtactcaacacacttctgtaaacagagtgagaacctgggttcatggacaagctcttttccacttatcttcgggttaaaccaaaactttttcagcaactttgcccctgtccaagttttgcagaacaccagctgcctcttcctgttctaggcattctagggctagatacctgtgaacggacttcaagcattaaagaagtcatcagcatttcctatacctcacacacactcatttgcccaccctgaacttcactgacattaatttaggagcctgccttttgcctttcacatgttttctatttcccccactgtactgtaaaataagatctgccctgacattaagaaaaaaggcaactgttaaatttacttttccctttaaataacgggattttttccttttctataagattagcaaaatatttcacaatacctatattttttcccttaaataaaaatgtatgcaaaattactataatagacattgctcaataggtgctggtaggtttatcagcacactcttcctcctttcattgaaatgcggagattcccttgaagttggatactcttgaatgcaccatggagtctttagaaagcaacggtgccaattattaagtattgcaggaaaattactttctccttgagagaggaagagtaacaacatttctatcatgctctgggtgttatttcaatgccaaataactatgaagcttgaggtggattacagaaattatgagaataagaattatgagaataattc

SEQ ID NO: 338516 - DNA, 1000 bp, Homo Sapiens
tttgggtatatattttcttttatttgatttcaactagcaagagactaagactgatgtttgtttgtttgttttaccttcaaagtcttagtcttaaattgacaagggcacaaaaaaagtgaaattaaaataattttaacaaaagggaaagcatttgacagtgtttaaaagacagacaaatcaagcaaaactcaatgtggcttaaggtaaaaaatacaactaggtattaaacaatttgtaaaaacttacaaagaaaatttagctttcaagaaaaattaggcagatttccttctgccaaagtgacaggtcctgaggaaaaaaaacacaacctctacaagaccaagcacagctcaagggtcagggccccgtcctagtcatctttttattattcaatatccatcacagtggctgggcaaacaacaggcatcaataaatgtttactaactgaatgtgtattataaggtataatcggtataactgatatagctcaaatctaatcatgaaagcttctttaaagtaggataaaaagagcacaatcagcggtattccagaaggtaggcctaaatccagttatatttttctaatcgttgaccagtggttataaagactttctgagcttctttttaaagcaatgaaactctttccaaaagaaaccccatgcagttcttcagtacagaataaatatgccactaagtcagtgagaactccaacagcctcccctaagccagcccccaaggtgtctctgtggaacctactggaaaaaatattactcatcttagaaatgtgatagaaagcatggccattcggttctcaggtcatcattcctagaaaattaacagtattgtgaagaataaatcctaagtaatgttgctaatttaaataaagacaaaaattcaacaaagaggggattctatcacttagaaaaatgaaaaccacacctataaatggggggaggggcagaaaacaaaaaaaaaatcaggccacagtagataaaatacaaaaa

SEQ ID NO: 338517 - DNA, 1000 bp, Homo Sapiens
tttttttttttttttttcaagtgtacattttaaaaatcgtttaatggaacataaactcctttagaaaaacattcagctaggtgataacacccataggaaaaaacaccaatcttgtgtttatcttttttaatttggcatttgttatttgcatttatattaaagcaaagtgcatcttttctttatttttcttgtttatacacattgcacaatacataaataatgatgcttataaaacgtctttatatttacaagtaataatatatttatatataacataaaatacatttttttctttaataaatctcaggttttttttcaggagtcctttctctctcaaagcactacaatgctaaatttccaatgagaatgcttctcttgttcatttaaacctttgtagttagaaaaatagcttatgttaaagtctaaacatgctcattgagctaagaacagtgtcgaagtatcatacgagtgtatgagttgtagaagaaatgaaagaagagttaggtgtcagcctaggatggtaccttgggttatgacggaccaaatccttcttggagggaaggggactgctaagcatgtccctcccagggacatccccgcttgctggcctaatagcagagcttaacacacaggatgggagcaggcagtgctgagctggttttctaagtccgggaaaaacctgatgtcaccagggcaggcaggggagaggctgaggggagagggcactgggtgagcaatactgtgagggggctgccccggcagcccttgggaagcccatctcagggagatccaggagcagatggccaaaaaagaaagacgctacaatggcaggggctggcaggaagggaataagacaaggatgaaaataattggttctggttcggccactagcaggctcgctgctcagaagcctgtggacaggcccgtgtccttgatgagggagaggaggggcaggggctttcccaggctggggacagagccgtgctcctggcagctgctg

SEQ ID NO: 338518 - DNA, 1000 bp, Homo Sapiens
ttttttttttttttttttggtttttttttttttttttcttgccaacagcactaaaagtgacatcatttaaactgtagggtttcactgctttgtttcatctgagtgatatttgctttagtgctgctaatacctgacttttgctgtataaacagtttcaatgtttctgtgaggccacacaacatgctttataatgacacggctgactaaagctgtcttttattctgctaacacccttcaaatactgttgacaatatcgcctctcaagtgtttcctcccacaaaatctgctgcttatagcacaggcaccaaagtcctgcttttccaattgcactgtactggcatcaggttaactagaaagcacaaaacaaacggtgattaaaaaaaataagaacagtatacattctatgtatttacacatgtttttagaaacttcagttgcaaatctgaaatgatacaagccactccctgcaatagcctctatcctatggaaatgcagcttaagacatgactgttaagacactgaagaaatggggttatgtggagagcccatctgagtcagaactttgtccagccactgcagtggcccatgaagatgaatctcaatccagcagggggtgctggtgacatcctggcgatgatactcagcaccccaacccttaacaaaactcatccggatagtacacatcttggtcagttcatacacgacttcaaagccgtggtgaactgactgggccaggagctgagcgaagagctggttgttgaagaccttgaggctgcagccgctggggatcttgcagacggtagctgggtggaagccgtgttgatagttgcagttccggctctgcacaaagatgctgctgtcactcacgcactcggcatacacctctcccccgacgtagtacaagtgcacaccctttcctatatgtctcctggtattttctatcgttgagtttctgtttacattagaaagaagtccaagacagaatctgttcctgttattt

SEQ ID NO: 338519 - DNA, 1000 bp, Homo Sapiens
ttttttttttttttttttttactaattttactaatttattctttgacatacaccaatgtatgatattgaaaaacagaaagcaggtcataaagatggtcctgtccgataaaggaaatcttttaaaacactttcaaaagctaaaataactaaaactattaagcctattgatagctaagaaaataattgtcttcaataatattaggtggaaccatatgaaactgctgacagtttttaaactacaaatgcagcaatttcatatgtttcagcctaatccatggggttgtactgatctttctgaccattctcggctgaaaattgacatggtcaaagtccttgcccttcagtatatgcatcgtattagccctttcatggaagtatatctacataaatatatatgtatatatagtgggccaatgtaagcaaacacaaggtatcacaccaaatctattcttgagaaaaccattcctatttcaaacttaatgtttaaaagaatcatatattgattttgatttactccaggactgtgggggatggggagtggccatttctttatatttcttctaagttgtgatctctgtgttgactataaccatactaaatatgctatattcttatttggcctaaaatttattagattttccttgattgatcacgaataagtaaaattggcaaagcttctttcagagtcaaatcctgctttcacaaactgaaaggaaataatttactacatctgagatagagcctttttcaaatctgagaaatctgaaccaaatagaatgctttattttccaaagaaaaaaatcaagatgaaatacaaacaagtgaactaaaagccatatgaaataccctctctttagacagacccaatttcttcatatattcagttaaacccaaaagctaatccattaagttgtactattttcttcagataaatgtaattcagtgatagcagagctctgcaaaatttgaaagctcacctctctgtgtagtagggaatgga

SEQ ID NO: 338520 - DNA, 1000 bp, Homo Sapiens
ttttttttttttagttgtcaatgtaatttatataacttttatttttatataatttcacatgtacagaaaaatacccatatacctttacccaaatagctaccaccaagaaatctctgttgtaacatttcaatcgccattccctctgaaataataacaaagcactttatttgagtattccgtattccccaaagctagctgtgaaagacctacatcacctcaaaaccttccatttggttccatagatcctgccatgtcacattcttgtaaccagctgcagggccatcttgttataactggttcatgtcctgctaaagctgagaggtgaagggctaaaaacacagtcctggcacagattccaggacaccccggcacaggcttgtttgaggacattgcctgggtaaacagcctcccctgaaagtgttcagtgtacaactcttcacagagcaatcgctcaaatgcgtggcagcacgcagacatgtctctcggcttctctccttgtctctgttgccttcctctccagtcggtgctttagaaatgctttattcccattgtccactgaaaatacaacctagattccttcagtaaatatctgttaaggaggtcacatgaaaagattgctccaactcattcttgctggtgggctcccaagggtaaaataatatagttcgtgtcttctcagtcatgaggaaaccattgtcactaaatctccctgggatgcttcctacatccaaccaaacaaagggagcgacagctgaggtctccaggtcaaaaacaaatatgtcaccttgctgagagatgatggcagtgatctgcgccttgcagagccccacggcctccttcggtgaggacaagaagtggtagttggtcgggctcaggagttcatggtcagctgaaaggtaaaaggaaaccacacagctttcccgtgtgcaattcccacatctcctcagcaattcagacactggctcctcataaaggcagacagcctctcctcctttcatca

SEQ ID NO: 338521 - DNA, 1000 bp, Homo Sapiens; identical to SEQ ID NO: 246462

SEQ ID NO: 338522 - DNA, 1000 bp, Homo Sapiens
ttttttttttttttttttaaggtagaacctagcattttatttagatcttcattaaactgttggaattgagaaccagacatacgtaataaacctccaaaaatagatcctgaaaggcactttctgcttagggcaagcagtcatggaataagcatgtaaacaagctggcttctctgtaccacaccagccaagtcagctttctccatggccagccgcaccagctctgccctcccttctgttaacaccagccagaccccctgtaggtctaacccaaggtttttctgtaggacaccttggcctacctgggaatgctggaaacatgttgttaaaggaatcatggtgttgagagaaaaaaaaaaaatcttttaaaagctgccatctgaggtgatggcttctctgtacttacgccataccccagaatacaataaataagcaattagaaaacgttcaagtatgaagggatttcctcctccccgccaaaagcactgctctctgaaggaagctggtttctctgtagctacaccagctgttcagaaagctcattggacctggttttgaaaataaaacaaagttaaaaccctgggaggagttattgtgcagtgtggagtactcaggctttcttataaagaaaaaaaaaagttatctggtaccaaagtgtgcaacctacagaccctcaggtactgccctgtgacttctctgtatgacatcacaaggctgccaagtgcctgtttttctagaactaggagttggtgaggtttggctagtgctgaaaccatgcataggattggtttactaaattaaaaccttattacgtacgtcctccaaaagacagctgaaagtggagagattttgatttggtgctgttagaggtggcaattaagagcataagcaccagggagatggtttaatggtaactgccttttttgatgtcaggctggagctccaactgggaacttgcgttacatgcaagattgattggatagggaacactccctgacaaaga

SEQ ID NO: 338523 - DNA, 1000 bp, Homo Sapiens; identical to SEQ ID NO: 158681

SEQ ID NO: 338524 - DNA, 1000 bp, Homo Sapiens
ttttttttttttttttttttgtttttaatgtttgccatttatttttaaaatacttaattgtacatacttgtggagtacattttgacaaggtttcatacaagttgattccagggaaagagataattattgggagaaacatatttaaatcattgttttaacctatattaatctgtcttgctttctactaatagatttctggctgctcaaattcacattgcactggaaagctcagacatcaaggcaagttgagtactcatgggtattagactgtcccacgtgggccttagcctcagacagttattttgcttttgtgacctttaacatactttgtgatttaatgaatgccatctgttgttaaaagctgcaacacaggaactgctccacctcatgaacatactgatcatagctaagtctcaggaactgttagtatcataaacggtaataacttttcctggaagaccataaaatttggggattgcttgtaatatagcaaatgacctatttcccctaaaaaagcaatttgaaaacaatcctgagaaattacccttaggacacagaagtaaaataaattactaaagagtaattttaaaaaagtataataaacttttataaacttaaaaaaaaaaaaaaacaactggaattaaccttggaaagtcatctctaaggcctctagctttcatatgagttctctaatgactccttctcatagaaacctcatccataataccacagttctacctcttcactccaggttaagcaaaaagggaaagtctcacattcagaagtagatggaagtaataatcagggtacagtagaaagaaatccaatagacaacttcagaacaagttattttattttgatgaataaaagcagtagctggcaattgaaaaaaagttatttgctcaataggacagcacataccttaaaagtaatgggccttttcttacacatgaaaacaaaggtattggttatagagactacacattatttggttccaact

SEQ ID NO: 338525 - DNA, 1000 bp, Homo Sapiens
tttttttttttttttatcagaaacgtgtattctttttcttttaatagtaaacctctttacaacaaatatagtgaaagagttttcaaacaaaactcataagaatctcgaggactttgtcttttcttattgtgtagaatactaagaaagcatcaccatacagcacgaaaagaaatattgaaaacaaatcaacagcctcacacttggactcgccctgccccaggacccaggaagagccccaggagtgtgggtgattgtcaggtgtgggggtggggcacctccatggcccatcctgcccctcccttcctcttcctcaccacctccctccctctggagaatggggaagaggagagaatccagattctccattccagcctccctccccccatacaaataccattccttctaccaactgctttaaggggtggggagaggcagcagaggggagaacaaggagttcccaggctccatgtctcctcccctccgcgaaagcctaaacttacccctcaccccaccccaggggattccaaagagtcagttaaaaatatatagagatatagatatttctagatacacttttacatttctgtctctccaaacaaataaataatcagcaagagaaggtgcattacttccttcctgtccaaggtagggagggctgggagggggtcaggggtcagtcttgctgcactgagtgtgctgttgagggggggagaatggtgtgttccactgaggtggtgggggggggtgtcctcttgcccactgtccctgaaagctgtgggaaacctggggagggggagggccattagatgactccagtggttactttggcaaatgcccagttcttcagagggagtgggtggaggcgaatttggcttgagaggaagaagacattaagtcctcatctgaggtctgggttcccagggacccattcatctggccgcccaggagcccctacccccaagagaaaccttcggatactgaactgcagaaatgtcacata

SEQ ID NO: 338526 - DNA, 1000 bp, Homo Sapiens
ttttttttttttttttttgagctttcctaaaataaaccatttattgaaaaaagaacctttttcttaaatttcagtaatcagccttttgcattacaaacctgcagcttgccaacaacaacaaaaaaggtaaaggtttcacagtcagtgcactcaacaaacaggagattaaaaacaaggtatgggacgcctgataacactacaacttcttttgaacctagaaaggtcaaaacactacgctgatgtcacggttctcagtcgcgcgagacacggaggagacagaggcgatggtccgtgtacagtagtaatggcacttaacatgcagcttctttaacctcgtggccaccagccctccagagggccttttgccacatcagacaaacaggagcagcaggagaagtgacgcttgtcacctgtgcagtcttcagtcttggaaggttaaaaaggcttatactgcttctcagcacagtctttatgtaaatattacatacagtagtgattaagagaattttccaagtccatattctactaggcttcattcttcatctgtgcaaaccttgacaaacgaatggtcgaggagctggctggcggtccatctcatctttgggtcactctcaaggcagtgagaaaggaagtcctttccttcagggcttaatctttcagggattggtggcttatgtcccatccccactttatacataatttgaaagttgtgctcatactcatgccaaggcctcttgccagtcaccatctctatgacaacacaccccagactccagatgtcggccgcacgcccatggccctctcctttggcacgagtgatgacttcaggtgccatgtatgctgctgtccccagggtgctgttcacttcaccaggcatggtctgggcattgtttttgagctttactgaacatccaaaatctcccagtttgattaatccagatgaggtaaggaagatattggcacctttaatgtcacggtggactatgccatgctcatggag

SEQ ID NO: 338527 - DNA, 1000 bp, Homo Sapiens
tttttttttttttttttttttgttgagagtctctttaatttttagagtaaatatgacacaatggatagctttagaacaagctaacattactacagttcaagcatgtgcaactggtacagttcagtagtacataaacgactcaaacaaatgtacgacaggtcagaaacttaagttacaaaatagagtcaatattacaattaacacagagaagtaaaaaccattgctctcagattctgcacacttaaaaaaacataaactttatacagtaattgaaattacgcatttctactcagattattagagcatattacaaacacacagaagcctaaacagttatggtcacattttggttttgttccagtggtgcacgatcacatgaaatgttacatccgttttgtgtgaaataaacatttggctgaagtgcaatagctgctgcattaaaaatatttccataaaaatgcttagattaaaatcttcctgaacattagggttctaatgttcaggattattttaagagtccttatgaagagtccttaaaaattatagaaatagatgtagttaggaaatttcagtgtgttttgtctgttttttttttttttaacatgagtaaacaaatactggatttaaagtgcagcgcctttctcctctcccttcgattttcccacccccaagaagatcagctctgtattaatttttagaatttccatcgaagattagattgagcaacagtcaagtctgtttgtttcgaaagtcaatgatagccttccacagtgtgcacagcatccctccccttagtctcaagcattttaagtcatcacgtgtaacatagtagagaacatccaatagtgtataatcttcagccaaaaaccggcttatagtgtcttcatcagctccattcactctcagccagtcggtaagttcagaatcttcagtatttgtgccagaagaatttagatgaaatacaggcaattcaggaatttctatgggttgggacttaagc

SEQ ID NO: 338528 - DNA, 1000 bp, Homo Sapiens
ttatttacaaaggatcatttattaaacacattttaaaaacaaaatacaaagatagttgttctgcatgaatacatcacatatgaaaaaataatgtgtttttaccgaatttaatttgaagatattcagaattttgttttctatcaacttgagcaaccagtttcgctttgcaccttgtctaacactgttgtcaatcaggaagaaatgttttcttgttaattaaatcatattcatacagctaatattttacagaaataaaataagacaatgtctgtcatacaaagctctttctgcaaggtaactgatttgcctatgatcctaatttttttaagctataagataggaagaattcaggagctaggtaagttttataataacgtattagcagcagttgatagtaaatgcaacataagatttgttttgtctgtggtacaagaatatgtcctatcagactctactgtatttttctctacttgaacacaggtaagcacatactgattgtctctgggatgacaaaatgtataaaaaagacaagaaactggctctggttgtcattgtgagtgcctattttcatcagctaatatgaatgcattgctaaattagtgaagacaggaaaatgacttaagggtaatatatacagagttaaaatacactttttatccacttgagtgaattcaggcactgtggctgttcaggataaaatgtttcatggtttattcttgatagcaatttaattttcagtgcaagcaaaagcaaatacctgcccactgtaatacacatgatctcacacatctggaatgttcaatgcaagttcatcctcggcatcttcactctggagacatcttgaataaaaaaccgttcatagtttgctcttgatagcaatttaattttcagtgcaagcaaaagcaaacacatacctgctcactgccatacgcacgaccaaacacatctggaatattcaaagcaagttcaccttctccatcttcactgtggaagctcttta

SEQ ID NO: 338529 - DNA, 1000 bp, Homo Sapiens
ttttttttttttttttttttttttttttttgtcatcataagtgtttattatatacagttgaagcaggtggcatcatccatcatttttcttcctcttgatgtctagatcagttgtgtgtgtattttaatatagtaacacaccctcacaattatctaatcttatttcaggttagtgcttctcggaaaggctacaaaagcagccatagctcagaattacgtatctgaagtaaacaaaaataaaaacctcaacaacaaaatattaaccaaacaaacaagataaagacgcatgcaacctatagcaccatacctaagaccacaaagggcaggagggttgacagaggtcttaagaggaatccagttttgggttttctcctaggatgagatcccaaatatagaacctatttgtagagtccaatacttttaaaaagggaaagcctgagaaattctgttaacagaaatatgaaaatccatgattttccagaagacagatgatttgacactgttcttattctaaaagcatcaaagacgttataccttagaaataaactgctcactttggaagatcagttaggcaatccctgccaacctcaatgaactaaaatgatgtctcagtaagttaaaaatatgatacacccccaccaaggaccaatttactcatggaaagtagtttacagagcagttagctctctgacatctgtataaccctacagacatgtgctacattgaaaagattcaatcttgcacatatcattatatgctccacatggcaaaacatctgaaaaacactcagatgtttttcaaaaacctctgtgcattatgacattggtgtggaaatttagatctcagcttaatcctttccaaaagaagcgagtaaaagtcccgggaaaggtttacttagagatgagtgaagattctggtaatttaaaggtgatgggttaagaagctatagagctagaaacaacttcagatctcacctaatccctcatcttattgacggaaaa

SEQ ID NO: 338530 - DNA, 1000 bp, Homo Sapiens
cccgtgaagaagataaatatattttggaagctgcctgtgtcctctggggtgaaaagccagcatgagggccccaaacgcccaccctgccaacccatgccggctcctctgacctcgctccctttctccccatagacccgccccacccccttctgtgtcgctgggcttcaggacaaggggcaagagaggcaaccagggagacaaggggaagtgtcttggggacagggggccacagcagttgtggcacatggtaccccagggccgacgcagggccgacgggcaagaggctgttatctccagcctggggcttccgggcctttcttgaggccaccatgggaatgtgatgtgtgagagaggggctaggagagacagagacacacgcacctgggatcggcggtccggacaggggcagggaaaccacacgccctactttgccctttcctgtccatcccagacctactcagatccctcagtgcctaagaaaacaggacagtgaggactgggggttaggggacggggcttaggggctggggcagggcccgtgagaggtggagggtgggaaagagggagggaggggtgactgtgtggtggtgctgcctctgaacaccctccccttccccagtccccagccctatggtgatttaaaggggctgagaagccaagaggcagcgggcccatggaaagcaggaagacctgggggtggcaggtggccactaacagcccagcagctccaggcgcagggcgatgcggttgtgccaggctacaggcaggatgcgcacatagcgagccaggatgggcgtctcaaacaagttcttcttgtgggagtggttgtcccagttgccagggaagatcttactgctgccagtcctggggtcctggtactcagtccagttcgcactgtcattactgtaggcaaccttgtaggatgccacaaactggacagagccaaagttacgggccccctgggtgatgatgcctgtcacctccttcgaggagcccaggt

SEQ ID NO: 338531 - DNA, 1000 bp, Homo Sapiens; identical to SEQ ID NO: 158683

SEQ ID NO: 338532 - DNA, 1000 bp, Homo Sapiens
ttttttttttttttttttaattaaaacaaattatttattccaagttctaccagtttaaagtttttcagaattacagaagcgaacaatgaaacaatcagaaacaagctctcacagctgtagcatttataacaaagtcattactacatgaccttgattagaggtgtagagtgtttcttttattcagaatccatgaggaaagtttcgaagtccagatccaagtcggaaacgagggcacttacgaagtcatcaacagaaggacacttctgaagcataccttcaaccatgagcatgggctccctgcctccaccgtgggccagcatctccctgcgatagcgctccccggcagccctgttgaaaggatcctgtagaaaacactccttccaaaccatggaggcgaccgctctggacatgaggtaagagtaatatctagcaccataccccacgaggtggctgaatcgcagctgccaggcagtatttggaacatatggtaggccatagaatttctcttgtgtttccttgagaatgtctgtggttgaattcctcaggggatgcttcccatggtagatttgatccagagtggcataaaagacctgaagttgcatatcagctgcagcacaaacctttttagattcacaaagacgagacaccatattttttggcagtggctgtccagtctgataatgtctggcaaattggttaactactcgataatcatttgcaaagtactccatcagaatagaaggaacctcagcaaaatcagtagggcacctggtcccagtgacgtgttggtaacgagtacgtcctagcattgaatgcatggcatgtcccatttcatggaaaagattttccatcatgccaggagttagcaaagttggagaactccttgaggaacggggaagattcagcataagaactacaagtgggagttgatagtctccatcttcctttagtctgcctccacggatagtgaaatggcaatcctgatgtggtttgtctgctc

SEQ ID NO: 338533 - DNA, 1000 bp, Homo Sapiens
ttgggggattcttgggaatgacccatcacaattcctcaatctgcacttttgtgcggagattcccttggtcacttttgaaatgaactcagatgtgtttggagatagctgtgccgtttttgccttctttccctcttgtagggaaaccttcgcttattcccccaagttgctggcaggtgtgctgaaaatttggcaatggactcaaggctgagctagaagaggaatttctcatttttgtggttgacaattagggggtggaaaggcaaggcaaaccatctgcagctggcaggagaaggaagctgtgggttcctcccctgtcctcagggtttagggttggtagagagtgaggaggggctcacagtacagcatggcctagcagggcagtaactaggtctatttagctgagttccccccaccccctgactggcctttgggtctttctcaaggtgaattcaggacccatcagtgcattaatcatttcagtaacaaatgcagcttaaggttttttttttttctttaaaaaaaataggaatacaaggatttacaaaaaaacctcacacagtgcaataataaaggaaagcagacactagtggaacccctagggccactgcatcttgttcatgggcaaaaggaggaagggaggtgaggtctgggtagagtgcttttcccagtcccctgctggcacttctccatgatgacaaggaagtctctgccatcctggccacagtgctgggctccctgcatgacagtgaaaacagtgacaatgttccagcaaagccaccagacaaagttcttaaggtcacaggagagaagggagcccaggatggaaggcacagcagagccatgagtcctggggcagagagtgctgggctgagtcgtattgctttgctagacttccataggaatgggcttcttgcggcgagaaaagggtgccccaccctctacttggactacactactctgaaaccttgtggcagaggcagagaaaaatctgctttatcgt

SEQ ID NO: 338534 - DNA, 1000 bp, Homo Sapiens; identical to SEQ ID NO: 158684

SEQ ID NO: 338535 - DNA, 1000 bp, Homo Sapiens; identical to SEQ ID NO: 158685

SEQ ID NO: 338536 - DNA, 1000 bp, Homo Sapiens; identical to SEQ ID NO: 158686

SEQ ID NO: 338537 - DNA, 1000 bp, Homo Sapiens
tttttttttttttttttttttttttttttttctgctggttataggcatttattgaatttattcatttattgatttgacacacttccccactccaatctagcacatgatacaatctgggtaggccaggcgctgacacaggaaatgatgggaacccacagcaggggtgggggaggggacgatgcaaagggcactgggggaagggctgctttgggggctggggtggagaaggagccccagatggcctccctggcaggtgctagtaaacctgatccacatccccccccatccctgctcatttcccagaccctcagccaagctccccagctcccccttccctgttcctcccctccccgctgcctgctgccacacacacttccacataacccctgcagtcagggaaggggaagaagggcagggacagctgtcaggggccttgaacagggaggtctctgtacctaactttaccatcctaaatccttccctccttctcttctctcccctcccagtcccttccctggccccaagctaattccaggccttcaatgtactctcccaccatagcactaacccatgctgggtcatagaagagtgtggctgcaccctaacaccacacactcccaggcacaagttgaaggaatgaggggacctgggttagcttttttgttagggaaactctaacctatttctgcatagacctttctctatacctggtccgtaggggagctcttccctgtgtttactattactccccacctctccccacttccctgtgtctcctaatatttattgtctgtagtgtttgtatcatgtcactatcacaaagccttcagaaagaaaaaaaagcattctgcccaccactagcaccctgccatggttaaaaaatctctatatttgtgtttatatttctttaaaagtttataaaaagcctttctgttatctgcagccttctaagggtgatttggcctggcgagccactccagtgctcagaccttggcccttc

SEQ ID NO: 338538 - DNA, 1000 bp, Homo Sapiens; identical to SEQ ID NO: 158687

SEQ ID NO: 338539 - DNA, 1000 bp, Homo Sapiens
tgttggaaaatggctgtcccaacagtctaacgtcctgcatgtgtattccaaatctcccacctgacaaaatggtgcgtaggagactatccaaagcagtcagagagctatcttctttggagacaaagctgttttgggtcttcacactttcctggaagttcaattgtgggttttttgtttaaactcttttttccctttgttttaaagccaaaaaagaaaaaaagaaaaaaagaaaaaaagaaaaaccgtgggttttctgatttgctttttttttctccccccagaaatgggctcagacttcagaaggaaaataacattagaaacttttaagaaagaatcttttcttctttttctcctcttctttagttaatcctgaaattttactgggcattgagcgtgcagaggaaaggcctagaactgaatgacaaagaaagacaaaggactgaagaacagcagatactgtgcatcatggaagcttccccatgagtgtatttccactcatgtgcaggaccagcaaccctctggtttgaaaggtcagccccgaatcaggctgccacaagcctgctcctagctaggaaacagcataacagctcttgtcttgaatctcaagttaccacaaactcctgcaaaagaaagaaagaagaaaaaaccctacatcacacccactcttgcatagagcgtttacagtacagtatgtggcggggtgttcctttcctcttgaactggaacacagtgtaaaccaatacaaggaggcataaggccaagatgcagggaatgacaatagctatggctttcacagtgctggctgtgttgtccagtttgatgacaatgtctacatcatctggtgggctgtgtccttctttaactctgtctgttggtccatcacagcccataaaatccttgaggatggatcttggatatccaggttctaccttgagtatctggttgttgaatttccaatactcctttcctttgtagaaatacgtaaagccattttctttgt

SEQ ID NO: 338540 - DNA, 1000 bp, Homo Sapiens
tttttttttttttttttggagtcaacacttttaattgttcaatattttactacaaatataagaaacaatacagaattaaataacacatgaaaatcttgctatatatatatataaatatccaatttaacagcgaaaacaacttacactttaattcctaggccactggatagacacagacaaagcagaagatactgaaaaagcaactaattatggttattaaagattcaacatcattccactagctggaacaatatctttagaacaaagggattgtatgctcatatttgcctcctctgctattgggaaaagttaacgcatggaaaaagaagccagcagagacaaagcatatgaattggctgactgctatacaggaaatctcctaaacatctgttttcataatgtattttcattatatgaggctgaatttagaatgacgtaaaatagggctgggtcatgttataagacaaatggacagggagggcatgcttctcaaaaaatgtgagctattgtctaagactaacaatatttatctagctataaaaataagttaaatgaataagttaagattgccaatgttacttcacaataaattcagtcctatttgtgttggagtaaatctcatagaagcacatgaagaacagcagtgaaaccaaggattctagcaaggccagctattagcaaagcagtaagcaggaactggactagataccaaatgatggggaaacagactcatagacctaagaacataggaagaagagatgtaacatcaacagaaaggcaaaaggtaagctctctgtattctttcttctctctctctttcaattcttccccctttgcttattccctttttttttctggaattacattttaaattaagttttagagctatgtggtaaattatttggtccaattcctttatactttggatgaggtaaagtgactaacagaggtccccaccagtaggagcccaagtcagtctgtgagctcagtgctcctgata

SEQ ID NO: 338541 - DNA, 396 bp, Homo Sapiens
ctaagtgtttaattattattcacatatttcacagaaaaaagggaatgtagcaaaggggtcaagattgtagcaaaaaacaaaaaatcctagattttacgggtcactctatttgtacttgggagcagggctgtcccgacatcaggcgcagcagctgcacttctccgatgcccctttgcagatgcagccttgggcacacttggcacagcccacagggcagcaggagcagcagctcttcttgcaggaggtgcatttgcactctttgcacttgcaggagctggcgcaggtgcaggagacaccagcggcacaggagcagttggggtccattgcaacccgaggcgagactagagttcccaagcgagaagggaagaggcagtgggtgcacgtggaaggcggagt

SEQ ID NO: 338542 - DNA, 372 bp, Homo Sapiens
ttttattatcattcacattatttcatagaaaaaggaatatagcaaacggtcacggtcagggttgtacataaaaaatccaggtttgtggaagtcgcgttctttacatctgggagcggggctgtcccagcatcaggcgcagcagctgcacttgtccgacgcccctttgcagatgcagccttgggcacacttggcacagcccacagggcagcaggagcagcagcttttcttgcacgaagtgcatttgcactctttgcatttgcaggaaccggcgcaggtgcaggagtcaccggcggcgcaggagcagttgggatccatggcgtgctgaagaggcggctagagtcgggacaggttgcacgcgggttcgctgggact

SEQ ID NO: 338543 - DNA, 1000 bp, Homo Sapiens
ccttaaatctgcaccttcttctgataagcaaaatgcagcccttctgctctgaggaagaaaataccattaaaaagaaggcagaccaccaaacagcactggccataagccacaagttcactctaggacaaaacagcgatgttccccaaggaaaattcactgcgatctgcaagccctggcaaccaaccgagagaaagaaccaggaaggcaaggacagtgatcatgttgctagagcctgctttgcacacacgtcatcaacagacagcagtcaacaagctgcctagggcctctgcagagccagatcaaccccacagcctgtgagccaggccttaagctgcctatttgtgctgaagcgggctgcagaacgacccgtgttatccaccctgagcaccaccaacactaagcacaaatgacaacaccatctcacctgaaccctgtccaactcacagctgcctcactggcctttgccactgccctctctgatggagcaagggtctggccttccaagcaaatgtcagcctcagattcaaaagacacataggaaggagcaacacccaacacactgaaaactcctgcccgatccacaaagaccccagtgcaagcgatgggcagcatcagattgatggaaaccacaccctttcatttagaatttttatgcacacgagtaaccttagtttccaagttcacatgacaacaagcaaaagtgacatacagtgcagccaaacagttcacttataacttagctttttttgttgttttttttgttttttgtttttttccaaagaatagttccttaaaatggatgctcctgggatgtgaataaagaaaatacgtctgaaaggtgaggatttcaaacagtagatttcttcatccttcaaatttctgacccatgatggcaggcattgtacctcatgcctcctgctcacccgcttttcccagaggtgagcacacatgggcccttcacttggagaagctgctggtgaggcccatctcctcctccccc

SEQ ID NO: 338544 - DNA, 1000 bp, Homo Sapiens
tttttttttttttttttttgtagaaatgggatctcactatgttgccagggcttgtctcaaactcctgggctcaagcgatctatctgccttggcctcccaaagcattgggcaggcccattacgccatgagccaccacacctgctggtttttgttttttaaatggaattgaaaggaactagccttggctagttgcagaattcacacatatggggctatggcaacagcagattctggagtctcagggtcttttctttctagataagttacagggcaattgcttttcagagtacttttacatttctattccattcttgtcagtaaagacaaggatcccataagctgatggagaaactgaggcctctagaaactaaacgctgggaatggcacccagggtgctgaattccagggtctcctcttttctgccacaggcacacatgccccagcagcccctttggagagccccctctctatagggtactagccgggggctcagactctggagtcagacggcttccgagggatgaggcctcagacaagtaactcagctttgaaatgttttcagtggggagagaaatagccccctcccagggctgtgctccgggaactgactgagggctaactattatgggcccaccccattgttggaatgtcttcagccacatgggggaatgggtggaagaggccgggatgtgtcctgccagctagagcagcgaagaaatcccagcggggccccaggaagtccaagcccatggggttcaggtgctcctctctggctattccttcagacccacagctgctggacacaggccacagagctggtgcctcccgcgccatcactgcagtgcagcctgggtggacggaggaagccaaggggaacggcctgggctcagagtaaggagaccttgccccgggggacaaacggtgtctgaagtgcaggggtgaagcggtctccagtcctcaggggcctggaaatcagctccttgggacacggtcttatgtg

SEQ ID NO: 338545 - DNA, 1000 bp, Homo Sapiens
ttcttcgttcacagtttttatttcttccaattaacttttgtgtcttcaaagttgatttgtcttttaaaaaattaatacttcttactcatacaatctacaccaccccaaggaaaacaaacccagggaagggtaatttagggggcagttaaaatgtgcactataggtttataacaaatgctttccagcccataatcctgtacatatgcaacaaaatggcacctcaagttcatctgaatgaaggcccaaataatgcaagcgaaggccatgagaataacaaaacaaacagaagcttagtcactggcttcattcactttgtatggtagcacagtcttcaaactgtctcacacttgatcaagagtaagcaaacacagagacaacatcttgactcagccattagtaattataagtgaaaccagaaataatttacctgggccacaaaaaggaattgttttgtcctgtttttcattaagtccctagcacctgaaacgtagcaagttctgatactgggcttctaaaggcatgcagtttttcactcacatctacttcaaagaatttcttccactgaaacatagcacaatcaaggaaaaacttcttctggaggcaaaggaagagcacaagtatatgttgaggcgtaatgtatgaccaagatggtacactatatatagaagcagtgaatgctgttaaagtgtcactcacaaagggatagtctaacattaacacacaactcaactgcactgctaaatatggttgtctttattttctttttccttgcccagccctatctaaacataaaataaaactacaggactgaaattaacaatccattaaaatcagcaataagttatgaaaatcataaagcttttttttttttttaagtaattaagggtagttaaattatttaaagtatacaaagtccaaacagccaggggtaaggtctccaagaggccttcccagggtaagggagagggccacaagggaaccttggagtttgaaagacaaa

SEQ ID NO: 338546 - DNA, 1000 bp, Homo Sapiens
tggcagataaattttttatctccaaaagtcataagtacaaaatggagtgacaaagattttcacattttgtgcatttctttggtcacctttcagcagttagataaattactcttcacttatgatttttgtgtgaacctccctgctcttcaccctcagcttgttgacctgggactcagcaatgtcagccctttcctcggcctcctccagctcgtgctggatcctccggaatttggagaggttgacgttggattgttcctccgcttcttcagcttgtctcttgtaggatttcacctttgcttgcagcttgtccaccaggtcctgcagcctgagaatattcttgcggtcttcctcagtttggtaagtgagttccttcacttttctctcatgtttgcgtagacccttgacagcttcaacattgcgcttctgttcactttcaacttcaccttcaagttcacgaaccctggcctccagtttctggatctgcttcttcccacccttcagggccagctgctcagcctcatccagacgatgctgcaggtccttcaccgtctgttccaagttcttcttcatccgctccagatgggcgctggtgtcctgttccttcttcagctcctcagccatcatggcagcatcagtgatggccttcttggccttctcttctgcattgcgggcttcctggatgatgtcttccatctctccctggatttgggaaatgtctgtctccagcttcttcttggtgttgatcaggctggtgttctgggtgtgcaggagctgaacacgttcactggcatccaggagctcctgttctgcgattttcctgctcctctccgtctgttccagagtggctcgtagttcctcgatctcagcctgcagcaggttggctctgcgctccaccatagccagctgttccttcaggtcctcttggctccggagagcatcatctaggtggagctgggtatccttgaggatggcttgggtgttcctatagttcctcagggcc

SEQ ID NO: 338547 - DNA, 1000 bp, Homo Sapiens
ttcacatgattattcttgtttattgaggtctctttattctccacgggtgcttttttcttcaagtaaacagagcaggcgcaaatatctataatgaataaatttattgtcttacaaaaatcattgtctagaaatatgggaatacaagaaaagatatttgcggtcaggtgtctggtggtcaacagccagtacagttcataaagggggaaaatccaagattccaaacccacaggacaaattcttcctaatagatgttaaagcttttaacccaaaaggtttgtgttttcaagcacattgcagaggatcaaggatttagaattaacactgattcattgtcactgaatgtctgtaataccactttgactagagaggtacatgatatgaagcacagtcaaaactgaatacattaaattgttatagaggcgaatgatatattcaacattgtcttagtactgtagtgtctaaggcactttccgtaatgtcagtttgcttaactaccaaccaaaaacaggatgctaagtgttcactgtaacactgtccaaagggaagggagaaggaaaaatgaaggagtcacacccactggcatgtcaacattcaggaagatggcatctgttctggaggctccataaacctcattgacaaacttggaacaagcctcggacacaaaaccaatattcccattttgggctcaaagcagcggctgaatttgcaaggtcagcatgagggcccggctggcgacagggaggggccttccaccagctcggcttaggggtccacggctgcttgctcctgacgtgaggagggcgccggcagagccaggcggttcgggagaccatctggaagtctacatgatccatggctgccacctggggcctcagctgcagtgtggccactatcccttctatgcacagaccagccctcgccaaggccagttcacatgagtagatgcgggacaccatcgactcgaggggcagggccccccttgggggatggacatggtaac

SEQ ID NO: 338548 - DNA, 1000 bp, Homo Sapiens; identical to SEQ ID NO: 158690

SEQ ID NO: 338549 - DNA, 1000 bp, Homo Sapiens
tttttttttttttttcctaagccataaaataaattttattccaaaataacaaaataaataatctactgtacacaatctgaaaagaaagacgctctaactgctcagataggtgctgcggtccagcccccagctggaggagaccctgagtccaacccaggcctcccgagggggccagtgaagggatcccacacccaccgcccctatgtagggcagggaagaaattgcaaaggacttgggggatagatgggaatgggagggcaaactgcagcacttgttaaattaattaaagaaacaaaccagaagcacaaaaacggggaaggagaggggagaaggagcaggtccagtgttcccaggcccccaattctgggggcaaatgttgccacttttagctggaccttcccagggaagtccccctttcccccttgtccaaactgagtccaactgctcacaccactggtgcaaacctaaagagaatgggagtgtgttgtgtgagggaggggaaaaccccagatgccctggaggcagagtccttgccccctcgctctgggcaggggtgagggcaccacgcaccctccttgtgtcctctctccaggcctctgcttgttattgcttgaagccccacagtcttatgcccatggagcaggtggggaggcaggagaagggcagaggaaggatccagggttgtgactagattccggggatggagagcgtgggggtctgtgtgagccagaagtctgaggtcctgggtctgaagacaccagtccaaccctcactgccggctggcctcagcctccactttcacgctgctcctgcgaccctccaccagcgcgggatggggtcctggggcaggacatctgtccagcagcccttcctcgaactctgcgagaggtggcttcgcaggcacacaggggctgaggcggcccacgcggtcgtgggagacgaggcgggcgagccgcagcccctcgtccatcagtgtctgctgcaggatgtgtcggctcca

SEQ ID NO: 338550 - DNA, 1000 bp, Homo Sapiens
ttttttttttttttttttttttttcaggaaccggtatttattatcaaagtcatattcgatgtcaacaagatgccacaactacaaaaaaaattgcgcacattgcaatctcaatgcaaacagtcaaatggaaccccagtcattaaaaaagtaattcaaattaccccaaaaagcaactgaattttttaaacatctttatacatccagccaacaaattaaaatggttaacaagaaaaaatacaaattcagaggtctcgtatcgatgtttaaaaaaggcaactgcttaagcgtttctatcaattcgaacgtcaatctctcggccactcagcttcatgccattcatcatccggcaggctctctcggccacctctggcgactcgaacttaaccacaccacaccccttggacttcccattctccatcttgatgtcggcgtacagcacgtggccgcactcgttgaatttgtcctttagcatcttccatgtgaaatcgaatggcagatttctcacaaatatctggcaggccttcctggccaccccaggagcatggcctccagctccaccaaaggaacctgcgaagcttcctccgaagttgccacgctccatctcgatggcacggtcaaagctggcaccgccaccgccacccatggccaggcccatgcgctcaatgccagcgcccagggccgggcccatggcggggcccatgcgctcgaggctgttggcacccatgcgctccaggcccatgcgctcgaggctgttggcgcccatgcgctccaggcccatccgctccagattgttggcgcccatgcgctccaggccggtggccatgcgatccatcacggggcccatgcgctccaggccagctcccatacctgcgggcaccatgcgctccatgctcaggcccatgcgctcgatggcagggcccatgcgctccacgccagagcccatgcgctcaatggtctggcccacacggtcgatgggagcggccatgcgctcaaggccgaa

SEQ ID NO: 338551 - DNA, 1000 bp, Homo Sapiens; identical to SEQ ID NO: 158691

SEQ ID NO: 338552 - DNA, 1000 bp, Homo Sapiens; identical to SEQ ID NO: 158693

SEQ ID NO: 338553 - DNA, 1000 bp, Homo Sapiens
accctgtgatttgggaagtgaatgaagtcgtcatataatataataactatcatcatatagtatttcactccgtgaatacgatgagtgttaccttggccaagcaccgaattcacagtcggctcagggcctactgtaatcttttctccactaatttgaattggagcgacactgctgggggcggggaaggggggatagaatctcaatcctgagatgaatctcagctaatttccttgcccccaccctgtgatatttttaaatggagtcattaaaaatttatatttgcttttttctgtgttgttctaatcaacaaaacaaggaaataaggtggttggagcacctggcattggctatttcagctgactgtgcacgaagcacctgcaataagatgccaaactgtaaaagctgcttgcctggcgtcccgggcgcactaactcagcttttcatagtctgtgcctctaaagtggggcccacatcctaatcttgagccaagacctagatgccaacaattggacacagaaactccagggtacacacaggggagcacaggggccagactgagagtggacgtcagtcaaagaacctcagagagagtcctttaagtttgtatatttcagagaaaaccctcaaggtcccattggaccctcaaggtcccggtgagttaacagaacaagcattataaaatttcccaaatcatctcccggagaggactggggaggcccttatcccggactaagtcgtagtggtgctcagccatccatgggcgcacagactcttccagaaacaactgcttcagaaaggatcaaatagctaaaagaaataaaaataaagaaaaagaaaagagggggggggtttattatcttgttagaaagcagtggacatcattcttgaacttttttgtaatcactttaacgaatgagtggtttaagcaaaattatcaaaatgacttcccaaattacacgtcaattgtcagatcagcattatacttaaagctattctcgaa

SEQ ID NO: 338554 - DNA, 1000 bp, Homo Sapiens
gatgcaacaaatcattatactttattatttcttgtgaacaaaatattttccagaggtcagtgttataagtaataatattggaatcagtgaaaacaatcagtatagaccaaattttttaaaatgataatttctcaaaaatatatgtcttgaggtcattgaacattatctataagcaactgatcttgggaaaacataatttttgaagaactctctcagcctatgacagtatgacagtgacctaatgtgaatgaataaaatatatttcttttcttttttttttgtttttgagacggagtctcgctctttcacccaggccggactgcagtggcgctatctcggctcactgcaagctcctcctcccgggttcatgccattcttctgcctcagcctcctgagtagctgggattacaggcccccgccaccgcgcctggctaattttttgtatttttagtagagacggggtttcaccttgttagccaagatggtctcgatctcctgacctcctgatctgcccaccttggcctcccaaagtgctgggattataggcatgagccaccgcacccggccaataaaatatatttctgtagttgaattgaaaatagatatatctctattgctgaattctaataatcttattcactctttaaattgtacatacaggaaaattaccagagttcttttgaacttgctttctcaaaattcatataaaattctcaaaattcatataagctatccaagtaacactattaaagtcttaagtacaataatcttataaagcaccttgtttcaatatatctcccaagttaagaagaaaagccaatatatggcttctcttttactattttacaaggcagggttttatttgtatatgttggttgtttcaagccttttcacgtaatagtggttctataatcaatgtaggcaagattgacagtaagatgtgtaagtatggatcagcagccatgttgagactcaggccctttaaggatgcaagagagat

SEQ ID NO: 338555 - DNA, 1000 bp, Homo Sapiens
ttttttttttttttttggttcaaacatttgcttttattgcgttatatacattctgcagctgtagaatcagaatctgggggaagtcaactgagaccccgaaggcccagcaggagtccatctgaggtacagaacctgtgcttctgccatgttcctggggcaggggcattccatttccccctgatgctttttcttcctgaagagaagtccaacagactgccagcccatgtctgaaatgcaaggtgggactcctgaacacagtcggggggatggggcagaggcaaacagccctcctgtttcacctgcagacagggtgggccagagtgctatggagcagactgggttgtggaagcctcgtgtgctgaggaatcagtccctgcacacaggagcctgtgcgggggccagcacgcatcgcagcctggcagtacagcctgtgcttctccatgcctccggtgccaacaccccgcacgtgccacaccaactgctccacctaacatgctcagtggcacaggctcaggcagcaaacgtgttccaacccacctgggcagaagaggccaggccagcagaccaagtcctgtgtgtacgcgtatgtgtgtgcattcacacccatgtgcaggaagggggacgcgagatggcatgaaacacgggagaagcagaataaacatttcagcctccctctttccccggtccccgccccccacatagacaaggctttgtcttaagtggaaagcaaactgggagaacaggaggaatgaggccatctcctgagcagccagctgcaggcctggctcctctgggaacagaaatggctgtgagggacttgatgattgagtgactctgcagggaatggctgaaaaaccaagaattccagcccggatgagcccacggggacttcatcagcagtgctttgtcccacagagagcaaaactggtattttcgcaaacaggagaggactcgaggccacagaacacccattcctcttggaccctgaccccaccaacag

SEQ ID NO: 338556 - DNA, 1000 bp, Homo Sapiens
ttttttggtttgtttgtttgttttttcttttaagagaccagggacagtgggggtctcactctgtcacccaggctggagtgcagtggcatgatcatagcttactgcagcctccaactaataggctcaagtgatcctcctgcctcagcctcccgagtaactcatggcctttaagtgaactgcttccaccatccagctgtgcaggtggcctgggaacagcagcacatctgtcccctgccacctcttgcatgcacacttgacctcctgacttgggctctgaaacctgagtaccttcaagtgtccttgcagtgtggtggtctcagggactcagacttcttacttgggggcttcaagagcacgtccagcaagccaggttggagcccagagccttctgtgaccagccctttctccgtgccgctgggctgcgtcggggaagccacggggttccgcgagcgcgcgaaggcgctcatgagcggcagtgcgccgggccggtggttccggggccagtcctcagggtcacagtcccggaagcctttcgcgaagggattgctggcaatcttgagctgcgtgatccgatggttctggtaggcagtgaccgcggtgaatcgtgtctcctcgaacacaaaggttttgaagttctcctcggcatatttctcgctatctttgcgtgggtccacatagaccacgtggaagcggggctggtatctgtgcatggaattcagaataatgtggccgttgtcgtccagtaggttgttggtcagcttgagcttgtcgaaggacacgatttgcttcatccactgcgcgcccttggcaggcgagtccgggtggtagtgcacgcggcctggcgtggcagggtcggccttccccgccaccagccaggaggagctgtggaaggcgtaccggtagcgcttatcgtccaccggcacgaagtccatgagcagcatatagtcggccatgggatccatgccgaagagcttcacttggaaggtgggaaacatccgcc

SEQ ID NO: 338557 - DNA, 1000 bp, Homo Sapiens; identical to SEQ ID NO: 159579

SEQ ID NO: 338558 - DNA, 1000 bp, Homo Sapiens
aaaagggatctttctattttattagattaaaaaacacaacgaaacctgtaagaactaggggaaaaggaaaaagaaacagattaggcaaagatcagagatgacaaaggggagaagcagggagaagaaacggaacagcaagagccccaatcagggcaggaaagaagtttctgaggactagacatctcttcatttaatgacaattttctggcgcaaggctcggggcccagagccagggaggggctcaggaggtggcgggccggggcccagggctgaggcagtgggcggcagtccatgggcagtaatgtacttcttgtaagcctcacgaatgatcttgaaggctcgagcagtggcatagggtatgtctgtaacagggtcccggtatagggctggacgatgggtcactggacagacctcacgaacagggacttttgggggccgcccttgggggaaccattcctcgaaagttgcatcatcactaaaagtgatgaaggtacgtgagcagcgagcaggggggttgacgggtccagtcccagcatgaggagtcaatgcagacaccgagggagcaggatcaagtccttctatgtcaacgttctcttccttggggcctggctccccaacaagtggcactgtcactgaatgataggtgattatgggcccggggcacttccgcttcttatgaacctgcttctttttatcagcctcgagccgctcatatgtctccagtgaccgtaaattaagctcttctgtgatcttggcctcccggagcagttcctcctgggttagtggccgctcacagtggggcccctttcgccgtcttgactggccctgcctctcctgtacccgaaggaacgtttgtcgtgtatgctcagctgtagactgacgcatagacttccgactgtcagagccgtcatcttgtagttctaatggcagtagtgccttctcttctcgcgccttctgagagctaccagccggggtgttgacctttcgaggccttaagctc

SEQ ID NO: 338559 - DNA, 1000 bp, Homo Sapiens; identical to SEQ ID NO: 158698

SEQ ID NO: 338560 - DNA, 1000 bp, Homo Sapiens; identical to SEQ ID NO: 158699

SEQ ID NO: 338561 - DNA, 1000 bp, Homo Sapiens
tttttttttttttttttgcagatatgccaatgggccatgtttattgtggattggtaagaatcaccaggaaaccattaagccccaatagctacaaggagggtggttaatctgctatatcaaactccttccctgaaaccagcaaacaccgggaaacattttggctcattataatccggtgaacaatgcagtcaggcctgttataaccgctgagcagccacactcgcacctcctgggtgctgtagtctgtgttggtacaggcttctgcatgcctggtaaagtccagccaaggctggtcaaggcaacatctccacacagaaaatctgcaccagttatgtaagctaaaaagctgtgtgaacccaggtgtcccggaaaggggctgcaggacacagcaaaatgccagcagcatgccggacccctcccttccatcctcctctccaaagaagagaggtcaggaaaaacactggctgggacgctagaagggtcatgtgttaactataatcacatttatggtttggaaccatcaccccaaggtaaaaaaaaaataaaaggtattcccaggtatgtttggcaaaataaaataaaggtaattaaaaacctaagaaatggctgtaaactgagattacaaaaaaccagaggccttttgggagccacaggctgggggctggggccaacataccccagctctgggaccaaaagcctttggagtcctgtccctggatacagatgctcaggccacccacctagcactcctctcatttttgctgctcccccaaaagccagcgctgttctacaatagttcaggtcagacatctaagatccccaggccaaaccatgccacacacgtgtctgttccgaggtcttgttacaaatgaccaaaggttagcctagacctttggtcaggtggtgaaggccctgggaatgcaggttctagaaggggtgggggcatggggcccaggaggttgctagagataggaaatggggcaaatcgcaggtgacctca

SEQ ID NO: 338562 - DNA, 1000 bp, Homo Sapiens
ccaagttcctttttattcaaatgaatcagaactgcaatctgcacatgaaaagacctggggggaatgcctacatctggaattccattacatcaacgttaaattttgtccgaccagttcttcattgctgatcacttttgataatgacagatccaacatgaaactcctgaagcaaatgaatatttaccttgtgctttcatgcaaatttagggaccaaactcaaaggtttcatccatgctggacaccagatctaagaattgtgacaggatcttctcatatttcattttagaacacttgatactagtctgatgatactcatgttagctgcactccaattaatgtttatcctaatgcaacagaaaactctgttaaactgtacaccgtaattggcatctgttaaaacaactccacttttgaacgaacagcatttctctctcaagatctctctctctcttttgaatttgtcagatggagttacgcaggtttctctatgatggcttttgcatgccatttccaagtggaacatggccaatctttgataaagtataatagatgaaaatctctgcgtgaagaatatgctgtaggtttcacacacttttagtgaaaatggattattttcaacagcaccaagaagtcaatggtgacttatttagctcatttagaagaaagtcctataatactcatttgtttaaaaaactctgtggtaacaaaaggtatatacaccgtttactgtacacaaaatgcatctttcctgtaaactggtgtgtgttcagcacactccacacatggcaatatgttagaatctagccatcacatttgatagagttttgatagaaatgcatccaatgggaacaaacaccccatatgttgtagtgtctaaatagaaactcagtgtaaaaaagtaaaaaacaaaaatagacaggaagggagggagtcatccttgaatagtgatggaccatggactataacgtgattgtgttcattcttaaagcactacccagag

SEQ ID NO: 338563 - DNA, 1000 bp, Homo Sapiens
ttttttttttgtctcctatcaaaatttattgaagtggtagatttttggtaagtacagaaacacaagcgaaggaaccaggaggaacgtgcaccccctctacccgtggggcagaggcacgtttcccttttaatggtaaaacgaaacaggtgggaaacagctttctatcctgaagccgttttaactgctcaacccttagattactataaacaagagaggaatggattgcattagtcgctggttgaaagcagcaatgccatttcctttcccataataacactgtttagctcagtcccttctggggctaatcccctattacacccaccggaaacacagatactaaccaaagcatgtgagtctcttccctgagtccatttctctaaagcttgtctgaaagatgaattggtccacggaagccaggtgacctactggcttgtttaatgatgcctgggcttcctccaggagcaacacaattccctccaatctcagctctccttatccctgctagagctcacaagcaggctagatatcacccgaggagctgagccccccccagtctgaggcagatgtgggaagaaggccaacaagtcacaagtagatctctggctccaactctgctcagcagaaacgcctacaatttgcccatcttcagtcctgcgagcgtcagagatgaagcaagtttcagatgcctagaagctttactctctgttcctccaggattcctgtggtcacaccttgcaaccagtctcccactcatctgccacagtttccctaaatcagattctctgaatctggaagttccaggaaaccttaggccgagtccagtgacattactcgatgcaacagcccaactgtttctccagagatgctggttcttggtgacaatgtcccttcttggaatggttatttgaggttgggcccagataagaggggctccatggctcaccggagttggccattaacgcctctggagcgcctctggttttgttggggtcccctgtga

SEQ ID NO: 338564 - DNA, 1000 bp, Homo Sapiens
tttttttttttttttgggatatatattttttattaagtgataatcttcagtacctaaacagtaaataaatgtgtacctctctatatataaatgtttcaaatctatttttaatgttgcttgttgaacattaacattttcacacttccagaaatgacattaataaaaatataaacaaattgatataaaaatctgtgtagactaagctagaatcttactaaactcttacataaaaggtgtatttaagctttctcaattatgggacaacaaataatagacttcattgcttcatactaaaatggtatttttgactaatcacaaggaaacttaaactaccatatagttataattataggtattcagtccaaagaggaagaaagttttagtgttactataagaagctgtatctctgaaaatgttagctccataagtgtaagcactcccgaagattataagataataaaatatggaaacaggcaaactctggggcgatttaaagtttctaccacttcctaatgattttctttaatagaatcattcgtgctaagtggataaaagtcacaaattacaaaagaaagatacagaatacatccaataacaaattaatcagactgaggaacatttagtgtaaaactggcttaaaattttttgtcagcagaatttctcaacatctaaccctatagcaaataatacaaataacaaggagattcttcaagcagttggcatttcttcaaaacacaagggtccaattataagaaaaatatcacattattcaaagtcctacagaattagaggagaatctgtactactcatatttttgcataaattccatgatttatacataaacccaaaatataaattataaacatttaatttcagtataacgtgacaaaaacagcactaacttttcatctttcaaagtaattttaacgtaaaaggtttaaacatttactttgccaatatatttttcatttcatataggcttagaaaaaaaaaagacatc

SEQ ID NO: 338565 - DNA, 1000 bp, Homo Sapiens
ttttttttttttttttttttttttttttttttttttttttttttttttttttttttttttttttttttttttttttttttttttttttttttttttttttttttttttttttttttttttttttttttttttttttttgttatgacaaatgctttttattacataatatttagtagtcatgctcaatcaacaaggtcaacagaaacttgtgaatattctgctaaataatctagcacactaatacatacacgtttttcagtgcagtaacattgaaataatccttgtatcctttattcagacagttctgcaaactagggaataaataaagatacgaacacacaagaacttttttttaaagcaggtaagattaacagagattaaaatttattgataagccaaagactgaccctgatcctagtaacaccaaactcaaagtagctcctggtcagaaagtgcagtaaagggtgcatgaaagcatccgctctatggtctcctcagtggtctattttaggtgtggttttttttttttttttttactgctaaactatattaactcataataaaaagtaactagtcaaaatttagaacattctgatcaaaatgggtctgcacatgcctttcaaacacctgctggtcatagtcaggagggaactgctcgctgcacatcgggcacaccttccagtgactttcaacatgttcttcaaatttgctctgatcatagttaggaggaaacattaactcacagaggggacacttcttgtgaacatcaaagctggaatcaaagcaaaagcctgtcccatgcccacgtaaatgttgacttggaggatcaggagcagtaggcacattctcatcttctttgctatcctcagagtcctctaagccatcaggccgactaaagtttcgagcaggctggctgcagacaacattgtcttccagtccccaagaggggactctgacaggtggcctttgtatttcatctgggtaaaaagcaccatctgct

SEQ ID NO: 338566 - DNA, 1000 bp, Homo Sapiens
gaaaggtttaaacgctttattgtgcccaaaaaaaggcccatggaatgaagggaagagccgcgcagccctgagcccggagcgattgtttgtcgcgcacccaaaggcaaggagggtggggagctgggaaaggatgcgcggcctccgcgtccccgcgcgcctgggcccggccaaccagcgaccccgcccggtgggcaggcgcggcctcggccatcggcgcctaggggccagtaaccatgacgacggccgttgccaaggccgagagccaatagaggcgtcgccggggctgtttcaaaaacctaaagcaaacaacgaaaaacgctacatcgttgggggaggggaaagactgagaggacccggggcccctccctgaggctcagaccaggcctcgcggccccggccggcgtgagccgtacaaaatctacgtcacttggggtagaaaaacaaaaacaccgaaaagcccacgccggccgctctgaccggccgacacgctcacttgcggcccttgggcactttggggacgctgggcttggccgccttcttcaccttcttgcccccggcggccgccgtcttcttggccttgccgcctttgtccttcttggcgccagcgcccttcttgtgcgagcgctgctccggcttctggcccctggcgggcttcttgtccgcgcgccgggagccggccgcgcccggggctgccttcttcgctttgtgcgcggtgggggccggggcggtggcggccgccggggctccgcgccgctccccgccgccctccagcttcttgcggttgagcttgaaggaaccgttggcgccggtgcccttcacctgcagaagcgtgtcgttctgcaccagcgccttgatcgagtacttgaggtaggtgcgcccattctgctggtcgaaccacggaaccttcttggcctcggtgtagatcttggccagcgacgagccgttgcgctcgcccagcctacggatggtctccaccaccagctggctgtacttgcccggc

SEQ ID NO: 338567 - DNA, 1000 bp, Homo Sapiens
tttttttttttttttttttaaagttaatatacaaaatgtattctatttttaaaatggcacagaatgagaaaaaattcttcatgctgataagtgcctcattcccaaacagggacttcaaattgatcagattctcttgcaggcaaaagctttgcagcagtctgcatttactggaatattgctctttgaacacggccacattcaggtttgttaaatatatcctcttccgcttctggagttagttggatgttatctctgactggggacaggggtttcttacaaggaggaagcttttcagaatcttttttaaatccaaagtttttccagagctcattgagtttgatctgtaaccccggcttgttctcggcattatgatgctttctcttctggatgcttgccggcttcttgctcagcccactggctctggcaggtcctagaggtttgatcttggttgtagaaagagagtctgcagaactggacttatatagcccaggaaccttgttccttagaggtgtgtctttttttgagaaatgagataaacatagcttggaggtctggtcactttgactgtcaagtaacttaatattgcaatcagattcctctgaatcagagtccttactagagcactgagaaagctttgatgcatttgaactctgcagtgagaattctccactttcctgggactgtgaagaacatgccccttctcgtaagggatgagactcatcgtcactggactcctcgctctttaactgcgacacatcagacatattattctcaggcaaagaggtgggggaatcgctctttcttcggaactgctgcaatgctgtgcttggagaggggctcggcgttcttgaaaaatctccaagacctccagaccaactaaaacaacttcttagtgttcccaaagtgggtggtgaaatggtccttgtaaatttgctgctctcaaaagagtaggactcttcatctgtaaacactgttgccttgtctggaatatgatcacctg

SEQ ID NO: 338568 - DNA, 1000 bp, Homo Sapiens
tttttttttttttttttttttttgaatttttaaaatattttaatttgtatatataacttcaaatttagaacactcagtatgaacaagaactattctctgacaaagatgtgaaatgggggagtgaattactgtacaggtgcatatcaacctctccatgcaatttacatctgtatcttatgcaatgagaaactggtttacacagctccgtaactgcagtattttttaacaccccattttgcagtctcagaatacttttcaattaaactggtcgacatgtttaaagatgagaaataagatgtttgcattgtaaagttgagtaatagctaataaatgcacacttccttccattaatataaatctggaacaatttatggtaaacaaaaatctatccgcgttatcagtaatctaacagtgcatacttttactgaacacttcctgtgagccaggcctcgtagtaaacatctgaacatgcaatttcacattcagtgtggaataagaagtgtcataggttcgcgtgtttttcacaactgattatgatgtccatgatgacagcgtgcactaagcgctgtgtccaaccaaccctttacctggcattttagccagcaagacccgcttgcattgcagtcgttcacggtgctcgctggcacaattttagaatgttacatgaatactcaggcctgactaaccttcccctccaaaaaacaacaaaacagaacaaggctaagcctttactactcagagacacatctgtaagaccccacagggacaagaaaagtagctgtgatctaggtctgcactaaagctgcctttcctggcactcagaagtgcccttccaggcctaactgcagaagggtggcctcagcctcctcctcctcctccttggcttcctcctcacggatctgcaccagcaactgaaagaggtttggggctggcccttccccagccccggtaagccacagctgccttcggatggccccgctgtggttggccccggcaatga

SEQ ID NO: 338569 - DNA, 1000 bp, Homo Sapiens
cacaaacaaaacagtgattaaattttattcctttttgagttgttttgtttttatttttaaatgaagtttccatctgtacacgttaagaaaataaacaaaacaacaggaagccattctctgtgtatcctccttggaggcaggaaggatggatctgccgataggcacacaacagcacacagccagggctcatgggagtgagtgcccgtcacctcacgaaggtcatgggcctaaaacatacggaggctccatagaaaatgctccagctggctttgcagtcatgcataaaggtgaggacacttaattcaaggcatctgggggctggtgtcaccgcacatgaagagtagtgcccatgctgtcccacgagcttccttgggaaaagggaaaaacaaatcttttcctcaaatagaattgtcgcaggaaagagccatgacattttattcactgtttaatcatcgggtggcaggatttctttgaagtagaatctggtagtacccctcccaatctttgctggatcacttctaaatggtgaatatactctgtcaaggaatgttctggatcttgagaagcagtcagggatctttctaatcttgaatttggggatggagtggctcttcccccactgtgtggggaggctgctgctgccagtctgcggcctctggcagggtccctggtgtggccagagggtacatcccgggttgggggggactctctggttctgggtggagactgcggctgtcgtgctcggggccctgggcgaggggctttgccttgtgccagagctcctttccgatctacttcttgccatttcttaaccaaaaaacgtaatcttaatattgcaatgaccaccctgacggccgtgcggaacctggtgaaaggacgagatgtgattttccgttctgctttggaaggaaatacccccaaatgggcaatcatggagagtgtttcttgttcagaatcctggaatccaccaatcaacagcaaaagatacttcttttgataa

SEQ ID NO: 338570 - DNA, 1000 bp, Homo Sapiens
tttttttttgctaggagcagttctctttattaatggctagaaagtcaggatcacccaaggaagtcactgaggggccacagcattgaagggtatggggtttggagagataggagcaggacccaccactcacgtccagaacccagggggcacacctggtccaagaggtggaggcattggtcactggagtcacgagggtcaggacaggcactgagaggctgagggagtgtcggtccggagggaggcagtcacgggctagggctgggagtcgtagccagtgtgcagggcctgggagccccagggctgatgccctggctggcgtagtactccaccacctgccgtggcacctcagccaggacacacttggcgagtgcagagggggcagcatccttgaagtctcggaagggcacgaactggacaatgtctcgggctgcaggcacccctcgggggcagcgcaaggggccgtcgtcgccatccagcagccgcatgtcagagaagtcagcattgcccacgcctacgatgatgatggacatgggcaggcgggaggcacgcacgatagcagtgcgagtctcagccatgtcgctcaccacaccgtcagtgagcaccagcagcaccgagtacttcgtggcttggccggtgctctgctcccgctgggccggctcagccacacggttgatgatgggggccacattggtggggccgtagagctggatctggggcaggcaacgacggtaggaggcgatgacccctgagatctcttcacattcaggattttccgggtcaaagttgatagcaaagtcatgggacacctcgaagttgggggggattcgagccccaaagccaaaagctgggaaccgcttatcactgtcatagtcctggcagatgcctcccactgcacgcagggcctgcaggtagtggttgggctgtcggggactgaggcagtgcagggactggctgctcctcgggtccccattggaggcagtgaagtcaatggccaccgtga

SEQ ID NO: 338571 - DNA, 1000 bp, Homo Sapiens
ttttaagaactttataattttttattattttactatttaaaaattttaatcttgaaattggttaaccttaggtaaacactaaccatatttttttatatacattatatacacgagaaataaatagtcttccaaatagcattttttaaaaagcatcattatatacaattaaggcttcaagccaggtgtataaatatacaactcactgagaattcaatttgcaaagcttccattagtaaaaacagaagtcagaagtgaccaggatgtacagccaataatatgggttgagcaaccctaatccaaaaatccaaaatccgaaatgctccaaaatccaaaactttttgagcaccaacaagacaaaaaatgggaaaacccctcacataagttaccacaaaccatgcttcatgtacacaactatttaaaatatcgtataaaattaccctcaggctatgtggataaggtgtaactgacacatcaatgaattttgtgtttaggctcgggtcctattcccaaaatatctcattatgtatatgcaaacattccaaaatctgaaaataatctaaaatttgaaacacttctggttccaagcattttggataagggatactcaacctgtacaagcttcgctttggctagaaagcaatcacagaaacaagagaagcacacaattggcttgagaacatatcttgaaataagactcaactggttatgtcttcagaagtttaacagtgatacaactttggcacgatacagattaaaacaatgtccttagaaaacctaagtacaaagaaaatcattcttcctctcctgcttggtgtcacacttcctcccgaatctcagccataaaaagtccaaccgttggcacagatgttctcctggttatacattaataaaagggcttaggattttatggatggctctatataaaaaaaaaagtccttgtttgtctcacgtctggggcatattggtgggaactggctgcaaaagtcttcatggagtttca

SEQ ID NO: 338572 - DNA, 1000 bp, Homo Sapiens; identical to SEQ ID NO: 158701

SEQ ID NO: 338573 - DNA, 1000 bp, Homo Sapiens
tttttttttttttttttttttttttaactttaaaactgccgtcttctgctttattgacaggtaaattgttcaaaaatgttctcacaattcaataattaattacaaagactgagacttacattaaaaaagtaaaaaccagaaccccccaggtgcccatccagcagaaggcccaggagggcagtggggtggcagggctaggcggtgctgggccactcagtgccgacttggggaagtgcacgtcctgaacagccttgccaagcagccgaccggtgggaggacaggggaagcctggcccaagctgtggacaagctgtgtctgccgccacagttaatcacaagcctctgacgacacagggccacagagctggtcactcaacatctggtacaaagggtgaggtgaaatccacgcgcaggggattgctgtgccgtgggccggggccagtgtgcaggagtgtgttgggtgggtctacgtgatcatacgggctactaatcacgggggctccatgcgggggcaggactggtgggggggggggggggcagggcggggcggggtggggtatcccagtggctgcttcgtggcgccctggggctctgacttccctcagcccagcaggccacagggcctgcctgcaccacgacactcgctggttttatggcaggaggcagaagccgtggaagcgaatggaaaacagcacagctgacttcacagtagtagatactggtgacacttcatggctgcgacccagaatgaacttaatgcacacagggacgcagggtgtcactggtcctgggcctttgtccatgactaggtggtcagcaggacttctgcagctgactgtgcaatggctaaatgaaaaaaaggccacagactaacctccactttcctgtcttcaaaattctagtgacactgggaatgctataggacctcctactattctcttaaggtcctaggaaagtttcaggaactagggaaaagactgggtactgaggctgtgtcccca

SEQ ID NO: 338574 - DNA, 1000 bp, Homo Sapiens
tcaagtggtcataattttaatggtaaaattaggacataaaaataattttcaaagaattattttcaaagaacactagacataaaatataacaattttcaaattttcaaagaatactagaagaaaaaaattatacagtcaatccaacaaaaagcttaatagaaaaaaaccctaaacaatagtataactacaaataaaatagggcttccgaattatgtctaaataatacaataattacaaatatgaatgggttaaattagcctattaaaagataaaaccactcagataacaaaaacagacataagaaacactaacataaaacacaaagaattaaaatgaagatatagcaagcaaataatagaaagcttgcaacccagctatagctataaacacaaaaaatgaagttatcttttgacctaataattccattcctaatacttagaaatatttgcacatgtgcacaataatacttaaaggatctcaacactgtttttttttttttttgagacagtcttgctccgtcacccatgctcgagtgcagtggcgtgatctcggcacactgcagcctctgcttcctgggttcaagtgattctcctgctgcagcctcccaagtagctgggattacaggtgcacgtcattatgcccgggtaatttctgtattttttagtagagatggtgtttcaccatgttggccaggctggtcttgaactcctgacctctggtgatctgtctgccttgcctcccaaagtgctaggattacgggcctgagccaccttgcctggccgggcacttcttatgtgagtggcactgaaacatgtgctttcatgcattacctaaggctagagaaaatgttaataacttagacaagtcatacatgtatcataaatatctttgtacctgacaaacagaataaacatctttttaaacaccattagataattatttaaagaccacatattgggaacctacccctaaagaacaataacaaccacaataacaacta

SEQ ID NO: 338575 - DNA, 1000 bp, Homo Sapiens; identical to SEQ ID NO: 158702

SEQ ID NO: 338576 - DNA, 1000 bp, Homo Sapiens
ttttttttttttttttttaacaatggaagacactttattattattatttttaatcatctctcaacatttcaactcttggtagaaatcaaatgtaaaacatctgcatttttaaattagcatgtatttaactatctcaatcacagcaacctcatccagtaagatgcacacctgggagcagggctgtagtatttcgtattccagtctgtgaccacagtgcgtccgtgatgacaggtacactggactttccctcctaggatgtgttagtcattcctgcttttgtccatagggtaagttacgtggcatcacggttggttagaaagagttagttactgtaatgctggcgcaatctggaaatggaaaactagaaaactagagctctcaggagtgggccaggcattgccgattctgaaatgtgaaaaggaagaacatcaaagatgaatgccctgctaggctggtcttagtaataaagttggttgaaattcagcttaatatacacactgtacatctacatgtgatctaccagatagatatatatatatatatatatatatatatatatatatatatatatatattaaaaagagagccatagaagatttggaaaaccttaaaatcactcaactgagttggaagaacatcagcaaattcacagtggcctcaggattcagccagacttaaacttgctcaagagctgaataactttctcccagaaaagcccactgcatataaatcccttaacattgtgtacatcacaaacagttatggctaaaatatagttagttcacaaggaagcggctttattttcaaactcttgccccactcctgctcttgtacccccacaaggaaaatccaggggttggtaattcacatgagaagctgaaggggccttcaggcttggaagcgcttaggcttagctgagcatctgaggagccgtctctctgatgggcacatgccgactcctgcccacttttagtgcaaaaagattgcaaatgttgcagat

SEQ ID NO: 338577 - DNA, 1000 bp, Homo Sapiens
aacagcttgtactttattacatatgcaaccttgccatgcctgccagttaactcccctcccgccaatgttatcctcatgatatcagctccctcttggggccactgagctgcccccctttccttctgggctggagtagtggtgcccctcaagcaggcaatgggcagggggagatccacaattaatcgtcgcagttctcttaaaagtattaacacttaaataagcactcttggggagttgcaaaggatattcaggatgggatgcagtgggaggctacccctcatccaaggtacaggctggaatgagctacagctggtctatcgtgggcctcagaaggtgaagagggaccgtattctggggcttagtgtgggtggggcatatcctccccaaacttgttctggtgggcgatgttcttcacatctaggagagcctggtggtggacataggcctgacagtagtaacaccaggctgacaggtcgatgtagctgaggaccagcgggtgtccagaatttccatggtgttggagcatgtggccattgatgtaacgaccacagtagacctgatagcaagagagacacacccaattctcttggattgttccacagtccccacaaggttgggtcacgtctaggcctgctgcaggtatggggcatactgccaccaaatggggacaccagggcagtggtgtcacagcataaaatatggcctgatcagtgaggcccctagatccctgcatcagcatcgaatcagccatgtcctgacctccagctgcctctcctagtaggttctcctctcctggggcctgagattctgaggccccctgagattcgctgcctagctccaaggtcctgagactcccaatcagtgtactgggagatatctggggtgtagttccctgcacaggtgaggttgggggggtctggtggtctgtgctcgaggctagaggagtttggatcagctcggtgccccctggagcctcctctgacgtagtctggtccagtgt

SEQ ID NO: 338578 - DNA, 1000 bp, Homo Sapiens; identical to SEQ ID NO: 158703

SEQ ID NO: 338579 - DNA, 1000 bp, Homo Sapiens
ttttttttttttattttttgacaagtttattgaacagtattcaagacttcatctttataaacaaaaacctctgctgagtgatgccaaggcagtatttgctggcaatgttgtggccatattggcaacaagccattttgttgtgtttggtttctaaagtctggactactatagaactgccagtaaaacaatttaaatgtggcaattttgcaagggtggaaaataatttttaaagtgaccacttccagaaattctttccaaaagatttgactagcagcaattttacattttctttactcatttcccgagtgttcttaaaattgatgagattttacacttggcccatacctgtacacaaccacagactccagtaaaagggagctggaatttaaggctttcacgcatccttgtttttatgcaaggctgactatttccacctaaaaatgtaatgtttgcttacttccatacagtcctagattttcatccagtgggttaagactggccttaactacactgaatattactacctgaaattttaaataaagtttcctaatcgaattttcattgttgatgctttgacaacttggagtacaaagctaggaactacatttcacttaacactgtttcattttttaaaaagccactaataataattgtacatccaaactactgtgtaaacacagaacacacctccaaattatgcttgtgaactaaatgtttcactaaagttcagaaaagtttacaaatttgcttatttatgacatacatttgtagatttctctaatcctttaaatcaaaagaaaaatgaacaccaataaaaaaaaaatcagaagggagaggaaaaaaaattaaatctaatggaaaatattctcttccattaatgtcagagtcaccaaaaacagacaataaaatttacacataaaattgaaaatatcatgatagtgtttacaaatgcacacaactttgagcaaagctttacaaatccttcataccatacaaagca

SEQ ID NO: 338580 - DNA, 1000 bp, Homo Sapiens; identical to SEQ ID NO: 158704

SEQ ID NO: 338581 - DNA, 1000 bp, Homo Sapiens
atatccataaaatcagtttattaaattacatagcaatatacatcccaaaccttttctcaaaattgtcattagctttttaaattcgttaaatattttcatctcattaaaaatggtttcttcctttaaaatttcccagaaagtgtggcctctgttttctgctactcagtttaaacacatcatcaaggatagataattaatgtcaggtgagcataaaaggagattataaaccagaaatgtgttttctgggaaccaagtttcaagtgactcagataagttttattaatttcatgggtgaagcccctggataaagcagtgcctaaatcaggcttgtttacccttggcattatgtcaccaaacactgtttcaggatactggaagtacatacagcttgggaggtctttggcctgagcctgttttggccaagcccatccagaatgaaaagtacaaaagaaggctagtgtgtgtgcaaagcagcatggcttattttgaggtcctattagttgtgggccaacaaaacagtggcaggatttgaaggaagaaatgtattgcaatagtccatatccttcgaaccacaaagggagactgaggaaatgctggctttaggccaaaaaaccctggctcaaaacagcttcctccagtggctcagaggcagaccaaattcatcaagtcaaggaccttttcctgctaccaccttgcggagaggggccttcaccagcccaccctgcacatgggtttctgctgttcagaacctacccagtaacaacaggagcaaacatacatgttttcccctcatgtaactttgcatttaaatatattctgggaaactgctgggcacagtggctcacacctgtaatctcagcactttgggaggccaagacaggaggatcacttgagtctaggagttcaagaccagcctgggcaacatagggagaccctgtctacaaaaaatttgaaaattagctgagtgtggtggcactcacctgtagtctcagctactcag

SEQ ID NO: 338582 - DNA, 1000 bp, Homo Sapiens
ttttttttttttttttttttcactgccagggcggaccgtctttattcctctcctgcctcagaggtcaggaaggaggtctggcaggacctgcagtgggccctagtcatctgtggcagcgaaggtgaagggactcagcttgtagcccgtgcctgagtagaacttgttctggaattccacccagtgcagccgcagggcgtgcaggaaggctgagagtccctccatcaccagcaggatagccacggtcatcacggcaaaggcggcaaagatggggaccagcaccacagccgccacgcccacctcccggcccaggcccaggcctatgcgcatcaccatggcccacagaacctcggacagctgggcgtgggccaggctcagggcccacaggcgcaggtaggaggcggtgttggagacgcagcccaggcagaactcgatggtgtggatggcctggtgcatgagcacctcggaggggacgagctcggcctcctcttcatcatccaggccccctgccttttcctcatcggagctccagccattcacagatgcgtcaggcaggtccagcaacccggccttgttttcctcctgtcggtcagcgggcctcctccgcaggcggcggcggtggcggtgcagcaggtgcaggggtgtgccaagcagcaggatgggcaccatggccaaggccaggaccaccagcgtggcctggaccacctcctgccgggggtagagcagcctgttgctggggctgtgggagaagaggaacatgttgatgaagtggatgaggatgctgggggccgaggcggccctggcagcccagacacacagccacttgtagatgactaggaacacgaggtaaccgaagagtcccagcaggaaggtgagctccggcagcgtctccagcagcagccggtgcctctggccaaagtgcacgtggttgaagactccgaggaccaccccaaaggccatgtgcacgacgcccaggatgacggacatcttcatcttgaaggag

SEQ ID NO: 338583 - DNA, 1000 bp, Homo Sapiens; identical to SEQ ID NO: 158706

SEQ ID NO: 338584 - DNA, 1000 bp, Homo Sapiens
ttttttttttttttttctttatttttttttcttctttttttttttttttttttaggaggaaacatgccactgttactgcttcagagtaaagttatgggtggttttaattttttctttcctttagatttaatcctctttttataaaaattgtggtaaaatacacataacataaaatgtaccatcttaaccatttcagtgtatagttcagtattgttatgtatattcatattgttgcacaactgatctccagaactttttcattttgcaaaactgaaactcttcacccattaaagaactcctcacttgcccttcccccattccctggcaagagaggttttacatttttaaaattgttttcatttttgcttatttgcactttccaaattttctatcatgagcatttattatttttataattgaatttttaaaactaaacatctgcaaccctgtaccacgtcctccactttctcggcagggagcatgagctatgggcatgagctaggaagctgtctgcagggagaacccagacagaccgaccgaaggtcatcctccagctcccagccttggaagccagggcttcctctcaggaggacaagactcagggactgcagcaggtcaagtttcccccatgaactgagtcctggctgagcaatgacttggcctgcagggattcagaatggggctcagtttcaaggactacttgtccctgtccctcttctcactgcattgagttcggcagaaccctccacagggtcactccttgcccttggttggccatgtctcttgccctcagagaccctctggccagccaagtccaatgctctgctcactggactcccgagccagcctgcacgtatgtgaggacggaggtgggctgtggtggtggggtctgcttgcatgctggctttgccccacttgtgctgggagaggctggggagggcatggggaggtcagggaggaagtggggcttggggttgataaagatgcagataataacttc

SEQ ID NO: 338585 - DNA, 1000 bp, Homo Sapiens; identical to SEQ ID NO: 158707

SEQ ID NO: 338586 - DNA, 1000 bp, Homo Sapiens
tatgttattgacactggggtgtgcccgtttatgcatgtgcaggggtgagagtgtgcactcatgtccaggtgaactgggtacgcacactcagtcctgctggcagggaagaagccacagacagaatcggcagggagtgtgactatccacacggggtcgagttcacagcagccggctccggggaatgtctgtatgggcacacctgtggggtagtgtgcaccccctgggtcatgtaaacagcaggtgggggagtgtgtgccggggatctgggcagccctcactgccagctggcacagttctcgggcaggctgtgcagaatggcctccaggttctgtttgtcggcgcggatctcggcgaggtcactctcgaagccctggatctgcagctcctgctgctgggattcctgctccagcagactgagtttcctctgcaaggaccccggggagcccagctgcagcctcaggcgttctagtgcccactgagtctcgttcagggcctgggctggggcttgatgggtgtccagcgaccccagcctggcaagcagctctgacaaggtctcgatgtccttctccagtgagatacgcgattcccggatctgctgctccatctcgctcagcccagcacccacccgctcagcttcctccagctcctgtctgcgtgcttcagacgccagcacctgctgggacgcctgttggagcgtggcttgcgtctggctggtgagcctgctggcacggcggtgcgcctgtttccgctccctcagcaaggccttggcaagcttggcactgtccttggccaacacctctgcttctctgcccttcttcttggcactggaggaaagaggggccgcgtttcccagcatcctctccgcctgcttggtcttctttctcgtgtctgcaaggagtctgtcactgacggagtctgccttcctctgcaatgccgcctggtccttgggccggggaaactgcagcttcattccttccagatcagccagcagagtcctggc

SEQ ID NO: 338587 - DNA, 1000 bp, Homo Sapiens
tttttttttttttttttttttttttttttcaagacactttttattttgcattgctttcttagacttaccgaaaatttggtaagatagtacagagaattcctagatagccctcacccagtttcagtttctctaacgttatcatcttacattaccctgctatatttgtcaagattaagaaatcaacactactgttaaaaatactccagattctattcagacttcatcagttttttcattactgatctttttctgttccaggatctgatccaagaagcacattgcatttggctcacatgtctccttagtctcatgtggtctgtgattgtttctcaggattcccttattttccatgatttttacagttttgaggaatactctaaaataccccagggatattttgtagaatgtccttcaacttgagtttgctggatgttttagctcataattagattgggattatgaatttttagaaagattatctagaacaaatctgaatgacttatcactggtgacgttaattttgatcacttggtgaagacgtcatttgtcatttttctcccctgtaaagttactatgtttccctttccatactccactctttggaagtgagtcactgattttagtgaagactcacaagggagaggactgagttctacctccttgagtggagggtatttacctatattatcttgtattcttttttaaggaagttttgtcaaagagaagagaggtttaaaaatgaaggtttgatcatattctactgtaaaatttatgcagataaaaaattcaaaggattgtattgattttggcaaaataaaagtcaggattgttttaggaggaacagcttcaactcaattgtgaggatgccagccagatgattgggaagaagggtgaatgagtgaaaagaattaagacagcatatgggaaaacgtctttgaagatgcttagccttagagtggagctaggaaaggcaactacagccaagggttcatgtgaaaat

SEQ ID NO: 338588 - DNA, 1000 bp, Homo Sapiens
ttttttttttttttttttggcctctcaccactcacattttattgagaacagtgggcaggggggctgggagaggagtgctgaccgttgtgaaggagtaagaacccaatgggtaaggggccagacaggtttcacctggctccatggtccaggaaagggcctgtggggtgggcacctgccctctctgggatccctcagcaggagaatgcagcaggctcctccaggaaagggaggcattgggagtgatgggttgtaattcccatagcatccaacccaagagtgagaggggtggtgctaatctgggggtaggaggggacaagacagggctactctcgaagtatctagcccagctcctcgaggtttctggaagacttcaatgttagtctgtggagaccctaaagatggagattgaggccaggagagcccctcactgacccattttaactggccccaggaataccagagcatcctaatctaaggagcgcaggcctgtcaagccccaggtctcagccatgctgctgagtgctcattgggaagcaggtgtgagaaagggtgatgacccactatgtgtccctcctgaggaaggcagaggccttttccatactccataaggccagccactgtgccaggtcctgagaggcaaggcacgagtctgggggaggggttaatctccacttccccagatgtccaaatgggggtgtgggtgggggaagtaatccccctggtccagcattcccaggagacagcctcagggaaggggctcaggatgcccagatcctcctgcccgcctctgcttgctgggccagtggtcaagcagttgccttaccagccacagctgtggtggggggaggtgaggacgcctcaccacctcccatctctgcttcaatgaactcggtctttcttttacccctcaaaagaaatcaacagcaagttgagaggggagaagcctcaggtgaaggggtgagtatgggccgtggggccgaggggaagaaacactgttagg

SEQ ID NO: 338589 - DNA, 1000 bp, Homo Sapiens; identical to SEQ ID NO: 158708

SEQ ID NO: 338590 - DNA, 1000 bp, Homo Sapiens
tttttttttttttttttttttttttttttttttggatcaaataaagcacatttattgtagcgatgtctgaacttttttcctatgtgttaagagaaaatagtgaccgctgtatcacaaaccctttcaggtcacaccgatcgttacaaattcctccatggagtcaaagaaaagacagtaggaaaggtaccgctctctgaactttgtacaaaataattcatataaaaaggaaaaaaggtaaacgtaccataaagtttccctctcaattccctaaggtttggttacaaaacttgaccaaatgttctaagtataaaaagtacagacgtcactctgcacaactcgggaagtctaagtcttgtttttcctaatacaaaagaaacgatcatttccctttcctggccctgcaggcacgtgagctttctgcgtggctgaagagcaccacactgagctcctgctaccagagatgtctgcttttgcccctaacgataaaggcttctgtggcatcagtggtgtcactcccgctgggcagagttgcggtggctctgtgagccgacaccatgtggagcagtgctgttcacagcccagcctacctgaccacagaaacacccacacagagcttctcaaacagctcagcaccagcactccacgtgtctaccctgatcccaggacgcctggacgacatcaaaattcaaacaggataaaaactcacaaacacactcattggagtataagatgtgggcttttttttttttttaaaaaaagatagttcaaaagccttaaaaagtattctctccagattataaaaggttagttaaaactgtttaataggaacaatcttgcacaagcagaaagagctttgatttggaggattatagcaacatacaactgagagagtccacagggacagtcagacgggatgtctgcacctcttctagagactctgtgttaaaaacacgaccgactgaacattctgccccctttcaaggcacatgccacttcttaa

SEQ ID NO: 338591 - DNA, 1000 bp, Homo Sapiens
tcaaagaagaaatctcacatttaattctgataaagcttaaagtggcatctacataaatgaacatgcttctgagtgaaaatagtacagctaccagcccttgtttctcttaagtgataaaccacattttccttattcctgaatagtccagcacgctattaataaccaaatgcccaaatcttagatgcatatgttgctatattcagcatatagacatatttcaatgtgaacccatatgtacctttttgttgtttaacaaaacatgtctcttggtcagaaaatgttactgaattttactttaactaccagtagctttaagaataaatgagaagcaccacatctgcattctcaagcatgaagcaagtcctggaactccccacgaggccctaagcccagggggaacaagaggaggggagccctggtctacaaaggggcctcccagtgaggccgaggagtttggggctctgtcaggagcaacaggccattagcttccagcatgggtcaagcgcagaaacacccagacaatgctccaccctggccaggtccctctctcaaatctggttctcaaaaccagtggctctgccttctctaaactgcaggcaccaaagaaacagggttgcccttgtacggggagtcacataactcccctctaaagggaaatcagtccaggaatcccacactgtgatcctgctgtctccccagatgctacactacactcccaacttttacactcccaagagcagaggacaagattggggattcttccaaatgtaggggatgtgccttgtgaaggacatgagtagaaagcatgactaggccactgacactccctaatccccttaatcccacagactcagcagttgggggaacgcttgcttgtgactcatgaaaccatcattcatcaaacaacaaggtaaaccattttcttcccgttgatgtttctggtcttcagccccagataacggtggctgttcttctctggctgcccatacagcatgtcaat

SEQ ID NO: 338592 - DNA, 1000 bp, Homo Sapiens
ggaaattcaccagacctgactaattgaatggtgtatttccactggactgaatgtcctaattatcattcaagacatatcttaaagatttatcaagcatttactctccaccttaccatgtctaaagctcagagatattttgagctctaaaagagtatcacaagaaatttatagcagtctgtagtacaactattacccattcttagagcaaagccacaactaaaatagaaaatagacaaaaataaaataaaatcattaagcatcaacttattgggtaaattaagtttagatacccatatgatgcaaaagggtcacttttatataagcttccccatcttttaaacttagagcacagtctatgttgtcattaaaaaaataatagctaactgaagccaggaattcattttgcaattgtgtcaattattttaaagataccattattaagtaaactttaaattagtttgtgtacaaccttatagtgactggaaataagataaatacaagcaccccctcccaccgcagcaaacacacataacagattcttgagacttagacccttaaacatgtctgctcatcactcaatccatttggccaccctttccgtccacaccaggccaaagagcaaaatgttttcacagaaattctctgggttgcatattcttaattgcctgaactactgtggacaaaacatcacatttttaaaatcttaaagcacttgtaagggtcatacatgtgtgtttactgtccttgttgcttctgtcctggagaatttgcttgaccagagctctctccagggcggtctgcaggagtgaaaggaaactgaaatccatagccattgtacccatccaagtagacacactggaagaaactgatgggacttttctgctttgtgggagacacatcttcagttccttctttagctttctttgaagctggtacatcttcaacatcttttgatactcttgcaggtttttctgcttttgtcacattgtgtaattgaaga

SEQ ID NO: 338593 - DNA, 1000 bp, Homo Sapiens; identical to SEQ ID NO: 158710

SEQ ID NO: 338594 - DNA, 1000 bp, Homo Sapiens
ttttttttttttttttttttttttttttttttttttttttttttttttttttttttttttttagaaaatcctctctatgtataaatataaaacactggtatccaaacatgacaccaacagctaactaaagtgcttgacaggagccgggcccgggtaagctcgatggtaaaccgctcatcctgggcgctggggaagcaaaacaatgggggaccccttcagcagggggtgctgcaggaggaaagtgtgtgctggccaagctgggccaccaagagcacttgggccacctgggccttctgggtctcaggactgtctggtcactgccccatcaacactgtgcctcatctttcccctaccttccccactgcgctcccgtccatgaggagcacagcgctggcgagctaggcccagggaagagctgttccacaggggactgatcatttgaaaaaaatccctccccctcaaccatcactcctccaggtcaggccctgcccgcactcctcctgggcttcctgcctgggtgggggtgggacgagggaggggagagaggctttgtggaatctgagggcagccacctttcacctgtaggccccaagcaaagcattagcacctccaccatccccaaggcccatagaaatgcccacaggcaagtggtcaccagagctctagggagcagaggggccccagaaggcagggaagaggccccccaaaaacacagtgctacaagaaggggttggtggttggaggtttggaggcgaatgggcttgatgagggtccagtcatgaaggggttggtggagatcccagctggctggctcagtggcctctgccccaacttggctgatcctaagtccccgaaggaagagccattctgctgctgaacaagcggggtctgcggggggaacagcggtgctgggaaggagctggcaaaggccccagtgggtggcactgcctgggggaagccaggcccagcactgctcatcccaaagccgggccctggcgcc

SEQ ID NO: 338595 - DNA, 1000 bp, Homo Sapiens
tttcttaactttttattgacattggcaaattaaaatagaataaattaacaagtattttttcaaaaaaatgttttgtacaaaaatactgtcaaaatttcctaaaaagctttcaacacagtagtatcttttcatgtactgaatataactattagcacagtgtcaaaaatgttgaagacagaaacaaaataaaaatctgtgaaatgtttgccactgacgacattccacaccctattatcatctgtacatatgggggtggggggggcggcgggggggacagccaacttgaaagtgaacagtatgactttcctgatccagaacagtttggcccacatctgtttaatcttccagtttagcatattttaaaaattagtctgtactcaaatgcatagttaaaaaaatgaagcgagatggcagtttgtgcagtaatatctgcccttcgaagttcatgcaaccaactaatgcaatttttcctttcactcgtaaatctgaatgcagttcagtcatttgaaaccatctacaaaatccacaagattaagcagtttgccaagattaatatctaacagttgagcactggagaaagtgagggaaaggagtaaaaacaaacaacgaaaaagaccaagttagctagatatttcaactacataagggaggtgggtgaatgtcaaggctacaaaaacgaaacaaaaacaggaaaaaaaagtggcagcaattttttttaaaaccaatttgtacaagtttatagtttactttgtttccaagttctcaaacctttcaagatctgaaaagtgagatactgtgtctaagggaatgtttcttttaattcacgccgaagaagttgggggtttgatttctttcgccggggtttcgatcgagtcaacagctcactctgctgggctgctgtttgcacacgaagtccgtcataaaatcaaactcgttttgccccagccagagttcgggcagctccttgatgcggtccaaacccatttctatcaccaaggac

SEQ ID NO: 338596 - DNA, 1000 bp, Homo Sapiens
cggtggtattaggaaaaaaaagcctattaggaaagttactcatggatttaatttataattggtggaactcagctgaatttcccaccattgtaaacatccacataatgccatgaaaaaagttcatgtatattgcatttgtttttccagttattgtctaggcaagtttctacttgtttgaggtttctagaggtaatgcagctcagacactcctgggtgccctctcaaattcgtgggtcctcctgtttctacctttcttattttcttgtaagtgcttccatttgttactgttccctggggtatgtcctggcctttgccgacgttgttttcggtcccttttccaaacttgttcacagaactcatccatcgtgttgagattggggtggttgatgagctgcatgaagtctctgtaccagaccttctggctaggtgtcatgctattggacatttctttggtcttagagccatctccatcatcatctttatgaagaagttcttccaaatgctctgtgtcaatgacttccagggttaccttaagaagagtttgtatgaacccatgttccaccgcatggcagaggtaattgcctgaatccttctgttgtagactacgtagcagaaggccttgatctgtcctgatgatatgatcatccactctgatctcttcttttcgctcttcatttcgcctctggaattgccaatagaccagcgctctctgcgacttcggactgcattccaaaaatgtgctactattctctacaccatagatgattctctcttcagggctgtggccatggtgattatcatggtgtaagtctgaacagtgagtcagtgggtctccatttcttatatcttgtcgtcttgtgcgtctctttgcagtgggaaaatagcgagaacatgcagaaccatcccaagcacagtaagggtctcgggcgaggcaacactcagcacacgctttcccgtaaatatcacaccggtgtaaagggagctgggcaaccccagccgt

SEQ ID NO: 338597 - DNA, 1000 bp, Homo Sapiens; identical to SEQ ID NO: 158712

SEQ ID NO: 338598 - DNA, 1000 bp, Homo Sapiens
cactatgaaaatgctttaatggtggtgtctgtacagcatggatgtggacagggaaaacagcaagtgcacacagtgggacaggccacaggacaggctgggagtgaataaagagttcacactgcttccctgctttccccagtgactgaaggctctaggccacctcctcctcagcctcctcctcgaactcgccctcctcctcggctgtggcatcctggtactgctggtactcggacaccaggtcattcatgttgctctcggcctcggtgaactccatctcgtccatgccctcgcccgtgtaccagtgcaggaaggccttgcgccggaacatggccgtgaactgctcggagatgcgcttgaacagctcctggatggccgtgctgttgccaatgaaggtggcggacatttttagcccccgaggtgggatgtcacagacagccgttttcacattgttggggatccactcaacaaaatagctgctgtttttgttttggacattaagcatttgctcatccacctccttcatggacatgcggcccctgaacacggcggcaaccgtcaggtagcggccatggcgggggtcgcaggcagccatcatgttcttggcatcaaacatctgctgggtgagctcgggcacggtcagcgcccggtactgctggctgccccggctggtcagtggggcaaagccgggcatgaagaagtgcagccggggaaacgggaccatgttcacagccagcttccgcaggtcagcattgagctggcctgggaagcgcaggcaggtggtgaccccactcatggtagcagacaccaggtggttcaggtcaccataggtgggcgtggtcagctttagggttctgaagcaaatgtcgtagagagcttcgttatcaatgcagtaggtctcgtctgtgttttctacgagctggtggactgagagggtggcgttgtagggctccaccactgtgtctgacactttgggcgaaggcaccacactaaacgtgttcat

SEQ ID NO: 338599 - DNA, 1000 bp, Homo Sapiens
gaatcgttgcgattaactttattaatattttaaaatatgaaaactgtaaaacatagtatttatgtaaacacctgaggactgttcaagtgggtacagcatcttcatacaaacaacttgaaagaagaccaagtttaagtaagaatcttatgacatgtaaggaataacataaatgaagctattctttaaatagttgcattcatgtctaaagtacatttggttttctaaaaagaaaatgtacattcttgcccctggtgaatattttattggcatttacaacaaatggctaatacttttataactgattctcatagcttataaacattacatcaaagttacacaaagtaataacaataaacatatagcaccatttcctcttcaaagttctaacttataaaataaagccccaaacatggctgggcaggtggctcatgcctgtaatcccagcattttgcaaggccgaggtgggcggatcacctgaggtcaggagtttgagaccagcctgaccaacatggagaaaccccatctctacaaaattagctgggcgtggtggtgcattcctgtaatcgctgaggcaggagaattgcttgaaccagggaggcgaggttgcagtgagccgagatcgagctattgcactccagcctgggcacaagagtgaaactccatctcaaaaaaataaaaataaaataaagccccaacaataagtcagaactaatatatctttcaaagtgtagcagaataaatggctcagaactaagcaaattaattagaaacttggcattaggacggacttccctgttatggaaacccaatctacagattgtttcatatcccctgaagagtaagctgagaggtactggtgatagcaacgatgggacatatattttttaccgaaatcaaaacatcctaactatatacatagttccatcgtcacccctgtggcagtgcaaagtgcccagattaaattcaagaaaaaaagatttacttgtgtgtaaacctacag

SEQ ID NO: 338600 - DNA, 1000 bp, Homo Sapiens; identical to SEQ ID NO: 158714

SEQ ID NO: 338601 - DNA, 1000 bp, Homo Sapiens
tttttttttttttttaagttgaaaacattttatttcaattctatccttgggaggcagcataaataatcacagaagaccacaaaggtcaatggggaaggaaaaaaaaagctccagaaatgtgggaggaggagatgagtgctgacactgtctagctgtggggtacggggtgaggaggccctactgtagctggctgggaggatggaggttcataaaggaaaggcccagctcacctggaggggcttgggtagccctggcctctgtggatgtgattttccgtagggcggccatgggaaaagcaggtatggagtataatgcatctagtagatcctagctaatgaaagaaaagagtggacacccatttcttgatttccagatctcaccccaaactgtgactcttctgagaacagtgtttataaactctttgtgcgtagtgggaaatgaaaggaggaaaaaagaaggaataaaagaaaatgtgtacaagatcaaatgaaatgtggcatctcagagttgcgtgaccttgggccacttctctcggtttcctcatctgcagaagggagtagacgtgaggctcgatgagatcctatgtgtcaaaggactgcagaaactttaaagtgctatacggatgcgagtggctgtggtcattctacgtgcataaggctgaaagtggctgagatagcggtgctgagacacacgcagagcatccctagaagccatcagaccctggtctgccttccccagggccaagctccacccttctcagcctcagcttccaggaggacgaggcctcatctcagatggagtcccctggggagggtggtggtgacagctgagggtggggacctgaaggatctaggggcacagagcgtgaggggcctcaactgggcagtgtggcacatcggcactactggtgctgggtagacggtagcagtggcttccagttctcattctccatagagacttgggcactggtgaagcccacaaagggattggcatcttgatg

SEQ ID NO: 338602 - DNA, 1000 bp, Homo Sapiens
cagtatagcaaataataaatttattaggtgcctacaagtacaaaatactgaaagccgctgcaggggattataaagatgtgtaagagacaagccctgccctcaaagagcttacaatctaggcaattagtcacacaaataagttgtgatggcgctctaagtgacctcagcagagttcttgaaaatgttcatatccttcaaattcttctcttgtcaaattaaacagtgggaaagagaacttttgtggcattcactggtgaccctgactctgcttgcaagcatctttctgctgttgcacgttgtcgtcatcctctcagcgtcgtttcctaactggacctttgttggagagaatctccgtgcttcctgaaccttcaccagggtttcctgtttgggagtgggtggctcagttgcagtttggccttggaatgatttgcagtccgatttttccttcagcaaatcgctcttttgattgtagttgatgctaaaatgctatgctttgcaatctgtggttttaagggtgggagtgagatgcaatattaaggaaggcagcccagacttttcccttactttaaacatttaataatagtgcacttattgattataatctgtacagatatagagcaagttataaacctcttccttttatttattttcttcacttagactgtattcacgtaaagtgtatttacaataagaagaaaaaagccttgaggtacaaaacccaaaagaatatctgaggtataaatacaagtatatcttaaataataatctttatcatgctttatctatgtttgaaagcacagtggacatgtttcttaatagaatggtatatacaacatacaatcttacaaatctggaagccatcaaaattgaatatccatgtatatcttcatgaggaacactgatatccaaaatactcaaattttaaaactctaatctgatgccctgccccaaaattcttcaaagaacctttgaaataacactgaaaatggtaactaaatta

SEQ ID NO: 338603 - DNA, 1000 bp, Homo Sapiens
cgaatactgacttattctccgtttaagaaagccctctggcaagataccaggtcattttcaatttccgtttacaaagacttagcaaataccttaaaaaaatccaaaagagatggtgttacagtacagttgcacagtgcttatgtctataatatacatgaatctgaatgtccatcagcgagatgagctcagatctacctttcctcttcatggaccagactggaattggttagcagactgcggtgacaacctggtagctctccttagagaggtaacagagcctgcctttcaggctctccccatcaccattcgtcgggcctctgtttcgtggtatcatatgctcttatcacttcagactgtgaaacgattccattttcatcttgagagaacgcatacccatggagcagattttgttgcaaggattcagagcggtacaagttcacgtggttcttcttaaagacgttcttgagcagttgcgccctctcggtcaggctttttccaagtacaactgctcctgggtcttgagattttgcctccagctcctgaacttcatcgaccaatgttttaaaagcagtcctcttgataaccttgtacaccacatcaaggagcagagatgccacagggatgaataacaagcccatccaaaagactccagaactgaacaacatggctgcctctcctgacatatcaggggccatcggaatggcaggccacagagatgagtagattccaaaaaacaccacccagagtgcgatgctcccccatatcgctatgtggctgaaccatgtccaatatgatgtctccaatccagctttcaaacacacagttatcaccacaaaagtgtacacaaagtttcccagtagcagataatccgaggttttcccatttccaaatgcagtaccatactgaagggcttttagtggaaaccaaaacagaataactgagtggaagaggccatttaaacaatgaacccagaaaaccttggtgttgaagtccagggcat

SEQ ID NO: 338604 - DNA, 1000 bp, Homo Sapiens
ttttttttttttttttttttttttttttttttttttttttttccgctgcaaagttacaaatttattggtctggaaataaatacaaatatctcattaagaaactcctctggaaagacttgtgcacaatagtttcccatccgtactcagcctctcttgccccgatccccgacttttctactcaaggccagggaaggcctccaaggtgatgggcggcaggtaacgagtcattgcctctcacgccacctggaaggctggactacttcctcctcccaactgcggggtcccagaaatcctcgggtcccagtggctgacttacaatattcaattcactctgaccaaacttcctatgagaaaatccacggtgagccaaaatgaaaagtacaaggcagtagtacaggaacctggcagccgcactggccgcccagaaacgtcagtggtgctgccccattcggcgaaaggttagggagcaggaaaagaggaagcaggagagggaaggaaagtcccatggaatatgtattccagaatccttacattttctcagccaccgctccccacgtgagttcccacccccaccccgacaagagcaaagagttctgaggatccaagaacgtgaccgggtcagacaggttcagctactgagttcacgttccagcccagctgtcgaagattgaaaactggatttaagccaatcacacaaaattcctggaaccaagctgggatccacagaaatcacaactgcactggatctcaacacaacaacaaggaatcccttacatcgagtaaccccaattccacccccaccccagtgctcctactccggcccctgcaaggacactcatcacagccagggcagctgtggaatgttgccctccattctaaggaatgcaaaacaaatctaaatgatcttctccctgaacaagaataatcactggctcatgtatcaggggtgggaggttggggctgtggaggagaggcagaaagcagaactaaagccttcaaa

SEQ ID NO: 338605 - DNA, 1000 bp, Homo Sapiens; identical to SEQ ID NO: 158715

SEQ ID NO: 338606 - DNA, 1000 bp, Homo Sapiens; identical to SEQ ID NO: 158716

SEQ ID NO: 338607 - DNA, 1000 bp, Homo Sapiens; identical to SEQ ID NO: 158718

SEQ ID NO: 338608 - DNA, 570 bp, Homo Sapiens; identical to SEQ ID NO: 158719

SEQ ID NO: 338609 - DNA, 1000 bp, Homo Sapiens; identical to SEQ ID NO: 158720

SEQ ID NO: 338610 - DNA, 1000 bp, Homo Sapiens; identical to SEQ ID NO: 158721

SEQ ID NO: 338611 - DNA, 1000 bp, Homo Sapiens
tttttttttttttttttttttttttttttttggcagtaaagggctataactttattggtatttcctcttacacaaaaccatcaaaacaagaacagaaaaaggctgaaaatccgttcaaaccccatgttctcagggatattccagggagttcttgaggctgagtgcgtagcttcaaatccagcactaattcctcaccccctggcctgaggtcttcatagattggtggcttgagccctgcaattaattataatcccttgcccaccttgatgtaaggcaggaaagcagattgaaatgctcctctctgatgggcaagggggaatcacagcccatagatgtactgcaccttctgtactacaggagcaggaacctgaagctgcttccaaggctctggacacttggcacgcagggctagaggccaatggtatatgagcggcctgtggggttatgaatagcagaacagactggtgctgtcacagcccactcataccacaccttcttggaattgctgcatcgccagaaacgcacacagatggtttggccttcacgtaccgttatgggctgcttaatagggaagaggatgggaaaccatgagaacatcccaggagagtgagtctctggacggatactcagagtgatgtcctgataaagcacagtctcaaagtagccggcaaagccatgtagtactgtgttcacctccacaggaaattccaaggtgcaatagcggttgttgtcaatcataggatctctgttgggatggctgaaggtgaaacagggctggggtgcagagagctggtggaagttgtgcagccgtaccacataaggcatctcaaactgggcctcagggtcacggtccttctccctacaggctcggacctcattgtacagcttggaggaagagatgggagccagaaaggaagtgtactccccggggatgctcacaccatcatcttttaggaagtgctgggctccatccaggcactcaggcgacaattcattgtca

SEQ ID NO: 338612 - DNA, 1000 bp, Homo Sapiens; identical to SEQ ID NO: 158722

SEQ ID NO: 338613 - DNA, 1000 bp, Homo Sapiens
tttttttagcaatataagaactagggtttattttagcaaagaaaacacgtaagagccacactggtagtcccaggagaggcccagcagcaaatgctgagaaaagccagtggctttttgcacagcctgcccatggtggaggggagcacctgagctggctcctgggcccacagctgtgcctgggaatagtccaggctgtgcctgcagaggagctgctccaagcagaccctgaggaagggcacatatcccaaatgctgcttgcttcaaacaggcaccctcggtgctgcctcctctgaggctggcagttccttcctggatatgcagggtcaagagcggagggggaagcagagagagtgccgcctcacacgtactccccacagtcggcgatgatcaccttctgctttggcttcccgtccttgctgccctgggcctcaatttgccgcaagacatctaggccttcggtgacctctccaaacaccacatgcttgccatccagccagtctgtcttgtcacatgtcaggaagaactgagagccattggtgtttgggccagagttggccatggatagtagacctggtcccgtatgcttgaggataaagttttcatcatcgaacttcttcccatagatggacttgcccccagtgccattgtggtttgtgaaatcaccgccctggcacatgaactgggggatgatgcggtggaagctgcttcccttaaagccaaagcccttttcatgagtgcacaggcagcggaaattctctgctgtcatgggcacgacatcagaacgcaggagcatctggatgcggccagccggcttgttcccaatcttgatgtccatgtacacctgaggatttgagcgggcctttttagcaatgggctctccctcctgggtctctgctttgggaggctctgacccttcttcctctttattctcttcaagcgtcttcccagaaaacttcttcaaccagtcatcatctgaccaaactggcctggaagagccttc

SEQ ID NO: 338614 - DNA, 1000 bp, Homo Sapiens
ttttttttttttttagtcactatttattatattgacatatttacaaaataatacaaagtgaaataccactctaattcaccatattacacaagggctgcatacaggcaagacaaagtatatggaaaacatttacttctgtctttggtattagaactctacacaaatctgcagcatttaaattttccaaaacaaagtattaaacgtggacaaagatgtaattggtaatgtcacaaaaaggggctccaatatcctctgctaggaaacccccaggcccatgaaatgcaacaggaagactaaacaccatttataaggagagggtctattgactaaaataaacaatacatgctacaataccatccacaggagtgtttctgcttgtgtgaggctgctccctccataacaaagttcggctgacggcaacagacaaaacattcccgagacagagtcgcagataagactttacaggaaagaatccattccaagagtacactttgaggtgtaactttattgtacagaacattttataaaatacatttttgtgatcatttacacatatacaaagacttaaatggttttagcaaataataatttttctaaaacacaatcacagtttacataattctgaggtaaaggtcttgaatctatcctagatgaaaagtcctagcccatgagggtctctaacagggggatgtgtccactgaaccttgagttctggcacccagacggattgatgagagggcaggctacacctgcttcatttcagagatgattcaaaatttcagaacttaatgctcctggttcagttctactaagttaatgcttcttttttttcccaacatgtaactctctcagtcttgtcagaacacaacttctgctatggaggaaatatttccatcaggaaagggccaagttagtgtcttaacttgactgccttgaatggggactctggaccccaggaagaatgtatttaggctcctcacaaaaaagagtgatggctggg

SEQ ID NO: 338615 - DNA, 1000 bp, Homo Sapiens
ttttttttttttttttttaatatcacaatgtgtaatgccaccatttattacttctttactacattaaaaaagtgaccctgtttctagagaccaaacagcaccacagaggcattcttggaagagaattccttttgttcccaagcctttgtgactgactttaaatcctctcacctgcagaacagagatggcttcaaagtggggagtgagggagtgagcgaggaccctgggctgagacctgtttttcttccatttctgctgtggcttcccacagctccctggttccacaccaggccctgctctgccgcaggaaaatggattcccaggccacagagctgtcaggcctttgacttcgcagagaccaagcaccccagaggctgtgcgacagcggctagtccctggtgggccggtctggggcatggggggcagggagactgggagatggggagggcgtggagaatccggggggtcctggatactgacaaaatggctcaggtctgagctctggctgccccactgattgtgtggcttggccaaggtgcaagtctctcggcctgcttcctctgaaacaggagtggcaatcctggccgacagccctggtggcaccccctccccactgaaggcagagaacatgtgggaaatagtctaactcaggccctgggctgggctggcccgacccttctcctatgcctcccagggtactgtgtctcaaagaacctcttccctcctggaaccattttccactcctctttctttcaaacaagtcccccagcctgactcacaacccctgcttgctaccctcagccggcagaggcccctcatcagtggtaaagacagttcatctcagctgcctgccagcctatggtcttcacagcaccagaaggaaaatgcaaggcaggcaccagctcaccctggctcaggcctgacgacagcggcccctgcctcagcccaccggggccagtcctcacctctcccgcacgcctggctctggggaagcccaggc

SEQ ID NO: 338616 - DNA, 1000 bp, Homo Sapiens; identical to SEQ ID NO: 158723

SEQ ID NO: 338617 - DNA, 1000 bp, Homo Sapiens
aattatcatcataccacagcttgtttattttagataccatttcatttcctgttgtaaaaaccagaggaagtagaaactcatcacctagaagaaaaatattcacttggaattaccacagaaagggttatttcaactgaatgctgctttattcaaaatcaggtatttgtcctcatgaggaaaccatgatccgaggtaaatgcaatgatggtgctgttggccagctgaagatcgtccaaagcactcaagaggcggccgacctgtgtatccaaatatgacacagaggcaaagtagctctggcggattttccgctgaaagtccacaggaattggaccatacggcacactgatgtttaaggcttggacgtcttcccgttgcctgatgtccatccaggggttgtaggccacagggggtaggccatcagggacctcgggatcgggggccagggtgatgttctccaagggatacaacttctgaaattccttggggtatctgaaggggatgtgtggcttatgatacccaacggccaggaagaaaggactggctgacgttttcatcttttccaacaactgtatggcttgctcagtgctctgtttgtcaggcaaggtgccctcgggaacatccagcacatccacagggcaaagcaggttggcatggagttctccatctggccctcgacatgtcttagtgttttcatacttctcagaggaaggatgataaggtggaaaagaccagctatacggagaatcatcggtatggttagaagatatcccagggtgaaagacttttcccaccgacatggtcacatagccattctccttgaagtactgggggatggtggagaagtttccagcgtgcaccctccagtaggagttgaagtcgtacaggcgggtggtgtcaggtctcctgccagtgaggaaagaaacgcggctcggggcgcacactgcttgctgcgcaaaggcattctggaagaggaggctgtgggatgccagttggtcaatat

SEQ ID NO: 338618 - DNA, 1000 bp, Homo Sapiens
tttttgcttctacatccagtttatacacagctctatacaatatacagaaacctttatatacagatatatttatagaataagctatattaatttgtctctcctttttacagcaatattagtttggatctttcatacattaagtacaaaaaaagtctggggagaatggcacgtaagagagtgcatgagggtctgtggggcccggctgctcgctactgattgcatatggagtcgcccaggcccctgggaggacaggcccgcgcacttgtgctgcaggtctggggatggagtgggggtcggtctgagccgaacggggctgaggggggtggctcagaccccccagtgtggtatggggtggaggagggagacgtgcagcaggcccatccttcaagggcgaggtgggtaggagccaggttaggggtgggctgcccctgggtgcccaggattgagcccaagcctgccccagccccaagcctgaaacatggtgtggctgcagccttgggggtggggggtctgtccctgatggctcgtcctggggtggacgacatgcccacattagaggtcccaggacccaccctggcagaggaggaattaaaaggccagacatcaagtctctccctgtgactggccacggtgcttgtcagatctttcatctgagagtctgtcttgttttctaaactctaagagccactgattttgtcttgcttctgtgctgggctgaagctctgtatgcctcagcagggccagggtgtccttgagtctggtgaaggcgggagttacagaggatgaggggaggcccagctccctctgtcagggtgggcaggggctcccaggacagccatccaggccagtcccagctgtgtggggagccgggggccagaattcaggcccccaggtaccagtgatcatgagagggaggtctcttggtcgggggagcctaggccacccagggaggctgcaggtggagccagaatgggagggaccatgccgctgcagaatgaag

SEQ ID NO: 338619 - DNA, 1000 bp, Homo Sapiens
ttttttttttttttttttcttgagatttgcagtagtggaggctaccagacagctaccacttgctttatttcattacaggattgactttagctattaatgtaagcataccaggtgagggtggggggtagagggacttgcccattttactaggacaggaatgctctttaagcagcatggatggaacattaactgatgtttgtgttgtgcgtaggaagatcattctgttcactttcgtgtcctctttttagcctccactgagcttcagcaagtcatcctgatctccgtgggaacattttcgttgctgtcggtgctggcaggagcctgtttcttcctggtccttagaccgttcaggaaatcggagacagaagagcttcttctgttgggcagcaggatggtggccagcgaggagtggaggatacatctgtggtcccagctgcttggaaagcggaggtaagaggattgcctgagctccagcatttgaaggtgcagtgagctgtggttgcaccactgcactccagcctaggcaacagagtgagatattgtctttaaaaaaaaaaaaaaaaaattcatggcagagtcagaaatagaaaaaaacagccaccatttccagtcagtcttcagggaaaccttcaataaccctcacataagcattttacaagtctatttcttcttattttataaacataactgcatctttaattgggtatacttgaataattgaaaactgaacagcaaatcaatttttatggttcattttctccaacaaacaacaatattaaactgtatgagaagtaatatttattgcaacaggttatgaggtggaaacaaataattagtcttacaatttgctagaagcatgacagagcttactaacattttgaagaaaaaaacagcaaagaaagaagtcatcaaacaagatggtatcttgacaaaggcacagcgctccacaactgcttcatactctgtgcacaagaaatcctctcaagagagaggagaggag

SEQ ID NO: 338620 - DNA, 1000 bp, Homo Sapiens
tttttttttttttttttttagaacaaaacaggtatatttctattagactacctgatacagaagatagtgtggtatggatggatagtatgaaggacaaataatacaaatatattttattgaaataaacaaaaatgcatacacagctcaatgggtcacctggaacaaacttgcttgactatattactgagcagaaacaaaacggagcacaaacaccttttctttttgacatgtatctggagataggtaggaagacactacttggttttttaaaaaactgaccttcccttaaggcctggtcatagaagtgtaaacaatgtaaatgaatccaccattaccagttgtcatatcatatctatgtcacctgtgtattctgagattacacacatacctgccgaatatacctgggaaaggttattttatcacagttacacttgagttcttggcaggcagactgaggaagagtaatttgaaagaagtttacatcctatttagaagaaatcactagtatttccttaaataacaggttacaatagaaagatactgcctggaagttatcctttcactttggttcatttttagtttttctttatgatttacatagctgtttaattcatttgcttatagtacaatcctgccataaagtattaaagcacaagatacctattattccttcaacatctgcatttttcaagttttatactctacatccacagtacgtcagcagttcttgaatgtttaaaaaaataaatgggtaaaatgcttctaaaaaatgcagatgtataactacaatggtactaagatgggaaggagccaatgagagaagggataaaagcaaacatgttcatgtgcagggaatgtggttcaagtctttggatttaaaaacaagttccccagagaagctggaacttcctttgccctccaaaaaggacctgaaaagtcccaatccaaactttagaaagttagttatgagatgcgataaatatgatatgacgatgcaata

SEQ ID NO: 338621 - DNA, 1000 bp, Homo Sapiens
ttttttttttttttttttcataatttcatattatattctcaatgctttcaaagcccaacagtgattttaaaaagaaattaaacaacatgctttcattgaatttttaaaaatctatacaattcaagctaatgaaatattttattgtacataataaaagtggtgtttttctaaaaaaaaaaacaataaaataaaataaaaaaaaaatttccaggcccagacgtctgtgggagtacgtgaggaaaggattccactcaagtataatcagcaatactctattgaatgaaaccataactccacttcactccctatggtaaatactaacattcaccacaggcttgaaattcctgtagcatcagtagaactatttttgaaaatattacaaacatgcttatgatgcataggaggatgaaaaaatttagactgtaaccgcacaccatatgtaatcccagcttttctaatttacaaccagttaagaattacaatatccaaagaaagtattttaaaatatatatgctcactggtaagtgattttctactcaaataaataggaaaatttgcattttaatgtcacattgaatttcagtacttttcaatccaagaaaaaaaaaataaaccgagacatggtcatgagttcaggattatatatattacaatttgccttgttataatacatttgtggctttatgataaaaataactcagggacatatggaattcaagctgatttgcgtaactgtcacaagaaaaaaagcattaaatgcatttctgaaataagtattttcattaatttcagaatctcaaaacagcattagaccttgccttgtttaaaaaaaatttagttcaacactaagctagctaaataaccttcttgaaaggtttaaacacaattgatatagaaaatgctttccctctaatctcaactttacataaatggaacaggtgaggaagaaaaggtagacaatttctttagcagcatatatggctaaatccatcaaccacct

SEQ ID NO: 338622 - DNA, 1000 bp, Homo Sapiens
agtagtttagtaattttatcactgaatatgtagaacataatgtacatacacttggtctctttaaattggcatgcttaacccaaataggtgagctcacaatcaaaaattataggagtaccattaattataagactcttacaataatagcagcaaatgacattgttttcttcataactaccatatctgaaactatgaaagcattgctcctaccactgtttttgaaccatttcttggttcatactaatagtgaaaacggacttccctgtataacatttcttctttgtttctgtgcagagtgagtaagaaacatctcaagtgtgattcatctttagtaggcctatttttccagtcagaaaacaaaatcatttattaccatagatcaagtctttccatttaaaaaaaagtatttatttatttgccactgccatttcaaaaaactctccagctctgtcattttcaaatacaatctgataacttggattgaagaactctgtgtgcccaagaagctgggcaagtggcacacgtgccagggtaaatccaacagttcttcagcacccaagtactgctgagtttgatcttcttgggactgattaaatccatggaatggaagcccacttaaaaatcaaccaaagtacagtattttcgatatggaatctcaagattcctactcctcccttccttctcacattaaaaaaaaattaaaagacctctttctatacataaaagtgggaggtgccttatatttcattacaagataaactatttcaagaaacaggaaaatgatggaagttaaaaggtcctcatattatagcacctcatccctgcgtagtgggtttaaatttgtgttacaatattccccccttcttaggctattgcccagtttaatttttatacataatttatctatatggcaataataccaatagctaacattgtatgtcgggcatgctactaaacgtcagggataggcagagtcaaagacagacttgggccatgccct

SEQ ID NO: 338623 - DNA, 1000 bp, Homo Sapiens; identical to SEQ ID NO: 158725

SEQ ID NO: 338624 - DNA, 1000 bp, Homo Sapiens
tttttttttttttttttttttgagtgtcacaggggaactttattgagaggaaacatggtcacacccagcagacatgctttccctcaatctcggtcttgcactggcgcgcgcgcacacacacacacacacacacacacacacacacacccatctccagcccctgccactgtccagttctcagccacaaggcgggacactcctcaattcctacgatcagaggcagcaggggcaggagggaggcaagaggaggggagaagtagcctggtcctggggtcgggaggaagcgggtgcggagagcaggggtgggggcatgaccagtggttaggtgcgctcaacagctgcaagaagagtgggatccccagccccaggtggcctcagctctgccagtccctctccacggagccctttggagcaagaacagcgcctaggggagaagggtggggcctcccaccccatactagtcctctcggcagggtgggggactggagggggcagggcggggcggtggcgggcaacactcagctctggggctcctggggagcctcgcccccctcttccccggcgttgtcggccgtccacagtgtcaggttgtctcgcagcagctgcatgatgagggtgctgtctttgtaggagtcctcgctgagggtgtgcagatcagccatggcctcgtcgaaagtggtcttggccagagagatggcctcctcggggctgttggcgatctcgtagtggaagacggaaaagttcagggccaggcccaggcggatggggttggtgggcggcatctccttcttgctgatgtccatggcctcctggtaggctgaccgggctgagtcaatgatgcgcttcttgtcgtcaccggtggccacctcggccaggtagcggtagtagtcacccttcatcttcaggtagaagacccggctctcggcgtccccggcctccttgatgaggtggctgtccagcaggcccagcacggtgtcgcacacgccctggagctcagtct

SEQ ID NO: 338625 - DNA, 1000 bp, Homo Sapiens
tagtgcttgaggaaactttaacaaaaccaaggaaaaatgtggtacaagaacaatgcagaaggattctgttccaggcagtttagccttgtacaagtagaagaaggtcattgagtccgttctaaagctggatgcaatttcaggcactactccaatctcttcactttataagcaataaatctgaagcccagaggttaaaggacttgttcaaggtcacattggaagcaaagctgcagctagaactttggtgtccaaactcccaggccaaatctccttctactatgctatatcatactaccattaggagatttgaaaaagaaaagcaaagtctgaagggtgatttttccataaattaaatcagctttaaatctaggcatatttggagaatcacaaacttctaacactgttagagaaaagagagatttaaaagctggttaaatctaaacaataaaaaaatccatatgtacaatattataaaaaagagaaggaagaagatggcattcacaattactggggaggcagggcagggggcagttgcatgctgggggtgggctgcatgggctgccagctctcctgggtttgaaggatgcggtacagctgcttcagctgagcaacgatgttatccttgatgtctggggttgagatctgcaggcggacactgccactatcaaaggatcgtgtgaaatcaccagaaaacatctcgtagatcatccgagccactactggaatgacctgaaccaagatgagtttcctttccaatggtttcccatctggccattcttccccaaagcataagtagatctcaaacggtggctgcttctctatctgtcctttctggtgggcaatgagatcgctaaggaatgtttccagacaaaatagcttgaccttcttttgtctctcaatcaggttgggagcaacaagtgatggggcacatggcccagaccagtacaccttgcactggcacagcctgatggcataaatggcatgaccgctgacctccagg

SEQ ID NO: 338626 - DNA, 1000 bp, Homo Sapiens; identical to SEQ ID NO: 158726

SEQ ID NO: 338627 - DNA, 1000 bp, Homo Sapiens
tttttttttttttttttttttttttggaaaaaaattaagtgatttttatttccaacagttgtaaattaaaattgtacaacatgttttctaatctatgtctcatgtgtcttgctgtatgactgaagacaatgaatgtatttttaaaaattatggcagacacaatatacttggtatttacaatggcctgtgacaaatataatacctggaaataatttctaattttccacttattattgctatttagtcacagaaaagattaacactctccaagaaattttagcatatgtcatatatagatataataattttatataatgaaaaaccataacagaacagggtgcctttacaaggaaacaaaggaaaggcaataaaggatttcttccatataaagattctgatatgcattatttgatttttgtttacaaaatacaaaactgtaatattagaagcaaagggaaaacagcaaagaaaaaaacaataaaacagaaggccaaggataaggaactgttctatgcagatgcactgcatacatagtatatatgtatgggctgagttataataaaaatacttattgtcaattctcatatagatttagaaacaacaatttccaatcaagcacgactggacccaacattttctcagtcttcaattacatgacaaattacagctacacagcagtcacttctggtcagcagtatcatgataaatgcttgacaagatataatttttctccttgttcacttgtaaaaattggtgcctttttgtaatgttctacaagttcttccatggtgctgaatttacgctgcccaatgcagtagacagtctcttttagttggactttaaaatgcttgtttttcccttgtgcttttagtgatactgagaaatcatttggcgaagattcactatcacgaatgaggaaatccccttcatgtcctctttcatttaatgccatttctgcttgatgcctggtgactttgccataataccaaggattgccagc

SEQ ID NO: 338628 - DNA, 1000 bp, Homo Sapiens
aaaatcagaatagaactttatttgtggattcaagattttaaaaaatgattttacactttaaagtgtgcaataaattttgatacatcaatcttgatatatatatttactgtgtcagaagattttaaaaagtcaaatagtttataatcaaaatgaattgtgtttaacttgatacttatatggaataacttcagcattataaataaaaacccaaaacaaacaccatttaaatttgagttctgatgaaatgcatttgtaatacaattttgttaaaaatttttaataagagattgtaggctaaagttatatgcttgtaatttctagaaacatatgatgtccttgctttatgaaaatgatcctactgactgtcccgcagtagaatgcatttgagacacttttctatctgggataaggggctgtgttgcttgatacatgtttcttccagaccacgagcccctagtgggagatgaaggggatgaaggtctgcagctggggactggtggcagttgagtctggtctcatttaacatcatgttctatgagtcacagaatcatccaaatgagtatcagccagatacaaagaaagctttgtattttctcatgcttagatagttcacaaacataatatttaaataattgtggcaaaatcctgttttaacaaaaataattttcacattccattctacataatgaggacatttccaaaatgcattggcccacattactattactttgctgatatgaagaaaatgaattatgatggtaagatccatatacagatatacacatgtgtatccatattatttatatatttaatatcagaaatgttcctacttccttgtctcttagaagtcactttacttttaaatgattctttgggagtgtggtcaatttgcacacctgacttgacacaatctgacggtcagcacaaagcaccttctgattgtataacactttacaaagtactttttgctttctcatctgtctggaacttctgacaatct

SEQ ID NO: 338629 - DNA, 1000 bp, Homo Sapiens; identical to SEQ ID NO: 158358

SEQ ID NO: 338630 - DNA, 605 bp, Homo Sapiens; identical to SEQ ID NO: 158728

SEQ ID NO: 338631 - DNA, 1000 bp, Homo Sapiens
tcaatctttcttcttagctgcttgttcctccccagcaccttcaactttcttctcctcctcttcagcttctttggtttcctctccttcttcaccttcacctccttcttcttcttcttttgcttcttcagactcttccttggcagcttcttcctcttcagctgcctcctcttcctcggcctcttccttgtccttctcctcctcctcggcttctccttcagaggggggctcatccttggcttcctcagccttagacgcctcaatggtttcctccacttcggtctgctcctcttggacatggctggtgtagtaggacgggaaggagcgggtggacatcagataggagctggtctgtaaaccgccgtaggcagatcggccaaagacctgggagctctgggagtagccactggttatgcttcccacgctggtgaaactgagtcgggtctcctcgccttccaagagtttcctgtaagcagcaatctcaatatccaaagccatcttcacgttgaggaggtcttggtattcttttaggtatcgtgccatttcactctttgtggtcctcaattcattttctaatttgttgatcgtgtcctgcatagcgctgatgtcggcgttctgcttgtcctccagctcctgcagctgcttctccagcgcttcattcatgccccggcatgcttcgatttccagggtcttggccttgagcagacgacggctctccgacacctcgtccttggcggcgcgcacggcgtcggtgttcttggcggcgctctcggtcagcaccgtgaagcggctcttgaaccattcctcagcgttctgcatgttcttggcggccagcttctcgtactgcgcgcggatgtccttgagcgcggcggaaaggtcgggcttggtcacgtccatctccacggagatctgcgcgtactggatctgcgcctgcagttcggcgatctcctcttcgtgcactttcttcagaaaagagatttcgtccatcaagctgtcgatgcgc

SEQ ID NO: 338632 - DNA, 1000 bp, Homo Sapiens
tttttttttttttttttttttttctgtagcgcactttatagaccaaagcttagacaaggtggaggctaaagacctgaggagccgagtcagggaagacagattccagccctccctcaaggcaagcctctttgaacacaccttggaacttccaaacacttgttgccattgtcatcctcttctggtctagagaactcagctccttctgggactcagggttggggagtacctttatcagaagggaatgaaggaaatcccatcagcagttccacccctctgggccagctcagtctgtggcctccatcttggtcccccggggcacaaggaagatggtcccatcggcagcctgttgcagcgcgtactcttcaggagagtagctgttgcctgattcatcccgaaggtgctggaaaatgtcacggtacagctctgtcagctgttggcgcatgacctccagggtccggtctgcctccccgcgggccctgagaagccgctcccgttcattggtcagccgctccagctcccgctccagctgcacaatggtttccagcttcctcttgcggcagttctgggctgccaccttgtttttgccccgtcgtcggatgtcccggactagcgctagctggctctctgtcagcgggtaccttgccaatagctcattaaagtcatctaccggcaagttgacaatcttgtccgtaggaaaaggaatcttcatggccaaggcccgacgttcatcccgactccctgcctccccccgtgcagtgggcttagcccgcacagggcctgaggagggctctaaggccaagggggtctcagcagctggcaaggtatagttggagtgggccaaggagttgggcatgagtgagtaggggtactccactgggtacatctctacatattcgctgcgccgccgaccagcctctgtcccctccagctcaagagattcagcatcgctatagttgagggataatcctgagtcggattctgggtcttcttggggcttagg

SEQ ID NO: 338633 - DNA, 1000 bp, Homo Sapiens
ttttttttttttttttttttttttttttttttttaacagtcataataatcctttattagtaccagctcttaaaattttttttttttgccagagctaaacaatttaatataaaaaatgccattttttgtccatacagtatttataaaaaagtacatagtggttagttttgcaataatttctttttagccagatgtcatatcatcatataaatctatgaatataacaaatgacataagaacagtataaataagtttttgtagtatttacacttacacagaaactagcccaaatggtgtcctaagaaattgtttacagttaaagtgaaactactgattcaacatactgacactccaatgctttttaaagtttcgtattattttctatactagttttggctatgattttgcatagaattacttataaagtatgagcatttcacatcacagtaggagcttttagtataatagtacaaaaaaactagctcagaaaaggtcaaatcctcctaaatctagtttttcttaacatctggcttcttacttttgggaacaaggaaaacattgccatctcttgtttgctgcagggagtattcactaggagaataaggttttccatcttcatcacgtagcatgctgaaaacttcgagatataaggtgctgagttgttttttcagtaggtgaaggcttttgtcattttctcctttttctttgagcaatttttctttttcatctttcaaatgatctaaatcttgctctagttctactatattttccagttttctttttctgcaattctgagcagccactttattcttacccctcctacgtatatcccgaattaatgcaagttgagcttcattgaactgctctttggacatcatttcgttgaagtcaacaacagggaggttaatgattttttctacagggaatgggatatggagagcttttgccctaagttcatctcttgtgagatgagcctccaagcggcttgaatgtttgtcttt

SEQ ID NO: 338634 - DNA, 1000 bp, Homo Sapiens
ttggacattcctctttattgttcacattccaacccagcacagtcacatgcacacacggagatcagaaacctttcggccacagccccaggagcccggcggggggggagggcgggaccgacagggcggggcggggccgtggaagactcctcctaccgagcctcccaggcgctcggcgtttgcataaacaagagagctggagaggctgccctcaacagtgcgctggggaaaggggagggaacgtgacaggcaggtgtgggatagggacttctcttccggtcagagcaagggtcgtccgaaaccaaaacaaccctcttcccttcatctcgccccggatccaaagtcttggggctaggctggggcgggagtggcacggagatgtagggcgccccttttactgcgcacagaacgaaagaactcgttttttctttaagtgagtgtgcttgggtgacgcttagggcgccctccgcagtgcgcgcaggaaagcgcactgaggctgcggaggcagagctgcatgctgggtgcgggaagaggtgggcgagaagcaaaagaaggaagattgggagcgcatggtttagggtggggtggagtggaagggcaaatggggaccatactagactgcagaactaactaaaagggcacggactcagcgactccgcgacggagcctgcctgggtgagggagtctctgggacgcagggggctcctgtagctggcaggttgctgggcaggagggggtcacaaacacggcagggaagtctcgtcgctgcgaaggggacgcggcatccatctctcctcgggaactttgaaaatgctcagttctggcctagtctccgctggggccgccgcccgcgcctccccgggccaccccagctccgccaggccccccagggcccgggcccttccggccgcgctctccgctctttatcttcttccgcgccatgtggccccgaaaactcgcctggattttggcggcggccgcgttggcgccgggatcgtccagc

SEQ ID NO: 338635 - DNA, 1000 bp, Homo Sapiens
tggacttcaagtttaattcacaaaagctgcactctctcagcaaattgtcatcccaggagaagtctcacctcagccctcagagaggtgggaggtggcaggagcaccctgtgcaggtctggaggcccagacagcctggagggagctgccgaggacccacgtatgtgctcacagagaagccaggcttcctcgcctgggctgtgcatcccctgcctaggctgcagctgggaaactgcagcaggataggaggtgcctttggcgagattgtcttggggacttcttggggagaccaccgggacttccatactggggagatgccagaactggaaagggagcagaagtcgtccaatccacatgagaattagatgaagtaacacaagtccaggaagcaactgatttgctcagggtgacagggggatcccatggaagagctgggactaggacccaggtttccagacttctgcacacagctctctcccaacccacaccaacaacccccagagctcactcttcaggcctttgctgctctgagccctgaaggccacagggttgggcagggaaaaagcatctcggatagaggtcctaatctatctagttgttggatattgaaatcttgaaaattctgtagtgctaaaatggggaggttacaagcttcagaatgaaaatacagcctcattgctaattacagctttaatgtgttacaggttgaaaaccctgaattaaaaactaaactgaggtgggagctgcaaccctcctccacctcccattcactgtgtcaccacacttccaccccccagtgcctggcactggtccctgcagagctcagcgtgctagtcatgtgggctgggtttctgtgttcgtaaggggaggggacccctctccagaaaatgaccagcatctaaattcgggcatgacttgaggacccaaaagctttggggatatttgcgcggtcatacagggcgtggctaggaccagaaggcgctctggtaacgatgcagagaac

SEQ ID NO: 338636 - DNA, 1000 bp, Homo Sapiens
ttttttttttttttttttttttttttttcaagtatatttactctttattgcattccttcatttgcattaaacaatattttttcaatacagttttggacaaaacacaaagacattaagctcatttaacaagagacataagttaacacaatgtgtgctgctttcatgaggaggaaagaggcaagatcttagaggaatccaggatactggccaccaggaatcacaggatctcacaatacaatccacttctttaaaagccacaaaataagctagggaagaaaacccaaaacaaagaagatatgacatccaagtctccaccaaaagtatacaaatggcaagatttggagatgatctgctttctcacatgaggacaaataacagaggagccacacccaagtgccactgtggccacaagcctcatgggtggcgtgtgaggtaagcaccttaggatggcttctaattgcttgtccttgcattttaagcagcagttgggagagagaggcacactccataagtctcatcaccaaatatgacctaattaaattcctgctaagtcagtcagttgtaagacaaatcaccctcaaaaggactcaacgggtgcttccttttggaagaagtgtgtggagggtaaaggaaatgtgttcaatgtattggaatggacaataaaggactgagggagagggctagaaaatgattgatttttctggagaatagtgttttagacactagatagtacagatcatttaaaataaaggataaattctaagtaagtcattaagctaaggaaaaagcagtgatactagtaagccttaatattatactaaggaattgacccacttggagttggacactaattagtgctgagaggtttgtaaattactttaataactcctttctgtttgggggtgtatgctttttccatacctatctttcacatgtttttaacaacatcttctaagtggtaataatgagcatatctcttaccacagagcaaattagttat

SEQ ID NO: 338637 - DNA, 1000 bp, Homo Sapiens; identical to SEQ ID NO: 158731

SEQ ID NO: 338638 - DNA, 1000 bp, Homo Sapiens; identical to SEQ ID NO: 158732

SEQ ID NO: 338639 - DNA, 1000 bp, Homo Sapiens
aaaaaatgctgacgtcagagtggtataaaaaaattcggctgagttttcagtggtggtggctaatttagccctgttctgtagtggggcacaaaccttgaccaagcagagagtagtagaaaaggctagaaagaggggccttgaagacgatgaattttgactcctgattttattattcaatttctttttttcgtttaaagtagtcttccgtggttgggaagcctcacctcccaagaccagagtcagttggagctggttgttgttggaagggagtgggttggggaactggggtgggggcagggagatccccccgctctgctggcggtcctaggtggagaagaactgcacttcacagagtctggggtttggtgggaaggggatgaggcaggagcagcaagctggggagatgggacgcacctcagtccccagcttcattttcttctaatgtttccccactggtgggattctctgcagtcttggaggccttcttttttttctttttctgggtttttcgacttgcagaactctggaggagggcctttagctctgcatcctggacctccatctcagacttgtagaggtcaggctcgaagggaccactggttatccgcatggggccattgggcatgagcagaactgtaaatttaaactgggcaacaaattcaccctccttctcatagagaacattaaatggttgcagcagttcatgtttggcgcactccaccacacccatccgagccttcttctcatcttcaaatgctcttaaagtaaacggcatggcatcaaaacgcctttccacctcactgaagaaggcacgtgaagttttcattttcagtccatactgtttagaggggtctcgtttgtaaatagtggttctctgtcctgcatccttggccttgccctctcctgagctgacgagaacatccacagcatatacttcatgtacctcaaattcagctttttcatggtccttcttctgctggtctgtgggattctggataat

SEQ ID NO: 338640 - DNA, 1000 bp, Homo Sapiens; identical to SEQ ID NO: 158733

SEQ ID NO: 338641 - DNA, 1000 bp, Homo Sapiens; identical to SEQ ID NO: 158734

SEQ ID NO: 338642 - DNA, 1000 bp, Homo Sapiens
tcggtgaaagcctcggtttaattggagacaagatcgaaggattattgatcaacggaccgaatgactgatcgtcaaagtggacaatacacaagcagcttacagaggtcctgtgctcaccctggggagaggagccctgcttgggggtgggtctgtctctccagtcaccccctggctcctggagaaggggggaggggacaggctctgcccagccccaacccctaggatgacacgacttcccataaaacaacagcggtgagtccacccttttcccaggactatggtacagttgtataatacagcaggaacagagactctcccaacgggagacctccttccctaccttcccgactgggtcagccagggaagggcaagtttttattttccctttttgcctccgtagaataatttacaaaccaaccttacagtatgtacaaaaaagaaagaaagaaaagaaaaaaaggtaaagaatgaacaaaaagaaagaaaaggcccactccgatcgccggctgggacaaaaacgactttcgctacaaaatatgaaccctgtacagacagcatcaagggagtgtgagtgcggggttacctccccctggggtggacagagggatggaaggctagggaggaactgggggctacagtaccgtgtgctcagaattgggtagggggcaggcgatgaatgaggtcggtccagctgcagaaccaggccgagggcgaggggaggagggagagagggggctttccttccaaacagtcccccatggcttggagaaaaatggtcttgcatctgtctgccgtattgctcaggggactagctgggggagagggagaggctaggcaaggtacggatggaggagaaattattttggtgccagggtggaaggaagggctgcccaggaatgagaatgagggtatacaccattattgcttcctcctagggcaaaaggtaggggggctgtgatcagagtgtggaaggtggggtccggaggaccctggaaagggg

SEQ ID NO: 338643 - DNA, 1000 bp, Homo Sapiens
attcccccagttgtgtttccgagttaaaaaaaaaaaaaaaggaaataatcaaatgcaagtagctgaagtagttcctgatcaacagatggcaaacaaccatcacacatgcagtgctgctccctggcaagaagtacttaagagcttctgtctcaaaagggtctcagaatctttcagaggttgtctgtggttttgtaaaatccacctattggcagaattctaatcaattaaaagcctggatgtaaaatgcccagccctagctccactgttacctttcaaatgcagcaaaacagaagaaaatattggttaaagttaaggcacagccctgggaccaaagacctgcagctatgtttttttaaatttatatatctttaagtattttatagttttcttgaatcttccataaacaagctctaaggtgacaagactatattacaggagaaaagaaaaatgtacagagtatgtatacacaccattcattctctcaccaagagtttccaaatatatcaacaccaccccatcatgggatgatgttttaataagaacagataatttacaattaacattacagtatgtacattgcaataaatacatggttgtaaacagacaaacaagactgtattacaggtaaggtcatttggtgagaaaaaaaatgcatggcacaaaaaataaataatgcattcaaaaattatcataaagctttctgtaaaatccatttcattcaagttttttctttccttgtctgtaatttgttctatctacattattgtgaattttaactgatataaaacaaaattaaaacagcattattgtgttcagtaacttgcaagctgaaatgcactggttttacacaaacttggacatttttttccccatacagtacccagatattgcattttcttatggcattttaggaaatgtaaagccacttgtaaaaggatattcttttattcttttttaaagcagtatatatttctgaagcacactttggcaagagagaagg

SEQ ID NO: 338644 - DNA, 1000 bp, Homo Sapiens
tcaggattgcatgattttttaatttaaaataaattggcaccaaaaatgtacctatttttgtcatattttgcacttttgttgaactttattttgcccctgggatttttgggctagcaatatatattttcttcatagtcacagggtagtttttctgaagatcctgttacgtgatgatttgttgaagttcttttgaatgttttctggttttcttcaaaggtaaaatgatatttgaagtttagaccagttagataatattacaacattaaacatgttttggactttttgtcatcaccacctcctgaatcttcagcagctttttcggctcctccttcttgcttttttgcctcctcttcaatgaccttcatctttgcatcatactcatcagctagtgatttccattctactctgttattctgaagaccactcagcataggtgtgatttctttgtgaaaccgtgagaactccttatatacaaaagtacaaacaaaatcaataaatccaacttgaagtttaggtaattcatctcttttgtttctgtccatcataggaatgggttgttgctgcaacactgttctctccagatctccttgttcccaaaattcatttgcaaccataagtgctacctgactttgcacctcccagggcttggtaatagcagacaagtcacatgccgtcatcatcattgccatgataatctctttcttggttggatcaacagttacatatttgatggcttcttcttccgtttgcatttgttcacaggcatcaacaattttttgaaacatggtcctcttcttgaaatataaagccaggtcagttgctattattgcgacctcgaacaaatgaataactgtttcaaactgccgcttatttaggttctggaagatgtttaaactctcatcctgcaacagagtcttactgtactccaggtggtgcctctccaaaatagaagaaccatgaagtcttgctaatggagacgtggatttcatctggtacaaat

SEQ ID NO: 338645 - DNA, 1000 bp, Homo Sapiens
tttttttttttttttaactttaaattatatatcatttattgaaatataaagatcttcatttacacgttttaaaacaaaaacatgaacaggggcattcgtaatacattttgtattggtagaccctatcaagttagtttttctcacacattcaccacaccattgttttgggaacatgtaagtatctttctttttattatttctaaaatataaattttggacattcaaaagtgcaacagttaatgtgcctgtggggattatcacagttaaaaaaatataaacgaaggcagtgatacagcttgtcataaatgttttggcagtattctccaagtctatatagaaatacatatatacatattgatgtataacatcattttatcttatgtccctcttcacaaaaataggaccattttgtacagattggcagaccacattttaaggacatcactaatcgtttaaaaagtcacaaatagtgtttctcaggccggctttgattgtcatcataaaaatagaaagtaggaaagattggcaaattttcttctggagactttgcaggaggccaaaaggaaacaaatctggaatttgctgaaaacacacacacacacacaaatgcagtcatatacaaattcaggtgggagcatttgttaggactggaaactgctggactgagaagtttcatccggcctcatgatgtcatgcaaggctcacagcaatatcaaaatgcaaagcaccaacaaaataaggctgtacaagggagagtgagcgataaacagaatgcttgagctgtgattctagaaacacaaacgtatttcaagtctaattggctctacagaacctagtcaggttttcgtttttaattggccaatctggctcagtcttcgcacttactatgaaaaagttggataagaaagttggggcttgcattgagattacaccagtaggtagtcaagtactttattattgcttctgcatcttccaaagcatcatctgccgatagcacagt

SEQ ID NO: 338646 - DNA, 1000 bp, Homo Sapiens
attttttacaaaaacgtgctcatttaatagaaatgattgattatataaaattgtttacacatgtataaaaactaggaacacgtatgtaggtaagcaatcaaaatcatgctttctgttagaaaagttaacacttctgtgaatagactggatgacttccttttagtttggatgtctgggtcggactcacgagacgctggggttggggtgtggtgcttgacatcagcctctggcaaagcactaataaaaggaaccccaaagctgactgtgtacacaaatgggctttccataagttcattacatttccttttccaagtcaggaaaactcaacagtggtagctactgtggtctgtccttgaagattctgagcagtgcaaatgtaatatcctgcatcaatcgtctcgaagtcttccactgtaatgacactctgggagattctcgtggtgtgtcccagtcctctgtggatcaacctccaagtgtcttggatcgtcacaggcctttcatccttctgccctgggaagatccaggtgaactccacctccacatcgggctcccccaggacagtgcagagcacactgatgtcgtccccacttttcactttgtttgaagaagccaagatggttgttgagggagggccactgggaaccgccacgtagagcagctggtacttgacggagatctgagatctgcccccggcctccgccctgcagtaaaccacaccctggtgctcggaatgaggttgcagatacacaaagccccgcttcatgtcataaacaatgtccgttccattggctgggatctccttggctgggaattccctgtggagcgtgactttggccgacagcacggtcacccgacaaggaaccacagcctgtctgtccgggttcaagtagacaacatcgaagtagctgggagaaggtacaaagagttctcctttctctgtaaaaaagatgtaggtggagcccgttttggcctcgtccttcctgcagatgtagccgctgca

SEQ ID NO: 338647 - DNA, 1000 bp, Homo Sapiens; identical to SEQ ID NO: 158735

SEQ ID NO: 338648 - DNA, 1000 bp, Homo Sapiens; identical to SEQ ID NO: 158736

SEQ ID NO: 338649 - DNA, 1000 bp, Homo Sapiens; identical to SEQ ID NO: 158737

SEQ ID NO: 338650 - DNA, 1000 bp, Homo Sapiens
ccgagcaggaatatccactttatttggactccatgacaccgttcctatgcccttgactagatgtgaatgtattatacattgttctagatttgggggaaaaaaatctcttatgacataaaattggtagggaatgggtttatcagaaaggggatacaaaacataccctaagctccaaatcattcacttcttcttgggtaaagagctaactgaatgaaagaaattgatttaacacttaaattagacaccaaccacctttattggctgccaccctaaattagttttccttaaaacagtaatatttcacttttactgttttttttttccattaaagcaacaccattgtgctgcaaaactaactctatgcaattaagtacctgatacatgttttctgcttttaacaagtgatagaaaaggttacatcatctcattaagaaaacattttccttagacatttcgtttggttttggttttctgttgaaagagttatagcagatggctatttcaaagattggttctttctcctttcacaagtcgagctcgaaacatccaaatatccttcaagttcacgctattttcagctccaaagaatttatgtgctattcctacaacttccttctcgatgttttcttgactggtgcccttcacgtcaatgtagtggcaatcggcactggcgaaatggcaggaaattgccttccggaatccctgggttttattctgaccagatccgtggatgagcaaaggatggaagaaaacagtgtcgcccttctccatcaccaggtgcacccgggccttgttttcctcgtagtcctggatcccgtggaacattttgttaactcccccctcccacttggggtaatcgtggggcttcagggagcccttgtgtgtgcctgggagcacaaccagacagccgttgttccggctgatgtgctccatcgccgtccaggcgcaaacgatgagatcgctgggcctgaaggggaaatagtgcaggtcctggtgcagg

SEQ ID NO: 338651 - DNA, 1000 bp, Homo Sapiens
ttttttttttttttttttactactcataacagtttatttttactttgtacaaaatacaaaaatgcaaatccaaggagtacagaccagtagtgacaggcacactgcacaacagcaaccttgtctagcaagacaggagttttttaaattttattttagtgaatacatgcattatataaaacaacaacaacaacaacaacaaaaacacaaagaggctagagatttcaccgtttctacccccaaaataacgcttgctatcaagactttggagggggatgggggaaaagaatttaaaaggcaaataatttttttttcataaaaagtaaaagctaccataaaacattttttttttctgtcacactgattaaatttcttctgaaaagccgcacatatagacaaaacaaaacaaaaattcctgaactggacaaacagcaaatactcaacagggttgttaacctaggtaacagttcagtagtttaaagaatcttttagacatctggaagcctttctattcattcctcagtacagtgttccagccatcctgctgttttttccctccaatacctcccagaacagaaacacttgcatcgagtctgttcctaagaactagttttgaaaaagaagcgatgtacaaaaatatttaacagaactatgaaagatgcaggaaaggagtctttcttcgtagcaaagtagtcgttgctttgcatggtttcttttgtatactcttcagggtttgtttatctgccccatgaataacacagcacctgtaggattatgtcggatgaaaaacagaaaaggtctgtctactataaaccagggaggcgatgatcttgcaatgagaattgcagttgttgctgctgaagctttggttccatcttcactgacttcaatttttgctttttgcaagatatgagaaacatggaggttttctgaccctgttgttatttttgcaaaatttgcctttgatgaatcaaacatgtcagtaatgccaagaactttcagc

SEQ ID NO: 338652 - DNA, 1000 bp, Homo Sapiens
tttttttttttttttttccttctccatcatttctatatattttggggatttttgttttgttttgttttttaaaaaaagatacaaacaatcttcaaagtttacctttttggacttaaggcataacatgaaattgcgcattattctaaagcttaattttgaaatgaactagtttaagtgctatcaaaccctgtttgcgtttacattatttaaattatatagtattttatttctgttcttgctgtaaattctaatgctgttcatggattgtgcaattcctatgcaatcggtctttgcctgctgagagttattaacagtgcagtgtggaatccagagtgagctttcattttctcagttatcttttcagttcaatgcatgctgtttaattgtgtggaagatccaatccatttttgttgtccagccaccatgatgtgcatcattcatttgtttcatgaaatactccaaagcctcttgctcagttttatctaaggctagggtctttcgaatgtatgcaatgtcatcaaaagattgtagttctggcattccagagccaagcatcattgagaaaagatttatgaagagattggcatgctgtcgaatagctagataagccttgtaacacatctcctgaaacctctcaaattctcttgtctttgtgcattcttgggctcctttactaatcactattaagaaatcctgtgtcaaaacaaatggcacacgttctcgtttataaccaaattttttcttcttgtgatccaaaaagtgtccaaaatctatatgaaacagttgtccatcgtctttcaccatgatgttactattgtgacgatctccaattcccaaaatgaaggtagctacacagtatccagcacatgaacgtgtaaacaggtcaatggctgcatcatatatttctcctttgttcttgtctttgagccactgatgtagtgtgtggctgttgaactgcagtgcacctttcaagccgcctttgcactgaatttgcataata

SEQ ID NO: 338653 - DNA, 1000 bp, Homo Sapiens
ttaagatctgtagtctttccgaactgtgtgggccatccagttcactttagtagtccagctttccctgagcgcctcatcaaatttttgcttaaactgtttgagtgcttcttcttcactcttccctaatgcaagagagtccttaagatactgtatatctttgactgatgtgagttcaggaagccctgcagtcaacatcagcgcaaagagagtgatgaagagattcccatgccgtcgtaaaatcagatatgcatcctcacaacactggcggaaccggccaaacttttctgtatttcctgtttttccttgttgaatgacatggatgaaatcataggtaagaataaaaggcactcgctcccttttaatgccaaacttagatttgaaatttccaagaatatgtccaaagtcaatgtggaagagctggccagtttttttgaccatgatgttgtcactatgtctgtcaccaatcccaaggacataagaagctacacagtagccagcacaggacagtgtaaattcctcaatggctcggtccaggtcatccccagagttgtattctttaagccagttcagaagggcatctttgttgaaggctgctgcagcagccacattgctactgttcagctgaatgtcagcaattgtttcagaggtgctcacaacttcaatgaggccagagcgatctcctgttgctaaacagccataaggcaacatccgaagatccaaaccagcttctttccagagtaaatccatcaagcgcaacatttggagtgtcaacatatcctgtcgtaaatcatcaccatttttaaaaatcactccaactgaatcctcaccaaataccttgttattgtataccagccacaaaggcttcattttggaatccatgtatttgcacttttcaacatagagttctgagaggataacacatgggttcaggggtgactgcaggtcagagagggcttcccggtaagcactctgttttaaacaggtatgcatggcctccttc

SEQ ID NO: 338654 - DNA, 1000 bp, Homo Sapiens
ttttttttttttttttttgcttttttcctccaataaacatttatttaaaaagaaaggagttaacactgaaaggcataacgtgccacgtactatgttaagacagtggagctaataccacctgtcctggaagatcagagttgactaacatgtaaaacaaatgttgtctaggaacttattttatgattctcacacactaatctatttgatgcccaatattttcagttgtgtgaatagtgtgagttgatatctgcttcccctgaagatggtttctgaattaatttatgggacagactgagagtcagaaatagttctgggaggaaagagaatacaggttaaagggagtctgcttgacttctctttgagaaagactgactgaatacctactacagttgacattcacttagccccaccctctcttacacctacaaacccatacttagagctttcacagaatacaaggagcatccaatatcttttctttttaaaaatttttgtatttccttgcagctccagctcaaaagaatatgtaataccttttaaagaaacaaaatgtataaaacttattcagtctttcatatgattttattttcttccttcgaccataataatatgatatccaaattttgtcttaaccggtgggtctgtaaacacaggcttatccatcccacttacaggcaaggcaaatgctgcttcttgaaatggtcccaccatggaccctctggtcatccaacccaagtcacccccttgcctggctttatcttcactatactgtgcggccacttcattgaatctcatcccagactttaacttttccatggcttccatgattttgccatgtttttcacatagaatgtgtctgacctttactgcattgccaccacctttgggaccttgagccttcttgtcagcactgtcactcccagaggctgctccccctttccccgcttttccagaaccactttttcctttgggcggcatcttggaagcttgttgttgaacg

SEQ ID NO: 338655 - DNA, 1000 bp, Homo Sapiens; identical to SEQ ID NO: 158740

SEQ ID NO: 338656 - DNA, 1000 bp, Homo Sapiens; identical to SEQ ID NO: 158741

SEQ ID NO: 338657 - DNA, 1000 bp, Homo Sapiens
ataggagatgtttatatttgcaaaatttcaacaattatcttctctaggtttccccaaattagcatatttgttaatcaaattaattaagaagcttttcaaaataaaagcaatgctttaaataaatatattctttcataaccatagaacatttagttctgttggaggtaacaaacattacactcaagtactttatgaagacattagggtaaaaattacctagatgcaattataaatgtaccctaattagtcatttctttttgcatgtatgctttctgtgtgtgttagggttatatcatagatgtgtggtaactggttagctcttaaattatcacaaagatattatcggacccacagaatttatatcagctcaatgtgatgatatgatattgttgaacaattatctttaaattttaaattttagtacccctaaaattacatccaaacaaagccaacacctctaagctgccatatctgttatagaaaatgagtgctagactctcagcttggaagaatgagaccttcctacaaatctcgaaattatacaacaatattatgtcacatcaaatcctaattgcaacagagctttcagtgtgtttcagagtagccacacaggtaggtataaattcacttatgatcagcttttctagtgaaatcatatgtttagtaaatgactacagaaaacttcctaaaaattgattttatttaataaatattttttaaagttttctgactgaagaaatgaccttgctaatctttttagaaattctcatcatctgtttaatctttcattcacttttatttctactctgattcttaggaatttttctaatctatatttaatctaccaaaacatgtatgctttgataaatttggcttccttcaataataagctatgctaagatcactaaattaaatgtcaaaggcagagaagtcaaattaaacacagcaacaggttacagtaagtgctctttagaatttcagattaaaacaattgtcccaa

SEQ ID NO: 338658 - DNA, 1000 bp, Homo Sapiens
gaggtggtggacggactgtaattgatagattgattatggaattaaattgggtacagcttcaaatcccgtcttctctgtggcactgggggttagagggggcactacaggctatgaatgtgggaaaagaggggctgagaggggttggggtcctgaatgacagctgccagcttggggattgagggctcagacagctgctgtggacggtgtgggggcagtggacgccctgacatcagcaggccggttcttctcaatcacctctcgcagccctttggcaaagtggagatcagccccgatggtgaggaatcccgcatggttcgtcaccacctcatgcacaaagttgatgccctcaggtagtgggatctgcaccccacgccaggtccgctcattgagcatgggcatcaccccaatctgcagcatggtcttcagaggggcctgtaatgggatcagagccagcgactccagtgcagaatggttggaatagattcggaacctgcgcaggtccagctgcgtgcgcagggccttcccccggagagccatcttggcgctgagacgggcgtccatagtcatgctggacagctggacctcaggctggtctggtgggaccagggcaatggtgacgctagcagtgacagagatggtggtgccagagggcttgatggtgcagcgcggtggggccaggacccgcagctccagcttcaatggggagtcaatcactgctgggctcagcaggacaatgctcccaaagtaggtggccctcagcagcatgtccaggtcgtggggcaccttgtcccccaccagcaacagctgcagggcccccgcccggaagtagctctccatggcagagtcgaagaagaactcagagaaggccacatacaccatccgctcttcctcctgcagctggggctccactgcccggttggggaggctccagttcctctcagtcagggggaagaaggccccccggaagtccatgtccaggttgctggtggaagccacagga

SEQ ID NO: 338659 - DNA, 1000 bp, Homo Sapiens
taaccatttgctcagtagaagtttaatggagaaatcgttgtttaaaacaatcagtcaaaaagaacagctcttttacaaacaagttatggcagtggcaagtcaaaaccccaggttcaatttcctattcctttcacctgcccctagaaggggcaagaggcgggtgagcaggagagatggggctattgaaatggtagctagaggaattacaaaaatacactctgatgtagcaacagggttgtggtgaaacatgccagggggctggggaggaacaatcagacgggaaggttctggaggcaaacgaagcctgcgggatctgcaggcgctcagtgccttggggaagaaggaatcctgattcccaggcggcaggtctgggkctgagcacatgctgtttgggggatcacctggacgctcatgggttgcagtggccggtacagctgggaggagcgccccttccggctacacattaccattctggtgcagggtgcgccggcgctggctggactgcatgctcaggaccaagtattgcctcataaactcactgaaccgcttctgattggccaacttcctggccgacttccgggccccggtgaagcccccaaatctcttctgcagctgcttctgctccatctcaccagcctcctccatgccaggctcgggctcttcctgctcctggaacaagctccggactcggggcattcgccgcagatgctgcatctccgaagctctcggctggtagagagcagccgccacatgctctggggcggcagggctgagctgccaagagctcctggccatgaccttggtgcatggagtccagagggggctggggaagaccttctcttcgcactcgaggatgcacacctccaggtcgaagctgtccagggctgggtggagcttctcctggcatgtgagacagtccctctgacaactgctgaacacactggagaagagactgagcagcagcaggtcacaaagcaggactttcatggtgcaggagcag

SEQ ID NO: 338660 - DNA, 1000 bp, Homo Sapiens
tttttttttttttctccagagtttttatttaaagtgggcaaagaaaatatgtcaaagaaactgtcatttcccagaaaagtcatttcccagaaaagtccatgacttctacatggattctaccaactgaaatgtctgcttaatagtgacgatggtgctattagcaggtgggtgagccagttcccaaggtacacgttcactatcaagagctaagcacacctgctaacaactcagtctcctacaaacctgatgtttctccagcaaaacaaattaaaattaaacctaatggtacttctggctgaggctccagaggtccccaggagggagggtgtttgcgtggagggggccttggttccacagaatggtggcttatggacgcttttaagacactaaagaaacccacatggtaaaaggctgggtgcggtggctcacgcctgtgatcccagcactctgagaggctgaggcgcgcggatcacaaggtcaggagttcgagaccagcctggccaacatggtgaaaccccgtctctactaaaaatacaaaaattagccaggcatggtggcatgcacctgtaatcccagctactcgggaggctcaggcaggagaatcacttgaacttgggagacagaggtgcagtgagccaagatcgcaccattgtactccagcctgggcaatggagtgagactccgtcccaaaaaaaaccaaaaaaaagaaagaaagagagaggaaggaaggaaggaaggaaggaaggaaagaaggaaggaaggaaggaaggaaggaaggaaggaaggaaggaaggaaggaaggaaggaaggaaggaaagaaacaaaacccacatggtagcactaagcctaggcgaggacccatcacctttaggcttaatggggtcttggcctccacagcaccagcagagggcctagaggtgagagagaaatggccgaccaaacacacccttcaccctgtttacaacagcccaacttcccttgcacgtatcctcaaggagag

SEQ ID NO: 338661 - DNA, 1000 bp, Homo Sapiens
tttttttttgtttggttgtttgttgaaaggttctaccaggacctggcccagtataaacacaaaaacgcacccaaatcataaaactgctcttctttcagttatgttttattttgtaagtgtactgggacacatccccctgttgtatttggcgcatagaattggttctgatagaagtaagggaggagaaaggtaaaagagaaaaaacataaccaaggagaaagctcagcagacatacatagacaggtagatcaatccgtgagacatttcaggatgaacactggcagtctgttaccactgtgtgaatgtgtgcattaaataaaatatttacaataacttttttcctgttttctttgaatacaagaatatgacaaaaatgttttcagtggaaacaggcagtagactgtgaaatcgcactagccacaaaacggtctaccagaaagctagcccagtttagtgctcagtttcaaatgcatagaatgtttgccctgcaaacaatgatatacaacataattaaataaataatgcctaaccagagtgagacctaattgtgtttctttccacacctttcagatcatgcatgatttcagtcttgttaatcggcaggttttttttcttttctcatttgttctgttttcaatgttttagttatgattaaaggatggtaacaaaccatctctacgagagatccaaagagtatcttgtacacaaagcaggcattttacctaaccaccttcaactatcttaattttttaaaatccaccagcagcttgtaaggtacctgattattactatgaaatactatacatgattttctatttgggagactggtagtgcaaattaaagttcttgctacccaacatttatcccctgtaataaatgactcttgaataataagaacaagtaaaaggaaacacagttgttctgttttcgcccaacatgcagacctctttgaaacaaatgggggtgggggcactttaaatctgtcttcctcttttctggg

SEQ ID NO: 338662 - DNA, 1000 bp, Homo Sapiens
ttttttttttaaatatttaattcccatttatttaaagtttcgtcagtctgtgtacactatttatattaaaaacacaggaagctggggctcctagcaaaaatatacatttcaattttggagattgttcagacactgagaagagctgtatcctcagcaccagacccgggtcggggcagggacgcggcatgtggccggggagggggaggtgggtcccagcagctgtcccttcatagccttggcctgaaaggaagcaccccaacccccatcagctgggtaggtggggagcgggaagaatcctgccagcagagagtgatcctggggcatggaagggaggctgcagcgcccgtaggggcaggggctgggcacttccacccagagtcacacacagaatggctccttgggagggaggaccaggcaggacccaggaagcctgggcttgaaccccagttctcctacctctgtgctctgagactccagccagccccttgcccctgcaggcctggagggctctgcgccgctcagacatggcatgcccagctgtgctttggccctgctctgaggtgagcgcacctcaacctgggagcaggggagggcagggaccagcggtgtgggactggtcccacaaggtccccggacactagaggctgtgcagggagacttctaggtggccagctgggctgagtaaaggggaaggggagggcagtagagctattgggacaaatggacatcagaatgaacaggctcagtttatcccgggaagctcccactgggagcaggtgctgggctgacccaccaggacctgcaggacccctgcctccccggagacctggcccagccctgcctgctcacctgcaggcccctctctctgggttctcacctgcctcagggagggaagggaggtgcatggagcctgcaggtaaagtgatttcagtgcttatgtgtgtgtgctggaggggccatcagcaacattggcctggcaaaccagtgtgaagatggaagg

SEQ ID NO: 338663 - DNA, 1000 bp, Homo Sapiens; identical to SEQ ID NO: 158744

SEQ ID NO: 338664 - DNA, 1000 bp, Homo Sapiens
ttttttttttttttttgtttttgcacatatactttaatacttaggcttgggtaaaatcattttaaataacatattaaaatatgtttggggggacaacccagcaattgcacagcccactagaaaattttaacatctaagtaatataactgttttagggtctgaaagttctccttcagttgttccacagcctctttatcaactaggcaaatatatttaagcttttaaatttcataatgttggtattttttaaaaggcacgggaggttcacttaatattaaatatataacattcactttcataaccaaaacctttttggcaagtgactttcacatagattatgagattctctacatgccttaaaataaatctggcagctcttaactcatatctaaattctctggacaactgtcttgctctctgttttggggccaggggcgtagcagtgaaggccctaacaggcttgctgacctaattggacagtttgttaaatagcaggaaatgtaacaaggcttctctctctcttgcatgttaatgtagtgaacagtgctaatagccagagattgtgcaatttagtcacaatatttcaagccaaaattcagtgttcttatattaaaagataccgaagaaagctatccttgttctttgaattataaaagcacagaggttgcaatgatcagaaccaaactggttaaaagccgaaatgcatcctttcagtattgatttgacagatgccaacaagcattcaaaaatttagagttaatttcttggtgacaggtagcataaaattgatcagactggtttcagctgtatcataagcttcacaaattggagatcttgtccttcctggctgtttttttttttttcccacaccttaattctagcacctgttgtcagaccactgttcagcaccaaaagaactcctcagcctggagttctttggagttttaagtgattgcctaactcagcaggggacagtggtcttgacttcttggttgacggt

SEQ ID NO: 338665 - DNA, 1000 bp, Homo Sapiens
ttgaatttctctctttattaagtctacccccagccacggaaagaggagtagaccatgattactgtgaacccccccttaccccaggacactgtgaatctcttcttgcctgtgccctccccctccccctgcccaataaataaaaaggggacaaggaagtacacagcgagggaagggaggagtgtgcacccaggacagtgtctgtgtagagggtgagctgggcgagaataaatagaccatggaccccatggtggggataaggaaggacctcgcattggccaaggcaggggcaggcgaggcgctgagtgcccttgcccaaggccaggagcagagggtgggagcccgcctgcagctggagcctagctttgcggggcaggggaagatccctgatggcagcttcctggtcaagcttgcccttgtcaagtcctgccacgaggggctgagcattctgttgccaagaccaccattgcctctcctcgtctccccccagtgaaagctgggctgggcagggagtcctcagaagccactctggcaaggccaggggtaggtgtgtttctctctgggcccctggacaggagaagggatagagggactgacagctctgggtttagcttttccccttctgaggtgctgtctagctctgacccccactggcggccacctggggtgtaagccgctggaggggggcctccttggccccctgggtcccctgtagccggcgtagccgcagctcctccagaccttgccataactcctgacgctcctgggccttctgctgctcctgctgcttttccagcttgtaggaggctgtgagctcatcaaacagcttcccattcatctccatgaaggtcttgagcacattgtagatcagtgatacgatggtttggttccagtgctccttggagacttggtagagggtcccaaacacagcaggcagcacagtgtggcagttgtcctcaatgaggcttaggatatactcattgttccagaaatacagagcccg

SEQ ID NO: 338666 - DNA, 1000 bp, Homo Sapiens
atatatatatatatatatatatatatatatataaaatacagccctagattttgttttttttgtttttttttcttaaacaatttggtcacgatgcacctttgatataaaagcatttttaaactttattattaatactcaggacattaggaatttccagatttttttcagtagcatttgtagaaccacttttggtaacaaatacagtagttaggaatatgcatccaattcagaatgcataataatgtttatcctgaatcctttccggctaaaaacagggctggcgctgtgatgagatatagaacgagaatctacaaaaaacactgtaacatgtttgttttttcccagaggctacatcctcttttgctggaatactttataaatacatattaaaaagtaaggcaacaactccaaacagtccaagctgtttgctcaactcttttcccaattagatttgcaatcccggtgatcaatttcatggttgtattgtttagtgtttgtctttcttatttcaaatggtccaaaaggatgtttttctcacatttctaaaacatctctggtatgtgtgttcaatgatatatgcaactaatactggtcaggtactgaagcctgtgatgtcccagtgcctgttttcaaaggattcaagacattgatttggattcaccataaactgatgcatgaatccgatattcccttccctactatgtttatcacctcttctctcttaactcctaattttaaaactaaaggagtaccaggactacctggttactggaaagatgttcaccccagtaaacaaaacttttatcagggacttttataattcatgaccccattccacgtggacattcaactcaggaagatgtgcaaaagaaaaagatgttaaattacagtcaagttatccagaggaggatgttacacaaacttataaggaaatgacagtctttttttcttcctttactataaatacatttaacagcttagcagaaagacaagctaaatt

SEQ ID NO: 338667 - DNA, 1000 bp, Homo Sapiens
tttttttttttttttccgataatgactttattttaacatatttaattacagacataaaatagctggggaggggggtgagccccagcctagccccaccatggggctataggaggggaggcgcaggcggggcccccctgctgaccctctctctgggggtcttcctatggcggggccctattgcttgagtgggggaggagccatgcaaatgaggggggcagggcagccactcggccccaccccaccccgaggacggcctccccacagaatgcccaggctgtgcccccagccccagctgctccacctccttcctctctgtccagggagcagaccctctggccagcccctgactctgcccctaccccctctgcaaacctaaaggggaataaatacaaactttacaaagtaaaagggggtccaacattgccctggggcggggcctgctctgcccctagcccagggcctgggtccggtgggattggaggggccctgggatgcaggccgccccgcccgtcacctcacatcattcctagctgcagcagcgtgttggcataggccatgggcttgacgttgggatgaggcactgctgtgaactggtggaactgaggccgtaggtcagagccctggaggtggatgtaggaggctttgttccccatctggtcgcagtagttgggggcagagaagacggtgacacagcggcctccgtgagccacctcgtagccctcggccttgacttcgtggctgcggatgatatagtccaggttgttctcttccaagaaggccttggtgacgtcaggcccaaactgacagctcacgccccgcttgctgatcgagcgcccgttctgtggctgtggatctgaccagagcaggtcacacatgggccctgaatctgggggttgtcgattccgctcaattttccggatgtcatccagggtgacaccgtcttcactgaacaggcctccgtgcatgatcagcactttgccgttgatgcactgggccaacg

SEQ ID NO: 338668 - DNA, 1000 bp, Homo Sapiens
ttttttttttttttttttccttttgctacaaaatgcatttatttccagtcagacaaaattcttgaactgtatattcgggtacatattataaggtcatctttgatatatgccctgtttacaagatccatttctaattattaaagtgaatatcaaacacacatctttgcatcttaaaacataaataaactgctaatgtttataagccacaaatctggtcactgacatgagtggcctgcaattcttcagtgatgagcacacggcgatacagacaagatcagattacccaggtaggcaggcagcaggcacctgtaattcacccgctgactgtgctgttgtggcagtgacccttcttgtgaaaaaagagttatgtgcagacaaaagtgtgacatatgcaacgtggagaggcatttcacagaatgcaaacaccattcaggtaaattagtagactccagaatgaatgaaagcttcatgaatgcaaacctgttgtttacaatactgggcattgtggcaccttttcactggacagtttaataaatatctattaaagaaagtaaggataagagaagaagctgaagcagtcgtcttggtgcacaacatattttcaagattgggctttaggttgtgagtttcagagataccattgtttgtttcttcagagtaaatcattctatttggaaagcccttcatttccttaaaaagacctttaaattcttcattagcattaagagacttcttgtagactgccaggaattggggttcattggcttaaagaagagcacagcacagttgacagaacgtcttggtttgtctcttgaattaagaagcctgattggctcagaatttctcagatctactttattcttcacactttccctccttttggctcctgttaacatcccaagcccacagagacagacgctcataggtggagcggtatacttcataaaatctcatttcattatcaactatttctagtgccatggctccctctggactctaa

SEQ ID NO: 338669 - DNA, 1000 bp, Homo Sapiens
aaaatagactattgatccaaaagtattcgtgatggattttcatggccgatgttcactcaacttaaactccatgaaactgtttccagtgctcatatttacgctgaagtacaatgaggagccacttttgaagaagtattagaatggtacttttaaacaaatcttcacgtgtttcaataaaaacaacaacaacaaaaaactcagaagctattggtggcacagagagcaaatgaagggttgctatttttaagaggtcttcttgtgagtcagcttggtttcgcagtgtctagcaacttaacaccaatcagcaatgtagtcaaaatctctgaacatttcctgctcctcttccgaaagtatccttggttctcgaggtggagtcagaataggtgcttctgaggtaaattcatcatcaaaattactaacatcttctcgtcctcttatggtaggtataaatggtggctttacttttttgtccatcagagcgctccaatcaattagccggaaaaatgggtgcttttttacatcctctgcatctttctcgctagccccaaggcgccgttcaggatttcttcttaacagccttctcattatagaaatggcttctgtagataagaaccttggataccttacttcatcatttacaatactgtcaaaaacttcctcttcatcatcaccaggaaagggagactcaccaacaagcatttcatatataagcacgccaaggccccaccaatctacagcccttgtataagaagtttctgttaatacttctggggcaagaaattcaggagtgccacaaaatgtgcttgttctatctccatatcccattccttctttgcaaagaccaaaatcagcaattttcacaaagccctctgtatctagcaataagttatccaatttcaaatctctataaacaattttgtgttcatgtaaatactgcaacccaagaactacacaagcagcataaaatacagctcttggttcagaaaagacatcagtatga

SEQ ID NO: 338670 - DNA, 1000 bp, Homo Sapiens
tttttttttttttgactctttttttttttttattccatttttacacatccacctgtttgccatgaagtcacaacattttatcaaaatatacacacagcacaaatacctttaaaatgtatggttggaattctaattcaactcaattgactgctgcaaacagcatgcatgggccattgatcttgaatgatgcctacggaggggcttatgagtcatgaaatcaccagtcatggcacgagaaggggttaaggttcttttcccaggagacttatgcacttcatttcttttcttgttatagtgtgagaatggcagtgagtgactgtgccaatactggagtctgctgagaatgggtggatggaaaggtttttactggcaagggtgaaatgatactatcttttctatcttgacaagataacaagcgaaggtgtctagcaaaccttccctctcactttccacttgtcctcttgaccatggatttcatgcccaatcaggatgaatggatttgtagatctcaagttacaagctatgtttattgtaaagaattcccataaaaacctatccagggctggccccccagccatttacacatccacagataggaatagaataaaacgggttagtgattacttgtctgcggctgagtgagatccgctactagaccaggcaatggggccgtttcagtcttgagacgtctgtactccgtttgcccctgattcaacaagcatttcattgatcagcagttggcgcccaggtgaagagccataatttattgcagtatcaagtcttgaaacctttccaagtgcggagacccatctttcaagtaaataactatggttagtaatgacctaacttcaggagcgtctgtgagacatgtcaggagacgagacacacggcatcgtcattagtgaagtagacttggtttctgctacagataaaagtcacatgggggcgaacgggtctcagtctttattgttgagtgtttctttctttttccaagttgaaa

SEQ ID NO: 338671 - DNA, 1000 bp, Homo Sapiens
cggggttacttatgacagctaataatagtcaactggcatgccagtgaaggactcagtttaatttgtggattcttttctccatgtgaataaagtaaatcagcttgacattttcaaatctagtcttttttaggtagtatgaaattgcagaattgtagtaattctattttatttaaaatttattttaaaaaaatcaggttcctgttttcctctgtactgctttcttagttagacaagtatatggactcagcttattcactaaaaggtaatcaacacctggccaggttcttgttttgttctctgacctcaaataagtaatgttccagatctggtaaacctgtaaatattaacaactttgactttgggctttctttctttgtcttttctacttcttttatttctgtttttcattcttgttttttgtttgtttgttgttttttggttcaggcctaagacaagaagctagttcaaataggtttataattacctttgtctctcaactctagactgactatgttgtataagtcaaattggacaggagtttggtttaataactttagtgaaaatgcttgagtttctggctacacgtataatgatttgaatttgtgttgctgttcagacactgacatttacagatgaaagatatacatagcacctatatagtttttatttattttttggatgggttttaatccctccccactccaccctaccccaagcatttatttttataaaagggaatactttaagcctcagtttgagggtatgttaagtaaaaccaattggctgctagtcatttacttccaggaccatctttaagcacaatattttaaaaaatatgaaatggttttgtgaattgctttttttccccactctgtcatgccaatttatcaaaaaaaacaaacaaatatcatgcattatttttcagtcttctgtgaaaactcatatatacctactatgagaggtctcagcagaatctatagcagttgtgcttttatcatat

SEQ ID NO: 338672 - DNA, 1000 bp, Homo Sapiens
ttaattgaagtggaatttaaatctaaatggtccgcctgagctgaagggattgaacccttgccatgagttccagcttctgtggaaagggttgccgccgcctccttgctggctctctgcatccaaaggatcttctccgtcgtcaaacttctttctcatttctggatcagagaggacttctttagcagctgctatatcaatgaactttttctcagcttttttcttttcttcttcattctggaagttatctgggtgccactgcagtgctaattttcggtatgctttaataatttcttgctttttggcatttctttttactcccaagattttataataatctcgtttctgcgactgtttcaataatctttgtgctttctctagaccttctcgaatctgctgatcattttcattgtgttcctgagcagtttcataatcctgaatagcttcatcatacatttcctctatcaaataggcctctgctcgatctttcagggcattcacattgtcaggttccatctgtaaaacttcagaacaaaccctaatagcttcaacaggcttctcgtccttagaaaagcagtggcaaatcctctcctttgaacgaactgtatattcagcaatgcttggctctgttttcatgacagattcatatttgctggtagcatctgtgtatctgccatctctgatgagctcttcagctgactcaatcagcttattaagtttctttacttgtttatagtgtgcaaaacaccttttatgatcctggtcaagtttaagacattcccgaacttcactgagggacagttcgtggtctcctagttggtagtacagtgtgcttattttataaaacgcttcagtattatcattcttcaactttgacgcagcttttaagtcacttatagctttcctaggttctccttcttttataaaacattcagctcgaagttcccgtagttctgcatcccaaacacaaacctctaaaatcttatcaaggaaggctatagca

SEQ ID NO: 338673 - DNA, 1000 bp, Homo Sapiens
catgttttaaggtgtgtttttatttacaaagtgagataatgattacaaacagatgatgcagtaacaaacagataactgataactccattttcatgaaaaagtatataaatatattacaggaaattctatatagtaaacattagaaattgatacagtaaacatttgctacttttttctatgccaatattactgtcatttaaagcttaaatactggtttcaagtatcccctataaaataactactttattaaaatattggaaaacatttttgctataaacaagattggtgcattaaaaatagactcaccatgtccttgtaacaatgtctgctatcatcaaatgctgcctttaatcatccctaagatctgcattgtttggttagtgttaaaattttgtaaataattatcataggttaaagtagctgtaaaaatacagcatttcaatattttttattttcaagaagaatacccctctaagatagaggagaacatgcatgttgtatgaacttgctgctctgtgatctttattttggatagagagcaggagtctgctggaggttaaggagagaaatggaaatgcatccagaggctcttttcatgtcacttcagaagctgaggctgctgtttttgctcttcttctgcttgaagacgtgtcaggacataaaggatgacttgatagcagaaaatatattgatcctctgtctgaaccattccgtgtctttgtagtctcatgcagcgcaccaaatcagagatgtcaaaatcaagatcctgactgattaatcccagaaccacatctatgcaaatcagggtccctgaacgtccaatgccagcactgcagtgcgtaatgattgggcctgatctgtggatgtgtctcatgtaggagataaaagtaagcagatcatctggttgagaaggtgtatcatggtctggccaggcagtgaaattcagatgagaaatatggcgcacctctctggtctgaatatcttcaagggtcattgccct

SEQ ID NO: 338674 - DNA, 1000 bp, Homo Sapiens
acagcttataacacaacttttattagaaaagttatacataacatagcatcaactattttcaagaacaatattaaacccgataagcaacaaaaaccagactaacaaaatgtgtaacaagaaactaatgacctttctaaaatcaaacattcaattatctacaatgtctttttacaaacggggaaaactccttggtttacaggcacatcatattgaatataaagctgcaatagcaattttatacaattaccactctgaagaaactgaatcattaaaacagtaattacgagttcacaaatttaaaacatttcacataattttaaattattgggtatacactgaagtctgagtttcaaaagtgatttttttttcccacaaaagtttcaacacttaagctagaactttcagtgttaactttgccctaaaaagttaagacatattctgataatcataacagtcacatgatttctgatgctatctggtctgttaataataaagtctttatttggatgtatttttcttcaattaaattacaggaaactggatataggatttcgttgcaacgctattaaagttccaaaccaggagtgtgcagcactggaaaaggagatcagtactaaaacttacaataaatatcagagaagccgttagtttttacagcatcgtctgcttaaaagctaagttgaccaggtgcataatttcccatcagtctgtccttgtagtaggcagggcaatttctgttttcatgatcggaatactcaaatatatccaaacatctttttaaaactttgatttatagctcctagaaagttatgttttttaatagtcactctactctaatcaggcctagctttgctcattttggagcctcactaaaataacagatttcagtatagccaagttcatcagaaagactcaaatggaatgatttacaaaatagaacactttaaaccaggtcagtcctatctttttgtagctgaaggctatcagtcataacacaatt

SEQ ID NO: 338675 - DNA, 1000 bp, Homo Sapiens
tttttttttttttttttttttttttatagtagaaacaggattttaatataatattcaagtctagcatttgctatttacaacaaataaatattgcccctccccaatcagtaaacaaacattttttttttctttttgctttttatacaaatattcaatcaccccacccccaccccaaatcctccttcctcactaacccccgtcttgcatggtctcgtaaagcccaggacgcagtggtgaatggcacttgcagtggcatgagattcaacatcgatgggactcagctgggactgtcctcactcaccgggtgcagagtctggtccatgaagagggtttctctctctgctcccaggggagggctggggtaagcggtgggtgagactccctcactctcagttggccctgatgatggaatctttggtgcagcctgagaaaggctagagtggtgggaggggccgggacccctgcgaaggtcacaggccagtgcctgtgggcatgagagaactgcagtggtcacagtgggtgctctggggtgcccatgggcacaggtggcagtgacccacacctgggaaggtgtcagggaagtgtacagaggtggcgcccgggggcaggcagggcaccatgccatgcccgttggcactgctccttggcaaaagtcagctagtcctctggttccagagagcagaaggcacctaaggcagcgagtggtccacgggaggccaggtcagcctgaccaatggcaggcgtcaatcccagcagcgggagaggttcaggatgaaactggagtctggggtaccctgggctggcaggtgggaggaaggcgcccagctggcctgggccactctggtccataagtgcttggctaccagccagccagaccctgggaggatgccctcagaagatgcccttggcaatcttgagtcctttctgcttcatgcgagggagggtggagctggctccgtgcttgaccttcactcccttggtgaaggtccgcttcttgagg

SEQ ID NO: 338676 - DNA, 1000 bp, Homo Sapiens; identical to SEQ ID NO: 158747

SEQ ID NO: 338677 - DNA, 1000 bp, Homo Sapiens
tttctgtgtaaaaacatttatttttactaatgtttagaatacaggaactaaagaaagaaaaagaaaagacacctcaactccaaagcgacagtgagttagggcctgcccacggccaagggggaaggctactccagggtgtcctggcatggactgtccccccactacttaatgtcagtgccactaagcagaaaacttgaggaatcagggtgtgaagaccttaccagctgctagcgagcgtgcaagggaagaaagggatgtctatgtggcttccccatgagctgagagccaggatacacggggcaggtggcagaggctcccaattcagttaagagcaggaggctgaatgcccaggtccaggaagaacaaaaaggggattttggaggtaggcttttttgttgtgttaaaaaacaggcacattatccatctccttgtggcccccgagctgctggcctggccccctgatccttcccctctccccacaaaaccaaaaggagtaggaagggaggcagaagatgagaaattccaagggtggggaatgcttcagtcactggagaccgaccgtaagagtgagccaggagagcaatgggaataacaaggtgaagctactgttccccctggggtggggtggaatgggacagggcagaaccaggagggtgaccgagaacatcctgactccagaaaagaacactctgtagcaggaacacagggccgcagagagccactctggaggaaagaggtgaggctatgcggcacaggggcatgaaaagctccttgtggacgtggcctcagcttgctcgctcccagctccctggcctggcttgcctctagaggacaggaaaactctggagaccagaggggaggcagaacacagagaagtgagctgctctcccactctttctaggaggacactgtttgaaccctgtgatcaccaggggctgggcccaaggcaagcagagtgaatgcacttaatggagagcagagagaaactgggccacacgca

SEQ ID NO: 338678 - DNA, 607 bp, Homo Sapiens
tttttttttttttgctggtgagagagaagcctttaatgaaagatgagttgcaggcttggaccgctactcttgcgcccttggtgggggtgggggtggggtgggcaagggtggggttatggagagggataagtggggtgaggtggaagcagggggaagaggcaggtctgggagggtggagaggaagggcgctgcccaatgtggctgtctgctcaactgttctcccagaagaaattgttacaggccactgtgagagcagccacaagcaccacatactcctggaagtccacctccccgtctccattctcgtctagctccttcatcaccttgtccacagcatccacatccttctgggcatccaggaagccagagagctccgtctgcagcagctctttcagctccttcttgctcagcttgtacttgtccccctctttgcccgagtgggcgtggaacacgttgatgagggtctccatcgccgtctccagctcagagcccattgcagcagtgcacggttggcctgggcctgaggtgggagcaggttctggacagatggccaaggttgcaaatgtggctgctggagctgtgtgtggagacctgtcttcaacagtcc

SEQ ID NO: 338679 - DNA, 684 bp, Homo Sapiens
ttagttgtaaacaccaggcggctttattggtagcattgcaatctgggggtggagcagctttactctgaccacactcaccctctcgctcacactcacactcacacacaccccaggccctgtcctggctggtcaggtctggtgcagaggagctggaagcctggtccttccttctggtcctcggttccccaggttaggtaataattcacaatgcttgactcggactccgggctccctctgcacggtcataggttaactgctgcggcgcttcatcttggctgaggtcctctgcagtctctggatgatgcgttctacccagggctggtctgggggtgcacagagctggcggcccctcagtgtggtgaacactacagcaggcaccctgcagccatccttgatgagaaggtagtggaagttcctcacgatgtacccagggatgggtttctgggtcacagacaggcagcagtcttcagcatcattggtgccactcagagttggggctggggaagtccagagaaccagcaggctgagggccagtagcagggccatggagggtgaacagaggcaggccaacggtgaatgtgtgagcgccagctgtctgggtgtgtgcaggatctgtgtgaggctgcagggcgactgggatgcaggggtgaaatgcaaggtgtgagtgatgtgaggctgggaatg

SEQ ID NO: 338680 - DNA, 1000 bp, Homo Sapiens; identical to SEQ ID NO: 158749

SEQ ID NO: 338681 - DNA, 1000 bp, Homo Sapiens
gtggcacagtgaaatttatttgtctttatgatttacacataataattaaacacacaaaagaaaaaacactgtcaagatggccatatgtagcttaggaaatgactggtcccaatgcaatcatataaatgttcattcagcgtaaaaatgagtttctttttaatggttttaatcttttttttttttcagtccccaaggcttgtaccactcagtacaaatgtttttgctactgggttatcatcaggaacatgatgtttaccaattcccaggaaatgaataaaatcaacagaaacatcctgtgacaacagagcacattttcatagaaatgaaattgatgagcttattacagtttgaatcagttcagctattagatctacacataaaacatgaaacaatattaacaaattacatttgtattaagtttttatttaaaaatatttatcacacttttttgtgcaagggttccattgatttctttggttttaaacacgatagatctattttacctaaatatatatagttctatttgtaccaaacatcaaaaatcaaaaaaacaaaatttcaaagggtaaaaatggaattattgcttcaatataaaaaaggcctagcccatttgagaactactgccattattgctttcctatttgaaaaactatcctggaaatcaaggaatgtaccccatagctccctgcagaaagtataaattggttgcacattatcatcatattaatatgaccctaccttcaccaaagctatcctgatcttgtccttaaaaaatgaaacaaagccaaaatagcataaataaataagtttacctaaggggacaataaatagcctagtatactagataggaataaagaatattgtaacataaagccctttcagtgctgtacaatgcaacaatagcctttggattttcaaggtttagagaccttgaaaatccatttcataacagttttattactggtatgcagctgacagaacaagagaatacacttctttt

SEQ ID NO: 338682 - DNA, 1000 bp, Homo Sapiens
ttttttttttttttttgtggtccaaaggacagtttatttaaaacaaacgtgatgaggtataggaagaagaaaagaaggagaacaacaattctaacataaaaacacaggaagcatctcaaacttaaaaaagaaaaaaggagtgggggcaatggaggaagctatgtctcatacaaactgctgacctcaattgattacttacatccaaaccttacaaaatagcatttcaagtcagcacttaagccagtgttattagattttcttacaaaaagttaaagctacaaacttcacatttttaaactgtacatagcaaaaacatttaagcttttttttttccaagttggtccgagtgcaagctggtaaaagagattttttttccaaacacaaacaagaacatgtattccaaagacaatgaatataatactgataaaaacacaaacatagtgcttaagaaaagatggggtgaggtggagatgtagattgggcaggaacaattttctagtaaataaggagctgcaatctttagaggcaacatggtatgctagaaaggacactggaataagaatcagaagacctggatctgaatcatggctctgccatattctagccacatgaccttgagcaatagactttacttctctgagcctcaattttcacatctgtaaaatgaggataataatacctatatctcccagcactattaagtttctatagatatagggctattcagattatctacttcttctttttttttgagacggggtctcattctgtcacccaggctagagtgcagtggtgagaccatggctcactgcatccttgacctccctgggctcaggtgatcctcccacttcagcctcctgacaagctgggattacaggtgtgcaccaccatgcccgactaattttttttttttttgatgttttgtagagatgggattttgccatgttgctcaggctggtatctatttcttcttgaatgaattttggtactttttattttt

SEQ ID NO: 338683 - DNA, 1000 bp, Homo Sapiens; identical to SEQ ID NO: 158750

SEQ ID NO: 338684 - DNA, 1000 bp, Homo Sapiens
ttttttttttttttttttttttttttttttttttttttttttttgagcggataggggcggcccggagccagccaggcagttttattgaaatctttttaaataattgcacgtgttagtctcatgtgtcagcaatgctgtgtctggttcagtgatccccacgggaacgcgagccggggggtcgactggaagtgctctgtcccttgagtccatgctggggctcccctacacggggagaagagccggtcagcccatctggaactggcactgtccagcaagtgtgctctgttcttacagggtgtcctgaaggccaaagttggaggcctgagaccacgggctccactgctaagagcgtgccccaggcagctgcaggctgggtgtgggtggcttggcgtggtgccctcggtggcagaggagactgcccgcctcacagttcaggttgcggtagcgggcaacagctggtgtggggcgggggcacatggacaggaagccaaagctgaaggggccgaggcagcagccaggacagggcagcccctcatcgggctcccggggagctgaagggggtggcgagggttctgtccgctccagggctgccgcccggggcaggctatgctgggcccggttccagggctccccagcccagccttgtggggagttcaccaccacagctgggggattgttattgaggacgggtcctgatctaggggaccagggttgggaggccgaggaacaggtgctgatgaagttgtctgtggccacagccagaggcagctggggcgctggccctggaggttccggctcagggctgctgccctcgcactccatcttctcttcagccgaggggcccacagcgggagggccaggacctggcagtgctgtctccatacggcgggggagctcgggggatgagggtagtgagcggcagcggcgggcaggtgtcccaggctggaccagggtctccggagtggtcaccaagggcagctgagtggatgggaatggtgat

SEQ ID NO: 338685 - DNA, 1000 bp, Homo Sapiens
tttttccactgctgtccatattcttgaaatagacttttctttaagacaaaagtaatgacatttggttcatttccacaaattgcacactgggtgagatcatacaattactgcagggaactgtaggcaagcaatttggtcataggaatttgtttctttgccttgttttaaatgaaaaagctatatgaaatgcatagcttggattaacctaaagatacagtttccttcttggtaaaactccagatttaggatgctggcaaaggcagtgctggcaaagtatttaatgcacatggaaatgctattctattgggggcttccagaagtagccctagtaaattctatgcaccaatgcattggctaataataatttcagttttactataaattatctaaatgtcacttaagtacttaagaagtagcgctcgctcctttctagaagctgtctaaggcagctgatgcgtaaagcacctcatctagacctccaactagttcagcagttcaatctgtgcccctcagccacaggactgccctcagtatccctcactacacagctcccctctcctggggacttttcatgttcatttctgccttgtcaaaggcagtccaggcaaggaagagaaacgtcagaaacacgatcgtcaaggactgctccgtgtagcaatctcaattctaagaatattacatgggtggtgagggaacacaaaaatcccacctcacagaagataaatgagttggactcacactgccaactcttcagggattatccccactatctcctcagaaagcatgctttctgtgttatatcatctactgctctgttggccagactttcattcacactatgttaactttcatctcaatcatctcagccttcatgtgatttgcttattgtgtttctctagttttcactgaacacacagtgcaaacaaaggcaaagactgaagcaatcatttcaaaaacaagagctcacactacaaacacacatgagcatcacatattgaaa

SEQ ID NO: 338686 - DNA, 1000 bp, Homo Sapiens
tttttttttttttttttttgtaggtagaatcatttttattggagcatgacctgtttggggcttataactctgcagcccctatgggtagctgggggtgggggaagatagtatcaaaaaacggtgaagagagctgatgaggctgtggggactggctggaagctgctggcagggtggagtgggctggggccccggcagattcagatcgaggtacagcagcgttaataatactcttggagcgttaatactctggggaggggcaggcacttggggggccctagggcatgaaggcacttggggttggggaggggacaggggatgtactgcgggactgggcggggccaggccctggggtttggcaggcactttggggagtgctggggttgggcaggttgggccccgacagcccagaaggctttggtagtggcacgcacagtctctgggccgggtctgcattaaatagaagaggcttctttagtgctcatctcgaagctctgaaggcagaaacttgtactgctgctgccggatctgggccagtttcttccgcgcctcttccagctctcgttccttccgaagcatttcttcctgtgctgcgatgatctgggcaatgccgccaaccatcttctctttcaccaccactgtctcattctcctgctcttcaaaggctgcagccttctgtgctgctttcaccagattatctgaggctcgcttcactgcgttgccagcagcctgaagtcgtttcattgcctccgagtcctggtcagccttgaccttgcaggccacaaggagctgggctgtggaggcagctacctgcttggctgatgagatgagcttctcctggctggcatggccttgtacagctgcattggctgcctcacacagattgttggtggccgcagccaccatccgggcagcagaaatgaggccctgggaccactgcccatcgtccagtgcattggctggaatggcacccaccttcccttgggccactagttctctctgg

SEQ ID NO: 338687 - DNA, 1000 bp, Homo Sapiens; identical to SEQ ID NO: 158752

SEQ ID NO: 338688 - DNA, 1000 bp, Homo Sapiens; identical to SEQ ID NO: 158753

SEQ ID NO: 338689 - DNA, 965 bp, Homo Sapiens
ttttttttttttttttttttttttttttgatttgtctttatacttttatttttctaacatctttttgttttctagtatacatgttagcacaggagtatgtatattacttaagtatgcctatgttggggtgcagacataatttctttttaaatgataggatgcaaaatcaaatctgtttgcataccagtgaagaggctatttctcaatcttggcaaactagggggtgcatacccccttcttttattcagtagcttccataaggatgtaacttacggaagttatatccttccataaactgataggctatccaaccagtgaggaaaactgataaagtggcttctgagctccaagtagcagttaaacacaactaaatatatcttgaaagtttggaaaaaaatttaacagtaaagggattcagtagttattcagtataaggtttggaattcaaaaactccagccattacaatagacatttatttaaagtaaaacatcttcagaccaaataattcttaaaattgtttgtttcaagtttaaccatcttcataacagctgcatccacagacttcaactacatgattacttctttgcccattcttctctttcttttctttcccgaataacctctttcagatacggttcaaggtagaaattttcctcttcatatttggtccactgctctttaggcaagatctgatgcttcaagttcaggtccagtgccctcttaatgcgaaacatcctgtcattataaaggttctcaggaagtcttcttatggcttcttttacatcttcatcctcgtatattgtatcatctcgcattaaccccagtttattgaatcctgcagcattgtaataccattttcgaataccatccagccacttgcctgatgctgaaacggcctgcttaccagccattttgaccagaaagagaagcgttgccttctgggtaagtcatagaggacaagctg

SEQ ID NO: 338690 - DNA, 1000 bp, Homo Sapiens; identical to SEQ ID NO: 158754

SEQ ID NO: 338691 - DNA, 1000 bp, Homo Sapiens
gggtgatattggtcagctcactcaactaagcctccgtttcctcatttataaaatgggggataaaataatacctattgatatggtttggctgtgtcccatccaaatctcatcttgaattgtagctcccacaattcccacgtgtcgtgggtgggaccaagtgggaggtaattgaatcacgggggcagaactttcctgtgctgttcttgtgatagtgaataagtctcacaagatcggacggttttataaagagttcccctgcacaagttctctctttgcctgctgccatccatgtataagacatgatttgctcctccttgccttccaccatgattgtgaggcgtccccagccatgtggaactgagtccattaaacctctttcctttataaattacccagtgtcaggtatgtctttaatagcagcatgagaacagactaatacatttatcatgagcctgagaaaggcataacagggttgggcacatagtaagtgctcaataaacgtcggctattattatttggagactcagaaccaagagtaaagttaactgctctgtttgggaatcaaccaccatattctagcactgcaccttgctccatggagaaaatctctgaaacctaacatgcctctcccagggctatgttggatggcattagagttatgaaagaaccaccttatcatgtcagttcctaaaatgagaagcttaggatgggaggagaaagtactgatgaatagttcatttcagatgaacataaagatagaatctataggataaaggagcttaatgaatgccattcacagttaagagctcaaaatgtcatacagcctagtcaataatattctatgctaagagtgtgaacttgagacaaagaatgatttctagtgatgtcctcaaagaatccacagcctttttctattgtcttataccatttggctaattctgtatatgtgctgtatcagctttgataattctttcaagacacagtcttttctcacacccaa

SEQ ID NO: 338692 - DNA, 1000 bp, Homo Sapiens
ttttttttttttttttggtaatatagagcaattttattctgagattctgagtcctggtaggtaagtgattaacgttaataagtttgcaaatttattgcactaaatttactgctttgataaaactgatgttcactgagaaaaaatgcataaaattataaaatggaaaaataccagcaaatattcattgccagaggaaagaatagttgttcacaaattacgtatatacacattaaaaagtcccagaaacacacaaagatatttgattatgttatgaaggttacagtcagatttcacaaagctcacattatgtttttctccttttactgtatgtctggttccctcattttattggtcttatgttataggaataaatgcatttcacacaaattcttgttgaatacttattccattttaaaatggggtgatatcatccatgtggttttctacttttcacagttttaacatcataatcataatttcctatcccatcatttccaggtaaaacacttgtaccttatacattctgatatacactgcttacaaaagacttatttttactgccaacaataaagaagagcatgtaaatgtcactcctaccccaatcatggatacatttcatgaaattaccaaactccgataggtttctcttggtatttcatagagataggaagagaatattaggttaggtttccaaaaattgtcaaattggcatagcttctacctgagttgtttgataaaataaatgctaccacaattagaaggccattatatcaaggcctgcatggaaatacagaagcaatcatgagaattcagaactaaggaagttttttccaacgtaactacatctgccacgtaaaaagtattactataaattttgccttaacactgttgaaaaaaatgtaattgtgatatatgcagtggactgttattgacaagttaacaaaccattttcagcctgtagtgtgagaagagttacaaatgattgttgaatttatattgt

SEQ ID NO: 338693 - DNA, 1000 bp, Homo Sapiens
tcctgcatggagtgttatatttcaaggtttttcacaggggttacagtaggacagtccccaccccaatcaggcaccaggataaaagcagggacttaaacagcaccccggttcttcagcctgagccatcacatgctatcagtctcctaacctccccctgggccttaagacagggcttgggcagagaagataaatggtgggacaaaaaaatgagttacattgccacctgagaaacctcagaggggaggacccagccttagcctccctcctcccaagtgcaaaatgtgtaaacagagtaaacggaacagaaaagtgcagtctaagtggttttctctcctgcccctcccaccgcccctccccccaccccctattatttggggataaagaatataaagacaaccctggcttttctattgccttgttgcttgctgaatataaggaatggggtggggcaggaaggggcttgcccttagccacagctctacggctgtgcctcattcatttccacagctgccagtgtccctagagtttatcaggtgaattggtcaggggatcagtctccctcgagcctgacttacggctgggacagccccatctttctgttgattatgtggcgcatatatatatatatatgtatatatatataatccatataaatatttctctatgtacaaggaatacgagtggctttcatggagggagggaagctgggggccgcaaggcatcaacgctgttggagttgtccaattcagtgctgtcacagtctgagtcctcagaattgggagggccccgctctctgagaagttcctggtgtggaatgggcagggagctgggttcagggccagggatgacctctgaaggaggtgggtccagtgggatttctgagccctgggagcacatgtcatcagaccgctcatctggccgctcatcagtgttggtgctgccaacttcaggtgtgccactgggggaaggttcactagctgtgccttcctccccatctgat

SEQ ID NO: 338694 - DNA, 1000 bp, Homo Sapiens
ttttttttttttttttttttttttttttttttttttgttttttccaatttatttagaaaaatagactctggattcacattcaccccagggctatgtgggatgacagcaaggagacacctgagaatgaatgaggaaggtttgaattactggtatccaaggggctgggggcaaaagccagaagcctttgtcccttgtccttcagagccagagtggcatgagtgtcttggctcccctcctctccctcccttcagtagtcttcagccatggccagtaagacaaggctggtccagccgtggaaagggcggcacatgcctcgcccatcgcggtcactgtactgctcccaaagaaagcctgtggcctggtactggcgccatacattgcctaccacgttggcacggagctcaccgtggagtttggcagcccgagcctggtgaggaccctccagatgcccatagtggtggagtgctcccaaagccaggtagttgacattgagccacacagcaccccgccagtaggggggatcatgctctgaattgcgctggccataaaaggagctggaggctgcaagggagcgtaaaccaaaggggctccagagatggcggctgtcggctagaatgtccagcaggggcccaaggcgggatgaggtggggtccagcagtcgcagcagcaagggaaaaagactgacatagccaagagcatctacatactgcagttgaggttggggccgacccaccacccgaacgagcccctgagggggcctgggcttcagctgtactgcttttgtgtggttcccaaagtctgcaaagactcctagctctggggcccagtgcagctcatccaggctctctgctgcctccagtgaggcagccagtgggcccagctcagcagctacctcagcctcacccagatgctctgccagccgcgtcagcacacgggcacccagtcccacccaacatcgcaggtccaggtgccgctcggttactgaagggtgtgaagcccg

SEQ ID NO: 338695 - DNA, 1000 bp, Homo Sapiens; identical to SEQ ID NO: 246468

SEQ ID NO: 338696 - DNA, 1000 bp, Homo Sapiens
ttttttttttttttttttttttttttttttttttttttttttttttttttttttttttttttttttttttttttttttttttttttttttttttttttttttttttttttttttttttttttttttttttttttttttttttttttttgctccaaaacattttgttttattaataaaagtcttacttaaaaaacaaaatagaaaagagttaggtgtcacattgaataacatgttgatagcctgtgtatggttatgggttctaatttctctacaaaatcaaccagccatgatggagtaaagaaagttagaaagagtaaatatggtcatataattttttgaaacacttccaagtacaaaaagcagcatgctaatttttaagtgcaaagaaagctcataataaaatagacttttaaaattacaaataaaatctgtacatcaaggatatttttaaggctttcccgtgtgcatgtcactatgtagacaatgaagaggaattgccaagagaggaaccatcatgtcaggtgttacaggtctggctcatttcggcttgtaggaccatctcttcttttctcaagggaaaagtgtcaatcaggttgaacagggccacaggcatcaccagggagacatagcgctctttgtccatgccatgcttatccactagcaccatactgaaggagtagagtgggattcgcagcaacagcctgagctgcagcgctagggctggaggcataatctttgctcctatcctgccaatgagagtcgggaacacacccaccagctccaccacggtgatgtgtcgaagatcaaggccacactgtgcttgctgcagcattcctagctggagccggtaaaggaggtttcgggctgtgggtgtggacacaatgaggagtctccttttctcataaaactgatccagaagtgcagctgccgttctgacacccacattgacgttcatggctgcacaggtgggctccgtgccagaccaagccaggttggattg

SEQ ID NO: 338697 - DNA, 1000 bp, Homo Sapiens; identical to SEQ ID NO: 158755

SEQ ID NO: 338698 - DNA, 1000 bp, Homo Sapiens; identical to SEQ ID NO: 158756

SEQ ID NO: 338699 - DNA, 1000 bp, Homo Sapiens
aaggccttgaatagctttattgaaatctatataaataaacatgcacatttcaaatgtaaactcaagtgaactcaagtgcagacaaaattttaacctctgtcatgcaggaggttagtttacattaaaaaaaaaaaaaagaaaaaaaaaaccccaaagcagcttttaaaataccaggatgataaaccagctttaatatcaagatataaagcaaagccatgatcaacatacctcatttatcctggtcaaatgcattttttttaaacttttaaatgctaacataaataaataatttaccaaaatgtgcactcacagagtgaacttttatttacaatacacaatttataatctattgtatttgattagttcaagtgaagaacattatactttttgctttaataacagtgggacacaaagcaatttctcaggtagtcgatatgtgaaatgtgccccagcatttaggttttctattaaaggcagtattgtatgccaatttacaatacattctttcaactatatcaaagggaaaaagcagcaaataaaaatgtttcaaatgttcacacatatttttggcatcctggatccttgaatgtggtgaactaaaatcaaattcaaggtgtttatgctttatatactgtacaggttctgactctggaacatgcaaatgccatttctcttataacaagttaccttctgagaaaagctgtaaggctatggtgaattccatcaggaacacacaaagaaagttaacagacctacctttatagccaattgtccattaatgatttaaaggccagtatatgaaaaaaatttctcatctaagcttgatgcaattattactatgggtacagaatactattatgtctgtccttatattacaataattgggagagctcaagttgccaaattaccacaaaatggggtagagaaaaacagacagcaaaaattttaattttggaccaacacccaattaaagatatgcattttaaagcaaaaaatgttt

SEQ ID NO: 338700 - DNA, 1000 bp, Homo Sapiens
ttttttttttttttttttcttagaaaaattgactttatttggttggaaagtagccctcatgtaaaataaagaacacctgtacagacctggtttgggggagaactgccaaggaactggaggggcagggctgtggccccagaggttggaggatttggggggagagtttcttctttggcaagggagagggtggcacaaagcccaggcagaggggtcagctcggggtgagaccatgactagcagtactacttcccaccctgaacagaatccagggatgctctgtcctggacacgtcagaagctggggttgaggtggccctcgggtcaaaggtcaggagctagagtgctggccagggtcagaggtcaggaggtcggaggctgctctctgaggtcagggggcagagatgggagtgctcttcagggtcagagggcagggagttgggggactgttctgtggagtcagaggtcaagatgtgggagctgccttcagcctgtgccactccccaggcccccaggccctctgagtacagctcccggttctgctccttccactggcggaacttctctcctgtcagctcagggtcacccagcacttcttctaggacctgcagctcctgcagctttgccttgagtgtgctctgtagcgcccgcacacggtgcactcgctcattgagctgagggtctcggttgcgccgcatgaaagagctccgccactgttcctgggtcaggggctgtggctggcctaggagggacacgccaccctgcctcagcccccgtaccattccttccagtgcctcttcactgctgtctgtcagagagccaaaggaggtccgtgggctgcgctgtgtgggggtggctgcaggtgatgtgtctccatggaggggactcccagcttgagcagggctgggcgaggctgagtgggacccagcctcatcgtccgggtcctctgcttcggtctcactgtagcagtcttcctctcggggtgggggggcccggcctggaga

SEQ ID NO: 338701 - DNA, 1000 bp, Homo Sapiens; identical to SEQ ID NO: 158757

SEQ ID NO: 338702 - DNA, 1000 bp, Homo Sapiens; identical to SEQ ID NO: 158758

SEQ ID NO: 338703 - DNA, 1000 bp, Homo Sapiens; identical to SEQ ID NO: 158760

SEQ ID NO: 338704 - DNA, 1000 bp, Homo Sapiens
ttttttttttttttttggaagataattgcttttaattttctaaattttcacttatgcaacataaaggcagatttatgtgacctgataatgacatttttacaaaaaacaatcccccccaccccaacatcttggtcagtagtatataaatatttacaatgaaaaaataggcaaggaaaaaggaaatcttcattatccatgtcgatttctttccaatgcttatcaggaactttgaaaataaaatactccattaactttctcatcactcctatttacacgctgctttagctgatgcattcgcggtatttgggttgcactgtataagagtatttttgttctctatcactcctacttttttctatactattttaaaaatctgaaatagtaaattaaatataaaaatgtaaactctgaaaggagagaaaataagaataaatatgtgtaaaggtaatgcattaagatacaaaggatctcacagaggttaatattttacaacactaaaaaaaaataaaatgctctatatattttcttagttgggacattttgtttcaatttaatttttggttatgttaacaaaaattacctctaaagaggatgttaaaaaaatagcaatgacgttaccatcttaactaatgaatatcctatcaccctaattttttctaaaagaaatggattttttaaagtgacaaatataaattataacatagaaagcttaagaagcctcagcaaattatggtatcttttagcgatgaagacttttagagacaaatgcgaacagtgcagccagcctacttgacttagggatttacaaatgcattcgactccgacatgtgaaacacgacgtggcttctcccacacgccgctccgctgaaacatggcgcactcgtgggcggaagggcaggacacctgcagcatgcagttcctgcaggacgtcaatgggaatttcgtgtctagcagtgcaacgaacatcacccgcagctccctgggaggaccgcgagcttca

SEQ ID NO: 338705 - DNA, 1000 bp, Homo Sapiens
ttttttttttttttttgtcaagcgaaatagttttaattagtaggctgatcataaataaatctacataaaagatttaacagaattacaaagagttttgtgttcctttgtggactcaattcataatatgcattagtcaacctcattctctaactgtgacaaaaagagttgtcatccaacaatgcagcacagtttaagcaattcatatgctatagttacatttttacattttctttacaaatgtaacatttatgtacattatatatagatttttttctatagttcatgtactgaaactctattgtttttacagagaaaatgttgaattcatttaatgaataagaaacattccttgttaaaaagtaattcatataaacaaataacacggtaccaatgccttttggcatctcttgccagagttcaagtccagaaatgttatattaattataagaaaaaagaatttatctaattttacattatgacatatcattccacatagctacataaatttgccagcttgcaatgaacagagcactgtactgccatactactggaaatgtgtagaaaccaattcaaaatatacttggtgaaacagcatcatcgttaccattaatttgagttgaaaaagatctgtcaagttctttcttcccctttactttttaccaaagcctcagacagagtgctgtgcgttgcatcttgtattaacaaatgccttcatttcaaatttctcacgcgcttctctgacagattatgctttacctaggttatagatctttttcttattcaattttattctacttcacttacaaatctgctgctgaacatgaagcaaaaattcatagtaagaaaatgcagcctctgtccggtcttcaatcaaatgctgaaaaaattctgctttggcaggactctcatcttttactatgtgaaggattggacttaatggtctgctgtctctaagccaagttatgaaggatctggctctttctgatgaaagtgtatctag

SEQ ID NO: 338706 - DNA, 1000 bp, Homo Sapiens
tttcatcttcattatcctctcacaggaccaacttttattttatttattcatttaaggacaaatttttaaaagtaaagtgaatgaaaccatttgtgattaagatacatagacagaacttcaatgtagaaaaaaaaaagaccttgctgggaaacagatgatgagaaacactgtaaaacatttcacagacgcacaaaaagctcacattgtaaacaggattaagctgctcttgatttagcccgtaacatcaaggtttcattttgctcagcctgagatctcgctcaatttcaaactgcctgtgatccactcggtcaaggaaggctttccgttcaatgtacccctctttccctcgattatggatggccagttcttcaccaatcccctcttcctccttgaagctctcccagtccagtttggacttctcaagggtgctcattttctgcttcttggcaccaattttccccaaaaggctgctcatgccacttgatctttttaaccctgacccggcagggagtgatggcagagctgaaggaacattagcctgtggtttttctttctcattctgcttgaagaaggatttggcctctttagatgtagcatccacttccttagttacccttacttcttcaccagcaaaatcaaacaccttggtgattttaactttttctgtttctttaggtttctctagctcttctgcttttaccaacaatttacttgaacttgtctcttcagtctcctctcctttcttaacttgtgtacttgggggcacttttgattttggtcccacatcattgaggaagctggcccagagttcgtcctccttctttttcctggcatcctctgatccaatgcctttttcctgctctgcagcgtcatcttcctcctcactactgcttccctcagattctgaattggcatcctcctcttcctcttcttctaatgagaggccaccttgtcttctcttcctggctggaatgctctgggcctttctttttttcccttg

SEQ ID NO: 338707 - DNA, 1000 bp, Homo Sapiens
ttttttttttttttttttttttttttttttttttccaaactgcaaattgccccaagttttatttgtagtccatacaaaagggaaaaaaaattaaggttttctaacaccacctacttggggagatggggaagtgggactgtgccgctcaccatcagctagaacattagtggtcagcagggacttggatacataccaactgactgtcccaacaggaactcagtctcaacagtctacagagggacagtcagggtaccctggactgctggcacagcttggcacataggaaatggttaagctgaccctttcctggcctccttcccatctaaaaagaaaaaggcgccggcgacctcagctgcaggttgcttccccatccagacgaccttaaatatcgcgcacaaaaataaaagggagccaggaaaaaaataaaaacataaaagaaattcccattctggggagacgggaggcagggtagaggggaaaccgcagatctagagccagtagcaagatttgctgctgaggcgaaggaacaaagtaggttactgccgaacacttaacaggatcatctcctggggaaggcccacatggtagagggcatgaaaaaccacaaccaggaaaggtatgggccagagtagttataacctggatctgtaaccctacccacctcttttctccctccctccctgtggtgccccatcccaggatggccctacatgcggcgctggtagccagagtgcatctgagccgcccgcaggtaatcattataggagcccgaatagcgtgcgtaatcggaatgggcatcgggcaggcgacggtaatccagcgaggactttgtcggcgagcggcggaacgaaagctgcgactctgataaacggcggtaatcagagagctcggctaaacgccggtcggaaccataccttttcgacatggcgacagcctttttgtagggatcgtcgtagctggcccggggtggggagaggcgggtacgctcatagggcggcgg

SEQ ID NO: 338708 - DNA, 1000 bp, Homo Sapiens; identical to SEQ ID NO: 158762

SEQ ID NO: 338709 - DNA, 1000 bp, Homo Sapiens
ggggaaaggtctttattgtcagtttagaatgcaacatcttaaggttacatgctttgagtcacatacacgaagttttttttttctttctttttcaaaaaatgcattgacaagggttcaaactattcatgaaatgcagctacagtcgcatgcaaaggaggatcctggttgtattcaaggttccttagtgaaatggtgctaagtattggaaaataatagtaaaaatgcatggtgcaaaaagctctctggctctctttcatggttacatgggagtggactgcttcttcagtcactgcagcattgaaaaaactcttttaagttagcccttaaactgcctggccaggtgttgcttatgactctcctccacctgtttgaacttggactccagtcctttcatttggttctccatcttctccacgtactgcaagtctctctgggtccgcctgtccaagacctctatggattgagacatgttctgcaccttctccagtagctgcctcagctgttttgtgcgggcatcccgtgaacacatggtctgctgtggggcgaccactgtgcagatacacctgccctcgctgtcctgggcagagctgtacacctgccagctctcctcagggttggtgggcagcacttgagtgagttcagtgcccatcaggatgaggaagaggaggctgaggagcttccgggccgggtgcatgtctcgctgccacctccaacgacctggcatgcagggccctgggtgctggccggccggcggctgcgtggacgcggacgcgctccggctctggccccggctccgctggctccggcggcggcgcctggctcgtgtccccacgcctggattcagcacccggagcgggcggcgcgcgggctctgctgcgcgaagcctccgctctgcatatttatcgcgtcccggttccggcgcgtctgcctccgggcagggctgggcagggctgggctgggcgggagctgcgccctcctctctcctcgcctcctaatggct

SEQ ID NO: 338710 - DNA, 1000 bp, Homo Sapiens
ttttttttttttttttttccattttgcacaaaaatgtatttctgtgacttcccaaagtacagacatttccccaggccccagggggtaaagcaatgaggtgtgaagtctgccagggtctggccggggccgctgagcgtgggaaggaagggagcgccgcatgcagcccatctgccaagctgggggaacacagggctgcgcccacttcccagggccgggagggagaggctccaggagaaaaaggccaggtgtctctcccaaagctgctcacccctgccgtcctgcctggaggcagaaatgctaggaacacctgaaaacaggcccgcgggaggaaaagggaagaaaaagccatcacccaaaggctgcctccagggttagcgctgctccccaggcccctgcgctccacaagtgtccgatgagaagcaatgcagtgtccatcgatggaggagcaagagagccggcgcctctcaggcttccaaggtaaagcctagggcagggcgggaccgccagggaggcccaagcggccactgcagggcagtccgagtgctggtctggaggcggctgtgtggccgttgtgggtcaaaggctggcatgggacctctgcctctgagaggcgtggggtcctctgggcagcggggcaggctgggaggaggaggcaggctcagttctgctggtgggagcgcctgggcagttgagggctatggagcgaggaagcaagcccctggccccagaagatgctagcttccagggctgagggcaggttctggatgtgtttggcagaaggggcagtggaatctgcccccgagttctgaccatccctgggctggggctttccacagcctgggacctggtgggagactaggaggcagcctccatagcagcgtggcctcaggcaggcctggctggacagcagcagggccactgggtgccctgctcctagagggtcttcaggggcagggctgcctggacctcagcctaggaatggctcactttcctgccccag

SEQ ID NO: 338711 - DNA, 1000 bp, Homo Sapiens
ttttttcttccttattcatattttattaggaagccatatcagaaaattaatcagttatacaactttaaacattgaatgaatcattcttatcaaatacatcaagaccagaagccaagtcaaatatggcatttcattttacaaatatttttacatttaatagtcatgaaaaagaaaagaacttgaaaaaacaacttcaactctgtacaaatgttaatatcaaggagcagctgaagcttaattttaagatatgcaagataagtgaaatgaaataagtaatgttttattaaaatatccttgtctttttccatgatatacacatattttttctctttaaataaatatatattatgtatttttaatgacagcttacttaacaacattcatctggtgctttggggccatggagttcacttggtaaggaagacaaataccaaaaacatcaggtacaattggattctcctacagcagaagaattggcttgatttttggaatgtctccccgcacctctcctcacatcaggacttctgagccttctgaggagtcgtcagcaaacaaaagttcatcgggcaatgagcttcccaagggcagcatgctcgaatgggaccaggagaccccattcctaacaagtctctcccccggtaaaacactgttcttttcagctgtgactgcagcagagggggcagaagtcagatcttcccattcctcactgcccccattcaggatgtaccgtccttcatgaggtttgctgtcatgaacttctgctgtgaccacactgatggcagcgcggggagtgcaggaggcaattatagagtcagggtcgatgttcaagtccagtggagcaagggtggagccctgggccaggccctcagagctctccagcaactgtgtattgacgtaaataacgtctgcttggttccgaacgtcaggcaaactttctaagagtttttctagctgcagcctcaatactgaaaaggtggggcggtctaagggatcggttctc

SEQ ID NO: 338712 - DNA, 1000 bp, Homo Sapiens
ttttttttttttttttttaagttctcacgagagtatatattcacttatatgaagtatatacacgagagtgtatgatttcacttatatgaagttctagaagctctagaagaggcaaggccaataaatagtgaaaaagaagtagatcactggcctggaaacagggaagtggttggactgcccagaggcatgaggggactggtgggggcgatggcaatgttatctattgcgatcggagtggtagtcacctaggcatgcatatttgtcaaagtcatctctactctttaaatgagtgcatttttattatgtaaaaattataccttcatgaagttgactttcaaaagttggaaaaaaaataaaagcttaagaacactataccatctttttaaaattaaagagaaaaaaattcaaaatgttagcagtgcttccaatctcccagtgcttatttctctcccagagcggtcttgcgaggaggtcgtgagaagagtcctcctcccaccgccatttctgtggccgggtggtcccaccaaaggcagctcagtgactctcctggctggtctgacccaggccagcctcgcagacccagtggtagggcctctggcagacgtcgtcattccacctgccgtctggatggaagtgagcacagtcctcgcctccacccagcccgtgcccctgccagtcgtctggctggcctggcttccagttctggaagccggtcgcatagtctgttccatccacccacttccaggctccttcagggtcactgaggcccatccaggtgtatgcggagcctagatatttctggacaaaattctgctcctccctggagttgatgaccaccaggtgggcgttcttcagctggcagtacttctcagcctcggcccaggacatcccagagtgagagaaccagtagcagctgtcttggtgctccacccagttgacagggcagcaggtcccttcagtggaggcttcctcaccattgttgttgagagtagccacctgg

SEQ ID NO: 338713 - DNA, 1000 bp, Homo Sapiens
tttaccaatggaatagcagactttctgccagattttattggttaatggtaatataaaatataagaaaaaaacaacttcaaaagagtcaacaatctgtatccatctacatggtatctgaccaccattactgggcttttgaagtacctcgtagtggacttcacaaatgattcttaatttttaaaaatgcaaagtgtcttagtatttgtgtatgacatttaaactcagaatttacgtagtatagaaaaataccaaaatatttataagccacacacttaaaatgcattgaacatttatgaaagctccaaaatttaaagcatagcatatatatttattttataaaatagaaaaaaaaataaagtatattgattgttctttacacattttgattacactgaatttgttaatttaatattagttcaaataaacattgttatttaaaaaatgctgagtacacgattaagctgaattttgttttccatcagaaaaagaacttcaggagtatataatggtctacaggtgcttcccatccaaaacactaggtcttcatcttttgtttcttagaccactcaggtgcttcttttttagtaaagagtgttggtttaggtgtaaatatattgtcttcatgctctttaggcacattcaaagtctttgatttctgattttctgtcacatgttttggttctgttttagtgagaagtaagctgttctcagaatgtttactatgcatcttaacgagaatctgtttcattgctgccaattcctcacgatgatttagaagttgttctaaatctaatgccatttgattcttcgtctgtagtaaagctgacttttctttatttaagttgctgacatctttctcaagttgtgcaatagattccgtcagtgaatcaatcttagaatctctctgacgcactgattcaatgagatacctgtaaggctgttgagtctggtttaatagcgaattggctctgtcaagctcttgtgaaagctgtgttacttg

SEQ ID NO: 338714 - DNA, 1000 bp, Homo Sapiens
tttttttttttttttttttttccggcacgaggctttttattctaacagcactggggggcccagcctacctgccagacagttcccaggagtgaggctggtctttcctggcagataagacacagttttgttgggtgaatgagcggctcctcccttggtccaggaagagctccccctgcattgggtgatgaaattctgtctttctgaaggccgggcagtgcacagcggcccttcctctctgggaatgcccaggctcacacagtccacttcagacacctggtctcctggtgggtccccagacagcgcacagtgcagtaccgggcaccgcagctgacacaggtgtagggggatgggaagccacagacagcacagaaggggcgctggggccgcgatgggggtcccgcacaggccgtcaggtagttagggccctcggccacactcaagttctgctcctccaacagggcctgaaagttttttcggaagcgaagtttaaaatgatcacctcgggttttcttctttttctttccagtgtccgcatcgtcatcaaactgaggcagtctcttgccgagctgagggagtcccgcgtgggggtcatcctggaagttgtcattctccagggcctccagctgccggttgatgcgacgctgccgggcagcccggtccagcacccgccgctgcccggggtcctgggagcgaaccgaagttttcttctccaccattggcacaacacaactgtcggaagaaactgctgcgcacgcgtactaaccccaaggctttagtaggggcgccatcacttccggtagcttgtacttctgcgcgtgcgccacagctttgactcattacgtggcgtttccttggagacaagaaagcttttcgccatgttttataggggcaaaaccacttccggcctcagtgtggaggtgtaaatcttgtgggagccacgaaatgggtcattttaaagatgtggtcacggtgttcttacaagaaatcttattttcctttg

SEQ ID NO: 338715 - DNA, 1000 bp, Homo Sapiens
tttttttttttttttttttttgcacaaaggctatgtgaacactgaacacttatagagagtttaccactctagaatagaagatataggaaagctgtagtcctggtcttcatcttcctcctcttcctcggtgtcttccgaaatggctagatgggggaatacaggggagctgttgtttaaatacggacaacaacagcgcagaagcagctcagtgtatgttttcaaagccctctgatacagccatattacagcgttgcatttttatgtgacttgcagtgagatgctttttttgtttttggcatctgctgttatgcaataagttaaaaaaaattttttaaagcataatctatgaagtcaaaaactgcagaaagttctgaagaatcaatggctcaggttttacgggcagattcagttgcaagatccggagtgctttacttccagtagcacacctgaggagcaggcagcttccttcatggcacactcgctggcataagtggcattgtcactggcacagacaggctcatccgacttactgtcagggcacagctcatcacagagggaacaccggcctctcccaaccttgaaatcccataaacattttttcccaccagtgcactggatatcttcacaggactttgctttgatacactttccctcataggctaatccaatagatctgcccagcaggcaggtagcctttctcaggtggcaggcactggagtaggtgactccatcattcccacagagatattgctcagaggaagcaggctctgggcaaatccgattacaggtcacacagtaggcattattggtctggtccaccacacatgtggagctgcctggacagaaaacatcccgacaagtctttttacatctgccttggtactggacttccagttctggctgctctttacatcttgcctttaggagtgcacattcattgcggtaggttttcccatccagcccgcagactggacccttccaggtgatgttggaacaatcc

SEQ ID NO: 338716 - DNA, 1000 bp, Homo Sapiens; identical to SEQ ID NO: 158767

SEQ ID NO: 338717 - DNA, 1000 bp, Homo Sapiens
tttttttttttttttgaaaaaccacagcagtcactttattcttaagtttgcactttacaaaaccacaagggagaagtccttgaaggggagacaggggtaggggattagggagtgggggatggtaaagaggggaagaggaagacccagaaacgaagtcccctccaaccccatctcggggaccaagcagagactaggcctcaggctagcccagcagggcttcctgtgtcctggttgtacagagctaggccaaaagacctcaggggaagggccacggccctctagagactgccgccatttgagggacagccacaggccaatgtttcctgtgcccaaagaaggaagtgggcctcccttcccctcccctaggccagataatcagcctgaggcaggggtgagggctacccatccagcagcttcaggatgctctcacgctccttcagagtcttccaggcctggtccttttctttcttggtgggagtccgcttcttctgccgggcagccatgatcttgcgaaaggcgtccatgacctcgttgtcagccatgcgcacccgctgcctcagctcctgccggctcacctcctcctttgccagcctcagcaggtcgtgcttcttggtgcggttgtgggcactaagtgccttcagctcagcctgccgtttgcgaagctcagcaaggacctcatcctcggagtcctctgcggggcggtcctcagactccaaaaggccctgggcaattagctcctccttgatgcggctctccagggacttagtatgcggcacactgaagggcttgttctgattgcgaggggaggtgcttgccccgtcagcccctgattctttcccagacatgtcaggaataggagaatcctccataggggaaataatattttcctccaccagggcctgcaggaggcgctgcgtcagggcaccaaaggggcatccatcttccggctgttcatgctgggcctcagacttcttcagcagggcatccacatctttagtgt

SEQ ID NO: 338718 - DNA, 1000 bp, Homo Sapiens
ttttttttttttttttttctcaattgtcttcaactcaaaatacttcttatgccaaagatggcatattctgctacccttcacttactacttacaacccagcctctatcatcataattagaacttctgaccctggggaacatgggcaatagtttgaactcttttatatctcccttaggcagagatggaggcccagccatgcctctgacatctagacacaactgttgcttcatttctcctattctcagaggtgatgttgtaggacttcaacaaatatcagtaaacattaattttttttttccttgaggcacagcatgatcttggcttactgcagctgctgcaggctcaagcaattctcctgccttggcctcacgagtagctgggttacaggcccctaccaccatgcccggctaatttttgtatttttagtagagacagggtttcaccatgttggccaggctggtgttgaactcctgacctcaagtgatccacctgcctcagcctcacatagttctgggattacaggcgtgagccaccatgcctggccatcaatttttatgtcaactctaaattataacatttagcaattttgtgactttttatggtcatcattaatgttgtttatgttttagttgtagtcctgtcattactcactcgggtatggtaatttggtctttttcaaaatgaagttaaggtctatttgctcttctctgaatcataataagaactgccaacagccatttcagcaataactatttactgagattttaaaatatttcaaggtaattggtcctagcagactggaaaataccaaattcttttccagaactgaatcccccatcaaagttcaattttactcataattcccttttcatttgaagcatctcattgtaagccagtcttaacccttctctcacactttgcttggctgtttctcaggtagaactcagtaagtctggtagcctccaggactgccgcttagattattaaacaacatgtcagt

SEQ ID NO: 338719 - DNA, 628 bp, Homo Sapiens
ttttttaactgtataattattatttttaatgtccagaatgtgtaatacaagggccagagcttcctcctggactcaattttataaattctcaattggttggtgaggccaatagggatactttttcttgtctaatttggtttctgggaaagcttcattcaagtcctcaatggtcatctgatcaaatggaattaagttcttcatcttctccatctctttctcatattctacaatcctggcctttgagagagacacccactcagcacaagatttcacatcttctttttcttcggcatccacctgggcagtatatttatcctctggcacgggaaccttcagcgcattaaacttcttctcaaagtcatccaccaagccagccttggccacattggccttgtagtaagcccagtcgatagctggtggattctcaggtaaagcagccaacctggaggtgagggtctcattccaggatttcagggaactagcaatggccttttggttctggggtatgatctctgcaaaagctacccagtcaatggtttttagagcaagttttcgcccagccattttgggatccttcaccgaccctggctgcccacggtcctccgcagcaagtaacggaagtgggtca

SEQ ID NO: 338720 - DNA, 1000 bp, Homo Sapiens; identical to SEQ ID NO: 158769

SEQ ID NO: 338721 - DNA, 1000 bp, Homo Sapiens; identical to SEQ ID NO: 158770

SEQ ID NO: 338722 - DNA, 1000 bp, Homo Sapiens
ttttttttttttttttttacaacatcactctttatattaaaaagtaaggaggtcctggggttaagtacacaaagcacctaagtccttcgggtagtttagtgtcagttctacaaagtaagctttggcttcctggcaccagtgaggctcaatcttctgaagtcttccagaaggcaggcgaggagagggatcaggcagccctccctccctcggtcacagtcacggggcggcctcgggccagacaggaggagatgacagacgacaaccagacggtaatatccaaggactatttacaggggggactgcttctgaggcatgactacgatcacttcatgaatgccacttctgggatctcgcccttggccttgagatgagtgaaggcctgggcagatctggtgtagtcccagttgttgtcctgaaggcacttctgggaccactcgaggttcatgccagactgggtagagaatgcttgcaacatttcctgctgctctggagagagggtgggcaccgggctggaggaaggcgtgggtgcaggcatagcgaaggctctttggatctcttcagaactggcattccgcacaaatagctcatcatttacaatacatagccctgaattgctagcaggaacagcaatgaatgtccgggtgaaggctcgcaaagaatcccgggactttccgtccacttccttgaagactccattgacagaaaaacacagcaatgtgcttgtctgggcgcttatgtctaccacgaaggaattgacgtcgtgctgggttttgggcaactcattgaggaaggcaacaacgttgagacgcgtgtgcttcagcagccggaaccgcaaggtagggtctttaagcttcttcacatttctgctatccttgaaatactcggctaagctgcttcgggcagggttctgaggaatgaaaggaatgctcagggaacagcaggccccatcatggtaggcatccaggagcccttgtcggtctccagagtcgtaaattgcata

SEQ ID NO: 338723 - DNA, 1000 bp, Homo Sapiens; identical to SEQ ID NO: 158771

SEQ ID NO: 338724 - DNA, 1000 bp, Homo Sapiens
ttttttttttttttttttaggcagcattagaatcacttatttatttctttcctcacctgttccctgactgcgtgaaatgttcagggaggtcagttgatttccccaggtacattcatggtgtgacagacacatgggtacaaataaaagacccagaaagccattaagtgtggtgtgtttgagccctcagtcgtcctgacagggcacaggagctgcggccagcccttgcccaccgctttttatttggacacagatggggagccccccaggctcctgctgagaccccccacatatcctcatatctagcctgagtatctgtcctgcaaaatgacagaggggctaccagtaggaagccatcctcccttccttgtgagatttgcctgcagggggaggatgggacctcggcagagaggctctgagaagaggtcagggaatggccactccaggggaggctctgcactgggagcctgaggcatgtaatgcagcaggcaggaagtgttgccaggggcctggagtacacagtctgagccgtccaaccactggtgtgtgctgtctttcggcacttctgactgcagggcaggcagctccagctggtaagggtcctcactggggagggcacgaagctggcgggacaacactccatgctcagctggcaggctcccccttgtgtcagaggagtacatagcaggtacaaggaggaggcagaaggagactagtaggaccaagatgcaggtgctgctgctgctggttttgtttgatatctcaatcaccatggcctggagtttcctcagttgatctagaagggacaaattctgttcctccagaagctgtactttgttctgaagctccatattctgggctgtgtatttcaagaccctgctctctaaacccccaacatacaccttctttttcctgcggctctcttgagcagatcttttatttcgaatcttcctccgcacacgtttcagaatttgttcctctgtcttagtgagaggaagtgtct

SEQ ID NO: 338725 - DNA, 1000 bp, Homo Sapiens; identical to SEQ ID NO: 158772

SEQ ID NO: 338726 - DNA, 1000 bp, Homo Sapiens
taagcaatgtaaaacatttaatgtgatttaaaaagaaaaacaaaaaccttttgttttcaactattttctaattttcaacaagagtgagcttgtacataccacactaacccaaagaggggaggcagaaaaagacatcagcaacggtctttggagtttggcctactggctgccaccctaaagtgggagataaaactctggaatctatcttgtatctgttggccaaattgcttaattccttcctattctcttcttgtaaaatgaggcactaatatcttaccggccagctccaaggggatatagagccaactcactcattcattcaacaagcaacgaaagccagctatttgtgtggggacagtgtcaggtgcaaggatatgtggctgttcacgagccggccctagacggaaaacactctaaggataacaatagctgctcttgattcttatttctggggtagcagtgggtcagtcaaggcaaagccgggctgtcatggtgtcctctttcagggagatgtcatgggcacaggcatggggatcagtcttgcccctgggggcaggcacaggaagtccaatgcataaaacctttggctgaggcttacttaaggttcctttcctttttttctttcctcccttgtacatagtttaaactctccacactaggtcattcaggcctggagtcaccagaaaaaaagaagtcactgtttgggggatggcagatgatcaagagttcagacagctgcgatgaaggattagttgtgggtttttctcagtgccttgctacaaactgtgttgcagttccatgttctgacactattaaataatgttttctctggcaccaatccaccttttccctacagtttaagtattgatttttttttttttaactgaagtagcttcagtttacggctcacatttaaaacctagaaacgttatttccataaatgttggcagaaactggtcactgtttatttcaccagcagtcataataaaccccttccaac

SEQ ID NO: 338727 - DNA, 1000 bp, Homo Sapiens
aggtgtgaattttttattgaaataaacaacagcataaagaatacaagtagccaaaatggttttgaaaacccaaattaggtcaaagttctaaattaaaaatagcagttgtgtatcaatttaccttattctagcaatttaagttggtaacatacaaagttattctgatacaagatattaaagacacacttggttttaatcaactacctttgaagacaccaaatctaaacactactggaaacatcgttgacactacagccaaatggacttgagccaaattttctcaagcacaaatgcaaactcattaactatttctttcagtatctaagaatatctttattgaaaaaaattaaaaataaaatcagttcgccagaagcagttagaagtgtggctttgttcgtgtccaagcggattgttaaaatatatacataaagggaaatcttgccagatgtcacaaattatagcggcacccgttcagatttagggtgagtttctgatcaacctatcagtctccaattttacagaggccctactgtttctacttccactgttgcccaaaagtatcctgataaaactcctggttttcagatttgtaaccatagttaccagaatgatcaccaccttggagcggttgctgagcaatgggttgggagccccagttctgattattggtctggcgccgcttggaatctggctggttgtacccatcagctttgcgctttcctcctacatttccaccgcggccacccctcgcaccacgtaccccgcggcctctttgttgttgggcacctcctctcgcacctcgaacgcctcttgctgatccaggacctcctctctgtgaataaccggctctaccgcggggaggagcagccccacgacctctggatggagcagcaccccttgctcctctaccaccccttcctctagctccaacttgaaaatcttcataaccatagtatggatcttcatatccaccacgatagttatggtaatcataaccata

SEQ ID NO: 338728 - DNA, 1000 bp, Homo Sapiens
ttttttttttttttttttttttttttttttttttttttttttttcccagggtttggctttttattgacacaaacacacaaaggcagctgtggtaatggggtggtggggtacacaaaagcagaaatcgcacttcacacatttaggcctcatttagacaatgaggaggctgagcctgtccctccacctcccattgcaatggttggggcaataaccctccctaatcctagctcagtgagtagagggagtgacctccctacccaggaagtccccattttggttgcaatggcccaggtcctgaccatcccactctgtacttccctgctccatctccccacccatgtaaacagagttttgggctgagtttgataagctgcctctctgctttgagaaggcagtagggcctcccctaactgcaaggggaatgtgcttggatttttactttggtcccagtacaagaaacagacagcactgcctttcagagctctggctagtaaatgccacacatatctgcaaggctgaggaagcttccccgcctttctcctcaaccaccatagagacgggacatggcacagaccacgatgagggcacctgtttttgccctgcctccccaggaggcttggggctgccccacccaatggcacatacacagatttttggcagtgttgtgggactggggaggagagaaaccccagctccaccagaacaaggaaggcactggggagtacaggggaggagaaggaggtgggaaacaggatcctccctccccgccgccacacacacacaagcacaggttttcgttgctaaggcactgagaacaaatccagagaactcagtgaagggtgggggctctgtatccttcccagagttgtgacctaggggagtaggtctgattcccgccctgttggaagaggcagccttggttaagaatggcagaaaacctggagatggaagaagcccaattgtgcttaagaagttggggacagaggacgagattgggaac

SEQ ID NO: 338729 - DNA, 1000 bp, Homo Sapiens; identical to SEQ ID NO: 158773

SEQ ID NO: 338730 - DNA, 1000 bp, Homo Sapiens
tttttttttttttttttttttttttttttgctataagataatttattacagactagcctataatctcctgtaacaatggcacatataataattaacaacagcaaagatgcttggtttcttgtttcatgtaatggccagtacatctgtggacaatgtcgagtcctcaggaagtccaggaggctgctacagaggaaatccaagaaccatgtcacatctctcaacaagtcttgggaagtccatctgactctctgaaacagtttgtctctgacctcccaggaagtgtggagggccccttccatccagcctgtacagagggatcagagtccaggctccttctatagggttgaatatcagaggggaatagcaaatgaccccgatgagagagagagagaccaaaggctagattctttctgcaaggtggaggacggctagaaggcagtggccacagatgagcaggactttttctagactggtttctacaatttttggctttgttcagggcccacccaagaagaaaatactcctggatccttcaactagccctcaggtagacacatgttagaacagcctgtcacgtcctgaagcatcactcccctgcctagaggagtgaggcagggagactcccaggcaggtggcccctagtgcctggggtccaaagaaatattcttctcagggctttgaagcaccacgtgaacctgattctactcatgatacaatctggggaaagggattagtacagttcatttctagaagttatcttgttcagtttcaaagccttgttctcactggagccacagaaaatcagtggattctactcaagggacagtctaaattctattctgtgtactcctgccctggccatactccaatccagaccaccgggctcagcaacaggctcagctgactacccagccagccaggcacaagttccacaccttctaaacttgttcttctaatgattggtatgtatgtgtctaactggataaggtgtggcatggag

SEQ ID NO: 338731 - DNA, 1000 bp, Homo Sapiens
tttttttttttttttttttttttttttttttttttttttttttttttaaggatagaagcttctcatttatttgggtactttccaaatgtatacaattcaaagtagaaaaataaaaacaaggtaaatcttataaaacacaaatgtttacaccaaaatggtcaaatcctatcatgctggaagataagactgtccacacacgcgcacaaacatccagagtttattgctcttcaccatggaaaaaaagtctcttcccgatgggtatttacaaagcggggagatggagtgtgaaattaaccagtgttgaaatcgtaccacccattcacatcttcaggacagtggcaggaacagcgccgtatgcttgagggtgctgtggtcacagctcgcggccccggccaccgaggcccagttcccttccagtagtgggcagctcagtgaggctggatagaaagtctgggcaggcagtgggtatgcaattgaagcaagaagagaaaggagatgttcagagaaccaaaggcgcccttgtgaaggttccatctgtctcacaggaggttctgaccgacagctgtgggctccagattgtaccgcactcccatctcagctctgggccagcctggctccactcagctcatccaggctaccttcccttgctcaaaacccacctcgtggatgtgggaaggtcctcttcttcgagagagtaaaagttaaaaaaaaagaaaagtaaaacgaagtacagaaagaaaatctctccaaaaacaatgcttccctcaaggaataaagttaaaaaaaaaaaaagaaaaagaaaaaaggtgagtgggctccggggagtgtttatgtctacatttctaaaagcagaaagaatgcatttagcaaaaggaagtttatccctgagaatcttaagcaacgtaagccgtattttatgccaaatatataacaaaatctggaagatatacatcttcttctaaatattaacacatctgcttctgtaactaaaaaaaaatga

SEQ ID NO: 338732 - DNA, 1000 bp, Homo Sapiens; identical to SEQ ID NO: 158774

SEQ ID NO: 338733 - DNA, 1000 bp, Homo Sapiens
gcaggaacactatatttattaggtcaataattcatttttagcaatacaagtacagaatatatcacaatgctggttacaaacatacttagtatggtttaatagttacaaataacggtgggcactacaagttggtgagaatgatatgaaaggtcatcctgacacaatgaagaaccgtcttcaaaaatctatttaatgaccttagatatttctatagaaattattgtggcactattagtggggattttcacgtaaagattgttagtgttttgtttttaactgttccattaagaactttttattttgagcctattaaactaaaatcccctgttgcttaataaagtataaaaatagtactgacctggtaatatttaataaaacgtagcattcattcacatcataaaagtagaactgaaaagttttagttaccatggcaaaatatcttcccataaaaggaatatacagaaatgagtaatgttacacaaacggtacctgcaatggttatttagtgatccaacacttaactgtgcaccacaaaccaagttttctagatatctatatataggatatatttttaatcttaaattttactcttgaaaaacatgtgcacttcaacaaactcactaaggccactcatgctatagatacctaggattgcaattaaagaatagtattatgcaataaatcctaaagcacactccttctgattatcaacagggtaaaaccagttttctgcctaaaacattcctgagatttatggacaaaagaagtactgttgaagctggagattaatccaaatgtcatattaacaacaaaaaatttcctagccaggcgtggtggcaggagcctgtaatcccagctactcggaaggctgaggcaggagaatcgctggaacccgggaggcggaggttgcagtgagccaagacggtgccattgccctcccagcctgggcaacaagagcgaaactccgtctgaaaaaaaaaaaaaaaatttcctggcaact

SEQ ID NO: 338734 - DNA, 905 bp, Homo Sapiens
tttttttttttttttttttttttttagggtcaaacttctaaacctttattactgattagtacaaacacaaacggagcaatgacaacagcagtgaggagaggccctgacaacgagggccgcccctgcccggggtgaggctgcacagcgccagctccaggctgggccagcttggcccgcactggcaacacaggcttgaccttggccacagctcagcagtagaaaggttcttggacagggtgccaggacacacgctggggctgctgtcacaggacaatcttaaaggagctggcaaagtctggagaacgggagatgacgtgctggaactcagagaggttgatggttccatccctgtcaatgtcagactcctccaggatgttgtcgatgagctgcttcatctcagacgcactaagccgtgtgtcctcgccctctcccgtgaggcagttcaccagccggctcaggtcttctctgttcaaggttccgtcatcatcaaagtcaaagatgcggaaggcataatgggacttgatgtctggcgtggctgtgtcactgaacacactgaggagatccaggaagtcctcaaagctaaggctgtctttggctggggatgtggagaagaccctgcagattcgctccttgaaggggttggccttgagctctggaaggctgagaatctgctcgaagggcacttgtgcccgaagtgacgactccacggtccgctgctcctggggaagcagctcacaaaaccgcctgtgggctaggaggatctcctgcttcgtcaggaacgtcaagtcctggtactcggccagcagctccttggacaggcgactgcccgagccccccatcgccccgccgcgcgcacagctccgccaactcgcctcgagacgccgcctcgtgccgaattcgggaga

SEQ ID NO: 338735 - DNA, 1000 bp, Homo Sapiens; identical to SEQ ID NO: 158775

SEQ ID NO: 338736 - DNA, 1000 bp, Homo Sapiens
tttttttttttttttggcatatagaaacaatttattgccgggggcaataggggtaagagaagccagaaatttttgcagccagcacccaccccacccccaacttctactttacaaaagaaatttttacaatcaccagccctctgtacagagctcccccatccggatcccttctcactgtacacagctgcctggctccctctggtccctgcttcagaggaggcctgggcctgtggccagctgaccttggagttggtctgagcccggagctcgccttggtgctgggcaccagtgggcccctgccaggcctgtcctctcctttttgagctgtcctcagccccatctcccttagagtgctttgtgggagctgcagtgggggcggggtgggctatcagccccagtcctgctgccgtcttggcactgcagtgggcagtgtctggtcaccacttccccctcttgctccagtccttgggagtgaagtgcagacacttggagtcgatccgcaggagccgcttgagcatggcccgctcatggccatccacgatgtcctctgacagtgtgaggatgtactggcccttgtagtagttgatgagattgaggtactgcagagtggagatgacatcctccttcttgatgctggtgatttcactaatctcattgatggtgatctgtggcctctccccgctctccgacttcagccccatcaggatctccaggatggtctgggaccagtagcttcgataggataggaggccaaggtctgagaggggcttctcaggggtccctgttttcccttccactttggagagttcatagctgaactcgatcagcagcttgccgtagccccggcgctggtagggaggcagggttaggatgcaggccacattgtagtcttccgttgattctttctccttggagaagtagcccacgatgtggaagcccttacagtcatactctgtcatgacgtagaagaggaaagggtctgtgtcatagtacagtgtct

SEQ ID NO: 338737 - DNA, 1000 bp, Homo Sapiens
gtagaaaagaatattttattgaaacagtttctcaattaacaatggagcaaagtacaatttgactcaaacctgtccaaccagcatcaacagctactgaaagaattcaaacatacagaagaggtgggggtggggtgaggggtgggacccttaggtcccatctctgccaatgtggcaaaaaaaaaaaaaggaaaagacaaaatgactgacacagccaggttcattcttgtcttggagctgaggcagcagccctagctcctgctacagacggaatactggaggacgggctccctaggcgtaggtatggtgggtcgggggcccccaacctagcagagtgatgcacagaggaaggccagccctgaccctcctccttcatccacaggcctgcctcagagagagggaggtggcatctctacattcacaccatggtctctcctttccccaggatcttgggatagggactcacagtagaaagcacattttggtcagcccagggggtcagggggtgagggaaaggctctgtctgggaggagcagaacagcagaagagaggaggaggcagggagttacaggaacctggggtaccaggctgctgggaagatgcagattatgacagagcttgcacgatgctggcaccccatgccaaccactctacgtggctttcctcttcggagaggtggtgggctcccttcttcactgtgcccctccctcctctggccactaggggtgggaaatacgagtgagaatccttccagatttacttccgccaatccagaggtacaggcttttaggcaaggggcagagaactgcccaatttgctgcaggaagccaaggaaacccagggggaaaggagctgcatgggaatggggaagggaggctcagagcaagagaagcccgcagagggaggaaagagcacagataggcactcagaaaccaaacctggtaactgaggctctgcagacactggcctgaaaggatgctcatcgcatggtgggagaggaagg

SEQ ID NO: 338738 - DNA, 1000 bp, Homo Sapiens
tttttttttttttttttttttttcctgggaatcagtccgcattttattttatagtacattcatataagttcctgcatttccaaggtaaccaggtcacattcaggttagcactgctggtaacaaaatcatacaactaccctggcttcaaaaacaagatagggtaatgcacattaatatctctttccctttaatactgcagaagacaatacatcacaaaataaaatctcaaaaatcacatgccttttacaatccagtgtgaaggcatattatttatgttaaaattagaccatgtggaacatgagaataaagagtttgaaagctctctaaaatttctcccaatgccatctttcgcttctaactgccagttggcacattcagcttcaatgccttgggaagggaggagcagaggaaagcagggggtcactgaactccaaaactcatggttttccaggctacttctatagacatcacttaacctaaaattctaaagagttaatatgcatgagggatagtaatataggaagcacctgaaaaaaattcctccagtcactgatgggaaatttaagctgtgaatttttgtgaattttcaattccacagaaagcaaaatctgtatcacatccagtaatatgttaagttctgaagatacgttttcattttgctgaataaaaaccctatgacccatgttctggtcttgaactaggtcagaaaaacactgtaatctccatatgcaatatttcctataggcaacctaaaagtgcagctgccccaacccttgaaaagtttgagaagtcaaactgagctataataaagacacaaacaaattaggtaggagaaaattcaaataggtgagaaagcaagaagttagatttgtttgggtctttttcctagattaaaaaaaaatattataaaatgctttggaccctagtccaacatagctggaatgataagttatttaaaatacaagtccccatccagaaagacagtgtgcttacgtagcac

SEQ ID NO: 338739 - DNA, 1000 bp, Homo Sapiens
tcagaaaaagaaaagctgccttcatgacatcccctcgtttcagatttccacagtgtcactttgaagcttcagagtcaggatcttactttcttcaaaaaataaagaaaatactccctctaaggtacctcccatcccccccacccccaaaatcccgctgatttcttttccagtgccaggttgcatgatcaggtcccatctcctggggttgttgtttcttttgtccatctattgattattagtttagaatagataacatgaaccagttctggaaccactactaggaggaacacaagctcttcactacaagcacacagcaggaaagaaagagataactcaattcatccctggtgctgggcctccaaaattgaaagaacttggcacaactggagcactgaatttgtatcctccatgcttctcaatcattttggattcatgggctgctcttctttgatcagccagagttgctatgtcctgtaactgttttctttgttcttcattaagaccgtgagtcagtgcctgataccacacaggattacgattttgaatagtttgaaagatagctttaaatatctgatactcatcaacagggttatcttcatcatcaatgattgtggaatagccttccagagcagtctcttcagcatcatcttcttcccaatcttcatcatctccatcttcaccagcctgcttagccagaatctccaaatattcttgcccatcttcatcaatatcatcttcatcactccccagttcctcggtttcatcatcatcttcagcttcatcatcatcatcactgtcattctcatgttctgcatggcaggcatatgctcttttcaatccgttaaataaaaggataaaagccggcaaaatctgtccagaaacctgatttaaaacttggggtatctgttccatatcaataagagcacagagtccgagaacacacatctttctgtcatgaagccccaagaaacagtcaacatcattaagccactgtgtaata

SEQ ID NO: 338740 - DNA, 1000 bp, Homo Sapiens; identical to SEQ ID NO: 158777

SEQ ID NO: 338741 - DNA, 1000 bp, Homo Sapiens
tttttttttttctactaaaatatattttaatagctggtgttaacaatttgcataacaaaagccaaattatattagtaacattgtaacattccgtgaagccccttcatttgtaaaacattcaatgttttcttcaaaactgttacactctcaaagttagtctcgcaaattaatcatcaaccacaattctacatattttgaagcaaacagaagccaaactgtacaatggttcaattttgatcacaggtcaaacatcaagtttcacaccatgcctgtaatagacttggtgctgcttcctaaatgctcagcaattcattgcatggacactggagaatgggactgtgatgcagttttctcttttcctttaaagtacatcattcttaacagcaactggattacaaagaagtgatactatgcaaactggataccatgtatcaagcacaaaaaatcctatggcattcccaggaatatactgaagtcatacagacaactgagaaaatttgctcaaagattcttccaagtttatgggttcaagtagtctaagcatcacagaataataaccacagaagcaacatacaatgccttgacttttttgatcaacagttgacagttagttgcgaggaaagggtccaaaaggcatggaatacttcagagacttttattttagcatccttgtcagtttacatagcttcttacttaactaaaagctctcccacctccatatcaccttaaccaaaacaaccacaatctagccacttttagattatcagaagcaaatcgctaaggtataattaatttatgaagtgaagttcatcttgtgtagtgaatccagcctcacaattattctatcttacaataggcattttaaatcccaaatctaaagttaatgtttatatagctcaactctatataaatccacaaagaacctttcagaaatagatggaagaagtcggcattttctaaagttctaaatctttagagataaaatacaatcagctaacac

SEQ ID NO: 338742 - DNA, 661 bp, Homo Sapiens
ttttttttgtttttctagagggtttttctcaggggcttctcttagtgctgtagctgctgcaggctgcgcagggcctccgcacatgcgcggataaggccacacagctggatgctagtctccagggaggtgctggagcccagttcagcagaggcccaggtcagcttctgcaagagggctgtctgtgtgcaggccatgacatctgtatttggaggcacagcaggagcaggtggcccctgggctgccttgagtcctgctgcagctccctcacagtgctccggacgaggtactgggggctggggcgcaggtcgagagcccagggggagctctgaggctgaggccagctggtgctcccgagcttgggagagggcagcctgggcattcagagcgggattatctttatccacgtctgagtcgagttcctgacaagccacgcagtagattttccgctgtttgtcttggaggaggatcgtcccgcagtccgcacacgtctcgcccagcatgcggtaaccgcgcagcagatagtcgcccatgagccgggagatgcgatcttgccgctcccgtcgcgcctgcagcaccttcgtctccgcctcagtcgggggctcccaggagaagtcgtcgacttcagctccgttcagggccatgttgccgttgtcaccgccgg

SEQ ID NO: 338743 - DNA, 971 bp, Homo Sapiens
ttggcttaaaaatttatttactagtctcagtaatacattagtaaaaatcatgtcacttaattaattgtgttagaatcaaagaaacatagagttgggcaatatacttcatcctacccatcccacccaaatcttactctactcatctcattctcattaattttgggaaatcatcagaagatgtgttcgttgagtaagagattaaaagaaataagctttttgacccctgccaacaccccatgcccagggtggtcaccctccaatacaataagatgccaggaagagtaagttgccctttctgatgccgtaatctgccatcatcttcccatcttccagtctctttccattgcaagtcacaatctgggtctcagggattatacccgtcttagtctcgatcattgctttcacttgtgccactgagctggaccttcgcacctggaggaggtgcctctttgcctcatcacctgactccacaagaaacaagggcagctcctcatcactgggcttcaccactttcagggtaaggtggatggtcttctctttgtcaatgccgtaagatgagaggcttctccgtggctttaagatcttggagcccagcaaaagaacctggtcctgcacaggaaccttggtcttagaccggacatgttctttgatttttttcacgctgtcatatgggttggcatcaaaggtcattaaatcccattcctcggaacggacatgcacacagaggcaggaagcattgggagccatctctgcagacaaggggccagaaaccagagacagaaaaaggactttgcatgcagcttacataccagagttgagttggaaatcccctgcctggattgctgtgtttgtccagctttgctgtgctctttgttcttgcatgctcccatgaattttctttcacttttgctgggcaggagttaatagacaaagaatgctttctgatcacatacttctctcctcaagcaatc

SEQ ID NO: 338744 - DNA, 1000 bp, Homo Sapiens; identical to SEQ ID NO: 158779

SEQ ID NO: 338745 - DNA, 1000 bp, Homo Sapiens
gccaaagagtaactgtttatttcgcttaaattcttaaaaatacttttttggcagttgtcacataaaatgtcctaatgtaaaaaaaataataataataattaaaaagcaaagcatgaaaaaacagacccaaaatgttaagattttatttacaaagcttttttgttgtacagaaagtaaaaatgctgttacaatctcagtgtaactggtagccacagacggttgactcaccaatcacagctatccacgctacagcaagaatcttacacaaaaacctaacaacgcttacaattttgttggggtgaagtccacaagcttggtggtagattaccaagagggactacatggaaggaaggcggaatgtcacaggaactattctttggctctttgggtgggtgggtgtcctggggtttgtatcacagctaccttttttttttttttaaacagctacaaaatccatgagcagtccaaccaatactgaacagttctgtttctgcaggtcatctggggtcttaatcatcttctccttcatcatctgtttctctcttcctcttttcacctttcccaccttcttcctcctcttcatcctcatcctcatcttcatcttcttcatcaagtccaaattcttcttcctcctcactgacttcatcgtcgtcctcatccccttctacatcttcatcttcatcatcttcttcatcaaactcctcttcttcaccatcctcatcgtcctcgtcttcctcatcttctccttcttcgtcctcctcctcttcatccacaccatccacctcggcatctgagtcaggtgcttcctggtcctctcggtcatagccatccaagtaggtaagctggggcaggagcttgaagacactctctcggtagtcattcaggttggtaacctcacagttaaagaggtccaggcttttcagacattctaactttttcaaaggttccaaggtgctgatatctttcagtttatttccacttaagtttagatgtgtgagat

SEQ ID NO: 338746 - DNA, 1000 bp, Homo Sapiens; identical to SEQ ID NO: 158780

SEQ ID NO: 338747 - DNA, 1000 bp, Homo Sapiens
ttttttttttttttttttttctgttcaaaaaaggttttatccaaaaaagttaatcaagacaagcaacagatactgcaaagcattatatacagcaccatagtccaggggccaaagaaatcaggaggggctgggcagtagaggaattccatatattaatgaatgtgagattaagtatagagtgaagacattaacacacaattctaatttctgttaggcagaatgctcccctaccctgatgccacagcctttcacgtttcctaaaccctagtaacctctgatctccatctgcctcatcaacacgtcaccaccctttgctcttcttccaattagtcacatgttggctgaatttatttcactccagtactttaggaccttgacagacaaatcgattacaaggtcaattcccaggatttcttcagggtgtgttcaggagtgcagatgttctttggatgacctttctactaaattagacctctgaaggagaaagctacttgccagaggctttccctgagagcattaggttgggcaaaatctgactaaaatttaattactaaatgaaagtgtgtaccttagagttcctggccagagttgactctaggtagtgatgtgattttcttgggatgtttttctaaatattcttttatgctaaagcacatggcttgatacttctgttgattaagctcgtgtctacttacagtcatctagtgagaacctgtggtgtggtgagatgataacttggtctttggtcttcatcatttgaactagttttggttttgtcttgtcccttccttgagcattttgtgtgtgtttaatcctatttggtaaacgaaccactgtgaaagaccaagttggagaaaacagaacacccccaaaacatttatttttttttttagaaaatcatggctcactatggtagtatacaatattgttttcacacatgtacacttgaaaccaaatttctaaaacttgtttttcttaaaaaatagttgttgtaacatta

SEQ ID NO: 338748 - DNA, 1000 bp, Homo Sapiens
ttttttttttttttttttttttttttccacattcagttcttttatttaattttctagtggacaatttacatatctccctcaccctgtcttttaagttagtgtgacaattttccataataaactacttaaagagaagctttggtcaagaatggaatgaaatcgcaaaaaaacaaacaaaaaaattactgccttaaaaaaaccaacactttcaccaattttatattcaaacaaaaccacacggcattggcgtgatatgtgttttcagtgtttccttggggctggcttcctcgccatcgtgccacggcacagctgcggtcggccacagtttgtcatgctggatggcggaggctcactcagcttcacattatccggaggccctggatggaagactcgagggtcttgaaatcccaaattgtcatggctccatcgatgccagtagtgcaaaatttgcgacaatcttgcttgtccacctcataaatagagacttgagtgatgctattctggtgcagcgtctccaaggccgtgttgcggtcctcagttgtggctctcttgtccatgttgcggaagcgttccatggcagacatgttgcgttggatgctctgttttggaatatctaacttggagacgaaggtcaggcagccgcggtcatcgtagttaaagagcattgggcagcagtcatggccagcagccacgacgctgttctctgagacaaatgacacacttaggagcggcaggaactctgtcttcagagtcgagacctgcacactttttgaggcatcagcaacagacacggtgctgtcgtggctgacccaggccaggcggctcccactggcagagaagcttaccccgtggacccagccaccagtgccactgccaccaaactctgacatcagctgcccaaaaggcatcttgctgccccagggcgtgctggctggcttttcatccacttctttaatgtaggcagaaaacactctgcatttgaagtcacatgatcctgctg

SEQ ID NO: 338749 - DNA, 1000 bp, Homo Sapiens
tttttttttttttttttttttttttttcgcttttaatgtttttttaatcaatattttatttaaacatttgtattcattggtgaggttataaagctttctctttttaaaactgtattttctcgggccgggcgcagtggctaacgcctgtaatcccagcactttgggaggccgaggcgggtggaatatgaggtcaggagattgagaccatcctggctaacacggtgaaaccccgtctctgctaaatacatggcgagcgcctgtagtcccagctactcaggaggctgaggcaggagaatggcatgaacccaggaggcggagcttgcagtgagcagagatcgagccactgcactccagcctgggggacagagcgagactgtctcaaaaaaaaaaaaaaaaaaaattgtattttctccaacccgcagaacagttgtctttctcttgcttaaaaaaatttcttattcagttatacctctggctctactccattgttttagagcccttacattaatattgcataaatgcatgtatttgcataaaaagctacttctacttaacatgatcccattataaaaataaattatttccaaagttggttcagtccgatgctttgctatttttaatacagctatcaggaaaatcaatattagcgttttaggggtttctaactaaaagtaaggaatcctatttcaaagaccttacgtaggcatgaagcagtgaaggaagagaccagatgtaattttacatgtgtatcctctctccttccacaaattctatagcaatttcttagaaaaaaatgctgatttgaatacatgaaagaagcttaaaacaagaggaactaaagtcacttcttcaatataagtttgaatatcttcaaaataactactatttgagtatgaacaagaaactttcgaaagaagctcttaaaatattcaaacatctggctgcatgtggtggctcatgtaatcccagcactttaggaggccaaagcgggaggatggct

SEQ ID NO: 338750 - DNA, 991 bp, Homo Sapiens
tttttttttttttttatgtaagtataactcattttattagtttcaaggcttctttacaaggtgtcctttcacaaactgtatgacatgacaagtttatgcaagattactttggagtagcttttttacttttgggtggtttccttatcttattagggtttggaatcagtttctttattttaaggggttgtaatgttacagaagcctgccgaccgtcagcaagctttctcttaggttttgacagatcttcaaatgaagtgtccaaaagctctctgtcttggctttccagaggttcagtctctaaattttccccagaatcttcaattctgtcttgaagccatggtacacttaaactggggactctggggatgatggctcttacttcgtccacaaagtcagtggtgttctttttgaacgccaaggctagaacacattttaagccaatgacgggggcgattctctcactgagccgggggacctgacaggcagggacacttctgcttaggcttaactgaatcaagtgtgaggtgatcatggcaggcttgactgatttacacaccagaactaacagcagttccctcctttccagggctctggtaacttcgttaacgccaatgacaagctgcttcctgacgtgtgcaggcgtccaccctgacacttgctgcttagcatctgttttcttctccttcagattatcactaatatcaacagcaatgctgcatttctctctgctttcttttttcagaaaaggtgttttgttctttttcttcttatcttcaatcttctgaagtccaatagctttaagcctgtcctcaagcgtctgtaggatgaagtgcatatcctcgctctccagagcgctccagcggatgatgtatgggttgttcaacgacgtcttcacaaccagaggtctcgtcttacggagagatccccgccccggtgcttgaggagctgcagccattttgaaaatcctggaactcacgatggcgaatccgtt

SEQ ID NO: 338751 - DNA, 1000 bp, Homo Sapiens
tttttttttttttttttttttttttttttttcaaagcacattttaatcatttattttaaaagggggagtaaagcatttaaactgccaatcctatagactaggacttgaacatcaaaggaaaaatagacaaagactagatgataaagtcattcaaaagcacagaagcacatcacatacaccagcaaggtttccaactactgcactgattaactagatactctcaatagcttttctatagctcgtcctagaaaaaaaaattaaattttcattttcttacaagttccaggcttaaacaaaggcaaaaattacatgcaacaactgatacactcataagttgcacatatgctccaaggtctttattagataacaataaatgctagcactttgtcactgccatcagattttcttatagtcttagagtcatgtaaataaaagttcataatgaaattaaagaaaattaatttttctaatcttagatcagttccatagaaaactattaatttttttaaagtaggcagtagaagggggttggtggggggtggaattggttagtaagtctggttctaatcttctgagctgcctttggaaggaagttatgaggtagaagattctactgacttttagtaaggtggacaatgagagaaaagaaaaagcaggtgcctcatctacagatccttctgggatttatttgccatgtacaatttaatgcataaaaaggcctctctccataaaactcagcactttacagatgtagaatatataagcatgccaaatttacttatctgccacatacaaagcatcattccaggtgctagtgaggggaaaaaaaagttggagatttggtccctcgaggagctccagatattaatctacctaactaagtccccaggtttcttccaggcatggaagaattagtggtgctacatggatgaggactagtcattgggcaatatttcctgtacaaagaatccctagacgccatactgagttttaagttcct

SEQ ID NO: 338752 - DNA, 1000 bp, Homo Sapiens
aagtaaaatgtttgctcaactttattgaatgtcattagatttataggaatcattaaagaattagataccagagtccccccggccccgcccccacaaaaaaagtcagtgaaaaagatgtgagtgaaagaagtttgtcaaggcaaatgtgtgaaaggatacatgtgtacatcaccctttaaatgctttccctgagtattctatgaagtctggggatcttcgaatgctattaatcttagacagtaaattttataaagaaattctttaaaagtaggacttaattctcctccgtagtgagtttttaagcagaggatatctactacatggattcctttgcctcttgacaggctcaagttccatctgcctcccaggcagctttttgagtctttcatagaagcctgcttttaatatatgccataattttcttcttaattcaagccacatgttcaaatttgaggcttaaattctcattccattgttttctaagaaattttaaacattaaacaacaagtatataatcaaaataatcctgtattacttataactgaataactattttcaaagaaactttcctccctgatgaataagaatgcaaactccaagtgtatatagggtgctgtgagtgaagaagcttgagtttgccccatcagctcctgcaaggttatttttcacatagtcctcatgccttatttgtatggggaagttctttctccctggaaaagatttaactaagcacaaaactaaaatccagagcagggataagggaagaatgcaggtgttcttagtggaaatatcagcatcagggaatctttctcttaaacactggaactggtagagttgaagaacttctttttctcaatacttccatcattctttgtatccattcagcttgagggtccacacacacaattgacttgttcttcttccagactatgatttcttttcttggacaaccattcccacggggcaagatttgaattcgatcaatgaagcgtctagggat

SEQ ID NO: 338753 - DNA, 1000 bp, Homo Sapiens
ggctgactcgtaactgacaaaaacattcaaatttctctaacacactcaaacaacagaaaacccagcatattttaggtggcagttagccgttacaagaagttttattaacatattctctaataatcacaaacctatacagctatgttcagtattttcaaggagagtgacttcttacaaaacgtttatagccaatcatgggattttgctagaaaacgatggcatatgcaatgacagatttgacagtttaatcagaaaaatggaatgatagaaatgaagcagactccccacctactgtgctaactgggtatgcaacagtttaatgaaataccataagccttagttggagactgtgatggaacagcgtagaggccatccgtttccaggccattctgagatccaagatgccaactccttgtttctatgaaacttcacgagatgtgccagtcagaaatggcatgctgaacattctgcagagctgcagcactggcctgggcagccagggctaccacactggtgacagtgctgctggtacctgtgatggctcttctggtatccatatcttatacacaacacttatccgtaggaagaacttccgcagaactgctcggagctcagggatcaggtcaaactgcataatttcacacaagtaggggtagtacattgaagcatgtgctttgaacttttcatcatttattttgagggttttagttagaagtaacaacaagagacttgtccaggcctcccgatggctctcagaattcacagtgatgaaataggcaagagcttcactgcaaacagttaaaagtctctgctgtatttcttcccaggaatccctgcggttctcatcaacatacattcgaaacaggatcctcaaacaacaggccaggctgctggtttcttgttttagaagattgggtttagacttgcccttaaaacctgctcgccacaggacagtccgctgctcgtaattggagttgaaggcctttgagaatgaatggga

SEQ ID NO: 338754 - DNA, 1000 bp, Homo Sapiens
gattgcactgatgaaataattcaaaaactttattgacctataacctgattagaatatgccagatgggaatcaatattgtacagaaagttgtacagaattttttacatagaaaactttacatctgtaccatatacattttgtccatctgaaaaaattttctacatccactgttaatacggaatgcttgacaatcttgtcttttaaccatcagagcacaattcacagtatgaatacatttccagtaaatctaacctccgcaaaccatgccagatttgttattttaatatattcaacgttaaattctgtacatagagtaaaatctacatcaagccccaccacccaaaagaaaagaaaatgacagcaatctggattcattttgcagtgattcaagttttggtccataaaggatcattctattttaatggctcatctttaaaagtcctaagagaaatatgtgacaggtagttactgtcagtagggatattttctacctttttttccctattgttgaagtgtcggccacaacagcttctgggcatgttacagcctcaaaatcaccacctaccaaaaagggcaaaactaaaaatccctataaaataaaaaagaaagttccacccaaatgtttagtgcatttgacaaaatattatgggtatttagcaaatgaataagaaaataaagaaaacagtgcaggaagaactatataatgttttaagatttttatattacagacctgcatctctgtacatttttcacaggatgattaccagtatctcagatagcctgagtgtgcaaaaatcttcagaataagaataccatagttgctaaatatcttttaccatgaacaataatttcttcttctctccccactccccaattataaacattttatccttcaaaatacagctctcctgagttgtacttcttgtagaagttcaatctttacatctatagttctttgggtaagtttcacttccacacctgccaaaaacgtggggctttt

SEQ ID NO: 338755 - DNA, 1000 bp, Homo Sapiens
ttttttttggagccctttaattgtaattttttaattttacgtccttgcttgcatggacaggaaaatctgcaaaatccagtggctagcacaagatgacatgtctttgatgagagtggtgtgaagataatgttagggctctgtgaggatatagagggggagatgtggaagtgagaaagaagggcggggataagggccggccccactgccagaagaggggaaagcagtggggttgccgattacaggttcaccatcagccagtccagcagctgcagcggtgtgacattccccaccgcctcattcagctggcgctccttctcatagcgcagcaccgactgcagaacctcgcccacactgcatcctttgtccacagcagcagctgagagctgaagtagcttctcctggatcccttcatcatcaccagcaaaatacaaaatagggacattgagctcagaggcagctacccattgaaggacggcttggagttgcttgttctgaactgtgtccgttaggttgtgattgctgacaatcaccgtgggtgctgcacacccttcagggggctgtcctgatgtgcctctcatttcattatggatagcttgataggcattctgcaggacagcttctgctgaccctgtgcccttggctggtaagcactcatataaactatctgggaaggccgaagttagcctactggcatctccagacttgtcatctcccagctctgccaacgaagcatcacaggacttagcaatgatgacacacagcttcatcactgagttcatcagatgttctaccatctgcccactcatgtggccatctatctggctgacagccatcttggtcagcccagaaagggcaccaggggtctcatcatcctcatatagcctggggggagaagacgccaacggtctttcacacaacttcctatcttccttaactggctgttccggcaccttgggttcagggctctggtcacgcttgaaaatggtctcactaagtaagt

SEQ ID NO: 338756 - DNA, 1000 bp, Homo Sapiens; identical to SEQ ID NO: 158784

SEQ ID NO: 338757 - DNA, 1000 bp, Homo Sapiens
ttttttttttttttttatgtatacacttttatttgcagaaggaatccaacacagcagtcattattactgggaaaaggaattaggatgataggataaaaggaggctttcatttttcattctctttctgtaccattaacttatttttgttttaactgggcagcctcccaagccaaagtaggttcagagaggtgccacttggatcattaacttttaagacagcatatatattatatgttggtagtttttaaggccagggagcatttatcagtgatgagcatattgggccatttttttcctcaacatgtaaactcactttttacgcttcttttattagtttttattagtttttcaaaagtatcagaaataacagaatgttgggagaagataaatctgccttttgaaaccaaatatttaatattttcattaaattgtttcaatacaacttcaggcaaatgccaactggaagaccaagcccagaaattcagaggaaataatcttccaaacaaggaacaccaaggtgatcttcttccattccagccacaatactggtgatcataatggtgctagtcagttatccagattatcgagtgtttaccacatcatctattttcagaatgctccgaacagtttcagttgcaagagtcagagcactgactgataccaacagaggctggacaaccagttcctccaaaatgttggaaataccaccctttcggacattaatgcctgcagttttttctccctgggcatgccggtttcttagttctgttactgtagaaatgggattcaggccggcattttcagctagtgtagatggaatgacctccatagcatctgcaaaagcacgaacgcagtaggattccataccactcagtgttcgtgaatattcagttaatcgtagggccaactctatttctggagcaccacctcctgcaataagagccctcttcttcactaaacaacgaataacacatagggcatcatgaatggagcgctcagc

SEQ ID NO: 338758 - DNA, 1000 bp, Homo Sapiens
ttttttttaaccaagtaattgttcaaatttttattttaatgcacagtatgagaaatgaacttttttaaatcaactgatttgtatggaaaatgacacggcaaataaattagacctatgttaaagcgaaggtcagctaaatatccaaacttaaggatataatgggcaccgataaacagattccacagtcttctttaatagagtatctttcaaacacaactttgctagaaactggtccaaagatcgacagcacgtgggaatgcttaacaggggtggtgatcagggacacgtttcctgggtgccgctttgatgatgttgtccacacgcagaatcacctctgctgcttcagctgcactcagaagaacctgtcgcttcacttgaaaactttctgttatacccaggatagccatatctccaatggtgccttccctcatatccaatccagcagtggtattgccttcactgtgagcagccctgagctgtgccaccaggtctgcactgtcatagcctgcattgtcagctatgatggttggcaacattctcagtgctttagcataagactccattgcaacagcttctttgcctggtgttctattggcaagctgtgtcacagcatgagccatcaacatctcagaacagcctcctccataaactgttctagagtcctttacagtttgcgcaagaacacaaagagcatcatgcaatgatctttctgcttcatctaaaatttgttgagtggcaccacgcaaaacaatggtacaagcctcaccaagggcaaccccagaaaagtgaatgagtttgtcttctccaatcatgacttcctcgataagtttgcaacttccaagcttcaccagttctgggtgatcaaaggtagaggcaatttcaccacctgtgacaagagctaggcgttccacacctgcaaaatctgcatgctcaatagccatgacaccagcagcaccaaagagctgttcaggataattataaattaattgcctgttaataa

SEQ ID NO: 338759 - DNA, 921 bp, Homo Sapiens
tttttttttttttttttttttttttgcagaagacaagacaaacgagtttttatttattcaagagtaaatttccaggtgtagaaagaggccacaagttaatgttgttaaaaaaaaaattaaacatctgctaaccaagtgctgcatttaatgaaaccacctaagacagaaaaagagacatgagacaaccactgagaaccagccacccggagctcagtttctgctacagagcacctcctcttcaacgaatcactggataccattggagagcaagtcactgttgttgaagcagcagagctggaggtgctgtcaagagtctcagcagactcattggccagatgcaccgaactcaatgaggcacttagagatgagaaacgatctgtactgggatttcccagcagaagagactttggtttttgtcatcctgaagttgccactccaccaccagttttatagagggatattcgcttttcactggtagtttattcaggtagctataggtcttgtctttttggatagggcagttaattccactcttacaaccatcaggctcaggaatgggaaagggaactgggacgcccatcaggatgccatgcaccacggccttgctgcttttagactgaatattgctggtgaaggtgacattgacgctgtaagactgtcctttgctcagctggcagggttgggtggggcatgggctcacattcacttcctttataactccatccacagaaccgcagtccttgaactgcaccggttcggcctgggcagcggtgctgagcgccaggagcaggaatgtagctgccaggaaacgcatcgcggataacgaagttccaagctcgggaaagaagcagcggccgcccgcggtcacaagacaaacctgtcggggcgggcccggggaggagcccagtcaggcgacctgtc

SEQ ID NO: 338760 - DNA, 1000 bp, Homo Sapiens; identical to SEQ ID NO: 158786

SEQ ID NO: 338761 - DNA, 1000 bp, Homo Sapiens
tttttttcttttgatttcaagagctccatttttcttaaatcaaagtgtgactatataggggcctgagattaaggtgtgagcctacagaaaggggttcaaagcacctacttggtatatgttagtgaaatcgatagatcagaagcacaaaaagagtatttatcattccacatggtctgaaacaagacacaaagctagaagtcccccatataaaggcttggggttaaagcatttctatgtctgtgccaacaaggagaacttccaagtatagccatggccatagggtgtgactggtaaaacatctgggcatcttggattcaaagatcttatcattgctcacagaaagcccttgtacatgtctggctttgggccagggcaggttagcctaaccatcaacaaccttcctaatcatcaccagtaaactgggaaattatccactgggatagacacagagtgctctagggagagatggtagagcaaataccaagagaacaactcatttgacatatagacaaccaactatctcgtgcacaattagtaattaaaattctctctcaagacccatgtaacctggcgagttattgggtcaataacataccatgtgtgaaaatatgaaaatcatcacaaaagagcatgatgatggaggctccatacctcagtttagcattttctagctatgttgactcagatcaaatgtagtacaatcaggaaaaaaaggatggataacaataactgtaatgacggtcacaggaaaatagcaaatacgtaggatgagggaagttactttttcttcttgatgaactcacagacaaagtacatggtaagatggcactctgtgtcattccatctgccagagctcagcatctccacacagtcctcatgaccataggggtcgctgggttccccctcattccagttgctatagttctgcagtggagtgttgtctgtgaacatgtactgtccctccctttcaaggtcattcacgccaatgaacacccgaaag

SEQ ID NO: 338762 - DNA, 1000 bp, Homo Sapiens
ttttttttttttttcagctacatttatcatgtaatttaatctgcttttttgtatattagcttttacatatagaatcgggtatctcaggatccctaatatataaaagacccgcataagaaaaaaaacattttgatggatatgcataaaatcacaaccacaataattggaccataattagactagttaagagatgaggaatatatgctcatttgtaagcgataagtgattatataaagagaaaacatgggttaagtaacacagtaacattaatttttgtatataaacaaattagttatctcaagtccttaaaagtttacatttaaaaaaacaggtcaagatgaagaaataactttgtagtttaaacttccacatgtgctcctttgggtggttttgccttggattttgcttcctttgaaatctttccattttgacattgagtaaatctggctactgtagaaacaccatccacaaacttggttttgaaaagaacgtttgcattgttgaacataccttcttttagtgacaccacaatgaactgagaatgtgtgaaatgagtacgcagcatctgtccaatgttttgggtatgagaaagatccaaggctgcatctacctcatcaaggatataaattggagcaggtttgaagagaagcatggacagtattaatgacaaggccactaaagacctctgaccaccactaagttcagttaggttttctttccaggtatttcctaaggcaaccttgaactccagaccatccaaaacagtttgaccctctggtggtgcaagcatagcattagcaccaggcaaaagagtagaaaaaatagacccaaagtccttgttcaccttttgccatgcaatatttagggcttggtttttcttctggtcaaggtcttctatagttgtaagaattttggatttgtcattttctacaattctcttcttcttcatcaagtcattgcatcgctcttcagcttctgtcaatacattcatagctctcat

SEQ ID NO: 338763 - DNA, 1000 bp, Homo Sapiens
tttttttttttttttgcaaatattggaatgtctttatttcttccacaatacttaaatgtattctaaatttacttaaacaagataattgttaattatacattgataaagtctgtgaaatatataattttatgtgagtaacagatattattgtagcatatatccaagctagacttcaggccttagtattatagttcaaactctgtgtttgtttgtttaataaaatagacactaggcatttctctttacttaggatatgaatctagctcctcctttttaacctctacctgtatgatactcatttgttttattaagaattagaattacctgaacaagtattttttcttttattacacagtaaccatgtctctcactttaatttgtatggatcatatagtctaaccttaaccacaaatatgtagctataatgtaacaatgagtactctcattttttctacctacagtttgttttattataagttcataggcttatttatacttccaccataaaagatgtggaaattcttagtgaaaggaccaggaactcctcaaaaataacatcttactgaatcaatgcaatgctgtttggaaacacagaagcagaagtggctttttttctccccttaacaatgtgtttcactatctgccccagcagaagggacaaaatgtttatttttatttaaggattctaagtttgcttcatccatgacacttccattttctgatgcattgatatctttctcttgatattttttcttcatggcataaattaatataatatataaaacaagtgatgagactcttaacattgaagacaagcccaagtagacccttgaaaatgatgtggaattatatgtcctacatgacccacgtgtgccacagttgttggtggaccactttatacacgttgtatcaatcagagccccaaaatatattggagctagaattcctcctagtgctcgtataaccattgagtggaaacccagtgcaagtgatttcaatt

SEQ ID NO: 338764 - DNA, 1000 bp, Homo Sapiens
cccttttcatgaaatagtttcatctttaccttgaggtcacgctacagatgaagagtaaaatgaaagactgaatatgatcaatactaattaaaatgggggggaggtattgaaaagagtctaaaattggctacaaataatgagatacattggactcttcgtcattaacaagatttagaataggctgggaaatttctctttggaactgtgaactgtgacgggtgtggtccaacagaaaaaacactggagagtcatggataacgaaatacaactgagaagttacggaaagcacacaatgccctagggcaagcttgtccaacctgtggcccgcatgaagtccaacacaaatttttaaactttcttaaaacagtctgagatttttttttttttttttttttgcaattttctatttttatttttttaagctcatcaactatggttagtgttagtgtgttttacatgtggcccaagaaaattcttccaatgcggtccagggaagctaaaatattggacacccctgcctaggggaacttgtttcgtctacttggttagttgtcctaattgcattttacctgcagtccaaaggttattttagatgatagaactgcaagaaccccaaacccaaagaaagaatcgttgaagtggttgggagaggaggtcatttctgagatacatttccaggagaaatacaagtttgagagaaggagctggtagttactgtgtgcaagtgtttttctttgatggggaaggagtagttggcaaagggacaggaatctgtgtgtacatttcctgctcctgtttccttaaccaccatcctcagggcatctctggcaccttggggtcgggtaagtgctctctactgccctcgttttagctgcctttatctcgtctatatggcactttctgcgtgaaaagacatttgccttacagggatgaaactggacttgcaagagtttgctgtagaaggtgttcaagtcaggaagatgctcagaaatgaccactg

SEQ ID NO: 338765 - DNA, 1000 bp, Homo Sapiens
ttttttttttttttttttaatcttctaagtccttttaattgttcttataaactagcataagatataaacttaagtagtacacatgagttttataatttactaatctctgacagatagctaagcatagcacatcagagcataacacagtgtgagggaaataaagtgtacaatgacatcttctattctggacctaataattcaatagagaaagaactacttgtagtcactgtggttacagaaggtttcatggacagcgaacataaagctctactagctaacaaataggtcttaatgataaaaacgtgggccttcagagaactaaaggtaccaatgtgtggcagtccaaaattacgaggaaaatgagttcccttcatgggtcacatcagcaattttttttttccccttttgagacagagtcttgctctgctgcccaggttggagtgcagtggcatgatccaggctcactgcaacctccgcctcccgggttcaagcaattctcatgcctcagcctcccgagtagctgggattacaggtgcctgtcatcacggctggctactttttgtatttttagtagagacagggtttcaccatgttggccaggctggtctcaaactcctgacctcaagtgatctgcttgcttcagcctcccgaagtgctgtgatcgtaggtgtgagccactgtgcccagctacctcatcaattcttaatctataaaccatggataggcttcgggagaacccaagaaccaatgaaatctgttggtaagttttatgtgtgcggttttctacagagagggtcaacagcatgtatattttcaaagaagtctgtggtgcaaaagagagtttattgttagaagtccttgggcaatcaacttggaaaagggtggattgagaatgggggctgtctagatcaggataatgttgaatttgaccctcacttgaggcttttgtacagaggatgagaagacggtaaattcaagggttaatcagaaattaacacca

SEQ ID NO: 338766 - DNA, 1000 bp, Homo Sapiens
ttttttttttttttttttttttttgccaggagagcggcctttatgggttttccaggggttcaggatggactggagagaggccggaccggctagggcagtgcgcctttatgggtttcccagggggtgggggcggcggccggcacagggagcttcatgttgtgccacaggaagtccaagaaagcggcggcctggagggtcctgctgagccgctgaaagtgccgctcagtgtagggcagcagggcctcaagcgctgcccgcacgccttcgtaggccagcagctcctcgggggcctctcgcctcaagagcacacccagcacggcctgggcctcgtggcagtgccgcgagttggtgttccacgtgacgcagaagcgcagcagggcctctttctggtcgcgccgcagtcggagcatggtggcttccagcttctcgcaggcctcagggtccctccggatggcctggatgacagtcagcacggtgtggggccgatccagggagatggccaggcccagcgcccgcaggtaccgcttctcatgcagcaggttgtccagctcttgctgcctgaccacctgctcctcttgcctggcctgctcctctgcctgctccgcctcggtcacatccttccagaggatgactcgggagtcactggccccagtgagggcgtggtcgtccagccggctgcagtgcagcccccagaccttgtcctcgtgggcatccagcgtccgcacacactcgttgttcttgatggtccagagcttcacgaggccatccgaaccgctggacagcagctgcgtgccacggctcacaaaggccaccttcagcacagaagcatcgtgcccctcaaatgtcttgagacagctgaagtcctggagtgcccagagcttgatggtgccatcagctgaggccgtggccagcacctggtccatgggagagaactggacgcaccagaggccacgccggtggcctgagaagacacccagcagctggcactgtggcagggccc

SEQ ID NO: 338767 - DNA, 1000 bp, Homo Sapiens; identical to SEQ ID NO: 158789

SEQ ID NO: 338768 - DNA, 1000 bp, Homo Sapiens
ttttttttttttttttttcattcaacaacaaacatttattgagcacctactggtcagggccctggaaccactagactcttagtccagtgctcttcaggaccctggaggaccctctgcaatttggcctgagactccagccagcagctggaaactccttgtccaggagactgtccaggtgaggagctcagcagtgaggagggcggaccccatcagcccacttgccaacctgcaatgccaccaccatcctgtggtccagagacatagaagtggcaggatgggtctggggtgcagcacccatgggtgaggcaggatgggggtccagtcagctgtgtccatcttaagtttttttttttttttttgagatggagtctcactctgtcgcccaggctggagtgcagtggcacgatctcggctcactgcaagctccgcctcctgggttcaggcgattctcctgcctcagctacgattacaggtgtgtgccaccatgcctggctaatttttgtattttttagtagagatggggtttcaccatgttggccaggctggtcttgaactcctgacctcaagtgatcggcctctcagtgctgggattacaggcgtgagccaccgtgccggcccgtcttgtttttttttaaagatggagtctcgctctgtcgcccaggctggagtgcggtggcgcaatctcagttcactgcaacctttgcctcccaggttcaagcgattctcctgcctcagcctcttgagtagctgggatttcaggcgcctgccaccacacccggctaatttatgtattttagtagagacggaggtctcatcatgttggccaggctggtcttgaactcctggcctcaagtgatccacccaccttggcctcccaaaatgctgggattacaggtgtgagccaccgcacctggcccatcttaagtttttaataaatagttcttgctgctgcccaggctggtgagggtggggccatcggcaccaggcttcccaagcttga

SEQ ID NO: 338769 - DNA, 1000 bp, Homo Sapiens; identical to SEQ ID NO: 158790

SEQ ID NO: 338770 - DNA, 1000 bp, Homo Sapiens; identical to SEQ ID NO: 335878

SEQ ID NO: 338771 - DNA, 1000 bp, Homo Sapiens
tttttttttttttttttttttttcttggtgaagacatttatttaatatggggggtggggtattgctgtctctgtcagtgtgtatagggtggtagggagacaactagagggactcctgtcctggggtaggctgttctggccccaggctgggggatggggagcagactgacaggggtggggaggtgtgtaagaagggtagggtgaagctctgcacacatccttgggaccacagtccaggctcacccagtcaccaaagcaagaaccgaataaataaagtgcaaccgtgggggtgggggtaggagagggagggcaccgggtgcacccatgcccacagcccacattcagtgctgccaggtctggcccacctcccagccagaccctcttgtccaatcaccccaatgtctgtccctccacaagccaggcagggcctctgtacagctactggaggtagcgataggctttaaagcagtggttgccagcatcagccaccaccacatggccatccgaggtcagtgccaggccctgtggaccatacagtggttctgcagatgtgttgatataggacaggaaggagccagagctgtcgaatacctggatgcggctgttgccccagtcagccacaatgatgtttccattggagtccacagctactcctgtgggggcattgaactgcccattgccctcgccatgggagccaaacttgaagaggaactctccatcggcactgtacaccttcactgaatggttatggaagtccgttactacaatttcattcttgttgttcacagccacaaaatggggccctgcaaagtggcggtcagtggccccacggcccccaaaacggccaaccagtttgccattgggctggaaggtaaagacgcagcaagacttgttgtcgaccacaatgatatgtccattccggtctacggccactcccttggggcccatgaggcggccagctccaatcttggtcttgaacttgccctcaggggagaagatgc

SEQ ID NO: 338772 - DNA, 1000 bp, Homo Sapiens
tttttttttttttttgatagtaaaataattttatttagtttcttattttaaaaaaggtagcatttcaacatataaatttagactcaagattacagtgtatatttgccaaaaggaacaccccgaaagacggccagcctcagagctgagagggcacagggaggcacactcctcacacatggagtttaagcagaagtgctttaagacttcacagcggcatttccctgttcctcagccccgcctccagggccatcactttggggcaacagcttttgctcatgtaactataaaacatctctaggaatgaaagcacagaggtcaatgatccagattttccacaacaatcatctgcagcaacaattcgacaggtaaagattttatttttataattcaaaagttcttttaaggagaactaaagaacacaaaattcatttataaagagaatttatagaattaaatgagcaaaaatgaaaaattattttctccatattacaaatgcctctataggataaggcccaggggaaagacccattcaaatctgggctttcctttcccaaataaagtgtttggcacaaccaacaaactgtcatgagactgacaggcctgacagctgaaagatttctagaagtggtcccatgacttttttgttgagcttcaacatagcgtacacaagagttgtcttaacaagctgcacaaactcaggccgaactacgcagcacactgctccagaaaagttaaactgaaggaaaaaaagggtccacatgaagtaggtctcctaatgccacaggttaactctgttgtttctcatggaaaattaaattcactggctgcccaggacgtcagtggaatcctgatctcctgggggaggtgacagctggagaaacaacttggatttaagcatctctgggccaggtgggaaggagacaatgatgaccaaggatgctttctaggtgactttttgttccacactatgtgggctccagataaacaatcttaaggagca

SEQ ID NO: 338773 - DNA, 1000 bp, Homo Sapiens
tatttcaaaataaatgtttaatataatttttagaccaaagaaaaactcaatcatacattgtctccagtggaccatatgtgccagaacaggaccaactcagtccagctttgaaggccctgattcagtcctactggtataatctcccttgatttattgatttgtgtatgcttcttatgcaatacaaggtgcattttactcttgaagtccctatcacctccaccatcgccatttaactgcaaaagcatgcttcctaatgggagggttttcttcccccttccctgcagaggttctgaaccttcaaggagtttgacaatcttatgaatctcttgaaccttctccccagaaaaatgtacatacaagtctacaaataatttcatggggttcatggaccccaaggcccacaatggtttctaaggccccaaattaaggaacctctgtgctagtgatttgagcaacgcaattgccctcagaagacactgacacagggcaggtgaaggactgggttaaccaaaatgacaggaggcaatctcataatttctgtttttattttggggcaaaatttagttctcagggcctccctacgtttaagagcagaactactcaagaacctaagcagctatcagcatagtttaagcgatttagaatagggctgtgcaaggggatgtacagggttcctcattcagctgaggacctcatttagctccttaactggaagctttacatttgatctgcagtgaggggacatttctaattttagtttgacccacatggaaaggtggatagctttttttttttgttttggtatagagagcacgtagaattggacaattaggtaaatccttggaatcccccaaacagccatttgctttataaatccagtatttcttacctctgaacgtcttaaagagctgcctcacaaattaatctaaccattgcttgcactaagaagtttgccaagagcctcttccagccttactggggggaaggaagagattactga

SEQ ID NO: 338774 - DNA, 1000 bp, Homo Sapiens
ttttttttttttttttttggagaaattcattaaatacactttatttaaatagcatttatctcagttggctctatgccagttggtcttggtattggggtaagggggtattgcaggtaaaaagaggtgaagcagattctggctttcagtttcttagctcagaaattccagcaatccctgtagttctttgcatcccctcaccacctctggaatagagagcagggtcttataaatatgctgaacaatgtcatctagtttttctaactccttgtcagagcgccgaaggttctcctctaggatatttctatggctctggaacttgatcatgagtttttccttctcatttttcatctccaggaacatcactctcagtttgtccacctcctgagagagccacactttctcctggatccaattggtggccataggctggcagttggagtccagctggcctgccagggcctcctggagcactttggtctctgtctccgcacgccgaagtgagcgggtaaggtgggtcacctcctctctaaggcttatgagctcgccactcttgtctatctgttctaggatcttctcattctgctgctgtatcacttcctggagctccttttcattcttgtagcgcaagcacaaggcctggttcagcttctctatgtctgcttcttttgccttctggacttcctgatgctgttcttcctgggcctgcagcctagcttgcagctcacaaatttttcgctgcagagtcctgatggcttcttctttagactcttgtagcagggaacaaagactctgaagctcagtagtcataatactcatttctgccaggctctcctccatgcctggggtctctgcgggctgaagggaaaccattgatgctactcgggtgaaagcactcttgtcacttccaagcaagggcacaggagttgattctggctcttcatctgccactgctgtcaagatgcttcccaggaaggtcctgtcattaggcagagggtgttcc

SEQ ID NO: 338775 - DNA, 1000 bp, Homo Sapiens
ttcccggaaaaccattttaattataatagcttacacaggctgcagagagggagacgcagagccggacctgacgggctgtgctttcaaaactgtgcagtctccttcctggctctgaacaggttagcaagagttccaagaggcctcaggcctccaaccacaaaggcagagaagttagccccagaaagctgacagctgaaggcggggaggctgagagtgcttggtgtttgacagatgagtgttgtggtgggaggagtatggagtcacacagaggctccacccagcaaggcctctggccaggggctatgtttaaggctggggtcaggcagaggtgggagccgcaggggagagaagtctggccggcaagccccaagggaaggacaaaggcactggggcagatgtgaccgtggacaaccgcagtgcaggcagggcccctacaacgctacagcaagcaaggccgtccacgaagctccctgagctacattctaacagaatgtggatgtggggctgggtcagcatgtggccccaccatctttagctcagtggcagttctgacagcttgggtggcaaggaatcccatttaccctgcagcggcagcccccgctggtgtctcctgggcccccagggccccagcgtgggcccttggtgacccagcagatctcggtgtggcagacggtgcagcggatccagtcgcagccgtccttcttctgtaccacgatctggcactgggggcagcgcatggcctcgccctgctgcagcatcaccttcagcatctctgtcgtctgccgggcagccacatcgttctgagcccgcagggccaggtcctcctgatactccttgcagttcatctgctcatggatggccttgcagagcaggcagttgacgtggaaacacacagggcaggtgaactcattgacatcatcctcaaagaagcaccatcccttgcaatctggggtcttgcaatggtagctgaaggcactgcggttttcagcaatggagatgc

SEQ ID NO: 338776 - DNA, 1000 bp, Homo Sapiens
ttttttttttttttttttttttttttttttccattgctttaacattttgaaatttattttggtttctgttcaacaaaaccaaaccacattgggatggcatttacagaagctcagaaaaacattatgcactgaaaaatacttctcattagaccacaacaagctttaaaaaaataaaattaagtaattatagttaagttacaaaaagctgaaagtataaaacattgtggaaacagtgaccatctattaactgggaaaacacaaaagaagagaaacaatttcaaccattaatcatttatcaaacatgaagtctggtgcattaaaggaatatctatcagagggtgaggggctggcttactggcagtttgacatactatacagctcagacccaaacccttcacagagagactctaagtgtacatctgacttgcagaactagacgagttgagtcactgttagctctggatataccgttaaattaaacctcaaaatctctccccaggactcttgctcaagcaagtcacgccaaatccaaccttcctaacaggggttttcagaaaatggcctgcagaagcacaggatctggtgcctcacagtttcctccatgctgcaatgctctagttctcatcacgcccatagcatctggcatcaggttaccctgtacagtcaacggccatagaagtcgccagcagggaaattccagaggtttagaattctatcagcacatgtgtcactggaagccatcatgggagtactatgtcagagcgtatgtaactagctgtcaggtctttccccgttgcctcagcctttctacacagactggccttcaacttcccctgagtccagaagtagactctttcagcaactctattcaggaatctgcagcaggaaaactgcttcctctattaacatctatgactgaagcacagatgtgtctaatagaaatcacccttcacccaaaagctgggcgcagaaagggaagcccttagctgactataggagg

SEQ ID NO: 338777 - DNA, 1000 bp, Homo Sapiens
ttttttttttttttgtgtgaagaggtagaggtttattgaaatataaacattcgagaacatgtaagatagaaaataaccacaacatatagacacttgctgcaggaggacatctgaggtatttactcactgcctaggctacccatgtgctatcacatttttcctggttagaatacatataagatggagagcaggaggggacagagctgccctggctgatggcaccttcaggggaagctctgcttgggccaaggccccactcgtgggggcacctgctggcacccctcatcgggctctgggtgacaccctgctgttgtccttgagggcagtgagggttcactccaacggtgtggccaggcgagctgcctggggaaagggagaggatccaatgaccggaaagacacagtgtgctttccctgcatcctctgggtgggaagagtccatcctttgtgaccaaacccctgagaaagacatactggccaaatgtctgagacaccttcaaatgggcccagtgccagccaactgggctcctcactggcaccacgtcccagatgcccttctctgcccacaccctgcaggctgaggccagaggaggtcagccctcgggagatggggtatgtgtgtgtgtgtgtgtatgtgtgtgggagtgggggtgagtgtgtgtggagggctgagagaagacgcagttgagcagagctgcagcttaccgggctgaggtatctgtttgtgctcaagcttttgattccctttcctctcctacacaggactgaatgcgagccacgctgccacacacacccacgccacgcgcggtgtctcccactgccacagccccatgtcacagtggtggtgttctgctgaacattccagggcttcctcgactgaggtgagccgcaagcgaatcaattttctttacagcacaggagctgcctgctcccgcgcagggtccaggaggagctgtggagttattcatctcctcataccctggggcggctcaacctctggc

SEQ ID NO: 338778 - DNA, 1000 bp, Homo Sapiens
ttttttttttttttttttttttttttatcaacaacagaaatttatttctcacaattctggaggctgggaagtccaagatcaaggtgcttacagatttgttttctggtgaggacccacttcctggttcgtggatgtttgtcttctccctttcacatggcagaaggggtgatggagctctctgggtctctttatataagggcactaatcccattcatgagcgctgttactctcctgacctatcacttaccaaaagccccacctccaaataccatcacattggaaatgagatttcaacattagaattctgggggcacacaaacattcagtctactgcagacattaaataagaatctagggtaaattctaacaaagaatacatttgagttaaagagtgaaacataagactttaagaaagaaggaacagtgaaaatattctttagaatgaaaatgatagtatttatgtactgaaaatatgtccttgacagtagtcattgggtttgaagtaagtatggtagcataatctcctaaaagaacatttctgatacaaaaaggaattaatattgtgcggaaaaggcatgttccactctcccccagtcataccccaagtttgcactctttgctattcctgcctttaaccccttctaatttcttttcaatgaaaccactgagaaagtaggaaacagaaaatggtggtagtgaaccagatataaaaaaaaacttccaatgaagaacttaataaataactttaaaaagaacatttttatactctagccattatcatagtacttggtaaatacgggtatgttggcatctttttccttgacccatcagaagtcttgaaagatgtggtcctccggagtttcaaagtgttttatttattgaagaatgaatttcactactaaccttatttctttcatattctactggctattttaccaatataaatttagtcttcataaataaaaaaaatatgttttcatagcagcaagtctacgtccat

SEQ ID NO: 338779 - DNA, 1000 bp, Homo Sapiens
aaggtaactgtatgtaaactcaaagtggttttgatattttggtaacaacattttgtccaaaacaacagaaacaagatcttattccttatcagaaataaaatacaaatcaagtctgtccaaatgttcagaagctgcatcataaaaatattttttgaaaaatttcatgcctaataggttgcctcatccatgttgtcatcacgtctgcgccaaaatcatctccatcttcaaagtatgaattaatgtagtcattttcctcttcttgctcttcttcatcatattcctcctgttctgcggcatcatcgtcatcgtcatcatcaccttctttacttttctctttgcttccttctttctcttcattttcctcatctgatttttcaccatcacctcttttttccaattccaccatttttttcaacacatcttcagtattagtgagtggtgtgcctttgcctgcgtcttttgcctttttgggttttgggcctgcttttttacatttatttcttggcatcatctctcttggaagtcttctccaatctggtatccattcttcctggtataccttcatgtatcttttactatacctttcaatatcttgtctttcttcaggtgtttcaataaaataaggcattcttttcattgtttctctcaactcctgtttcaaagccagcatatattcttcaccttctcctgttttcagtggtactggtttataatctgtatcaggaaatagtgggggtggtttcaacactacatcaggtaacttttcacctttgctaaatccaacagcctcaatattaaaggtataagcagcacgtcctcttcctttattcccagccatcagaaccagttataccagatgagtgggcaaattctgaaattctgaaaggcactgctccctaagtctcgaagcgtgggcaaaactctgcagccgaagtgccggccggcaaggaaagggtgatggcagagaacgccggcgcttgactgccgcccgtccacctcg

SEQ ID NO: 338780 - DNA, 1000 bp, Homo Sapiens
ttttttttttttttttttttttttttttttttttttttcccactgcaaataatgcatccaggcacctcctttattttgctttccatccccccagatcttctgaggaagatgcttcttctggatcactgtctcttcatggtgcactcaatgtaagactccagcaggaagatggtttcgtccacctggatctcactggcatccaacttgttgacattacgtttcagggtctctagctgctgacgttcaggagctgtgatcatctcctctatttcttgtaactgtgcttcctctgcaccagtagcctgcatagatgcaatgatggcttctaccctctgagatttttctagtagacgcttattctctttggtttcaaattgcctcctttctatcaagttggctatgctcttgtagcacctgtgcaacaacattcgggcagctgacaggatgttcacagtatataaatagaaggtcctggatggggcatggtctggtgttttgggaatttcctggagtgacatgaaattttctgagagcatcttatatagcatatcctttgcctcctttgcaggaatcattgcaaagtcttccacttgcttctgctctatgtgtttcttctgcaaaactagacggaatattctagcacagcgagacccaaatctctcctgtacgacggactccagagtggctgtggctagggatgctaatgccttatggaggttgatgacatacattcctccaccactgtcgccagactttccaacaaactctagtggatcatctgccagcagagtgagatactgatcaagaacttgcttagagatgttatagccaacaggtagggatctgaagatctcattggaagacaatggctgggtgaagggagcactagaggaagtggtaatctcactcattcggagcatggttcgcacaatctcgctgcttgtctggtccatcctgttagcaactgcgctcacaatggcttggtcacggaagtgttggt

SEQ ID NO: 338781 - DNA, 1000 bp, Homo Sapiens
ttttttttttttttttttttacgcaagttagcaatttattatgataactctgcaatcttttcagccactctttaaggttcctggtcatccattctgggcacagtgtgacatttacctgaacagagaggagaatggcactagaagatgagggagatttggtgcctaaaaattactacaaacaggcagggcgcagtggctcacgcatgtaatcccagcactttgggaggccgaggtgggtgcatcacgaggtcaggagtttgagatctgcctggccaacatggtgaaaccccatctctactaaaaatacaaaacattagctgggtgtggtggcaggcacctgtaatcccagctactcgggaggctgaggcaggagaattgcttgaactcgggaggcggagcttgcagtgagccaagatcgcgccactgctctccagcctgggcaacagtgcgagactccgtctcaaaaaaaaaaaaaagaattactgcaaacacatagagaacagcaccatatggagcaaaagagagcagctggagaatgttttcattcagagaccccataggatttcaaaagccagctaccatcagcagttatttctgcccccaaatcaccctaaaatgcaaatcccatcactgtagctggcaaaggtctgggatatggctcctggagtctagggagcagtccccaccaaggacggtgctggcttctcgggttcctctcccagatctacaatccggatggcgttttccttcttggaaagccagaaggcagcatagactggttctgaaaatttgcaggcaaacttgtgaaccagagtcatggtatcatactctacgccatagaaggaaaggatccctcccgggaagtcgatatagaccccgagcctccggaaagggccagctttgagtggggtctccatgtcactgtaccaggccgtgaactccttcccgttccattggaggctccaggagaagttgtttccggaaatgcaactgttgcgct

SEQ ID NO: 338782 - DNA, 1000 bp, Homo Sapiens; identical to SEQ ID NO: 158792

SEQ ID NO: 338783 - DNA, 1000 bp, Homo Sapiens; identical to SEQ ID NO: 158793

SEQ ID NO: 338784 - DNA, 1000 bp, Homo Sapiens
ttcccaagtccaaaccactttttaacttaaatcttgagtttttctgaattactcaatttgaagtaattctctttatatctgaaaaatggttttattgaaacgtttgagattaaaaaatatgcattgcaagaagcatatgacaaacattctgagagtacaaaattagttgtaaaaaataacataatttaccagtaaacccactcatatagaaatgtgcaaagccttttgatataaaaagttttgtacaccaagcacctatttttataacttagcttcccatggagagataatggcttgcgtgcattttatgtatccataacatacatacaaggctcggtcttttcaatgggataacagttcacaactcttcgatttgaattgtaatgaatctggtgacaaggatttttctctaatggattccaaagttagccagaacttttaatgtcaagatgaaaaagggtgtaaggtgttatattttcttcaattcctttaccacaggaggctaactccacaatttccctcatgtttctcattcagaaaaaaaaatattaaatttgtgttcagaattatttgatgattgcttctttgtgctgatgtttcagttcctgaagtcaacttggctctcacaattttctaaggtcaggttattgacttagggttgtataaacatttttttctggtttttggattttcactgagaacgaccttcccttaatcgtcttctagaaccttgaacttttttgttggcttgcaacttcctcacgggtgtgtctccctgaagcagtcttttaatttcttcatcttcaaataaatgaccatcaccaccttcaatgaatttggtgaccttggtgacctcttcttgtaacaatttcttcagagtttcttctgtttctccacctccagtagaaatcctagtgtattttatttcaggacctgtaatgattcgttcttctcgtgtctctttttcagttatttccacaggcactccatcaatgatttt

SEQ ID NO: 338785 - DNA, 1000 bp, Homo Sapiens
ttttttatagcaatcatttcatttatttcaggatataatatactatttagatccagggaagatgctaaattataaccttgtttaaatatctttggggtattttgtttttgcaaaggtagtaaaaccagacaaacgaataacacacataaaaatcagatttcacatgtatggctctgtcctactgctaaagatgttacaaagaaacatacttagaataccaccctgttctctcttggggaggctatattcaagatgacaagtactctaacatttttacagacatagatgttgtcaatagggtctttctgtgattttagcaaagaaaacagttgaaatgttattctaactactgacatgattcatctctatcactttggcatatggtactactatttcttctactttggcaagttatagttttcccaagacctaaccctcactgttctggaaataaagcttaaatatatatattccaaaccttcaaattaaaatgttatccccatatattcatgtaccaggttaatattgccacatatatcctttccaattgcgggctaaacagacgtgtatttagggttgtttaaagacaacccagcttaatatcaagagaaattgtgacctttcatggagtatctgatggagaaaacactgagttttgacaaatcttattttattcagatagcagtctgatcacacatggtccaacaacactcaaataataaatcaaatataatcagatgttaaagattggtcttcaaacatcatagccaatgatgccccgcttgcctataatctctccgacataaaaccacatcaacacctcagtggccaccaaaccattcagcacagcttccttaactgtgagctgtttgaagctaccagtctgagcactattgactatttttttcaggctctgaatagctctagggatctcagcaggggtgggaggaaccagctcaaccttggcgtagtaccaaaatgtggccaatcgaggcttcga

SEQ ID NO: 338786 - DNA, 1000 bp, Homo Sapiens
tttttttttttttttgtttttttttttcaaattattttcccttttattatcccgtggtaggtgtggcataaagaatatgtccagtgaagctccaggagcaggctgcgtgtttccagtcaagttcatagccaagtcctttccatccaatgggattgtgacccattgaggtcccagaaaggactggtcatctccaatggagcttgggacctggttgggtccaatgaggttcaaaagggggccagtcgcttaggagactgggttggagctttcctcatccaatcagggcggagacttccctgtccagtcccagtgaagttgggcgatcccgtccaatccaggtccctgattgtcccagtcacaaggtggggcccatggatggcactgtccgatcgggtcacatgaggctgcagcgcgcgggatgcagcgccccctgcaggcgcagggccgggtgtgcagggcgcgcgcgcaccagagcgcagcgcagcagctcgcggaagagacgcagcacgtgccagttgtacttggcggagcactcgaggtagccgcagcgccagcccctgcgcactagggcggccagcgcgcgccgcggtccgaagcgcagccgctgcctgtcccgcttgttgcctaccacgaggatgggcgcttcgggcgcgcccgccggcctggtctccgcgatgcgctgccgcagggccttcacgtagtcgaaactgtccgggctgcagatgtcgtagacgagcacgaaggcgtccgtgtcctgcaagctccagtccttagcgtctggccactcctccggacccccggggctcgagccggggccagcgacgtcgccgtcgcggatgctcaagtcgtagacggcgccgtcgagcagcaccgcgggtcggtagaggcgcggcccgtccgtgggccggtggcgctcggggtagtcaccgaacaggaactggcggatgatggccgtcttgcccacgcccggggcgcctagaacggccacccgcaggctacc

SEQ ID NO: 338787 - DNA, 1000 bp, Homo Sapiens; identical to SEQ ID NO: 158794

SEQ ID NO: 338788 - DNA, 1000 bp, Homo Sapiens; identical to SEQ ID NO: 158795

SEQ ID NO: 338789 - DNA, 1000 bp, Homo Sapiens
ttttttttttttttcggtattctgcacacagttacgtttctggcttggttagtgaccctaccttggctgtgggcactgaggtgggaagagtgccatgcggctctacagacagaagccacccctgaatgctgggctccagcctgctgtctgcctgagtcgatgactcgggagccctgtcacggcacaccgccatcctggcagcctgaggcggggacacaagtctttgaccccagcatcgtgcatctaggcacagcacagcagccacctctgtttctagttccagggccaggctacatctcactgcctcttacggggaatgccctggtgtgtgagatcaaaaagaaaatgatttctgctgcctgccagtcttctcactgcccttgtttagccctctctaatgttaagagtcataatgagggtagtatgggttatcgggaaaggtgtctttatacattcactcctttcatcctcacatgcaccctgtgtggaaggtcctatttctccattttgtaggcaggaaattcagactcagagaagttatgtgaattagccacagttataaccttactggttagaacccagatacataactacactcagagaaagagaagccagtccctgggcttgggacaaggaccatgttgaggagcccagagtgaaaattaaagcagaagggcgggcacaatctcacaactgtaatcccaagcacaaagggaggctaagacaggaggaccgcaagagaccaggagttcgaggctgtagtgagccaagactgcaccactgcactccagctcgggtgacagaggtagacctgtctctcaaaaaaaaaaaaaaaaaaaaaagacagaagaaaggcagccactgataatatcagtgtcccataactgttgctccagaaacagtataggatcttattacaccgcagaaagatccacaaagcccccaaacaaaacctccatctgcagctggttctggggactcgacagtgacccgatatcct

SEQ ID NO: 338790 - DNA, 1000 bp, Homo Sapiens
ttcttaagataaactgtaggattattattaaagaacttaaccggaaactttcttggcctcactggggaccacgcttttaagtacttgtaaatcaatttacaggtaatacaataatctctgtgcatatataagcttacttatcctaatctgtactacccaaaacctattgtccaaacaggcagaaatctttctatattaaattgcacatactaaaaaatttttttcacgtgccttgaaattgatatagatcattgctcatacattagtgataaaatactgaaattttcactgtgaaaataattattattcagagaagaaaatattcttttaccaaactctcagttactttgccagataaagtgtcattcccacaaaaacaatcagtgcaatccaaaagaaagtaaaataaaatagaggaatgctatctctggggttcttctaatgatacgaagaataagtcaaaccatttaacttgaggttgaacttttcctcctctaaacgtgttgttaacattggccttactgaacagccaaagtgacttctgttcgtccagaggattttcaaccctctttctttttaaagaaagagttgatagtttcccaggctgagagaaccttacagtggcacctgaaaagtgtgaactcactctaatctgctaaatcttctttggaactatgaaatccccaccttaagtagctaggctgctgttctttttttaattggaatatgaaacaatggtcataatcacagctgaaatgtctcttttctgtattaacagtctgggatacacagctgaaggaagaagacaaactaaatgcaagcaacagacgtgtggtattaaaagaggaacagagaggagaaaagcagagaaaagggaggaacagttcatggaatacaattctaaatttaggtgcaaaagcaactctgtaatatgaggcttctttacaaaacagctcaccgatcatactagaaaatttggaggaacacacacgtttccatt

SEQ ID NO: 338791 - DNA, 1000 bp, Homo Sapiens; identical to SEQ ID NO: 337965

SEQ ID NO: 338792 - DNA, 1000 bp, Homo Sapiens
gggcctattggattttggaggcaacacattcctcgtttgagtgttactccagcacatttatcgagtgacctgaaaggctgccagttttgagtggggtccagaacaggagaaagctctatgacaggtccaggctgttgtgcaagttgctctgccacttgggccatatgacccagcagatccaatgttgcttgaggtgtcagtggcagataaggatgctggctgcagcctttggcaggcccccataggtgaatcacagtggcggtctctaggctttcggagcaaggccctgccatcttctgcagataactactctccttttgagagacagctcttggcctgttactgggctttggtggaaactgaatgtttgactctgggtcatcaagtcaccatatgacctgaactgcctatcatgaactgggtgctttctgacccatctagccataaagttggtcatgaacagcagcattccatcatcaaatggaagtggtatatacgtgatcgggcttgagcaggtcctgaaggcacaagttaagttacatgaggaagtggctcaaatgcccgtggtctccactcctgccaacttgccttctcttctccagcctgcaccgatggcctcatgcagagttccctacgatcatgtggctgcggagcggcggtagttctcagggcactcgaaggccaggcagcggaagccgccctggatgttgaagcaggtctcgttgatggagcagttgtggatgccagtcacacactcatcaatgtcttggcagttgcggccattgggggccagcctgtagccagacgaggggcagctgcactggaagcttccagggatgttgatgcagcggtaggagcagatgtggcccccggtgggcagggcgcactcgtcgatgtcttcacaggtgactccatccacatcgctgagctggtagcctcgccggcagtaacactggtaggagccgtagacgttggcacactcctggctacaggggctgct

SEQ ID NO: 338793 - DNA, 1000 bp, Homo Sapiens
ttttttttttatatatgatttttatcctcacaataattctgtagccaagcagaattggttccatttgacagatgaagaaattgaggcagattgcgttaagtgctgtaccctaaggtgatatgcagctaattaaatggcagatttgaatccaggtctgtctcactctaaagccctttacattatatgctctttacattataaggccttacccaccctatattggagttggccccaattccaatatgtgttccagatcggacctccctgaggacagcaacactctgtatcctgggtcacatttgtggctgaggcacgcccttaattccaaggtgggctccaagggtgagactttcaggctctggggcagtcagcgggaggaggtatttctggacaatgaagaccccatcaaatcacaggctggtgggcagggcagaggaggcgcacccctgccccccactggcctgtcagttcagctcagcggtgtggactcccagcttctgagctgtgggaatagagtctgcacaacgcagggccccgaagagctctcacggtttctttggcaggttcactgggtgtggggcaccgagtgtcctccccagccagggcagagctggtggcaagcccagggcacttctcgctgctctagcccaggcagcccctcctctgggcctgggcggagaggttaatttggggaatggacacaaagagggaggatcgaagagtcagagcctcaggaatgcccagccagagcagttcagacattgagaggagaagctggctctgaggaagatttatttgctctgaggctctgcatcccccagccatccccccagagcctctccctgtggggaacacaggacacaggcagagtcctccccacagcttgcatctgtcccctgaacagggcaacctggacgccaggctggatggaggggagaaggcgatgcagccgcaatggtagtctccatggtgtgtgaggagccggcacctgctctcacac

SEQ ID NO: 338794 - DNA, 1000 bp, Homo Sapiens
tttttttttttttttttacaagctccaatttttttaattagacccaacagaaacaaaaacactccaataaattgtttataaaagcttcctgtcagtatctgtacttatttcctcacagaccagtaacatctggttggcaggcactggtctgaggaccacacttcggtgctaaaagcctgtactatagtgcatccaattcagtcagcagaaccggggttcaagacctgacttcattactactagctggatagccagagaaagatcacttagcctttctaaggtccactttactcatttggatcaggttaattatatctatgattaagctttctgtgagagctcaataataatgtactaacctctcaggaagtacttgaaagttgaaactgaatcacataattggtacatttacatattaaacgtgaattgttttatctgatatctactccatcttcttactgaatggtgttttctccttgaatagaaacgtgttcagttgatcatcaaatacttaaaggaccttgaaagcttgtctggctctaattaaagcacagctacttggtgatcttaacagaaacctgtcctctctcggagaagtgcaacctcttccactgcgctgacagctttgtgggaagagggagaactacaggaaacaatgaagaagtcagaaggtgcctgtttacccaaacgtgtctgcagccatgttcctgcataccccggttagaagaaccgctgaagcactatgctatcagcttaaaatctaggtgactacaaaaccctggaaagtttggcacataaactacattaggcaagatcaaggatgacatttgttctttgattaatcattatcactgccattcaatgtgacctgccaaacatacacaacttacatctttacagcaatcctaaatcctaagatttagtgatgttagtatgcttaaagaacacaagccagttactagctagttccaaaatctcagccagaaatatgtgttaacac

SEQ ID NO: 338795 - DNA, 1000 bp, Homo Sapiens
ttttccaaaggtccaaagtttattgttttgaatacattctccagcggcccctctactccccccaccctcagtccccaatacagaataaggcttgaccacagccccccaccccaccccagaggccccagctgggaggcagagggggcttccagtttggtttcagggcacccccttcccatccccccacccgcctgcccatgggccagtcctaggagcagctggggatgaaggggttggaccggtgctggggtggggagtgggagagggatagcaggcacttgtagagatttgtggcccatgggcggcacccctcaccctcctccgccccccaccccccaacacatggaatttttggttcattataaaattgtccctccctcccctgctgtgaccttgtggggtatgagaaacctaggcactcatggccccctggaggggcagggcaggcagggctggggctgaggagggctgggagtggggcagagcgggtgggtcagaggggtacaagaggcagagaacagggagggagacaaggctttacttcctaagcgattgtaatagaaaagttcctgggtgttaaggccaaagcctcaattcaaatataaattccccagaatggaggtgacccccttaacttccccctccctccccctaccaccaatttgcccagagcttagaaacccacagagacagggaatagcccctagccctgggcacccacccacccccaccatttttaaaaaaaagaaattaaagttttatacaaaatgtggggagggaaaagggaggaggcagggaagagacaagagagctgccctcacctccagggcatagggggcttaaggcagcaaaagaagcatggggggtgcggggcacacaggtcccctgcccacagccctcaggagtctcggtgctccagggagagctgggccgtggcatgctggaggtcagagctcacccgccttggggtgaggggccccccagcctccccaggcccctc

SEQ ID NO: 338796 - DNA, 1000 bp, Homo Sapiens
ttttttttttttttttttttttttttttttactctcaaacatgcattttaatctcccattcccacaaacttggaatatttatttaatacttgaggtattaatttaaaacttgaagcatatacttagtctcttattcctctccaccctggtctttgaaatggaaacataaaagtttattcaccataattttatacacagcttttcaggggaaaaaaaactgtactgggtaataagtatatgtagattgtttcagagttcttaaattattgaaacataccatttacatatgtaaaatgtactatactttaaagataggtactataattagtaaatagattactgttaaataactttttttaaaaaaaagtttcatctatgcacataggctctgagcagatttcagatagttcctgaataaaaatcaaaattgactatcagttgccattttatatatgttaacatataaagaaaaaagagtcatttgaggatggaagatcagctaaaaagcaagttgtaatatttataacagttctgcaggtggaggtggcagggattcattaagatcttgatcagagttgggaggaatagagaactcctgacactggatctcaaggttggaatcttcttggtttttcataaaatctactggtggcaggggcaagttaagtgagtcaagcggtggaaatgattgtattatctcagatttatgatctccacagtcttgattgagacagtccagagatggagggagactagtagaatcatttggaagaggagatacaattgtcattgtgggtttgtcagattggttactttcctgtccttccaaatccagaaggggaggtggtggaggcagacctgcatcatctgaagaagaaacagcagttccaactgttgaaccatcagcactatcttctgatgtaccatttacttgatcttttattttctctgttttggggttgttggagtcttcaatgttttcacttgattcaaacaactt

SEQ ID NO: 338797 - DNA, 1000 bp, Homo Sapiens
ataactctgggggattctcgagtcttcttgccttctacagctttccctgtggcaccctccacccccaaccagtgtctttgagcttggtgagactctgcatacattaatatgaaaagctggaaaagaattaagggctagcgatttctacactgagtacttttaaaaaaataagattgacaatggtattcttttcaatatatggatagaaataatatctaaaatctgttctgaaaatattcctaaatcctggcagagttctgccccagtctaatgtgataaaatgatcctcactgactgagcttttttccctccccactcccaaacctttgaaatttcctgtaacaagatctgacctgtaaagatcccatatacatggaacttctgccaactcccctcaaataatagaaaaatcacagaaatggaaccatttaacttgctgatacaggtttgattttaatcacgtaaagtggaagagtgctttgatctcagttgctaatgatgatggactaatctttagaagaacggaggccttgattggtgatttcatgggaacaaaacagatttctgcattacctctgcctgctttgtgggtcccttagttggcgtacactttctgatagtgcctgccttatgaatgcctgaagtctaatcctgaccttactttgttgcccataaatatctttcaaattgaatgcatcttgcctcttcctgaaactttctgtaggcgtctgtgtagactctgatttgccctaagttcaaatacacagaaatcagctgccttgggcttggcatcaagttaatttcagcaccatgtatttgttttgctttggttttttgccttaatttctgtgctcagatgtcatgccaattacttggtaaagcttgcagctaatagagccacatgtttattacgataaagaaaatgatgtcagtcaacatcagtcctcagtgatgggatacggtagagcactggttatgacagtgatcactggggaaggag

SEQ ID NO: 338798 - DNA, 1000 bp, Homo Sapiens
tatgatttctgggacaattaagctttatttttcatatatatatatattttcatatatatatatacatacatatataaaggaaacaatttgcaaatttacacacctgacaaaaccatatatacacacatatgtatgcatacacacagacagacacacacacccgaagctctagccaggcccgttttccatccctaagtaccattctctcatttgggcccttctagggttggggccctgagcttggtttgtagaagtttggtgctaatataaccatagctttaatccccatgaaggacagtgtagacctcatctttgtctgctccccgctgcctttcagttttacgtgatccatcaagagggctatgggagccaagtgaacacgggggattgaggctaattcacctgaactcgaaaacagcgcccagcttcctcaccgcaggcacgtatcttttctttttttttcctcgagacggagtctcgctgtgttgcccaggctggagtgcagtggcacggtctcggctcactgcaagctccacctcctggattcataccattctcctgcttcagccttccgagtagctgggactataggtgccaaccactacgcctagctaatttttttttgtatttttagtagagacagggtttcaccgtgttagccaggatggtctcgtcctgactttgtgatccgcccgcctcggcctcccaaagtgctgggattacaggcgtgagccaccacacctggccccggcacgtatcttttaaggaatgacaccagttcctggcttctgaccaaagaaaaaatgtcacaggagactttgaagaggcagacaggagggtggtggcagcaacactgcagctgcttctggatgctgctggggtgctctccggagcgggtgtgaacagcgcacttcaacatgagcaggcgcctggctccggtgtgtcctcacttcagtggtgcacctggatggtggaagccagcctttggggcaggaaacca

SEQ ID NO: 338799 - DNA, 1000 bp, Homo Sapiens
gcaagtctcattacatttaaaacccttttttaaacttggtcccttttctgtgccaactttatgtttgtttttgttcttgtttttgtttgagatggagtctcgctctgttgcccaggctggagtgcggtggcgcaatctcagctcaccccaacctctgcctcctgggttcaagtgattctcctgccttagcctcccgagtagctgggatcacaggcgtgcaccaccacgcctggataattttttttgtaattttagtagagatggggtttcaccatattggtctgaaactcctgacctcgtgatctgcccgccttggcctcccaaagtgctggcattacaggtatgagccactgtgcctggcccctattttttattttctgagatgaagtctcgctctgttgcccaggctggagcgcactagcatgatctcagctcaatgcaacctccgcctccaaggttaaagcaattcttctgcctcagcctccaagtagctgggatcacaggtgcctggaacgtgcctggctaatttttctatttttagtagagatggttttgccatgttggccaggctggtctcaaactcctgacctcaggtgatctgtctgcctcggcctcccaaagtgttaggattacaggcgtgagccattgtacccggccgagttacataatttgaatacattgttattaatctgcaataatctgtaaggtattatctccattttacagatgagaatgtgaagaaaatgacttgttcaaggccctcattgcaataaccagagctaagtttgcaaccacgtctcttagactccaaggcccacacactttttactttatgacactgcctccctaaatgctaaagattaaaaactctggtaggatgaatttttacatctctgtcagcagtgggattagaatccatgcctgtgaagagatgggaccgtaactcagcacctaaatggattattttttgtattaaaaatttcataattccctttctcag

SEQ ID NO: 338800 - DNA, 1000 bp, Homo Sapiens
tttgcagaggaatgaaattaagagatttaaagacaaaaacacaggctggtagtcaaagtaaaggtttatccttgcatcagaatggtttaaatcttgcaatttgcatatacaaagagttcagcaacattcactggcattataatcagagcaagatcaaattataaatgtaatcaaagaaaatatgatagttgaaactgtaataacatacatacattataaagactgcacataagttaaacacaacttagttaaacaaacaaacaaaaaagtatcagtaattatacacttaaaagaataacatggggatgtctccaaatgctgaaacacaggtgtcaggctcatttaaaaaagtgtttaaaaacacataaaaataccttttaaaacactggtatgcattcttcattcatatagcacatggagagaaaccgtaaaggcagtcacatagtgaccagatcacacacagatcagaatggtcgtcttctaatcactatttggcatttgaacccaactgcatgcaacaaaggaaagtgtgaaaggaacaatggtgtcggcactgggctgtttgggggctgttttgttatgtacaatggactttctttgactgaaggaaacaagagatgaactttccaggttgcacggagaagattctgagtccctcagggattgattcccccagcgtgaggtgctccaaggcccaggagatcctgtgatctggggccttggtagaggccatgaggctgtaatgacctccccgctaaagggcgaacgctgtcccggacagtggaggggagagtcttgcgtcctggggaaagtggcttctcctttgttcctggaatggaaaaagtttgggaacaggcagaacccctgcagtggacacctggggttggtctaaggggacaggaaaaaaacatgagcagggccctttcctgagggcaccctgaaaaggtctaccttaaaggtacttcttgatacaagagatgccagttagaccattaaaggg

SEQ ID NO: 338801 - DNA, 1000 bp, Homo Sapiens; identical to SEQ ID NO: 158796

SEQ ID NO: 338802 - DNA, 1000 bp, Homo Sapiens
aaaataatattttccagttcttctgaaccaatctgttaaactctaagatgctttcccaacaattggattttccttgctcccatattttgcactactggatcttttcttcctatatttttcatgaggttcatccagcttctcaattatgctttttatttgctgaattgtcttaaaggttgttacagaatcctcgattacaaagttagaataatcatcaggctctttctgtggtccttgatagactgcaatagttccacaagcctcttccatcttctgcagcttaagtaaactgagggtaaaaagggaataaattctttctgtttctctgtcttcatcaatatctatttggatgtctgcagggacacctgcagtacatggcttgcagccgagagtgttttcaccagtctcctgacagcagagccaatttccgtttagatacacagagggatgataaaaactgagcctgttttgattgcatcggctcaccctgcagagtacgtctatccattcattagcttctacacagttatttgcctggacatagagtggtttctccgtatgtattacttggaacatatttttcttgttgaaagagctctcttccagtttttccacagcaagaatgttttttactgggattgtgtagattgcatctttgcctggctgtttgtggtaggtgagctctctgcttgttaagcagaaccatcgtttcttaaaattcttttttccaatccgagttcttccttgagctcttttatacatctcaccttctttcaggtgcacaggctcactcgtaccactggactctttagtttcagtagatgaaatttcatccaagaactttttaactgctataatatatccttcttcttgaaacattttgaaaaattcacacatgaatgtctctttgaaacttgacttgcttttggacagactcccccagcttcccaaagtttgtatagtttttgagatgagagttaatgttctaattgtctgtgca

SEQ ID NO: 338803 - DNA, 1000 bp, Homo Sapiens
tttttttttttttttttgaggctcaaaaactcatctttattgggaagactctgaacaaccaacctaccccccaccttcaagtctggggagggagggccaggaatctgccccctcctcccatatgtacaatcttttccgaatcctactggagaaggtgcccccacatgtggggacagaggcagctgtaacaagctagtgcacgggagccatgtcccttttcctctccggactcagtttcctcatctgtaaaatgggctcaaggggaaacccgtgcaacggagcttctcgccaaggctgaatatgtccacttcagaagcatgaggaagggccaaggggatgggggtgctagacatcctggttgggattgcacggctcctccacctccctccccacccagtgcccctcctctggcatcgcggggctacgtggcttcaggccccggggataggaggccgcccccaaaggccgcctcgcggtaatgattggggaacatgttgctgcccacaaggctggcggtgcctccatccccggggcccggggcctggtacgagtccagtgtcagtggttcagggccgggggtctccccaaccacggccccggcacctccgctgcacacaacagcgctagcgtgtggcggtgccgggggcagcaggtccagcatggtgaagagtgtgggggccgtagggtcgtaggcaaagccatcgtccaggaggtcaggcccgccagggggctccaggccgggcagggacacggtgccagagaagaagtcagggtctggcagcagggctgacggcgggaggaacgggcctgagccgtggttgggcaggaagtggtccaggatggccggctttttcttccgccgtttgctctcgatgccatgggggtcagagctgttcagctccccaaggacgtcgggcatcccccgtttccgcttcttgtccacgccgtagctgtcatggtcgcgaggcaggtacgtgaaaggcaatggctcgctgcagac

SEQ ID NO: 338804 - DNA, 1000 bp, Homo Sapiens
ttttttttttttttttttaaacatccatattcagtttatttttaaacagaggggcacgtacccacagagaagcaggactgagaaccatcatgggggcttgcttgaagtgatctgccccagccttctgacttcgagtgtctcatgatccaatggccatggggacggagctgccccttgataggatgcacttaagcatggtcaattcccccttcccccaaaggaaatggagaaaaggagccaagaagtcaatgaatccctggaatattgtcccagaatccttccagggatggtatacgactggccaccagtccacaaatgtgactggtaagggatctagtaacagaggatggagttgggcagaatattatcctggatgatatgcacccagcactagaatacacctttcattagaatgaagagaacagacaaagccctcagaaaagatacaaaggcagagacattgattagaacattatctcataacagaggtggggccattacccaccattattgtaaaataactgtaactaaccaaaacacatacaggcttctttaatggagttaataaaactatggcacattgggaatcaggggcagaggtactgttcccagacggaaaactgggataaagggagccatgctgacagggccttattccagtctaggttgttagaaaggagccctagcccagaaatgacagcaaatagccataatcattatgtggggctgaaccagaggaagccaggctgagccaagaagctggaagtatcttgaacggctctccaaatccaaagattatccatactctttatccctccagcgatgtgtaaaaccagaaagtatgaaacactggaggtggacatctggtttttatttctaggatgtcttgatacatctcattacatttcacaatctgcatgggaaggaaaaggatggtagagaacatggacatcctgtctcccactgcaagggcgtggaacatggtaaggatacccagctg

SEQ ID NO: 338805 - DNA, 1000 bp, Homo Sapiens
tcatgtaggaactacgatgttttttgcgagcaaaacaagaagtgcaaggtctgcattcccaccaactcgatgcaaagctccaagagcttcctgcaaagtaaagccagcacggagaatgcggtcaatatctgtggcaggaaaaatcaatggtggaagaatggcaggacttgatgatggatggctggtaggtggttcatattcaagtaatggcctcgaagcatcaggacagacattttctctggtttcaggcctgtctgttactgaattctgtatgccctgacctaagtctttaaccaatatgaaattggatgacaaagacttagtttgctcagaagtctgattgagtgcatcctcctcacctgctaaaagtttgggtgaaatttctacacctaaggtgcagtgtaactgattggatgttttagctgaggttacagtgacagaacggttcttatttatggattccctagatttggggacaccttccttatcggttgacaggccatcacctagactcctgaagtttacattttctacagcttctcttccagtgtcagatgaagtacctgttaatttttctgtctccactgatacagatatggcctgatgaaaggagacttgtggacactgttcattctgggtaagatgctcattttgggtccatctttcagaaaggtctttaatactggtttggccctcagctatggtttctgattgacagattacttcttcagatgtattttctgaagctggtttactgctaacaaccaaaagttcatgaagttctttcaaggctgccgttatagacgggcaagattcttctgctgactccacagaaggctgacaactgccacagagacttggagaggagtaatggccatattctttatttgttccaggtatttcaacattagtttctgggggctgtaaatcctgagtggaaatggaatcattcaaaatttcagatgaagggttacattttgatgtttctacttccatcaag

SEQ ID NO: 338806 - DNA, 614 bp, Homo Sapiens
tcaatttgacaaacatttattgaacacctctaggtgccctataccagttcctggggacacaaagctcagtgaccctgtgtccctgtctggggggagaagtgtgtggctcacagcccagtttccctgagagcagaggagcaggaagctcagtatttcttaggcaggccgtcaggtctgaagcggtcggggtctttgccactccggccccattcctcagctttctcgttggacttcgagtcctccaatacagtgctgctgtttccaaataaatagtagtctattaatccctgaagatagaccctggaacggctgatgagtttagcagcccagacacccccaggtcctctttgggcagcatcatagtttccccgagcatagagatatctgtttgaattttggtgattggatatcattatgtcccaataggctctgcccatgtccccaaccccttggagagcctccttgaaaaacgaacgccagctttcactggtgactcccatgaccaaggagcagaaaacaatgcctgtgaaaagcctcattgtgctgtggacctttctccagctgaaatttcagtaaaggcagagctgctggtatcttctggccgtggagctata

SEQ ID NO: 338807 - DNA, 1000 bp, Homo Sapiens
ttttttaggctcaacgcatttttattaatcaaaataggaaccattacaatcaacacatttttgccaacgagaaataagttggtttattcctgtagcgtaaaaatccgtgctttgggattcgacgaactcttggaaagcattttctgcatcctgctggttgtggaagcgttttccctgcaaaaagttgttgagatgcttaaagacgtggtagttggttggcaagaggtcaggtgaatacggtggatgaggcaaaacttcatagcccaattcattcaacttttgaagtgtgggttgtgcaacatgcggtcgggcattgtcgtggagaagaattgggccctttctgttgaccaatgccagctgcaggcgttgcagtttttggttcatctcatcgatttcctgagcatacttctcagatgtaatggtttcaccgggattcagaaagctgtagtggatcagaccagcagcagaccaccaaatagtgaccatgaccttttttgggtgcaagattggctttgggaagtgctttggagcttcttcttgatccaaccactgagctgatcgtcgccggttgtcatataaaatccacttttcatcacacgtcacaatccgatcgagaaatggttcgttgtggttgcgtagaataagagaagatgacacttcaaaacgacgatttttttgattttcagtcagctcatgaggcacccacttatcgagctttttcaccttttcaatttgcttcaaatgccgaacgaccgtagaatggttgacattgagttcttcagcaacttctcgtgtagttgtaaggggatcagcttcgatgattgctctcaactggtcgttgtcaacttctgatggccggccactacgctcctcatcttcaaggctctcatctcctttgcaaaacttcttgaaccaccactgcactgtacgttcgttagcagttcctgggccaaatgcattgttgatgttgcgagttgtttctgctgctttacgacccatt

SEQ ID NO: 338808 - DNA, 1000 bp, Homo Sapiens
ttcccttcacattcaaaataatgcgatttcaagcctgagcatcacggctggcacaaaactagtgtttttttgaacaccaactatcaaatatgtgatagaaatgccttgaatgtcaagataaagaatgtatatattctctgggtaacagggatcaaacagatttttgagcaagaggacactgatgagaggtacgtgtaagggactggatcctgagtcgaagtctaagccgttgcagtggttgcaaccccacttacttctgtctcactcccatccaaacctcctaccctcaatccacaagcatttcaaaaccatgtttctaaaaaccagccatttatatctgtttaggtaagtaacaggagtgaggtggtgtatttacaagttggcttgtccagatatactataacttagtgtctgtatttaatattgacaaccaaaaatatatataaatatcttgcatctatacacaacagggcaggagtctccatgtcttcttgagcagtgagtttgcaggctcccacaggccctcttctcatggtaatagtgtggccctcagtgcaaaggagactagaacccggcagcccagactggcccttcccctctcctccctgcactccagtgctcccaactggtctcaggtaaagaaagattaatttgagtggttgggtaggaagagatgggaaggggcaaatcctaatggagcctgacccctagagtggggagatccaggccagcagaacgggtggccatagccacctcctgggatagaagctttgtagttcatagttcgattagtgtgtccttaggacataggtccagccctacagattagctgggtgaagaaggcaagtgtctcgacagggcttagtctccaccctcaggcatggaaccattcagggtgaagcctgggatgtgggcacaggagactcaggctgatataaaaataacaaaatcagtaataaaaaaattataaaacctgttgcttgtctgaatagatttgagc

SEQ ID NO: 338809 - DNA, 1000 bp, Homo Sapiens
tttttttttttttttttttttttttttttttaatttttagatctgtttattttgttccaaactccttgaggatttaaatgtcccatgtcttgagctctgaaattttgttcgttctagatttaactgtggtgcataagaggctgcatcctactctaaatattaatactgtgctgcttttgccaatcaacattctctccaaaagcacacaagctcacatgtgcacaaccacatgtgtggaagaagtaaattgatatcccaccatattatgtgacatctgaatgggcagatttgggacctatgaatgtcttcccttcatctggagagaagtgggcgactgcctgattcttaagagccatctgcatcttaagcaacaaaagaggtcctacagaaccaccctctggtgacttggtgagagtgaggtggggagaaatggaagcaggggcattgttgctccagtattttcagtggtctctcctgggagttacagggctcctagggcccagattctcctgttccactactgttagaactgacaggatagtaactaggccctttctagggccccttcctacccacagagctaagaaccagtgggttttcctttggggagttgataagagctggactgggaccagcggagggggctcaggactttggccttgaatgaaatcattggaggccaaccatgccccagctgcctgtttgtaacggaaaatcatgagtgggaactattgtcttctttggagcccctcaggacaacctcatcctcctggcccggggatgaccctgccttaaggtggcaagttactgttggctccaagtgacagccaggaatgcctggcaaaaagatgatgaaagggtgggtgacaggaacacaatagacaaaggctcagagaggagaaaaagagacacaaagaggcagagtgaggagagaggctgagctcctaatgaggtgagctgtgctaactgaacacagcctggcagtgccctctgcccctag

SEQ ID NO: 338810 - DNA, 1000 bp, Homo Sapiens
tacagcacaggaagataatatttattatattttaactagaaacagagcagatagcaagttcaccaggtaaaaattttttttcttaaattatgcttaaacaacaataataaaaaacaagtctgcatgtatattttggtcactattatgatcttccagggcacaaaagccagcagcataaaagaaacatgaataatgactgagaatttttgatgtgccaaaaacaaagatcactgcattaaactcctttattttgttaatattattcttaaacattgaacaattattaattattgttatttggcaaaatatcaaacatgcacatagtattcctacaagaatattgccttaatattgtcaatattaacgctaagcttattcctctccaaaattcaatgagttatggttccgctctctatatgtattagtgttagtggtaatatgcaaaactgattttgttttcagggttaagtagcagattgacttcgcatttggtggccagctgtgtaccctaatttttcatctattttcttaataaatttaattacatttcataagccctgagataacgtgctaaggattgtatacttttaatctatactttattccactcaatttgaaccccacataataagtcttttaagttatttacagatggttgtaactaaagcaatgacaaaatttactacttgtataggtaagactgataataaggcctttaactaagagttgcatattttatatgcacttttaacttgctaggagcaactcttaaaattacatctataattctgtcagaaagcaataagtgcttttcattttgcttacttccatatgtgtaaccagattcacttttttcctcccttgtaaaacaactactttcttttccttccccaaatattaatacgtcttccaactgaacaattgctaaaaggaacttagcatttgcacagcacattgacaactatggtgcttagcagagacatatgcccataataggcat

SEQ ID NO: 338811 - DNA, 1000 bp, Homo Sapiens; identical to SEQ ID NO: 158797

SEQ ID NO: 338812 - DNA, 1000 bp, Homo Sapiens; identical to SEQ ID NO: 158799

SEQ ID NO: 338813 - DNA, 1000 bp, Homo Sapiens; identical to SEQ ID NO: 158800

SEQ ID NO: 338814 - DNA, 1000 bp, Homo Sapiens
ttttttttttttttttttttaggatctgtaaactacatttattgaatacttactggacacatcatatacaaaaaaggatgggggcaggtaagaacttgaagaaattaaatatacacattaagtttcttcactaattctagccactaaagaagtacaaaatttgtacaagtaatactttataatgaaattttgatgcctgtcaaaagggtaataagctatacatatactacaataaacatttttaaaaactgtgcttaatatcatagaattttcttaaaatgggttggtaaaatacctatatagcatccattcttacacacatattttccattaaagattgcttaaatagtacaaattcctattgctaagaaattcatggtcaacagctgtatatgaagttcctctaagaaacatcacagcatttgcagtaagtccatttctccagtgaagcccaccttattttcagtttagcttactaccaagttctcatgagaactgtttatatgtcttttgcttggtcatcttcttcaagttttctgatttcattttttaaacaatttatagtttcacgacttgcttttaatctctccttaagctctgcaatctcaaagcttgtttttttcttagcagcttctaatttttctctggttttcacttcaagctctgcaaattctgtttcatgcttataggctcctaatgttagctgacgagatgttgtcaataattgttgcatcattgctgttgggtcttgaaatatcatttcatcatagaactctgaaaccactgtctttttccccagcattgcattggtgtctgattgaaacagctttagcaaatgatacagggttacaggtctttcattagggtcaatgaaaaatattttgatgattatttcgaattcaccccatcctgtttcagtaatttcatatggaggtttagtaacaactcttaaaggattgccatagctttcatgtaatttaaactggattttcttcacata

SEQ ID NO: 338815 - DNA, 1000 bp, Homo Sapiens
ttttttttttttttttagttttacctgtttttattccttaaaagaaaaaaacaacttaaatgcatacatacagaatagaatacacttacttaagttttgacagtgaaaaaaaataattacaggttagatatttaatccaaggtttaacatgaggatgatctcataaggcaatttctttcctttaataaatattaaagtgaatattattctggaagcaaatcatctcctaattcttcatcagcaaaatcatcctcatcgatccttttcttggctgcagtttttggtcgttctatttgagggccaagtgggtccacataggaggcatctatttctttgttactgctactttcataaggttcatttgtcccaggtaaagctctgagtctggcacttagtcgttcacctttactactggcactatagttctggccactatcaccgctagcacttccttctcttttgccacgggagcccccactgccatctctgcctgactttatgcgctgttcccttatttctttcattttttccaacctcttcagttttctggcatattcttgagcatcttttaatccaagatctgtgcagagacgaactaagaaacgcagacattcgacattttctggaaattttctgtgagtatctttgtaagtatctaatgctttttggtagttaccacttcttctgaaacaactagctaccatcagctgccatttcacttgtgtaggctgtataagagaagctctttcaaagtactgaatagctttttcccaaaattgggtgtcaatgtaataggctccaagccactcaatgacttcaatattacaaggaaaatacctatatgactcatagtaatattgaaatgcttgagatttatctccttcacgatcatataattctcctagcttagataaaacttgaggatcggttggaataacactgaccacctgcattagccattcaatagcttgactgggattttccattaattcatatatat

SEQ ID NO: 338816 - DNA, 1000 bp, Homo Sapiens
ttttttttttttttttttttttttttttttttttttttttttttttttttttcagttcagtgaaatttattggagaatgaaaaaagtcagcattcacctgtttagtgtacaaaaaggacactagatcttttaagaaaatatcaggaaactgaagacgcagatagatgcctttcaattgtaacattttggcaaaagtggaaagttcttgtaaacaccaaccccatggctcaaaatagtttttctccacagtacaacattaaaagaaaaaaaaatagtatcaataagttagaccatatttaatcagctagaactttgtccaccaacccccaaaacacaaaacttttcttagcttcataattccttaaaaggagaacaaataaacaacaaaaacaacaacaacaacaaaaaggcaaattcaactgacagccccttggactggttcccagggcagaggggcgggcagtcccgggctgggacctcctgaaatcatcccacctcaccggtgtctgcagggctgcctgcgggcgacacagcaaggtccagctgactctggaggcctcctggagcctgctcggcccttccccggcccggcccggcccaaagagaaaaacaacaacagctattgaaacatgaaggatcagtttcctcggagctctgggaacccgggggtcccaaaggagagagactctcgggcaggggtgggatacactgtgggccctccacagtcagctctttggaagctgtcaggaggcacccctccaccccccagtttagaaaaatagacatctgtatttttgcatttctgttctccctgcctgactgctgatggcagcagtgacccccatgtgatccctgggccctgagtcacagccgccatccaccccccaccacctttccaagtcatggcttcattcagccctaaatgggaacacacgcctcagaccccaccatgccctggggggtccccacatacgcacactcacacacccacacttgcgtg

SEQ ID NO: 338817 - DNA, 1000 bp, Homo Sapiens
ttttaaatagaaacctttatttacaatgacatccaaaatggtcagcaaagcagtcacagctcaccatcccccataagtcatttcatgtggtttcaattctttgcaagataaagaataatttctatttttttaagcaacataatgtaaacttgattgaaactgaattcattctcaagagtataagtcaattcctgagaatttaaatattgctctcatattttattcttcgaaactccatatattagaaaggaagagagaaaacaccctgctcgtttattaacagtgtgccttggagttgaaaacaataaatcaatccttgaggttttgctcctaggaacctaattgtgaacaaaactcacagcttctgcaaataaaaagggaactgggcaggcatacatgtaactggcaatccattctgtttactttcagctgcacccacctctggatcaaagaacttctaggacatcaagccaattatcttctgtaataccctacccctaatatagatacccccaactcacctcagatattaaatactgataactaagtagcactgttattgatatttacacctttcaatccagatgcagtttagaaaagtggcatcataatatgaacattaacaatgtaacttccgtttattttttaaaggaagaaacatgtatctcctttatatcattctgatctttataaaatatatatattttatttatatatctttggattcagcaaaaaaaaaaaaaaaaagtaggtactggaaatatcccacattctaaaagcagatgaaaagattatactgttcacccaacagataccaaggtttgaaaaaatggggggtgctggggtgtgaggagaggtagacagcaggagtacaaagaattacctaaaaaagataaagggcaatacaggtaaaaacaaattatctcaaagactgcacctattaaaagaaatcttgagtttgcaccaaatgaacaagtagaaaatataaaaacttataata

SEQ ID NO: 338818 - DNA, 1000 bp, Homo Sapiens; identical to SEQ ID NO: 158802

SEQ ID NO: 338819 - DNA, 1000 bp, Homo Sapiens
tttttttttttttttttttttttttttttttttttttgaaaaagttgagaaaaacagtgatttttttacttatttatgctgtacaaaattttacaaggtaaaggaaacacaattgcacacagacatttggctcagttgataagtaatatgacctacgaatctaataaatactcacaatatatacattaagaaggggaaacggcagacaattgtattccactatatttttttaatcagaaggaattttaaacttgatttctccgcaacccccacccccaaaattcttgatcaactaaccagttgggaagggcatctgaagaatcactcatgaaactattttgtgtgtgtttattgcgtttctgtgttaagtcacaggacactttttacaaacctcacatagggagaggttgtcaaggcacaaaacctgcagtaagtttccaaaaaggggatttaattattttttctacaaaaatgttttttaaaaaaggtaaaaacgtatacccacgggaggcatactttctgcacagaggcatcttgataaccagatacatacagtacagagacatccagtcatcgctttaagttctggtgccaacagcctggtctttaatactcctacaattcatagaatctctaatttcctcaggaactgtttccacagccagcctggaggccgccaggccagagggaaatgtgctcatgtggtgcacacagcccctgggcagcacagggcagggcctcccgtgcctggcccagggctgcacccagtgtgtgctcccaggggctgcagggctgaggaaacagagtaaagtgctctagtcaggagactggcacgtgagtacagggatcctgggagggggtgcccagatccaaatacatctttggtgtatgtgtgtgtccagcaggcccacggctgcaatcctaccactgcttgtaaccgtgggctttgtatgaccctaccaatgggctcgagacacatcagggaacaagatgagctcca

SEQ ID NO: 338820 - DNA, 1000 bp, Homo Sapiens; identical to SEQ ID NO: 158803

SEQ ID NO: 338821 - DNA, 968 bp, Homo Sapiens
ggttctccagcaacttttattggccaaaggatgcagaaggatatatggtgtctgtggtttaattaacaggatcgtttataaaacaactttacatttatcttatttttaaaattcttgcttttgaataagctgatgtgttagaatagacatgctcctatcccatgcaaaaagctgttcaaaaatgagcagcttgcaaatctatcataaatgagacattgaataaaatattcttacagtgaggtctaagaagtagttcagtctgagaatttgcttcagatactttttgaaataaaatattcaaggcataaaaaaagcaaaactcaaaatatctaaaacagatacatactgatatttttatcctagtcatttcccagagtttttatgtgtctctgtgctctgctgattaaaataaacaacaaaagcagtaggcatcttctaactaaaagttaatttactagtcttcaactaaaaagtcacagtggaagaacatatataaggtgaagaaagctttttaacctttcagatttaaataatactgcatttcaactttaaagaaaggttccaccatatattttttgcactgacattttaaaatacaagaacaagtctttgtaatacaatatatacttcaatatacccaatataccttatatgaattaaaaacatgtcaactggataactgtagtaaggcatttaagtattcagcagaagccataaagaaatttcttaatgagtggtgtccatttaatattaactggatttagtaggtttccttaaaatgaacaggaaacaaaagatgtgaaaaacaggcagtgatgccattatactgaattccagaaaaagcacagtacaatgtgttttctagcagggagaccagcaaactggaagtggatgagcggccccagcttacatggtctattgtatttgatcaactgctgagagaagtattagtagcccagtaggtttgg

SEQ ID NO: 338822 - DNA, 1000 bp, Homo Sapiens
aaaactctggaagtccaccaatggagactaattcctttgttagttctatccaaacttcacttagtttattaacataaagataactggaagggatacgacactttcttcatttaagattcccagtggtgaaaacaaagaaagtcactcattggaactataaatgaaacttagctttcttattccaggttcctacttccttccttaaccctccatatttcctcctattaagtcactaggcacttataattctacattttactgacctttcactgattataaagtaatttaagtgatttttgaaagtaaacttaattccagtttcagacttttaaattaaaagtggctcagttggatactgtctcttaaacacagtaatataaatattagtatcttggctaaaatgaattattgacaattttaatacatgttgcacagtacatattaatatagaaaaatacatgttatcagcagcatgatgttgaccatgttctaatccattccacctgctcaaatattagtgcaaataattatatatttgtaatgcatcactgctgtctagcaaaatctatgccttctgaataaatgactttcctctgaggttgactgctatgtgaagtatgatgtgatatattcctatttaaactggctttgtatggtgaggcagactgcaaccttctaaaccacttagaaaatgggcgagtgtgtttaattactcatctttccccccaaaagtcgataatcacaaaacaaaggttaatggtacctatcaaataataatgataaaatacctcgggtctagttcaaaaataggaattttgttaagcccaggggcagcctagctgctttaatttggcaattaaaatttctgttctctaaatgtcaggtttctgtcccctatacatttgaacagttgtttcctccctaaatttgtaaagagaaatgattgatcactggtagaaataaaaggtaagagttatgacagcttttaaaacccttaaca

SEQ ID NO: 338823 - DNA, 1000 bp, Homo Sapiens
ttttttttgctgtttgaaatggatgtctttatttacagaactaagagtcaacctctagacagtatgacaagcctcctagtaggagggactacccacagcaatgtgtccatccagtcactaccagcctcacttccagcagatgatgatgttggggtcattttcaagccgctcatccagctcatggtagctcatgcctgtcttgcagcagatctcgtcatagctgtggcagcctgtataaagccgggcagggtggctctgctcttcccgagtcacccgcacaggatacttctgtagtcgcctgatgaggttcttcataagcccgaactggatcagcttccgttcatcaacatgctgcagctgctgggggtggcggccaatgaggtctcgcacggtagtgccagggctcaggctgcagtatagctggaacacatcccggagactggccctcttgtgcccttgcttggtcacgtaggatagacatgcctcttgcagggacttgtcatctaccaggtcctggaccttgggcgttgggcagtatacattggagtactggaggatggacaccagtgtcacaacgccgtagtacagcaggttctggatagcaatgcgcaccaggttgagctccacatctgcctctgctgaaatcttctggatgtggcggaacccatcaatgtagggcaggatttgttgtgtagtgaggtcccactgtgagttgaagaaatcctccttgtctttggtaaagacaggtacatcatactcctgggccaccggagggtctggccgctgctcaatcaccttcaagtggatggtgttggactcatcaatgggcagagtgcaccggcctgaggcatttagctcctccagcaagatggtcatgatgggcaccaacttctgcttgctctcctccatggacacgaagctgctctctagctctagtgtggtcagatagccagccagctttttaacaatgggctcgagggcgcaggtcttggcctgggca

SEQ ID NO: 338824 - DNA, 1000 bp, Homo Sapiens
ttgtctttcaatataagtttccttttattttgaaattgaaacagcaaaatgaagtggtttgtggctgaaacaaccttcacgggaaagaaaactggagtgttcgttcatccatcaaagaacaaactccaacgtgtgagccagctgccccacctcccccaaagcaatgaacagattaaaggatgggaggaaggatacaatcaaaatcgggtggtgatggctggcagatttccagtaaaatacaattttcaaagttgccgcaattacagaataagctagcactcatatttaaaaaaaaaaaaaaaaaaaaaactgtcccaagcagtaggcctccagctcttcccaatttgcactcatcaaaatacatcgttccctcttctgagtaagtgatgtttcagaactgcttacaaatccactttgcctcaggggaggaagctcttttgattcactctggttttggggaccaggatcaagatcctggagaaaagggagactccaaatggtgatagaggacgtttattcattatggtaacacataatctgctgaaattcattttgaacgtgcttttacatagcagtggctaacataaaatctgcacagaaatgttacaagtggctccccagcccccacagccgggaagtgccagtcaagatttaagcatccccaaaacaaagcctttattcctgggggagcttattggcaggggaggggggacaggggtgactgaagtcagctggctgggaggggagaagggagagaagcacaggaaggactcactggcaggaatagggtgggggatggggtgagacaggccaggggcagactgtgaaagctgttacctgttggaatagctagcacgttatcttaaacaagtgaagaaaatcgccaaagagtgaaacttatttatgggggaaaaaaaagcttgggaaattaaaacaatccagtggtcactggaaaatgtctcccttttaaaaaaaaatttttttttttggtttttttttt

SEQ ID NO: 338825 - DNA, 1000 bp, Homo Sapiens; identical to SEQ ID NO: 158804

SEQ ID NO: 338826 - DNA, 1000 bp, Homo Sapiens
ttttttcttgttagctggatatatttctgttttttctttttttttcttttttttttttttttttttgtcacagaacactgtttgcagtagaggaaactggcattgcagtctggtggtataatggcttgtccacataaaccagtacatgttcatcctttagcgcaaaaagccctaatggcgcgtaccctattaaaattcaggacatctccaatattctctctctctgtttttctttgtcatcttttttttttttaaataaacattttcaaggtttgtccaaaagaaggccatataggttcttggctagcggaagacaattcagaacagctgttgcacacttggactgtcaccttctccaggctggcagttgatatcttattttttttccaactcatttttattaaaaaaataaaaaaatgctccaactatcagctttacaaaatctctaagggaaacacaagagcaaggtgctgaggtaaaaacacctgaggtagcttcttctgtgtgtttttctcgttaaaaaaatctgtgaatttaacgccctgggccaacaaccttggtaaatttctactttcctccacattttttttttttaaagaaaggaatcattttgctgaatattgatggcttatacaccaaaatgcaaaaagacaaaatacattctttcattgtggaattttttctttgtttggttgattggttggtttggtgggttcctgttttcctcttccaaaacgctaggacaagtaccattgactcttgttcttttgagtaaccaagtgtaagttgaggctggtttgtgtgtttcgcttttgttccttttgtgtgatgtgatactcagagcactgctttgcctgggggggggggggtgcgtagatacgggattgagatggagggatgaggaaattcaaaagaatggagatggagaagaaggggaggggagggaggggagagataaacagagagagacagagaattatatagcagtatgcaaaaaacc

SEQ ID NO: 338827 - DNA, 1000 bp, Homo Sapiens
cccgaggttttttttttttttttttttttttttttttttttttttttttttttttgttttgagagtgtgctccaagaggtttattagtatccacactggggagctctgggttcttgcccagaacaaggggctgagaacatccagtcaggatgcaaggccaccacaggctgaggggactggcactggggatatggcagggtttcgccttcaagcacagccaagacaccctcctttgcccttggagtctcctcctgaagagcatggctgtcttccccatggagaaaatgaggtctccagaggtttcctgccttgcccaatatccaccaaccccctcagaatctagaccccccctgtctgttcctcacctcggccaggatcgggggacacccccattttgcagagtcagccccacccccacctcagcaggccccagctcactcctagaacctagtgactaaagtctggagcggataaattctatcaggttctccaactgctcctccaggcgctgttcaactccatggttctcgatgacccagtcaaagtccccgaagttgtccaggccacattctgactcagcatcgtccacccctggcgtgaacacccagccccgctgctgtcggctctgctccaacgctacaacgcggaccgtctgcgtcacggccccataggcctcccgaaaccactggatgtcagacactctccgtgtgtcactcaccagccagatgggctgggagatgccctccacaatcttcctgcaaaagaagcctgggtcagcctggcgtttctcctctccccagcggatcatgtccttccgaaaggcctccttgtaggtgctggtgtccaggagtctctggaagttcaagccatgctcctgagcatactgttccttgagtggaccagagagccggaggacagcacagacatcagctccaagtctgctctgcagcgcctcggtcacgaagtccttcccggatttcctcttgccgctgaacagcag

SEQ ID NO: 338828 - DNA, 1000 bp, Homo Sapiens
taaaaaaggactaaactttattgacaaactgctgcagacattttgacataagtttaagctacctatttaggcagacttacacatgtagcatttaatcttccgagaacaaaatgggaggacggtacaaatccaattaggactttaacttatgtacaaagtggattttgattcctttttcattcagctgcagtgtccctttttatatcatgctagtgttgagacatacttgactaacttgggaacagttcgatatattgacaaccgtcaacttaagaaaatcaacagcttttggccccagcgtccaagtgaacttttcatggagtgcagaatctcaaatggacaaaatactttgtctttttaaatactgaaaatttaattattagtactatgactgaaagattcttcatggctaaaaagctctgcatcaaactcaattcaggaggccttccctccccaccaccatcaacctcttcaaaacctactccctccctctaagtatctctcaacacagtatgtctggggctagatttcaaaacccacgtaatgaaaaagtcagttttacaagcctaattttgttgtttttttttttatatcaattaacgttaaaaattgcatcaactatttaattcatgaggatctttcatattaaaatttaaccttaagattcaaccgccatgtgcttttataaaggaaacattttttagagacgtctgagctcacttttacatggtggtgcctactgccgttaatgtttgtgattttaaatcttaaacagccctgaattttgaaatgtagcctagtttgggattctgcaactacaactttacgggatgcctcaaatcaaaactaagagaaacttaacaagcctttacttcagaacctttaagcaagcaatgtcatttttgaaactaacaggtttgtgtgttttttttttttactcaacttcttttttttattataaaaggtacacttctgtttatatttaaacaacaaagaaaaa

SEQ ID NO: 338829 - DNA, 1000 bp, Homo Sapiens
ttttttttttttttttcagaggttttagtgacatcttttatttcattgtttacttcaaagttgtctttaaaactaagcacacagagaaacaaagcctagaaacggactggctgtgtgttcacagaaatacaaacaccacgcggtatgtgctagtagggctgctctgaagacaattacaaagaattggaatcacaaaatcaagtggttatcttatgaagttctagaaaaatagattttttttatattcaaatgcaagtttaaatatttccccttcagcagtcgttctagcaaaaccaatttggcagcacaaaaggaaaaaaaaaggaaagaaaaaaagaaaaaaaaacgaagaaagaaacaaacataataaaaatacacatcagcatcaaaggtcaacacaaggtcaaaggtgagagttcaagcatcagagaagctgaagagacagggatttggacgatgtacttgacgccacatcgacatgctttaggcacaacgatgaacaaacggcaggaatcagaagaccctctcactccagtctcagaggggagcacgctcagtagggcttgctgtcattcttcgaacgtttgagctgcactttaagccgcttcatgccaatctgaaagccgttcatggactggatggcagcttgggccgaaacaggattgtcgtaacttacaaaaccaaaacacttgctcaggtttgtctgcttgtctatgaaaaccttggcagacacgacattcccaaagggcataaacatctgcagcaggtcctgatcaccaaactcctggggcaggtggtagatgaacaggttggctccctctggaccttccttctggcttccagcagcaccaatactctgctgtgtcagaagattctggttgtacagagtggggagcgcagcagcagcatattgctggatacccgagtaggcctgagtgagggcctccatggtgctcccggtgccattggaaaggccactgctgcccaggccaccatttaa

SEQ ID NO: 338830 - DNA, 1000 bp, Homo Sapiens; identical to SEQ ID NO: 158806

SEQ ID NO: 338831 - DNA, 1000 bp, Homo Sapiens
ttttttatctgggaggggcatttttataggacccataaccattgacagttaatatcagccacaataagggaccttcaggagccgctttctagacccagggtctctgggaagcctcatcccacaccctctcctgctgtccagggccatctgggagctggtctgagtgtccactgagtccgtttatttggcggtctgtctcactgggtttgcacgacagtttggacatctctgtgtggctccctgtggctgaaggcttgtcggattttccgtaagaggctcccccagggctgtctatgggtccgtgtttgatatttgggtggatctttgggaacgcgagtccaggagagggtccattcgtgggaaaaccacccagcattgtgtcacgcgcgtccgtgtgaagagaccaccaaacaggcttcttgtcccatccccagtcactaggagagtccaagtgccagggcagggctcaaaggtggcgcttcatgtgcaaggccaggtggtcagagcgcgaaaaagcacgtgggcagagctggcagcggaaggggcgctgccccgtgtgtttccggtagtggcgggtcagctcgtccgagcgcgcgaatctccagccgcagccttcccacgtgcaggcgtatggcttctcccctgtgtgcgtgcgcagatgcgccttcaggtgggagctcttggtgtagctcttgccgcaacccgggtgcgcgcacgtgtgcgctgcctgcctcttgcgcgcccacgaacgtcggcctcgcttggatggcgcggtctcggctatcacacctggatcctctgcagtccccccgagtccagtgcccaccgtcccgggtcccaaacaactcaggaaggagggggacgtggcgggaccgggcgcgggtccctggagcccgcggaagagctggaagtgcccttggtactgaggcgccgggtacatcgcggggtacccggacagtagcccgtagggggcgcccgacgccgcaggcactgaaagccc

SEQ ID NO: 338832 - DNA, 1000 bp, Homo Sapiens
tttttttttttctttggagcacttgttaatccgttatgatttattagctgtacagcagtagatcctcctccccagctttcaaccccattacatattttattacaggtctcatgttggcgtcctaaaataatgaaaaatatcacacagtacagctaagtacaaaatgcatcaacctagagtctgatagctaactgatggctctcttaaaagcaatacacagaagaaaaaagtgtttgaaatcagtaagactgaggctctctaaaaaacacatttttaaacatgtgacagttcatgtgcaagaatcactttttagttggttttgcttcacattattttattttttgaagatccaaggtttaaattactgacctagtgaaattttctggcccagcttataagggctgctgtgaaccactcataatcacccttctgccttaacagaagatttataaaacacaacaatcagctacaaacagggcaaagaaaatgtcgatgggaaatcataactgaaagttaattatacaaggttcaaatgctggctccgtgggctggaaatcatgatctgccacgtgcatgtccgtcactggtgggcagtggtctgggtgccattctgctacatgattgtgatccaattccttgtcaacatttacacactacagagtctgtggtaacttaatttgcaagtaattaaaatgctgggttttcttacactgcacttcttttcaacctcttaattaatggaaaagattaaaatgtaaaaaaagttatttacaagcttgaccataccagaaactttgccaagaaagaggcaaagctttcaggacagaacctgatcgtagcatgccatactactggtgtgcagctgactccaagcaaagggagtcagggaaaagcaaaagcaaaaaacagtttaaaactctaagtccttcccaagtatgcatttacaattaaaaactctcttgggaagaagaccatagaactctgggaagcctggtggcca

SEQ ID NO: 338833 - DNA, 1000 bp, Homo Sapiens; identical to SEQ ID NO: 158808

SEQ ID NO: 338834 - DNA, 1000 bp, Homo Sapiens
tttttttttttttttttttttttttttttttttttttcaaatctgccatttaattagctgcatatcaccttagggtacagcacttaacgcaatctgcctcaatttcttcatctgtcaaatggaaccaattctgcttggctacagaattattgtgaggataaaatcatatataaaatgcccagcatgatgcctgatgtgtacaaggctctcaaaaagttctagtgatgattaatattactggggatggggtcacctgccctgagctgcaggagagcatggggtgtctgaacaccaggtgagggggaaccggtgagggtttggggcccagggatagactgagctttcctcactgggtcctctgcagccggccatggctagcaccatgcgctctgctgccggagcaccgtgaggcccagaaacactgggcaggcggcatccctgtcctttcggtccccaaccccgttcctctgagagggtctgggcaggctggacgggtagagaggtggcccggggggatgaattcattcagttctttattggtaatctgccccttaacttagggtctccctgagctgcacagaaagacctgatacctactgggaccagacagggggcacagagatggtccttgtcccagcgtacatttcccctgcccacttcagggcttatgttctggcactgagacttcgtggggtacctgtatcttcaagatctagatctcatcattctccacttgaacaatgtgcacctcaaagtcattttgggtgttcttagactccagtgtttcccctggaagttccttggcctcctctccattctccctggcctctgcctggcccccagcttcccctctgggcccgggggcatctccttcagcctctgcctggcccccagcttcccctctgggcccaggggcatctcctttagcctctgcctggccctcagcttcccctctgggccctggaacatctccatcagcctctgcctggcccccaggctc

SEQ ID NO: 338835 - DNA, 1000 bp, Homo Sapiens
tttttttttaaattgctaacacgtttattcatgaatgaagccaagaagaatttataaatgcattttaataccttgctgataaaatagtaacattccgtctttgcaatctgatacggaatacaggaagatactggtaaaggctttgatgtgcatatctatcataaccaggtaatgagaacacacacgaaccacctactttagtgttacaccataccaacttctcagaaaggtcagcttcaagctctactgggtagctgagtaaatagcgtccaatgtttaaagactggggaagcggggagaaagatgaaaggagtaagcagcacacacttcaaagcccacttttaagcacacgacattatgaatattaaaaataaaggatgcaaacaaaaaaggcaattcagcattttcagaaagagcatttggcaatattcaacgcataaggagactgtgcttggggccatccactctctccagcttctcaaagtgtttccgggcattgcgaatgttgatcagagtggccgcagaagggatcgacggatctgacatgaccaccatcacgtacgtatttgaggtgaagatgtcgatgaaagcagcgaagttggaattcctaacttccatgctctggaaggaagcggccaatttactgcagctcagcttgaactgtttgatgatgttgctgatcttctcaaaccggtggacgtcgcgctgctctttgcactggtagtgggaaataaccaagaatgtagctctttcgaacagcagaacttcatcggcctcaatgatttgggcaaaattcctgaggttcatctccagctgctgaacgttgggaatcagctggtagacgatgctggaccaggctttgtagagcgtctcatcccagatggacgttcgaaaacaagcacactccagcgggcgagacagacgcctcaggtcttcctctcgctctttaaaaatcaggtcacgctgatcctcctgaaccagatccattttgtgcaccagg

SEQ ID NO: 338836 - DNA, 1000 bp, Homo Sapiens; identical to SEQ ID NO: 158809

SEQ ID NO: 338837 - DNA, 1000 bp, Homo Sapiens
aaaaatacagtggctttatttccattgtttatagtccccagtatcccatctgataagaaccttcaattctataaacaaaaatatctcaagaaagtatgttacacaatagtacatataagtaatagtttggcagaattttaaactctagtagttcatacccccaaaaaacaaattttaaaattcaaaaataacagttttatttaacatatgttacaccttaacatttaaaatatcatgctctagttaaatatttcatcaacaacactgtatacaaataaaatattacataaaatatatttaagaaaatgttttggtctttgatctgaacaataaataaaaacacaggcacttctacatagacagggaagcagttactactcaataataatcttgtataagcagcatgtgaaaatatggcaataacaaattctggaattttaaactgacaaaccatctatgcaaaagtctgtaacttcaaccttttcactcaagttcaaaatacatatgccttcctggtccatattgaaaattcactaacacgatatggttgttagcggcaattcaatcttcagttggccattaaggaatcacactgattttcaaatactaaaattacactatgataccaccaggaaaccaaatacaagaaaaattaaaccctctttctccttattatgaccataacatcacaacaagataaattagatgagtgtcacaccatgattctcattttgcaaaattaattaacacacaaaaatactgttggggtggcaggaaatttccacaattgaaaaactgaattccacaactgacaactgaaatttcagttttctagacaatttaaaatttacccaaatcccataaaaataaacataattccatttcacgaaaaccactggataaagtttaacaaagtctttgtagccaataggtttataaatacctgaataacaaataaatcagtcattattatgggaagtaggaatattatagaagaggg

SEQ ID NO: 338838 - DNA, 1000 bp, Homo Sapiens; identical to SEQ ID NO: 246471

SEQ ID NO: 338839 - DNA, 1000 bp, Homo Sapiens
ttttttttttttttaagacccaaaagacataaactgcatttattgtgtagaaattcagaatggctcaggctacacaatagtagtcagatgtaaagtgtactaaatttcatcttctagaagggttgattttgaattcaatcatcatttgagagaagacatcccagctcgcataatttcatcaaccaggagaatgttggtggcaatcactgtgcaagagtgaagaagttgtttttttacacaataattatcccaaactcctgcatctgctgctaccattggctcacctgtattcaaatctacgcccacaagttgttttgactcgacatgctcagcctgaacttttactaatgtttcctgtgggtcataaccagcattctgagcaagaaccttgggaataatgagtaaggcatcagcaaaagcttggactccaagacgagctcttccttttatactgttcttatatgtaacaagagcttcagccattgccacttcaattgcaccagctccaggaaccatacaaccatcttcaatggcatttttgatagcacgaagtccatctcttatggcatccttgacttgtgtgagagtatgcttatttggtcctttaaccaacaaggtaacagagcaagggttaacacactcctcaataaaagtgaacttttcttcacctaatgtatactcatacacaagaccagcatgtcccaagcaatctacagtgagatcttcaaaagaattcacggccattccaccacaagcaagagagagtctttccatatttcttctttttgctctgcgaagagctactattccatgttttgcaagagaatctaaggaaaatggatcaattcccttttgattaatgacgacaaatcctttatttgactgagcacagactttgtccttcaggtctattattttttgtactctatcttcaataaattttctttcagcttttaccaatttctctttctcttctgcagtcttataaaagaaaccagag

SEQ ID NO: 338840 - DNA, 1000 bp, Homo Sapiens; identical to SEQ ID NO: 158812

SEQ ID NO: 338841 - DNA, 1000 bp, Homo Sapiens
ttttttttttttttttttttgatcaagaaaacaaggggaaaactgaaatttattgaaggcttacatactgttaagagctttacaaacattctaccttcacagtctttaatggagcaggcaattggggttacatagcttgcccaaggtcatgcagctagaggtggcagagctgagaggccacctagattttttggactcttcgtgcctgccttaccaccccattgcataggcacacgtcaccctgtacttaaacacctgggccatgcctttgccctgaccatagtgcccttgcaaatcagaaagagccactctcattctgagggggacaagaatttgttttcctcctccagtgctataagaaggggcatctcccccacagtctaaatacccatgcagcacaggacagaagctctcccagtccagagcagcagaggcaagcagcaagagaccccagaggtaggagggaaagggacactttggggggtatacagcaggtttctttttgtgccagccagtgcaagaggatgctgggggctgctggtcccaaccagctggtgcctgtggctggatgtgttcagtgtgacaagaagcctaggtcagagcccagtctcccggctgcccccgttgaggctgaggctgtgggggcgggtaccacgctccagcctgcggccagacaggagacgccgcagggaagagctagagctcagatctccgcagctgcgaaggtggaggctctctcggccaggccggccccacaggctccggggcacctgcttatgtccatgagctccagtcccactggggtctggggctttcctggatatctggaggaaacgagtgaccaggccccgacctggccagctgccctttaggtcccccagggagtgggcaggtgcagggcccgagggcaggggaactttttggaaggtgggcacagggcgccgtttctcggctgaccgggcacgtagcaacttgggggaagggcagcgggctaggcgga

SEQ ID NO: 338842 - DNA, 1000 bp, Homo Sapiens; identical to SEQ ID NO: 158813

SEQ ID NO: 338843 - DNA, 1000 bp, Homo Sapiens; identical to SEQ ID NO: 158814

SEQ ID NO: 338844 - DNA, 1000 bp, Homo Sapiens; identical to SEQ ID NO: 158816

SEQ ID NO: 338845 - DNA, 1000 bp, Homo Sapiens
ttttttttttttttttttaaaattacaaaaggaaatttatttcaaaagcataaggggacatttacatttaaacaagatgataaacaggtgtcttgcaaaagaaaaaaatccatggcattaagtttttcattcaaattcggaagcaaaaataacctaagttgtgcactattgccttaggaaagggaaggggaagggtgagggataagggaacagtcaactcagtatcaaacttgagaaagtaaagtcacttctgctcagttctgagtttacaaatatgcttataaagacaaaaagtggtaaaattatatttaatgttcaaatttatttagctgtagtctctataatttctgtacttgaaatggctttgggccactggctgatctatctctgaggtccagattagctggtcagttttcaaatggcaattttatattcctttgttcagattccaagggagtttaggttcagctcatggtcttttggaatgtttagagattattgccaccactccatagccaagctgaccaacttttgctcacttgtatcattctagcctttcagaactattttccccatacacatgtgcagtaattctaataaaggagttttgcttcttctgcagtgtagaggtaatggtaatgaagacacctgcattggaatcacaaactattcctcagaaaaatacatcagactactagaaatgtcattcaggcagttgatttgaatagcaaacttggggagggaagattaactgtgaaacaaaaatatacgaaacattcaaatgcagaacaaagggtctatgctactaaaaatgcccatgacattaaacactccacaaaccccccatctgttgttttaacctaaaaattctattggctaacttatacaataattttgattaataacctgagaagttaaaatcttgaaagtggcaaaagcaaaccgagagagcatcccttacttattggtaccatgttatcaagtcactttttctgggtag

SEQ ID NO: 338846 - DNA, 1000 bp, Homo Sapiens; identical to SEQ ID NO: 158819

SEQ ID NO: 338847 - DNA, 1000 bp, Homo Sapiens
ttttttttttttttttcccatggtatgtttttaattctgaaaattaactgaaggagacaagagacaatttaaaattacagcacctctgatgaatagttaaatggatcatttatcctacagggataaactgtaaccaaaacagattgtggggctctagactccggacagcaccaaaaattcaagttgcatatgaagtcctaatacttacagttgatttccattcagtattcggtattttgctcacctgagaatagatactccccagagtgtatagaggcccctgtatattcaatgatgaccacaaagaatcaaacagaaatcagaaatgacagtccatggctctatggtttttaatgaatagtttgtgtagattttcccatgaaacacccctgatcttagttgggtgatttatagacctatgatgttggtggtgatcagctaagcaaactagccaaacagaagtaatttcaaattaagtcacttttactttgtgctattactcattattggatggtgggtgaggggaaaatacaaaatatatgtcctagaccaatgttgtccaatagagctttctataatgacggaaatagcctatattggctggtcagtaaggtaaccaatagccaccagtggctgttgagcacttgaaatatggctagtttgactgaactgaattttcaattttacagctagctgtggttactggttactatatttggcagcaaagttcaacaatcctataggtctatcttaattacttttataggaatgaagagtatcagaattatttctcaattatatatatttagttttcatttctacagagaaagaggtcaacaaagttttgtgaactaaattgtataagtttcttttttaggaaaggacttcacagagaacaaggcaaagaataagtaatacaacagcaaatttccaaaaaattcaagtagaatcaaactttgactatagatttggtcaaattagtgctaaacagcctctttaa

SEQ ID NO: 338848 - DNA, 1000 bp, Homo Sapiens
aaaagtcttttattcggatttacctaaatagttcgcttgatctctctttgatagagaaatgaaatctccagttctatagactataatgaaaagtattgaatttgcatatttccataaaatagctttgcttcatgctttgggcatctatcatagttgccaaaaagactatgtccagtaaacataactgtcacagtactgaagctaaactatcaaaattgtctttggtgttaccacaacacacacagtctttagtcagctgactattcatgttgtttgaaaagcatgaaaatacaggtttttagcatgcacacccagttggaaaaggacttgctcctccggaaacaccattcattcgctttgcagagctgagagcacctgtgcatgtgaacaagcaggtgggtatctcactggtttctgcagtcatcactttccttgataggtaagttttgataccagccaggggagagtccaggcatttaactcagcttatgatttaattttccacagtcttatattaaatcctagaagatcacttataacacctgagacagcagaaaggataactactcttgtgatattgtagattaagggattcattgtcagtccatagagtctaaatggtgtgtccagctctttcaacaacttggtggacagctttaatacattgtttactagagtaagctgttctttcttatttggctttttttccatcttaagatataaattaatctgttctgtaagtaatattgaaacattgctgtatttcttattggtttcagaccccagtgaggccagacgcaataaaaaaagtagtaaagctgtttcccagatcaaaaactcccagttataagcatcattcagggaagttttatgtccttggagaacctgagcacaacaaatgaaagcaatcgaaagtgtcagtaggaaaaccgaggatacaaccacatcaactgaacgctgtggcccccgtctctttagataggaacgcagtgataaccat

SEQ ID NO: 338849 - DNA, 1000 bp, Homo Sapiens
actgctttgtaaatagctgttttcagtttataactgggactgatctttacatcagggtttctcagcctcagcacttctgacattttgggaggggtaattctttgaggctgctttccttgtgtattataatctatttagcaacatccctggcctctacccaattcatgctactagtatccctccaattgtgacaaccggaaatgtctctaagaattgccaaatgcctagtgaaatcatcctcgctccacttttggcaaccactgtttcacatgatacctgtttttttgaggtgctttagtattctgtgatcctaagaacaagggtttcatctcctgacataacacataaacattactaattgaactcttcgctcctaagggatgttacctatggggaatcaggagctggaaatagaagatggtatacatgattttgattatttctccattcctttaattttgggacgtccccctcaagtaaaacaaaacaaaactgtttaaaatacactaaacacctaattttttttcattatttctattgactgtaaatgtggtctcttctactgctcacacatttgataagagtgatgtccttttgtcttttatttctatttgctcacaacttgactttaaaataaaggttttccgtgtgtgtgtgtgtgtgtgtgtgtttttaagcagaaagctatccctcaaggtttacagattccagtaacgtggatctattatagtgtatttgcttattatactggttaggattaacaaataaacatacctctcagagattcatatcttctatcaagactcctactgagcaaaaaggttggtagacagaggttaggatctaaagaatacagatataagaagaaacctatattctttaagttgagtacctaccctaaactaaagtttagggctcaaccccacaaatgaggatatattttaaatactatcactaaaaactacaaattatacatcattttcttctccttgttttccat

SEQ ID NO: 338850 - DNA, 1000 bp, Homo Sapiens
tttttttttttttttttcaataagaacaagtttaaaaacaaagagcatggacaggcagtttacagaaatgccaacagccagtatgaaaagagactggctttttaaggtaatgaaatgtaatttgagcagtgacattacactgggtgggcaaagatgactgtcactctcgtggtttatgtccccttgagtcaatgggtaaggctggaattaaactggcaagtggagaaatgacagcagcctcacctggagtctgtttttttgggtggagcaacaactgccatgtccacagtaatgatgaatgcttctcgagccacgtcgctgccaaggtcttcacaggcatttctaaaaatgaagaatccttgactgcagacacgcaagttaaaaatcactaattatgttctcgatccagggaatatagttaataacttttgtgtagactccatactgacctgcttccccacaattcatggaaccccaggacactattcctcccacaaaccacctctctgtttcactatctagaaacaccagtgcccctccgctgtcacctctgcagctgtccttgcccccactttctaagccagcacaaagcatgttagcagttacacttccccttggatagggtggcttttcatatgcagcagtacatttttgatggtcaacaatcggtatgtcgacatacattagatttctagcaagaaaacccctttgggttaatccccatccagatgcagttccaatgtcatctgtcctcataaaggattcagcttcttttcttggcagacaaataggcgtgatgttgctattgattacaactttgttattcaatttaatcagtgctatgtcattgtcaaagccagcatcatgagtataaccttcatgtataaaaacagcttcagaccaggcttgtgtataatgaggtgatagtcttttcagggtgcccattcgaatgtccagggcggatgcatcatgtttttgctcatagacggcatgagcagct

SEQ ID NO: 338851 - DNA, 1000 bp, Homo Sapiens
aaggaaggaacaaccactctcaaaagagaaaatctcctcttctccaggaagaaagatggcatctgatctttaaagtcatagtccaaaataattttctttttcttcctgttcatctttatcttttgaagaattaactaagtcccacagttaaaagcaatgatttataatcagaaattattatgggaaacaaaaaaagaaaacattccattttcaccttttcttcttggcgcacaccgaatcagagaaaatagagtctattctcttcccacagatacaattgtacgtttgaatgcaatcaatagttgccattcttgttgaggtcaaaaatgcacattctcctctcccagaagaaaaacgcattattgtagaattaattccaggagatgtgccattatcaatccatttccacttactttccctttcatcatatgataatccgatccagtaattattttcataaatctgagattgaatgaaggctctggactccagcctgtcttcaatatcttaggtccaacattgagaaacagagtccaagagaataaaagtgaatgtaaaatacgagttcatctttgtcatctatcttcaaaagggatgatctacaatgttgacaagtctgtttacatcccttccagtctttcttctgcatggtaaaataataacagtttactccacaacaggacccgtggtcttcagagaatttgcctgtattttgcaaaactttaaaaacgatctcattttctctatgacatctgttcttttgtataaggcgtgaatccagttcctttttctgctgaaagctatttttgagaacgtcatattttaaagtcttatttgtcaaaatctgctcttttaagtagttgtcattttgcatgatgtacttttcactacagtttcttagaatttcctgccgttgatgtttttcttgaatacactgaaagatatttgtcaccaacactgtgactatcatcagaagaagtaaacagaggatcccaagagt

SEQ ID NO: 338852 - DNA, 1000 bp, Homo Sapiens
ttttttttttttttcctgtttgctatcctttattaaagggcccacatcctcatgggactccagccaaaccagtcaggtcccccaaatatagcaggaggcctggaaggggaggggaatgacttatgatcctaccatgcctcccaagaaacagaaaccaccacagacagacagacagacggacaggggctggggagaacttgcctcactctcagtcctctcccactttcccccacttgaaaagaaagtcaaacactggctacgcagcaccccagccccccaccccacccatagcagcgtttgtgggacacaccccctttgcaaggggtggccccgaggcagcttcctatctctctcttcactttggtttgctcctggcaactccgtgccctcttcctttcctcagcctccggctcggtctcccccttgtcttctatcacctactcggaccttctctctcatctcctgggcctccctgccccagcacttctggggaagcagcgtctcgggcgtcttcccttctcctagcaaggggccccaccaggccctctgcccaggatgtgggactcacacagctgccccactctccttgaggtcaggggcagaacgctgccgtctcattcgtgggggagtagtgtatggggggtagcggggccctgggggccgctgggctgggtagggttggggtggctggggataagagttgtgctttttgggctggaagtgctggggttcaggctgtgcagaacccgctccccgggatcggccccctccatccagggagttcctgcggggatggtgggaccttcggggactcggaggccggcgggcaggggtggctggatggggagtgacctcctcagggggttggagcggagttggagcctccccgctccccatccctggccaagactcccggtgctgggggttgctcttgaaggggaagcgtagcttgcagtcgtgagggggcacaaagcgggctgggggcctgcgcagccccccg

SEQ ID NO: 338853 - DNA, 1000 bp, Homo Sapiens; identical to SEQ ID NO: 158820

SEQ ID NO: 338854 - DNA, 1000 bp, Homo Sapiens
tttttttttttcattcttaaagagatttaattatttgaagtgcataaaaggggagggtacatttaaacctctgctatatcacaaactgctgtttttgttgttgttttattaaagacccaccagttttactcatcttcaggtttatggctatagaatgtggggaaaacaaaaattggcaacagaataggaaaaggtaagcaaaagtctggtcaccagaatgtcttctccactgcagaacagacccctttaaaaaagaaaagcaaggaaaatagctatgggctatccacagccagtaatgatagctacagttagaaagaaatgagaaaggaaaccaggaggcagagtctgggaattcacaagtctcctctcaagacatatactaaacccggacctctgtgaggattaattttccttagatttccttccaacgtcttaaccctaaaccaagttcccctgtcaattcaaatataataaaggcagcattccacaaggaagactgatttgaggattgaagtgatttgccaacattctgagaaagcttattttaaaagagcacggctttaaagataggttctagtccttgaagacagaggggttctttgttagtgagggctgtaggcatatggcccaccaaacagagcaggacacaaaagaagaatcccctaatgttgtttgcaggctaacatccactgctactgcaacctggttgggcagaggcaaaagcaagcagccccttctggctgtgcaacagtagaggggcagaagaagctgtgctctaatggctctaaataatcagcatttagtgttatgttaggacgaaggatttattccacaatataaactgtaacatttgatacaagctaccaaaaaataggggagaaaggaagggacagggagaaagccaaaatacagctgtggcaattacttacagagaagtctcttttctacatcactagttcatcagtgacactagaaactagacatttgtgttctgtacatc

SEQ ID NO: 338855 - DNA, 1000 bp, Homo Sapiens
ttttttttttttttttttctgctttgctatttaagtcctctatgaccttgtttgtttacatgatctataaggcagagctatgagaattcctcaataattgtaactatgccctttaatttttaatttctaataaatttcattatgcatttttatgtcatttggtacagttttattgtgcattatacttgttattaatatgaaattctcttaatttttttttacttgctttaaattctttgtccagtgttaatattgctactcctgatttctggagaggcagtgtagtgtctttgaacatgcctcagtcagacttaaatctaaattcaaatcatggttccataatttatttactagtttttagcaatccctctgagctttagtcttctcatctatagactgaggttaataatatctgcctcatataattatagatatgtcatgttaaatgagtatatgaaaattgcttggcacatggtatacacccaacggatcagttatttttgtctccccagtacatctgtgccctttcttctttaaatctatggttttatttatttacaaaataggaatattttgcagatagcatatcattagctttgcagtttgagtctacattttaaagataaaaacctattttcatttactgtaataatcacaacctttgtcttcatttaattttcttgtttccttaccatcttttgctgtacagacttagtttctttgcttttttttttttttttttttgcattgatatgaatagtttcactaattccattcatggttactgtaaacattcttaaaactttgttttatgggattatcagagtaacaaaataatgtagtccctttatggactataagtaacttaatgcttttctttccctatttcatatccccatatttggtgcaataatttaattcacttacttcattattttgttttgcattgtattttacacctacatttacactattaacttatttgtacatacttaaatgg

SEQ ID NO: 338856 - DNA, 1000 bp, Homo Sapiens; identical to SEQ ID NO: 158824

SEQ ID NO: 338857 - DNA, 1000 bp, Homo Sapiens
gtgatactataaaagttatttattcgctatacacagaacatgtcccctataaaatgtacatgtaaatcactaaaaagtataatttggtgaacattttctcaattacagaacatactaaatcagttaggataacagctctctgtctgcctcaaaataatctaattatagcacccagtctcctttatacctaatgcaaagttaaatacttattttgggggttatatcctagcatgtgtttggtgaggcagagtaaacaatttattataactctagtatattacagtcactgcacaataaaccagtttattacagattaaatcattttttcattatttataataatgtgatcaaatactggatacttttaaatggcagataaccacacaattacttatccttgatcgtatattgtgttctataattacattgatacgaatggtgtaaaatattgttatgaataacacacctcaaacaaaacaatgaggccatactgtaatgattcactagattgtgctcagtagacatttactgaataagggaattatctatttttctcaattatccagtacaatgatttgcccacagtaagggctcaataaatatttgctgaatatactgactaggaaagaggtgagaagagatgggccctcttagctggatgtcaaatataattggaatttacctgggaaggagtagttaagacagatgtaaactgcatgtggtgtacaagtaaataaacacagatgccaacaaagcaaatgattaagcagaaaacactggcaccaaaataaacaaaggcaagatttgccaataatggcaaaaatggaacttttatattggaccataccttttcccacccaattcagtttgagacagaccaacagaggcactgtaagagactatggctgtcttccttgatattcagacatcctagtttccaataatttattatggacctgttacccatgaatcaatataaacctattcatatttagggatt

SEQ ID NO: 338858 - DNA, 1000 bp, Homo Sapiens
ttttttttttttttttcttttttttttccattcccacctccagtttattatttcttatgtaaacatgtaagatagttacatcccaggaaaaagggcaagtgtttttctctgacaacgaagtaacaactaccttttcaagatcttttatatgtaaatggagtaaatgaagaggctgaactcaaacacttttcatttttctgtcatatcagaaacataaactaaatgtgaatatgttaaatgaataaattctatactttgtcatacctgaactttaaaaaaagattccattttcctgaaaatttttagacatatcatgcaaacagacactctcctaggaatgtttggagatcattccgtgctactgaacaggaataaataatataaataataaccatcactttcacaaaacacccctcccccagcaaaaatctcaaagtgctcacaaaaaattttacaacaatcttacaaggcacacataaaacttaaacatagtttcaaccaattttttttcaaatatccaagatagtagatactaattcttaaaaaatcagagtactattcttttaccctctcctcccatctccatccttcccccttccccccacgccattttataataggaagcaaaaataagaaaagtacttcaatcactagtaaactatttctgaaaagaaaatattttcacaccaacaaatggccaatcttaggtcaaatggaagcaatgaactatgaatgaaaaattagcaatgagctatcacactttccagtggaaaaagatccactaattagaaaaattatgtctccaatggagtacttaagtaacaaagttcataaagacacaaaaccgtcctctcttgctttcccctcttctgttctcaggaagaattaaatacaaaatcatggaattttagacctggaaatgatctttcaaatgaccaagatcaaagttattttacatataaagttaaaaagttcaaggagaaattcagcacaatgtcgc

SEQ ID NO: 338859 - DNA, 1000 bp, Homo Sapiens; identical to SEQ ID NO: 158826

SEQ ID NO: 338860 - DNA, 1000 bp, Homo Sapiens
aatggaattaagtaacatttattttacataaaacaatttccagagaatacatttaaaaaccatctagatactgattttttagcattacaaaaaattgagaggcacaattgaagtattcaaataaattgtgaggggtggaggtggggactatgctcactatctatgttgttccttagtcacttaaaggctctgcgtgcaagagtctttacatgaggcagtagtgcactttcatttagtaggaataaatcacataaaatatatacttttatacagaaagtgttattgtgttgtcattttcaattacttataaaaacttcatttgaattgcacaaaagttctctttaaaattgataactcccagaagacagggcttagaactgtctaaataattcattacaaataattaggtttccatttatccatagattaaaaaaactatgaagaattacgttattcaagtgggacatttaaaacttttttcataggaaaataggtttacatgtttgtccctagtcagctaaatttcccaccccccaactttaaaacagatcacaggatgtccaaagttttaaatcagagtacctatatcacagtacagtgtggatatgtttccattaattcattttatgtctcattctattatagtatcaaattagcaaaaaggcacctgggtacattcttcagaacagttttggtcatttaaaaaaaatcacacatttataagcagtgatttcaatcatgtttaaaaacaaaaatattaaacaaattcatttcctaatccagatgatacagaatccaagaaatttctgtaggcacttcactttccatagaacttcttgttcagcaggtatatgagaaggtttacattcactttaaccttatcaaacattttcattacagctactccttcatattgcatctgaagtaaatcctgaatattgagttgcaccttttccatctcaacaccaaggaattttgatcttacatcgaaaatgcctac

SEQ ID NO: 338861 - DNA, 1000 bp, Homo Sapiens
ttttttttttttttttgtaagtaaacacgatttttaatttttattttttatggtggacagtgatcatttgccccaacagccatctgaagccaatagtcctgattattaaaaatcacaaagttatataaatgttctcctccttttcgaaaaccatgttcatttttttcccaagaaacagggctgtctgcaaagccttgaacggacagtgtaacccatggagctaacttcggttcatcaaagtagtgacagagatgttccaataggagacagatcttctctggaagtatgaagccagtgattgtacacaaataagcttttgccaccactgtgcttggctcaggacagcaataggttgatatgaaattattaggctcattatttaggtcgacattactgaagacggcgccgagccagtcgaagagctccagagcccggcaggacacctctggcgttccctccagctcgctgctctgcagcactgggcactggagatctctcaacgtgctcagtgctacttttggctgatgctcctgaatttggtacttggaaaaatatgacatcattgtcgattcttctgaacctgttttatgccaagccaaaagaaaatcaaatttcaatggcttcttttctttgaaagaccaagatattctttcatacttcttagaatccaagtttaaggataattccatcaaatcaatggaaacaataaatttcataatttttctgccagaaaactgagatggatgaccctgaagtccagtttcttcataagtgtctttatccagtgacaaaattaatttcccatttggtagcagggcaacagtattatcttcatcaatatgtgtattgtatgttagtgcatagcaagaacctttctttataaaggtactgatgaattcaggtgtaattaattcatgaagaggtaaattcttcacaaagtaatagggtccagtgttcatgaccaggtttttcagttcttccgatagtatcccacattcag

SEQ ID NO: 338862 - DNA, 1000 bp, Homo Sapiens
ttttttttttttttttttttttttaaaatattaagtaaaatttttattttttttgtaaatgatttgacaaaatacttatttgggaaactattttcattggtttggactggaaatgggtttaaactatactttacatatttcttctcctttttctggcaaagaggccttctttctgggtacataagtcacgctggacaaagaatgctttctgaatgtagacagccttttcctaaagttacccccagaaaagaaatataggagagggtcaaagcaacaattggatgcagccagagacaaggttatgaccacggacttctgcattctaaggacagaatcacagggtttagtttcattgtgtaaaaaatgaaggtgaatggtacgttgaatatgatatggcatgaaactgactaaaaaggcagcggtcacgaccatgatcattcctatagcctttttatgacttgacagattttttttcattgatttttttagtaaggtcaaaatgatcattgtgtaacagacaattataataacaaaagggatgataaagccaacaaacaatgacacataatgcaagaccaaaacatgatttttagtttgattgtcttgtgggggctcaaagcacttggtattatttttctcatctttttgtggtttggccattagaaatggagaactggtcaaaatcacaaaaatccaaatacctacacacacaaacctggcttttttctgtgtaaccaaattaatgttctggactggaaaaacaattgcaatgcaccggaaaaagctcatggctgtcataaagaagatgctacaatagaggttgacatacaaagcataggtgctgaggcggcacaagaagtcaccaaagagccaaatgcctttgtgaacataatagaccacacggagaggcagtgtgcacacacaaagtagatctgctactgctaaattaatcatgtatacttggaaggctgacttcttgtgataggtttttatgaggaca

SEQ ID NO: 338863 - DNA, 1000 bp, Homo Sapiens
tttttttttttttttttttttttttttttttttttgggtttctgcatttgaaacatttatttcaggaaatacattttcaacactttgtcatttatacaaaaagacaaatttctcgggaggcacgtagcaaaaggccattgaggaacagagcctgatgaaacgaacaatttttcaaagtctggttacagagaaggaaagtgaagcatctcaaggctgggatgctgctgcccacccccaccccaccccgccgccaagtgacattgaggctgggcaggccacatggcctgggccctggcgctggccactcatttccttcaaaatcttggttttggcaaaaacatggcaagtcggcaaagtaaactgtctcgccagtgggggtggtgaggggtccttcctctcttgggtggggagggagtcagacgcccagtgccccaacttccatgcacacacactcacactcatacactccttctcgctgaccttctcctggctgcaagcagccagcccggtgcctgcagatgcacctggtgatgtgtgcacctgagtggagtctcatcaggcccctctttctccccaggagcaagacaggtaacaggaagcaggaagggactttggtcatctgtgccctgcaaagacagcccccatgggtcccctcgtggggacagagggtgaggggccgggccgtgctgccacgaaaccttgctcttcagctgtggactgtgcacccctgacgcccgttctctcctttctaggggttcgttaccatgggctctgaggggaggggcccaggcacgggtagatcaacagagtcaggctcgcctggcctcccacctccccagctcagagagtcagcaaggcctgggccaggaggggtgagtggcaggggtggctggctgggcattaatgtaactacagcccagtcttgggccaaacccagacactagacagacagacggacacgcatacacatggacacacacacacttccctggtcacttgg

SEQ ID NO: 338864 - DNA, 1000 bp, Homo Sapiens
tcagcaatcagattgtggcatgctgggtaactgggtccgcagccggtccacctcttccgacaggctctgcctctccaggagaagctggttctgcttgctgaggagctgcaccagctgctgggctgtggcctggctgtgcttatccagctgccttagcctttgcttcatcgtctcatgtactctcccatgctggacacactgttcctccaattcttcatttcttctctgtaactttcccaatttatcatatgtataccttttttcttgactgagttgagctatttcagatctggttttttgagagatttgttccagtttcttggctaatgtacagcattcttcctttaactttgtcaaaaatgtattctgggaggtcagcaacaaatactgttcattttcagttttgtcatgctgggcttccatttgctgtatcttctgtgtcagctcctgctctctttgctgggcctgaagggcttgggcctttgcttccttgctaaagctctgctgaatgctatctttttcctgtctggtgaggtgcagttggtgctcagattcgcccagcagttctgttagtctcaggcactcctctctggccagggctgccttctgctgctcctgttccaagtgttgtttgctttcatccagttctattctcaatttctctatttcctgatctttaatttcaagatccctgttagtttttgctctgaactctctgtgctccttttctgcctcatccttctccatgttggttttattcagctgatagcgcatttctccacacacctttgtgacatccatttcccgagaagccagctggctttgaatttcctccagttgattaatagctgaaatcttttcctttgtaaccttttccacctgggcctccagttgggcaatattctgagacaagatcaacatctttgatcccatgtactccctttctttcgttatttcctttttcatcatgtctttctcaatggcccttttctcttgctga

SEQ ID NO: 338865 - DNA, 1000 bp, Homo Sapiens
tttttttttttttttttggtgaactacagaatttattaaataagaaagctatcaattggaacaggaggaaaaaaaagttttaaaaaaaatctataggaaaatagtcaaaaaagcatttagtgctcatcgccgtccctctgaggggggccgtcagaaaggcaactgggacctgacagacccgggcacatacttgaaattcctgaattctaacctgcattgtacaaaatgccacttgaaacgtccaccagaacccccagccaaagaggcacatctggacagcttcacagcacggaacgtgtgaccttggtccccgtgggtcccggaggaggacagcggcagccacgcggtggcccctgcgcactcaggccatgactgcagggaccacccactggggccacaagagtgacccgggagccagagggagccctgagcatcggtggaaggcacaggtccctgcccggggtggccatctcagaggcacatttagtgtttgttctacttatgaaatcaaggacaaccaattgtacttatcttacaactgatgttctgggatgggactggaaaacactgattccagaaccactctttttcttaaaatcactggcttttatgacaatgtcttccaagagctcattagaatctataagatcgcaggaatttcgccaagaagggctgcatagaaaccacagagacaactcggccagggctgctcccattgtggtggccaagaactggctgagggcacgacactggactcttgcgatcaacactttactctgggtgaagactgcatatttaaggacacaactgcacatttagatcgagcggtggtgacctcagggtatacacggagcttcatgctgagaacacccaggggtcctcaagagtcttcctcctcgtctttaatttcagaaattctgtctatagatttaaggatttcggcaacaagattcagtgtctcagctccggaaaccagttgcttgatggaagcctgtgcact

SEQ ID NO: 338866 - DNA, 1000 bp, Homo Sapiens; identical to SEQ ID NO: 158828

SEQ ID NO: 338867 - DNA, 1000 bp, Homo Sapiens
gcggccgccgccccagggctccgccggtcctgtctccgtccctgaagcggtgcgtcgctcaggtgagcgaggtgtcgtcgtcgctgccctcgccgcccgcgccgcccatccgctcctctctgctctcggccaccgcgctctcgtcgatgttctccagtgagtccgcatgctgcaccgacagctccgacagcgccaggctcggcaacgggctctgctccgggtgcagccacggcttgaagtgaggcaggtgcttctgtttccactcggggtacttgaggcacgccttgtacatcttcttcatggccttgggagccaggaactgagaagatttattcaccacccacttgggtaaggagcctttggggtccacctgggccaggtaggtgatgacgcagctcttgggccctgtgctctggatgaggtagcccgtctggatggacacagctcggaccaagtctttccgaggtgggtatttgggatgtttgactgagtagttcataatgatgtaatcagcgcccatggggagccaggagcggagggtgatgacatcacggttcttcaggggcttgggacacctccaggagtaatagcccacgtcagcgttgactgtcaagcgggcgatgtcaaaagtctcaatgacgttgctgtcccatttcttgcggtactcaatgtcgtgtaggacgtcgtagagtgtctcggctggcacatcacagcactccatccggcacttgatcttgtgcagcgtccgatccatctccacagcctgcacccagacagacaccccagccctgctataggtcaggttccagcccacctcagcctcacactctgaccggaagctgcgaaagtcttggtcatcgggcacctggacactctcacggcccaggaccggccgaggcccttggggctctgtagaggccgccagcttctccatggggagtgtggggaggcccagggccctggtcctagtccggctctcctgggtcctccgcggaggctc

SEQ ID NO: 338868 - DNA, 1000 bp, Homo Sapiens
tcctttctgccccaaaatattttttattcttgcattacatttgtgtttccaattgtgaataaaaaatgcttagaaagtggttacaaaacagcgtgaactggacaggaggagcagctggccctgagggtccgtcacttctccacttagacggcgtgaagtgggcctggcgtctaggcggggtcagtcaggcttctcactctcaggatctggtgtgggcacggacagggtcggggcggctccgggaatgaccgtggtggacagagggccgggcgctgggggcagacgtggcatccccactcctgctcgaggtgcggtcatagcccgcgcctcgccaggggcagcccagcctgcctgggcctccatgtcttgcagcttctgggtctgcttcagctggttgagcgtgggcttcagctgcgcggcccccaccgtcttgctcgtccactcgtccaccagcttgtgcaggtcgtccgtgaaggtacccttcttgttgttgctgttgttcacctgcgcctggacgtgcagggcgggctgggggcctggctcagggcctggggccaggctgctggtggaggacctactgctgtgttctttgcctaggcagagacgcttcagggcagaccagatggacacagatacgggtccactgaggaatcgagcacgaggtttgctactagacttataggtcactctctcagacgttgggtggtaaaccgtccagccttggccacgcgctccgcctccatcactggctaagccggagcagatgtccgaagacagggaggcccggacggagcagggctgctgggtctgcactgccttcccgctcaggcccgtgctgtctgcagtgagccccacactggcttgggcagggtccttagcgggagggcctctgctggagtcagccaagtgacctgtgctggaggccacgaccttgagctgccgcaccaggggatttagcagcttgcctgccttcagcttgctcttgctggtttttctccgg

SEQ ID NO: 338869 - DNA, 1000 bp, Homo Sapiens
tttttttttttttttttttttagacaaaaaggcatctctacttcacaagtagtgatttccatgggcctacacaaataggcctgattctgagatctgggggtctagagatcttcctaatggtgaagatcttctcacaggtaaaggagtagctgggccaggacaatatcctgagaaaaacaaacttgagagaaacccagaagcctggacaagccttggacagacgactccaggcatattgaagatgcaactaagaaaattacatcaggagctaccatcaccccaacatatagcccaacatctacaaagtctcccaccagctacatttattttcttgaattttctcgctcttctagccccataaactggtgaactccttgagggcaaagactgtgggaaattctgtccagtgttttaaagtcctaatccatgtccttttcccatcaggaaccaccctaataaatgaacttcagcccatcatcagggtaatgccaccagaagcaatacgcactattatccagtactactggcattgagattctcattgttctccctagaaaatgatgctttctggatgaggaagagaaggtaagcagaactacaaggctgtagaaggtaggagacttcatgattcttctgttttgctcaattcctctaggatagagagcctacagaactctgagcattattaaaagggtgtggatatttttgttattaaaaatggaacaaatcatacagatctggtcttccttcctgccatgacacctgcttgtaacctcacactcggatgaggggtaagtcatgtgaaaaggtaagtcccctggtttccattttgacatcagagtcctttatgcagccaggacttactgatcatgaagcatgcaggcactatgcttgtcctagggatgagaagatgagaaatcttagaaccaatactctcattttacagatggaaacctgaggtccagagagttcaggtgacacatccaaggtccaaaagcaa

SEQ ID NO: 338870 - DNA, 1000 bp, Homo Sapiens
tttttttttttttttttgatttgctaaattattttttaatggagaacttctctggagacaggaggctggctgggcagggagctgaggcagggaggaaaagtctcccaggagccactggttgaagggtggacgggaactgaggacagggccagtaccgtgctctgtggaactgtccagacctgccgggagctgcacctgggaagcgaggctatccttccagcgtcgaaggtcctgctgtccctggggtttcgtcactcctgccgggtctccaagcagtccagcaccagtgcagcctgggtcttggcttcctgcaggaggctggaaacacgatggtggatctggtccttaaatgcctcgtctgtgatgtccctcaggttgatgagcacgttgaaatatgcgccaaacacgcccatctccagggctttggccgccacctggaggtctgaccggcaggccaggttcccacaccgggccagttcctgcagggccggccacagcgaggccaccgtctccgccagcgtcagcggcacagagactgcccgcctcagaccctcctgtagggccgccgtgcgcctgtccttttcctcaggtgtgttcttggggagcctcattgcttccaggtaggcggtgaaggcctcggcgtcggcatccaccagcgtggttagcttggccgaagcctcgcggaagggcgggatcaggcgccgcatcgtcgtgtccagggactggaattggcgccgcccgtaggtcatgaggcccaccatggagcccagcgccgcacccatggccgcagcggccgccgccaccgagccgcccccgggggccgcagagcgggcacccacctcccccacgaaggcgcgcagggacttgctgcccaggcctcgctcaggcccgcgctcagggaccaggtactcgatgatccgctccttagggctgaaggggcacagggagtccaggcccagccggctcaccaccagcctgatccgctgctcctcctccagga

SEQ ID NO: 338871 - DNA, 1000 bp, Homo Sapiens
tcaatattcaattttaaagaatttattttcccatttgtagagtaacattattgtaaaatctacagttatcgcaatacctgcattgcttaaaagaattcctaagaattttgttaaagcatattttttttaaaaaactgaaccaaaataatgtacattttatctctaaacattgtgtcattaaagtccatataacatcttccgtaaaatcaatgtgatgttacaattatatacatgatctgattcttctcctaaaggcttctctgaccatgtatgatatccaagatagatccaatgcctttaatatcagactgtagagacaattatgatcctaaacaaaagaaggaaaagctgtatatacaagacagcaatatgacagtttagctgtttgcagcatctgcttggcggggccatccttcttcttcaactccagagtcatactcctcttcagaggattcttttgttggagcccggatgtatcctggttccttttttccttctactacttctttgtcaacctccacacatacgatatcagaattagggacttcaaacattggttctagtaacagcttttccattatggaccgaaggcctcgtgcacctgtttttcgttctagtgccaatctggctatagctttcaaagcatcctcagtaacattcagttcacacttatccatgctgaataaggcctggtactgaggaataacagcatttcgtggctcagttaatatttgtacaagtgttttctcatctaggctatgcaatggaaccaccacaggcaaccgtcccacaaactcaggaatcatgccaaactcaatcagatctctggcttccacatgacgcaataaccgatctttttcttcaatgtcttggtgagtattcgattccccacttcgattagcaaggtctgcagcagctgcagcccttctgccttttcccagattagatggtgttccaaatccaagatacttttcatttttcctcctgctgatgattctgt

SEQ ID NO: 338872 - DNA, 1000 bp, Homo Sapiens; identical to SEQ ID NO: 158831

SEQ ID NO: 338873 - DNA, 1000 bp, Homo Sapiens
ttttttttttttttttttttcaaggttataaaaattactttatttcaaatgtgaaaatataaaaaccacttacatataaaatttaagagtattgaaagatctaaaatttaattttcagctttagctccttacaaatatacttaaattgaatgaaattgaatggaattaacctaagtgtccatcaactgataagtggataaagaaaatgtggtatatatgtaccatggactattactcagccataaagaagaataatgtattttgcagcaacttggacggaactgggggctgttatcctaagggaagtaactcaggaatggaaaaccaaatactgcatgttctcacttataagtggaagcttagctgtaggtacacaagaacatacacagtggtataagggatgttggagactcagaagggaagagggcggaaggagggtaatggatgaaaaattacctattgggtacaatgtacatcactcaggtgacaagtacattaaaagccgagtcttcaccactacacaattcacccctgtaagcaaaaagtgtgtacccctaaagctattaaaataaaaaattttaaagatactatatccataacaggcatacatttgaagaatattaatccttaagaggggaaaataattacattttttcactggtaaaaagcgcagaactgcagtgttcagtttgtagactgaccaacaccctctccattccaaagggttactcagagacaattataggaacctcgttgttgttggcagtgactggtgaaatggccacattacccatttctgaacaataagacatgaggagacatgaggagaggtttgctgtgagaagctctgaaaaagagttattcaagtctatgaaggagactcaaaaaatggctcattttcttcctctggttgctatgaggtttgaaggggcccatgaaacagctacagccatcatgctaccagagtctgagaatgaagccagcgctaaagatggcagag

SEQ ID NO: 338874 - DNA, 1000 bp, Homo Sapiens
gcagcttcccaaccattttatacagagtcacagtgtcagaactctggtggaaaacagggtggggtcgggggatgacatccaactcaggaggtgtccatggtctcgcctttgagttcgttgaagaggaaggcgtcctggtactccttcatgtactgcgtggagcgggactcgtccaggaagagtgagtagacccgcttgatgtcatccacctgcacttctgtacccttgcgtttccggcacaccaagctggcagctgtgatgagctggatggcgtagcgcagtgacgtctccagcccgatgcgggtcagcaccgtgtaggcgtcctcactcatctccacatcttcttcctcgcaccggatgcggaggatctgcttcgtgtctttctcgctgtagggggtggtggagacgataagcagccggtccagcaggtctatggggatgccgtgagggctctggtagctggtgccccggattcgcgtgatgccacggttggtggccatgatcaggacaggcgccatgtcactctccagggcccggttgaggaaggagaagctctcgatgtccagcatgtggacctcgtcgatgaacagcactccagggatgatctccgccttgccctcctcgcgccactcagccaccttggcattgatctgctcacggacttctgacttgatctcccctgtgtcacctgagaagagcgccaggaagccctgggtgcgagagttgatgacgtcgatctcgtgcagggacacggtgtgcaccacctccttgcgtttctggagctccccatctgggcactgcacgaacttggtctgggagcccatagcgtcgtagtcgcgggcgcgtgtgaaggagcggcccagcttggagatcttgcccgtcgccttgtcgatggtgatcacgtccccggcctggaccttgtccttggtcagggactcaatcatcttggtgcccaggtcgtagatggtctccatctctgtggtcttgagggtcagtttgc

SEQ ID NO: 338875 - DNA, 1000 bp, Homo Sapiens
ttttttttttttttttttctttcttttttttttttttttttaatttgagatggagtctccctctgtcgccaggctggagagcagtggtgcgatcttggctcactgaaacctctgactccctggttcaagcgattctcctgcctcagcctcccaaatagctgggattacaggcactgccaccacatccagctaatttttgtatttttaggagagacagggtttcaccatgttggccaagatggtctcgatctcctgaactcgtgatctgcccgcctcggcctcccaaagtgctggaattacaggcgtgagccaccgtgccctgccctaaatttcttataggaaagccaagatcattcatttcctactttttttctttcctaattcattcattcgtggcttgtagttttccagtttcatcgcttgatgtgtaatatttacattgtgattcagtttaatgcactttctgacttagttttctcagctacttcattgattattgagaagtctgttgctttatttcaaaattgtagagacattagttatttatactgcagaattgagtgacccctaaaagttcccagagtctcctggggtagatccaggctgggtggggtccaatggtgtccactgggggggcagctcccatgcattccagactccatggagtgtggggtctgcgtccccccctgggctagtggatggccagagtggcgtagatgctgggcacagctggagagggcccttcctgggatggaggaggctcagttgccttccgtctaagggtcaagctgtgcagctgggcgtaggtcacatcctggggggcttcagatgcagcagcctcagtgtccatctgcctgtcctcttccgcctgtctgtcctttgtgtccaggaattccccagacagtggggaaggaggagaggccatttctctcctaggtctggagtgtttcacctcggcatacgtcactgcctgggggtcttcatcgtgtgggctccgagt

SEQ ID NO: 338876 - DNA, 1000 bp, Homo Sapiens
ttttttttttttttttttgaaaaacaaaatacctttatttagttaacactgaatttgcaaacacagaaaggaatagaaaacctgactccacttggacgcacaggcctttggggagttctgacaccagggccccatcggcagctccaccagagcatcctggctgcacctccttcccggagtcctggcttgcctacctattccatgggaggttggcctggatgtgtcaagggggcctttcagctctagtaaagacatctgtctccacatccaaggagctttgcaaaagacacgtggcaggacaggagactggacgcactgtggcctggggaaggcagcggggcttggccctgggctgctccccttggggagaactgtgtggctgaggccacctgttatggggtggggcctgggcctggacacagctgcaggctgccctgtcctccaagaggagaggcggggcttgaaagatttgagttagtgtcttgaccttaacgtgagaccttggacaagtgttttcagctctcagagcctcaagtctgtcatccagaaagtggggccggataacccctgcctgccgccctcaccgggctcacaccggggaaactgtcacagcggggcctcaggcaatgccgggcccatcactccctggatggggctcccccatgcagcctttcccttctctgagatacattttccgtcaagcggggttaattccagcctctcaagggtgagaagaatgtgtgatcctggcccctgccggctgctcaggagggttggagagtcgagttcctgcctcaggaccctgcccctggaggcctcgcctgcccctgcagctccgcaggctcagacattggtctccagctcgctgatctggatggtgcagtggttcagactcgcagcgggcagctcctcatcccgctccacttgaacggggacgtggtgggggcaggtggggcccagggtgagctcggaggcctcggctacactcttcacacagcca

SEQ ID NO: 338877 - DNA, 1000 bp, Homo Sapiens
ctcataaaacttgtgtttattgaatttcagcctctgtggcttcttcaataaaatgttggctcccatgccttcaactcttctttgggcatgagaccagtgggttggaggatggggagtgtgggggttgggatgacatgcattgccctgcagggtgcctcggaggtagcagggccagccatgagaacaaaaagctctgttctttttgtcccttgggcctggcattggcagtcctagcaccacacagtggacagcatgcccaccagccccattggtaccagaagtctcatatgctagtcctttctttagcaccatctctagaagaagcagaagcaccttattcagtaactcatttgagcatggcaacagatcctatggtagggcctcccaagaggcttcattatccatttgggagatgaacagactgaggcccagagagggaaagccacatgcccaaggtcacacagcaagttaatggtgaaggttttatcagagcccagggcagactcagtggcttcctatccagggctcttcccacagctcgtcaccactgccccaacccaaggggcacctttatttacagaatcctccccaaccgtgagaggggtgcccagcagcccactgcattctgggaagtcaactgttcctagaagccaaataatcaaggatggatgagcagagggagcgggtactggcagcaactccggccctaggcagagggttcgatactcccagcctgagttgcagggcctgcccttctgctctcccagcccctgctgcagagcttctgtggagggcctgcctccactcccacttagttctggacctgcttcatgggcatctcttcctcctgaagactggttggggcactctttctctccacgtcctggatggtctctggcagctgtgcctgcctcgtctctggcagcaggagggcggtgccggcagccagcagggcgatccccccataagtaagcttgggcagtgacagccacactccatc

SEQ ID NO: 338878 - DNA, 1000 bp, Homo Sapiens; identical to SEQ ID NO: 158835

SEQ ID NO: 338879 - DNA, 1000 bp, Homo Sapiens
tttttttttttttttttttttttttttttttttttaacatttattctgtgtttattctgacattttgaacacaaactagacagcacagacatggggcccgatcccagcctgcacagaagcctctctgcgtcgcgacagtgcagcgtgcggcctctggctgcagcgccggctttcagaaggctggggccaatgccaggggaaccccaggctcagcagggagggagcaggatctgggacagaagatccgaaaagtgaggcctcagggcctctgcgggacccacctgctggaatttccaccaccacctgcttctacaaagactgatagaaacaaagacgcagtagtgtggggggtctggtcccagagccccttccccacccacgccccgtctgctttgatcctgatgatggtcgcacctcgccctggcggtttctccaggggctttggtgccttgctgtgctcagtggctccctccactcagcatccagaggctgcttcccaggatccacctgagcgctgcaccctgcacagcccccacatccctccaggcgggctctgcactgctgctgctgggaggaagggaaagtctgtcttctttagcatcagctcgggaagctgcctttgcctcaaatggccaagctgtgaggtatccctgtttcatcatccggttccctggtgggggctcagcaaatttcccatgaagatgaactgctgaacttcgaggcaaattacagccaatccagggggcaggctcagcaggacgcggtgtgggggaccagctgcctccagaaacatcccccactggcagaaatccaacctcctcctggtgttccaatcagcaatgagtccagagtcttcagtctgcaggagaagtgctgagagcagcccgggacttcagagccttcctggtgacgcccaggagatgcagaggtgcggcgggaccaccagggaggacctgtgagctcctcactggccagggcttctggctgcgctcaccggccc

SEQ ID NO: 338880 - DNA, 1000 bp, Homo Sapiens
gggcctgaatagtctggttttattaacacttttaagtacaggaagtagcttgggcagggccaagcctgaggccaagggtcagagcagcaggatgaatggacagacagccagatggatacacaccctaggatactctgcccctgcaggggccacaacctccccaccctctcccaccagatgcataagctgaggcccaaagcccagaggtgttccccacaacaaaggcaggcatggcctggggcaggcaggtaggccagctcacagcagctgcctgcaggcgagctcatctccagcgactctgggataccagaggatagaacacgttgagcacgagggccaccaaagccgccacggtgcccaggacaaagtaccggaggcagccctcatctggtgtggtagggccacgtggtagggggcccacccagtcttggggcccccagggacccaggggcccagacccctcaggcaccggctcctcctcagcctccagctcctgccaaatccgggaagcctggctggcagcagcctcagctgcagggcctaggtctgggtggtgctcagagtgacctgccctggggggcctctccacaggagagttccgccggcggtagaagagtacataggcataacgcgtcacaacctggctctcgtctaccgttgtcactgtgctgtcatcaaacaagcgccagcccacgtcactgcgctgactgctacgatcattgggcaggcgtgcacaggcagtgtagtggccaccaatcatgcctccatagtggttgatgacagcatatagatcgtagctgggcagctgctcctctttctgaccaatgcagaacttgctcaggtccaggttcctaacagggaactccaccaagtcattgatcttgtcacgccagataaaactacgaaaggagaagcgcttgagctgcacgatgagaacatttggcaggcgccatagcaacagctgcttggaggcctcacggtgctgtttgcactgtgggca

SEQ ID NO: 338881 - DNA, 1000 bp, Homo Sapiens
ggcagattttagtaataaaatatctcaaaggatgtcaaacattttttagctatgaaaaatatgaaacaaggcatattctaaagtgctgaaggaattaattgccctattagataacgaatacctggaggaatgaacagagtgatttatggcttaaagtgcttgggtctgatcatcatcttagcctctttgaaggaggacttgtagccaccagggtgtgcctcacttacaccaggccaggtaccccagaaaatcccattacggacacctctgtatttttggtgataatatttgccatttaagtttgcagaaagacatgcatcaaaccaccagcctgaactgtagtacagcccacagttcccagaaggatatcgatcattgtctttatctggagtggtgaaaaacttcagatcgtggttgtaatgtttgttgaaacgtaatgcatctccagctgtgccattatagttaccaacgtgtaaacgatatttgagaaactcattagccacataaaactgatcatacaaggcatatagttcgacaccattaaagtcttcaagatctattctcagaatcatttccttactcttggtcagaagatgaattttatcgttccccagccaaaattcccttctgaggtttccaaagcctgctttgtagtcttgccatgttctggtgaagttggtgctcccatcgagacgtgcctgcagcactgtccagcctccccccatggtctccatgtcacagtaaacttcaaagctactatttttgggatcaggtgtaactctgtaggtctcactgcttcttttgcctattgcgtagtagtcagagcaatctttatatattagatgttgaactggacgtgactgtatttgttcttggctgggacactttgaacatttgccatccaaactattgacaacaaatgttagatttgccactttgctgtcaacataattttctatgttgttcatatttacaagattcagcttctccaggcgaccat

SEQ ID NO: 338882 - DNA, 1000 bp, Homo Sapiens; identical to SEQ ID NO: 158836

SEQ ID NO: 338883 - DNA, 1000 bp, Homo Sapiens
ttttttttttttttttttctgttatgtatctgtgattttatttcttctttgggtatagggttgaggggaaataagttttgagtgagaaataaacgttttagctgaaattgtatcccagaagtttgaaataagtagtagaagagggggaaaacaagggagaagtggtggggaagacttggtagattggggccttaagtaaccacctcctttccctctctgcccccatgacttcctgctccaagttacagaagggaaggaaaccattttactctttttattctgctcattaatgatctgaaagaagaagatggggaaaaggggattccaccacaaggctccaaagaaccaagagtgcaaatcagtccatttcactttcactgtctgagatagggtctctaagacccaggatacaagggtggaatgtagctatatggactcgatttgcttccggaccttttccagagcctttctgtccaattgtcgctgacgaatgatgacaagacaagcgaagatcagggccacacacacgacagccccttcgaacttccaaaataagcgttgttccatcaaagctgagcggcagcttttgaactcatttctcttagatgagctgcatgtgattttctctacatatcctgtgggaccacactcaggggtagttttagcccggaaattagagcatggagagcactcttctgctaccacaaactcttccaccagccagcatggcaaatttgaggtgcttgctgacagcttctcttcctgcacgggagcctctgcttggcagagctttaaggtgaaagcacagagcaaccagcagaggtggcggccctgggggaggccaggcctcccggcacccgcaagcatggagcgccaagtgtcgcacctgtcggaacagagggacctactccacaggcctcgtgcctccgtcggagcgcagaggcggcacttactctgcagccctcccagaggttccaggtcagggcagggaaggccggag

SEQ ID NO: 338884 - DNA, 1000 bp, Homo Sapiens; identical to SEQ ID NO: 158837

SEQ ID NO: 338885 - DNA, 1000 bp, Homo Sapiens
tttttttttttttttttttagttttttttttcagtttattgtatacacacacatttcactggtggttgttttttttaaaaagtctgtacaattgacaagacaatacaaactagctacgatctgctagctacacattaggacattaacatagcccatggtttctgccctaaaacaggcaattgtgctactccaactctctaagagagattttccagctcatgtcgtgtggcccaggtacctcctcttctgtaacttccacctctggaactgggcccgcaagcccaagctctatcttgtttacttttattttaggttcggctcaaagagggtaactctgaggcttcactttttcatcttcatatctgcttcaatggcacagcggcgtcccctggttcctccatcaaagagagagagaaggaaggcaggagagcccattgggacactgtccttctctgaagcatcctgtttgcgggtagaatctctccctcgaagacttttagcactgatcccagactcggatgtttgcataatcaactgcgtggccaagaattgctggatctgttccaagacatctcgctgcatctccactgccatgtgatagacatcatggtctgagctattgtacattacagcattctgaaacatcagcataatgtcacgctgaaattcagctgtgcttcggatcagtccattttctatgtttttcttaatagttgacaaatccataggcctctgcacaatgctgtggtagccaggtgctatgtcatctgtaacaggctgcaggaagacattggcatacctatgattagctgcagctctccatacaagcatgatggctttcttccaaattttctgtgcctgaatagcttcctgatcctcactacagacagagaactgtgaagaagcagggctgctggggatggagtctgccagtgtgtgtgactgcagtgtagcattgtgtatgctgaagccatcatcactctcgctcacaggaggttca

SEQ ID NO: 338886 - DNA, 1000 bp, Homo Sapiens; identical to SEQ ID NO: 158838

SEQ ID NO: 338887 - DNA, 1000 bp, Homo Sapiens
tttttttttttttttaaagtttataaagctttattaaacatttcaaacagctgtgcaacgaacacaccaaataaaagctctagaatagcagtccagacgtttcacaagtatggcctcacagtcccattccctagatggactgcctccagttctgttctctgcctggcccatctctctttcccctcaggcaagagagagatggatggatcagactgaaaggacaggcatgctgatctccagcaggcaggggccaggagaaagtctcgtttgccaacacttgttactgaagcgcagaaaaagcagcaagtgacagtcacaaagtcttcctgggtattcttcataatgtacagtctatatgcgcaggaacgaagaagctcctggcgggaggatgatggccactgctcccctctgtcttgtctgaaccacctcggagtccagtgtgctggtcactctgcaatccccatgctaaataaaaactgtagcggcacctaccatatatagctagctattgctaaacctcaaaatcagaccacgttcgataaagcttctttaaaaggaatatacacatgtatttgtacacacacacacacagggcacaccaaaaaatatccaaacatctatcaaggggatcaaggccgttacgaaacacacaggtactctcccactcactcagctggggactgctagaactacgtgaacacaccatacttcaatgctgcagagcatgcacgggagacacaatgaggccccctccttgggacagttgagaaaggcaggaggaagggcaaaggaagtgaggctgggcgggaaagcttgagcccagacacccaggtgaaagagcaacatctatctgttgcttcctttcttaaaaatgaagtggagaaaatactgaagatttgtggacaactaacagtcaagacatgtttctgtctagcctgctgaacaaggaaagaaggatgaaaaagcgaggctctcgggcgtcagcaatctcttcaaattc

SEQ ID NO: 338888 - DNA, 1000 bp, Homo Sapiens; identical to SEQ ID NO: 158839

SEQ ID NO: 338889 - DNA, 1000 bp, Homo Sapiens; identical to SEQ ID NO: 158841

SEQ ID NO: 338890 - DNA, 1000 bp, Homo Sapiens
tttttttttttttttgtttcaaaaagtttattgtaaaattcaaagcttcaacagcagcatcctttagaaaacgaagcattgcccggatccgttttgaaaaagcagcggcagtcggttaagtccttcacgctcctgaaactgtaccaagtccagggcgccgctccttcctgccgagcgcaggctgctgagtcacgcctgcccggccagtctgtccttcctggccctgaggccaacgtcctagcctaggccttcctgggcgagcagccgctccagacacttgcagagtcctcagctcggaccagcctggccctgccgccaccgggcccctcctcgggaggccgcgcctcctcgctctccaggcgccccccccgcctgccagtctccacgccgcactcgggcaccctcggagggcccctccacagagccagccgcgctctaggcgccccggggcgtcaccacgtcgatcagaccaaggtccccgccgggctgtcactcggggagggtgatgctgggcacccagtcgttaacgctgcggctctcctcgcaaaacaggctgagcttctccaaggcgggatccttccaggcgtcctcgttggggttcgaaatgaggatgcagtgcaggtcgcccggcgcacccgcctcctcgccggcgcccacgatagccgccagccgctgcacatcgcccacgcgcactatgtcgatgtcgttctcgcagcagaaagcctggatcagcgtaaaatggatctgcagcgcgatgtcgccctcgtcctcctcacccgcagccagcacacagaaggtcacattgtcggggtccacgttcaagactttggctgactcgtagacgccggcagtgaggcagccctgacgctgcgccgacagcagcaactcatgcagcgctttcccggcaccctgcatcctggctgtgctttccggaactgtgtcctggccgcggacttcttccagagtcatagtgcgatcaaccagcagctagttatccaca

SEQ ID NO: 338891 - DNA, 1000 bp, Homo Sapiens
atataaaaagggttggtttattgtagttcaaatacataaactgaacattcaaacatcttaaaattaaactttagcaacaaagtttaacattcaaacaggagtatagtttacaagaaacacccagaaaggtaatttgttgtctaatccagaatattgataaagatcacttaatggtgaataaaatatgtttaaccagtggttctattctggccaacatgttagttatgaccgtggttccatacctgagaagaaattactacataaatcttctcttaggctaaacaacaagactcggtctataattcagaggggataatcaaagcacgtaagtgaacaaataaaactaatctgatctttagagacaaaggtaaaagtattgtccattataataattgtagcctctggaagataagaattcaattttcagtgttttctcttttacccgctttaaaaaaaaaaaatcaaaacaaaacaaaccccaactcgggttttcttggagtctgtggtatttgcatctggcaagttcaagccacaaatgctcttacttcttgcatgtattaacactgctaggaagaacgtcaccaagtcactgacttccacacctcataaaaggatgaattttagcttcaagattttaagatttactagagacagcctatatttgagtatgtatgtcagtcatgccacacaaagaaaagcataaatatttccaaagtgttctgttcagaaactgttcacaaatgcttctccttctgtttgtcagatggtttcgcaataggttgactaatgcacatatatgtaaaaacctgaaaattggctcatgcaagcattttgaatagatgcccctatggaagagtatttagaattattttgttgatcgtctcgtgggctccgatgctgtgggaggtgggggtggaccccggcgatccaggtcatcaacatatgccacaatcagtttacgcctctcctctggcacacagtccagtactagataccgttt

SEQ ID NO: 338892 - DNA, 1000 bp, Homo Sapiens
cttatttgaagtttcattttatttcagtctataagtattgctatttgtttaaagcactcacataaatccatttcacccaaaaaggaaacataaagtgcttctagcagtacaagcacggttggcatggcctttccaaaggtcttccactagagtctagagaaatctaaatatagtcatccacaaactggatgtttttattttctgagccattagagattttcaaaatcactttgatttttaaaaactcatcaaatgtgaatcatggcggggaagaccactgagctgatttctgataactaagttatcactgaacataatttatcatatatggctactggcatcatgaagaccttgggatagggaagactctttatgagaaatataaacatcacttgtgtaggaatcaccaggtgtccctagagcagttttgtactaaagacttctagtgtttactccctcaccacggtactccagcccaagagccaagagcacaatggtcaaactcactgaaggtttttacaacaggaaaccagtggaggtattgtgaggtactacaactttgaggcacaatctaaatactaaaaatgattatgaaatcttgagttgagctgattgatgccctcttaaatccattaataatccatgaaagtgatttcacatgcctagcctgctttctttctcacatgacagctgggagtattaaatgagataaagttgcagcctagcccagtgtctgggtaccatatcatttccttcctcctcccctttcccaaataaataaggttagtccttgaactttaaatgtactttataataagaagaaatcactttttctatcagtatccttgtcagcatgatttgaattgctctcaagagtacctactcttttgtaaaataaacactttgtactttactgaaagaacactagtgttctttcctttccgttgtgaaaaaagttgtttctgaggaattgaaaccccagaagataactacaacaaaa

SEQ ID NO: 338893 - DNA, 1000 bp, Homo Sapiens
ttttttttttttttttttcaaaataaataaattatataattatcactacacagattcaccatacaactcatttctacttaagagattcatatagacacaatgacaaaatagattgtgtccacagaaagatcgagagtgaaatttccagaaactatcttagatgaaataattgaagaattcagttaaatatttattgaacaaatgcagagtaaatgaactaagggctgttataaccttaagttacaacaaacaacttcaaatattcagagggctgtcacacagagaatgaaagacttgctcagtatttctccaaagggcagaacttgagccaagcgataaatataagcaaccaatgggctgcaggatagttgtacaaagtgtatcatgtatcttcatagcttctttgcccatataatgcattccacacttaagtttctccttctaaaaggcgacagcacaagttaatatgtctcataaatgtcttaaataagttgcattttcatggcaagccctccactgccagcaatggatatactcacactattggaaaaaatctaaagttaacaaactggtttagtatggaaatggtctatttgttcctcagctatgtttctgtatcttacattagtggctctcaggaggtggggggtgaaaagagagcatgttctccaaagagggtgaatcataatccccagtgattcagatactgtgcctggggacaatctttcttcaagtccaaatgaatcattataattatcaaccaatggtacatataagagtacggcatgtgctgggacagagaaaagacagttgacaaacactattctacatgaaacaggaaatcttattttatgagtcactagaaaactaactgtaatactgacaggctccatccagattattaaatactacaaaatgagaactgtttcaacaactattcagcataacgtttatggacaaaatgtatatagtatatcttatattctatatgtattttatc

SEQ ID NO: 338894 - DNA, 1000 bp, Homo Sapiens; identical to SEQ ID NO: 158844

SEQ ID NO: 338895 - DNA, 1000 bp, Homo Sapiens; identical to SEQ ID NO: 158845

SEQ ID NO: 338896 - DNA, 1000 bp, Homo Sapiens; identical to SEQ ID NO: 158846

SEQ ID NO: 338897 - DNA, 1000 bp, Homo Sapiens
ttttttttttttttttcactgtaaagactcttttattgagcctacttcaggtactggtatgaaaaacaaaggtgttaaaaagccagtgttcattgatgttatccaaatgatcaaaataatgtatgcaggaaaagcatatgaattagtcctgtactgagaatcatatatttcaaaaaaattaagattagtaacctaatttttagtgacaatagattcatgtactatgcaatagaaccaattgaatgtcactggtggtagtcttactcctacaagaacatactcaaaggcaaatgccttatatccacagattcaaattgaaatttcttatatttgaattttctcttctccaaatgcttgtatcagtaagtgccagatcaaggcaatccttgtatatatcccaaaactgtatctataattcaatgccatccttttctccttcatctcctaccaaattagggggtagagtcaacttttttttttttgagatggagtctcactctgtcacccagtctggaatacagtggcacaatcttggctcactgcaacctgcacttcccaggttcaagcaattctcagcctctggagggagtagctgggactacaggcgcatgccgccatgcccagctaattttttgtatttttagtagacaaggtttcaccatgttggccaggatggtcttgatcttctgacctcgtgatcagcctgcctcggcctcccaaagtgctgggatcctgtggcatgagccacaggagagtcaacttttgaatattattaaagttatttacaaggtaagtaattaaaaatagcagataaattatattccacttggtagcctggttaagtccttccttcatggcttccagttacccctatacataatctaattactcagcaccaaaatactagcatggtccaccagtgaccctcaagtgtcaatatttctgatgatttccagaattcaagcatagaaatgtatttttcctttctgtatgaaattta

SEQ ID NO: 338898 - DNA, 1000 bp, Homo Sapiens
tttttttttttttttttcacaacatacaaagaatttatttatgcaatacaggccttttctcaaatatttttcacagaattccacacagtaatctactagaaaagtagaattatacaccaccaaataacattgtttcgtttcttagtacaaattgctaatcaaaaggaaggtggagatgatagtttaataacaaatagtaaaacaggtgttgctgaatacagcacccggtagcctctatttgcaaacccggggagggaagggggtgccccaacaacagtggctccgcctcattgtccaggcacaggcaaaccgcagtagtgagctttggtacttgcatttactttaaaagaaaaacaaatgttgtgagctcaagagcatttccatcatttcgttttgttgtgctatgaagatgacagatcaggaaaaaatggtaactatttcacacttgctataaattagattccttgtgctaaccacacaataaaatagcctcccccaaaccatacttttctaggtctaaaacatgcttgaagaacaatattgatagacagacttaattgagatgttttaaattacatttaccataatttaaacattactatttaaatcccagaaatattagtgctgaagaagcacagttgtttggaaaaatacaggacccaaattacagcatcaaattttcctattccaatattgtaacccacttccccactgtgaaaatcctatttctcaagcttgtagatgcatgggaaatgttcttcataatattatagctggaataagtggtttacttgctccactgtatgtttccataattggtgaaaatagacttctcattatgactaaaaatatagattttttaaaactacagaacccagcagccagttttctgctttgctaatcccccccaaaaaagtcaagcaaagactacaaaaatagcaattattaataactttaaaaaatattttgcttctttgagcaaatttaagttacattcaga

SEQ ID NO: 338899 - DNA, 1000 bp, Homo Sapiens; identical to SEQ ID NO: 246472

SEQ ID NO: 338900 - DNA, 1000 bp, Homo Sapiens; identical to SEQ ID NO: 158848

SEQ ID NO: 338901 - DNA, 1000 bp, Homo Sapiens
caagagattagaaaaattttattcatcatcccaaactggattatatattacaaattctgatgaaaataatattaaaggtattttcaagtagtaccacaaactatctgtacctgaagataaaaccacacagtaaactggtaagtacacattgaatcaattcatctttaaaatatcactttgtttagaaattcatatatatgtttttgtagttatgaagtgggagggacacacaaattgctacataagattttcatttaacaaacatatgaactattccccatgctttgaatgaatcatcagaaggctgtaaaatcctgttatttttttcaaaggtgcatgaaacaatatttcatttccaatagcaaaaatacagtacttctaattttccttatattctctttcaaccctactgtgagagctgcttataattatataggagcttgttaatgggtccctacaaaatctctgtattaggttgggttagaaggtgccagggggtattctagggtagaagttttgatagtacggaagcagagatttctttctttccttttttttttttctgagacagagtcttgctctatcgcccaggctgaagtgcaatgccgcgatcttggctcactgcagactctgcttcccgggttcaagtgattctcctgcctcagcctcctgtgtagctgggactataggcgtgcaccaccatgcccagctaatttttttgtatttttagaagagacggggtttcactatgttggccaggctggtctcgaactcctggcctcaagtgatccacctgccttagcttctcaaactgctggtattacaggtgtgagccactgcacccaaaagaagcagggatttcttattagaaaatttatacttgcctcctttaagcacaggacctatacaaaaggtattgccattgaattagtctgtttcacttatgaactgtaattaggatttcagtctgatgtgaagcagcttaaaatggcatcatgca

SEQ ID NO: 338902 - DNA, 1000 bp, Homo Sapiens; identical to SEQ ID NO: 158849

SEQ ID NO: 338903 - DNA, 1000 bp, Homo Sapiens; identical to SEQ ID NO: 158850

SEQ ID NO: 338904 - DNA, 1000 bp, Homo Sapiens
tttttttttttttttttttttaagcatgtaattgtatatttatttctctttttaaagaacactccttaatgtaattcaatatacaaacttggtttcacagaattataatccactatatagcacaaagataacccagattgtatgtgtgcgtgcacacatgtgcgtgcctgtgcacatgttgctgcacccctccctctctttcactcttctggacctacaaatgctcttcccaccttcaacactaaccaaaagccattgtgagtattacatacaacagacatcctcccacgagttctttgcccttgaaagattcttttccccattccccctgagatagccaggagtgtgacactcttcccctatgaaaaagggtaaggtgacctcccctaacacagatgttaaccctgttcccatgtaaaccggctgacaggaagagctggggagcaggtctccatccccttttcccccttccacacccaaccctcagagtccaagtgcgaccctctgtgtagccttagttccagtcaccatcctgtgtagcaagaactaaggagattgctaagcccaggtcttctccatgagcagcgacagactgcctgccaagccaccgggccggccgataaccaagctctacacagtcccatgtgctttgtcaccttaattttttaaagacacctagcataggtctgtggcaacctagtgtccaactgagttacataaaattgtaccagtgatgcacttgtacatatttacatggggtggaatgttttcccatatttttagatgagtatatagatcaacatgttcacataagaccaaatacttttaatattatttataactgatttataaagctttgaaaaaactcacaatagcacattgtttactttaatgctttacggtactatcattttaaaatcacaatcagcacttaagttatagtcaatccagcaaacaagagacaaaaaaatatacaagagttaagaactgactgatacat

SEQ ID NO: 338905 - DNA, 1000 bp, Homo Sapiens; identical to SEQ ID NO: 158851

SEQ ID NO: 338906 - DNA, 1000 bp, Homo Sapiens; identical to SEQ ID NO: 158852

SEQ ID NO: 338907 - DNA, 1000 bp, Homo Sapiens; identical to SEQ ID NO: 158854

SEQ ID NO: 338908 - DNA, 1000 bp, Homo Sapiens; identical to SEQ ID NO: 158856

SEQ ID NO: 338909 - DNA, 1000 bp, Homo Sapiens
tttttttttttttttttttttttttttttcatcagtggcttttttactccctgaagtcctcttttctccacagaatatttacaaacagggaaggggtggaggccacttccgccaccaaataaggggctagggaggggggcagtgctaagacacgcctctgcgcagggagagttcctgaggagggcccagtgtgaccacagtgccctcaggggcccaggtggttccagacggctcaggccaggtcggcggtgggtgagcccagctgcttggaggccaggaggaggcgtgtggctgcactctcagactccgcctgcagccgccggttgttgtgtctcaggctccgcacctcctcctccagggccgccctgtccgccttctccttctgcaggtcctcctgcagcttcctgagcatggactccaagtgagagaccttctctgagaggttcccaggctctggctcagcatcagattttggagttcccttagggtctccactctctgggatgggctgtccctctcgggacagcgactccagaatggtgttgcaagtagaggcaatctccgagatggcctgccactcgtcctccagggtcccactgcccgcctccgacatgatcctgctgatggagttccgcagagacaaggtacgtggcagaaaggaggccctcagctccggcgccgggttgcccttgtcctcagagccactgggactgcctggcctgtcctgggtcaggggtgtctcactgtcagcactgggtactgatggcttggctgtggtggccaggaggaggtccggggtggtgttgggcaggactggggcctcatccgacagagagctgcgtggtgacagcgagttctggctgtgcaggaactcagtcctctcctcggccagatccccaggccctggaggactgccaccatcttgcaggcacaggtgcagcagctgctttgtggtgggcagcagggtcaccccctggacctcatcctgcacaggatctgg

SEQ ID NO: 338910 - DNA, 1000 bp, Homo Sapiens; identical to SEQ ID NO: 158857

SEQ ID NO: 338911 - DNA, 1000 bp, Homo Sapiens
ttttttttttttttttgggcaaaataaatactttattgttttaatatatatatattttagaaatcagcctttgtgtgatatttcaaacatttataagccttttagagattctttcaaagaacactgttaacaactcaaccacttttgattaaaatatcacacacaaagaaacacaataggagttgaaaaaattataaatgctagaagaaaaattctaataacatttggtggttactttacacatttatttaacacatataaaaccaaatgggaaaccattttccttttttttcataaaaacaaagttttcactggttaaaactgaactaaaatcattttatgtatgaggagaacaaatctaaattacttccattttgaaaaaacaaacaccagcttattcatttctattcattcaagtcataggccccattatttggatgatactctatttagtctagaagacagaaaaagaaacatctccatctaataaagaagtctggacaatgcaaaaagtaaaagtacatagtgtttaacataaggcacatttccaaaagaaaaatactacataagcaatgataaaattacatttgtcttgggtaaagcaacaaggcttacagtgtaagtacgttaagtagttgtaggtaacctcataaaattctatcctactgctattagtaacctccccaagaattaagagcaattatattttttacaacagaacagtttttcttcttggaagtgacattaattaacagcagtggagggaaaaatcattggatgcttcaagctctgaaaaaaatgaatcagttattgcacagtaaatacctcatagaggtcagtgttttaagatgttagtctgaagaaatatgttatttataagttggataagtctggaagtcttcaagttttaaaattaattctaatagggaatcaaatgaaaaatattgacatacaaataaatattaggcttttcaaactgctagagtttttgatagtttag

SEQ ID NO: 338912 - DNA, 1000 bp, Homo Sapiens
ttttttttttttttttttttttttttttttttttttagctcaaattttttttaatgacattgggatacggtcagataacgacactgattccttgaaatatcttaagacttcttttctggacaaagtaggtggtcagtttccatccatgttccatatatgcatggaaagagtatgtattcttttcagatactgttgtgtctgtctctcagctcaagctcatgctcacctcacatcctatctttcacagggctttttcatcagttgcctctgtctggtaacagtcacaccagctcctgttcagttacagtctttgtctcataaccggagagtttcatcaaaagaattttatttacagctttatcatccatatgccactaaaattcacctgttttctttcaacctgcactcattttgattgcctggaactctggatttaattcttccatcccactttgtatcttgcattcacttcactctctctccagcttttattctttctttctctttccctaggtccaatgcacttgacccaactcacatgcgtggactccgggaaggtactgctccctccctccaaattctgagcagtaaaatgccgccccggggcactggggaacagaaaggaatgagaccccaacaggcagaagccaagagagcggggaggagccatggcgttctgccccaggatgcaccacgcctggacgtgctcccccgactcccagtgccaggtgcccatatgccacacctcagggttgtcctctgttcgggtgagctgcggactaacgtggcccggcagcagaggccaccgtcttctgtcccgtggctcctgcgaacacaggcagtggggaacaggcagtgactgcccacccccaccgttcctcctccctgaccctgcaaacctcggggaagctttcaggcccgggaaagcagaccaggccccagtctccctcaccctttccctgggtctgaaggtcccggatcctgcgttcaaggatgacgc

SEQ ID NO: 338913 - DNA, 1000 bp, Homo Sapiens; identical to SEQ ID NO: 158858

SEQ ID NO: 338914 - DNA, 1000 bp, Homo Sapiens; identical to SEQ ID NO: 158860

SEQ ID NO: 338915 - DNA, 1000 bp, Homo Sapiens
ttttttttttacctatccctggagcaagtaataggaagagaatgggcaaactggttgcacgagagaaaagagaatggagttgggagcaacacatgaacttgcgttataacattctgctgtccagatctgccctactgtgctggtggtcggtctgtccctcttctcattagccactcacaggagaggtgcttgtgcactctgattcacaggggatgaactcaggatctcaaaagacatacaaaaactagaggtatgtatcacttaaatagctacgaaactcacaccgtgatctcccttctgacacacatctgcgccatctcttccaacataaaataaactgtttcaatggtttgtcagttatttttcaaatcactaaaatgtacagtcatccaccaacaatttaagaaagaacctaagaggcaaatcactggggactgctatttgagttttatcagtcaaaggctcaagcatcaagaccctcagttagcatttcaaagtacatactagaaacaagaggctgggtggcgtgtgtgtgcgttatggctgattcaccaggtggtaaaaaaacaagaggttaatctcctctttttgattgttaattgaccatctctattcctccaaaggctggatttggattgcaaacagcttttctctgagattctgctgttaattgagacttacagtatttttgtgtctctgagtgctgagtgggaatattttaaaaaagaagaaaaaaattatattacacttgattcaagaacaacaaagatttcaatgaagtccgtctataaagaaacattcttggggaagggtttcaagaggtgtgtgtgtgtgaggagtggaggggattttaaaaggagaagcattttcctgcctcactttattaataataataataataatattaacaataataataagtttaaggagcttgggttgttctccatgtccccatccgagtctcccctaagtgcctcctgctggaatgaagtaggaaatg

SEQ ID NO: 338916 - DNA, 1000 bp, Homo Sapiens
ttttttttttttttttttaaaatttgctttttagggcccttggcatgtaatttcatttattcatataagtctagatcagggttcagtgacaagggtcagcatagagcagggttgcagactggttcaaggaggcttctgggtaggcccctccaggagggatttggaggaggctgccctgtgggtgtggcaggagccacatcttgtggaaactgggtagatgggtgtgtggccccactctgagtgaatgcacctggcccacatggctgggcgctgcagcctgcactccacttccaggtgctgacatatcctccccagccatggtcctgggcctgctgtgtcctcacctcaagggcctcccggctcagcctctgccccagctcctgctctctcctcccttgttcccagctcatcttgcactaggccacttcctagcctgcaggctgcctatggatctcctgttagctaagcaacttgccactcagggccccccacacacctgcatacacccaaaggagagcaggtcacttccccaaggagctgtggcttcatggcagccacaacaagaaaggggtcctggaatcctgttcccagtaagggagcgctggctcccagcactagagtggatccacatggggccctcactagggcaagagggcagccctccttccacaggagccaagagcatagtgcaggggcaaggcagggcagaaggggcaggagcccaccccaggcctccaggattcccctggaaggggccagcctggaggccttcacagcccttcccaatgtgactgggtgaccccaggtggaggcaggagttgacagcatggatagagacaggtaaggccactgacctacatctgggggtctgctaagccatgggctgctcaaggggctgaagccagcagtggtggccgggccagcaaggtgtgtgtggtgggtagcactgctgtggctttaatggaggcttgtctgtgacagaatactcagcaagggacac

SEQ ID NO: 338917 - DNA, 1000 bp, Homo Sapiens
gcctcatccatctctaaggccacgaaggccggccttcgtcctcacttgtacttattagggcccaccctcacatttagctgaaggtcccagcacactctcacagtgtcagggagaacagtctcagggatgtctgttgctctgaaggtcacttgcccctcttgctgcggcccttcctggagggcaacttcccactgccccccgaagaggcagggctcgaggccgaggccatggcgatgttgatctgtccctcctggatttcctgccgggtctcggcaggcagatggttgatcttctgctgtgtctccaggtagaacatgacgtcacgcagctgctcctggatctcggtgatctgcagatctttttggtcacaggtctccttcagcaccctctcctcctcttttagcttgttctgcaggaggacttggttggctcgcaaacacttgttcatttcctgctcctctttgagctcgttggtgagtttggccacttttgtgtttagctgagtgcactttctttccacagactgcttttcttttaggagatcatttagtttgtgctctagattatcacacttctcaattgtttctttaaacttggtcttcatgttgttaatttcctctgctgtgtccttctctatccgaactatcttgttttcccagtagattcgctgagattccagctggcttgttagtaaatatgaatactctaactgtaaggcatctattttctcttcctggcaagtatccccctcacattcatactgtactatttttccatctgttttacttgcaaccagtcgatgaacatagttatctccagcatagtcccagactcgatggttggtaagctgcatggcatacgtgtgctgcgtttcctcaaagtgcttataagcatgtcgactgacataccgtccacatcctatgtggccgcatattaaacaaatccaaagattttcctgaacaccacactcaaaacacttattttcttctactggctcggg

SEQ ID NO: 338918 - DNA, 1000 bp, Homo Sapiens
ttttttttttttttttttttttttttttttttttttttttttttttttttttttttttttttttattttttcttttaagtttttattatttaaatacaccatactagagcaaatgtctctgaaaatatcacaaataaaagatttttttttttcttcattcagcaaattagaagtagggggaattttctacacagtagctgctatgagcctgatttttttttccaaattttttttctttttttcattcttttttttttctttgccatgggagtagcaacattaggacaaaaacacttacatgcatacatacattgtattttacagagatacaataagtgtttgtgatagaatatcacaaaagccacatctctttcctttatctcatggtcagttttgattgaaacacgtttccttacaacacttaaatatacaaagagcaaatagaatgttgttaaggtaaaacacagggtacaaactctggccagtgccctgctaattgttaatgagggtagaaagcagatttgaatgcttcttttaattagcttcattagtcatttccctcccccccagctccctccccctccccaagatgtcctctggtggatcttttttcattttctctacagtctcccattagcccaggttcatggagtccttaatgttcatattcagtcattttaatacaccaataaatgcgggaagggcaatcaagactaaagaaggtgcaatggcatggagctggcactggtgctagctacaaaggtgacttgtctactgaagacacatgggatccacctgtgatgaacaaatctgagatgaaggcacgcattctgcattactctgaccttttagcagaccttctggtctggcagtagtggattgctctgaagtgaattcaaatggccattgatgagagctgtaggtctatcatgttcacaaaataaactgccattgatgtagtgaaaccgatctcccgggaccaggcgattccggcaggtag

SEQ ID NO: 338919 - DNA, 1000 bp, Homo Sapiens; identical to SEQ ID NO: 158861

SEQ ID NO: 338920 - DNA, 1000 bp, Homo Sapiens; identical to SEQ ID NO: 158862

SEQ ID NO: 338921 - DNA, 1000 bp, Homo Sapiens
tttttttttttttttttttttttttcaacattgaagtaattatttaatgacacaggaaaataacatgttatgaaacaagctggttacaagtagtaggtagatgacttaatttttgataaaaaaattaaaaagcatgaacatgcatataaaaattagattatgtacaaaatgccaacagtatttacttctgctcagtaattaaatattcttccctttgtttttgtcttttaaaaaacattatttctgaaaaaaaaaatcagaaaaacatgatcgtggagagaattattaaacaccaggaattaggaacccaagaagctaagccaggagctcagcagtcaaggttggaagtccaggacaggtccgaccagggtgatggtggccaagcccagaaatggaagattgttcttttcttttcctactggaatgttctttaccagttttctctatattcgatgttagcacacttatttaatgggatcctatgattaactggcacaacagcaaaatgatgctagcaactttggctttgaactgctacaaaatgtactatcttgtagttatatactgtacaaaacacactagaaatcaagtgctcctacaacgaaaaactcatctgactaaatcactgattttgctgtttttttttctaactttgttcattttcaatcttcacagcaaatgtattttttgtttcagggcctggaagaggtatttttttctcagaaagaagctaacattaatgtgtgctgggcaccgtctgacagcttggctctaactccaagtaagttgcccttgtcttctaagtactctacagagtgcaaaggcttaccaaatccaaaccaccttgaattaaacaaatcttaatgaggagcatcatcgttctttgtatgaaagtctttgttatgttaccaaatgaagaaatgcagtacattacacctctattgatgtaaatgaggctcaaacatctcaattccatcctcttcctaccccccagccatca

SEQ ID NO: 338922 - DNA, 1000 bp, Homo Sapiens; identical to SEQ ID NO: 158863

SEQ ID NO: 338923 - DNA, 1000 bp, Homo Sapiens; identical to SEQ ID NO: 158864

SEQ ID NO: 338924 - DNA, 1000 bp, Homo Sapiens
ttttttttttttttttagaattaaatcattttatttttgccacaagaagctctaagaactaatatcaggccatggttaatgaaaagtagaacttaaagtcatgacagggaagattgtacaagtgtgaacattacagtactcggaggaatgaacaaggtttcatatagttgaccagccagaaagccagtgctgttaagttagcatttaattctttagaatatgcatgccttgacaatacaaaataccttgatcagtgtttaccatttttttatctttttggtacaatgggggaaaaatgcggcattatttcttcatagtggttgtgtgtgggggatcgttaccaccaaaatcataataatcatttaaagtatattttaaagttagtctcgcaagattgttatggcatttttaaatttctgtagtttaagcattttcattttgtcatatcttttaacaaattactatttcaagtagttcctatccagaatatttacaggtaatttagcataggagcaaatttgaagctaacttcaaacaagaaaaggaagttcaatagccagagagctaagtataagataaaaaaacaatatggtaattttaaacagcatcttgctacagatttccaatccaataaataccaggaatgaaggacttttgccccaaagaagtatttcacatgaattctgaactttggatatggaaacttatagaaaaactgaagaccctgagacacatgcaagtaagagtcttctggcaaaaatacaatttaattttccagtttctctcctcccaaaaactccagaagatacctttagtaggcacagagtttaaatgtcatattcagaatttacagagcacagcagcagcagcaaataattacatacctattattcagaatggatagttttccattatagaattagttcctggtttgtcataatagacttgtagaatctgccaagttttattatgacaaactaattgacctagcagttgagtc

SEQ ID NO: 338925 - DNA, 1000 bp, Homo Sapiens
tccaagtccaccagtggcccaccacactgcttggttcatagttaacacaaactaaatggttctagagaatgtgattacatgaactctaacattattggaagaaaacaagatgaaaagaggtgagatgccttgtttaaagtcatacaactggttgacaggctggttcaagaaccaggtcttctgacttcaaatccagtgctctttctatgcagctacttctgtgccaagcacggatggtggtgagcagaactggcagcagcctgagtccccaggtaccctggccatccactgggcattggggaaaggacttgatcagtagattgagagtcctctcttctatcccttaccacccgaccccatcccatcttctaaagcagtcatttctatcccgagtcatccaggtgattcagccagggatcaagccacatggtactgggttgaatgagtcctgtacttagaggagagtaggtaactgctccttctcaggagctcagggagaaactggaccctcggccccagagcccaaagaagggaatgaccttcctagtgaaggaggcagtgaaggtgtagatgggctctcgggtgacagcgttggtgaaggtcacccagcccacctcatagtcaagagacaccctcacctgccggggctgctccttcagggtcagccgtgtggggaaggagcccagagccgagacgaagccccaagccagcctcacagcccacaccccctcctctggccgcagccgaagctcccccttccgctgcacatcctcgctcaccacgcccacggtgcagctcgccccatgggccaggtctatactcaccacccacgtgtgtctcccccctgtgatgccagtgtgggccagaacacaggtggcccggtcaaaacgctgggggttgtctggtgagttctgccattttgaggagaactgagctcgctggtggtcctcggacaagaggagcttggggtgggaagtctgagggtctagagaaatgtgag

SEQ ID NO: 338926 - DNA, 1000 bp, Homo Sapiens
tttttttttttttttttttttcccttgcacactttgtggttattcttttattcttgggtgtcccccaccagaccccagctgactgggcagggattggccccaggcttggcacagtgccaagcccaccccagtgctcagccacctcttgccaaacatctgaatcaatgtcacagcaacacttggtttgctcctgttgcattctcatgacaggctcagcgtcaggtacgacgttcttgagggcaaggcctgtcctccacaaagccctctggggctggggtctccagaggcaagccctcagctctgggagactgtctgcctccgggaggaaacctggggcaaagggacagggagctccgccaccagcagcagcatgttttattgcaaccagaatccccggtcacgtggggaagggattggagctagggatgaggcaggacacatctggtccctgacaggacactccccgtccaggatgcaaagccaaaggcccggaacagcctgctcagtggctgagccctgtggccagctgtgccctgtctcttcccctgcccccagtcagggcatccaacggggcagaggcagaagggacgtgaaaaggggggtcggtttcagcaaagccttcacccagggacctgaaggaagaaggagtattgtgatggggtccaggtgccccaagatgctcagggcgcctgggctgacttcaggatgtgtccatgtggttatcagaggaaagcgatggggcctgccctgcccacgtggagagggagggagaggggaaacacggctcagaaggagaatcactggccagcgaccatacaggtgggatcttgggaccctgactccgccgccagggccgggtccacaccccacctcctggctgggccccacctgggaccccagcctaggcagcctcgtgtcctatgtggggatctgcatgctgtccaggtcctgatccatgatctgcaggacatcatccaggatggaaggccccaggtccacg

SEQ ID NO: 338927 - DNA, 1000 bp, Homo Sapiens
tttttttttttttttttttttttttttttttttttttttttttttttttttttttttttttttttttttttttttttttttttttttttttaattaaaatgttttacttcagaaagtatccagtctttcttgacggaatcatatacgtcttaacttatgaaacaaatatttggaaactgaggtttgtggctgagagattaaaaagggtgaaacttctgaagagcagaaactgtgatatgaagatgaaagggattttataattgtaatctgtttaggcaatggctgggatatggtttgtatctggagtatgggaatcataataatcacttgtcttatgggcctttaaaaaatttatccttactcttccacttttttgttgtacttccttcctgtatttgccttcgcccttttcgagccttttgatttttcaccattgatttctgattctctctttcctttaactttgtcctttcctttgtcaccttttgtgtttttgtcacctttttcttttttatttggatctttctctgcatctctctccttttctttatcattatttcctttatcctcaaaactctccttcttttcttgggcttcctgtccttttagtacacctgactcactcttctttacttgggattccagtgtttctggtacactcacctcagtgttctttacttgggattctggtcctttcagtacacctgcctcactcttcttttcttggacctcttgttcctttggcacatctgcctcagtcttctctacttggccttcttgtccttttggtaccttcaactcactcttctctacctgggcttcctgtcctttcagtacaactgactccctcttctttacctgggcttcctgtccctttgagacaccagactgactcttctttacttgggattcctgtcttcttggcacacccatctcactcttctctacctgggcttcctgtcctttcagtacaaccaacccactcttcgttacttgggct

SEQ ID NO: 338928 - DNA, 1000 bp, Homo Sapiens
tttttttttttttttttttttttttttttttttttttttgaaggcttaagcaatggggacgagctttattgaggcaatcacatccacatttcagttgtttgcaatgattggcaaacggatgagttaaaaaagccttctgcttccacactgttccgtctacattcagaaagcagtaaaaatatattgtgcaatgaacactttccaccttaagcgtatcatgacagttcacaaatttgccaacagacaatgcaaaacaatatttacaagatagaccctttgtaagttccaaatttagatacttgtggtgtaattctaaaactaacatcgcatgtttttccaggtaaggaagaccagtcattataaaaatactttatataaattcaaagtcagaactaaaaacatccaagcctataaaaatatcttttcctaataaaagtatcaattcctggataaatgttccttatcaacaacagttatataaattttcagaaagtacccactttgtcagagagtccacttaaaaggaacctgtcaaagtgactgcaatgctcctttgtcaagcagtctcttgttttcagagatggaccacatatttgattacgttgtgtatgaatggagcaagtatcctacaaaaagttaactcaagtgtctatttattatgaaagtcatttacaaactcttcaggctacagaaggaactttcaggttggtattgccttctggagaagacagaagtctccttatgacgcagctacattttaccttgaaatgtttagcttgggaaacctgtgattgcattttgaccactatctgaaatcagctcattcatttcattctgcttactctcctttagggcatgattggggtgatttttttgcgtctgtgctctctttgatctcctaaaacacactttcagcagcaggtagcacaactctgccacgttaagcagcatgcaaatcacagacgcagaaatcataaaaatggtaaacacggtcttctct

SEQ ID NO: 338929 - DNA, 1000 bp, Homo Sapiens
agtattgataaacacagtaaatatattttctcttccttatgattttctaagtaacattttcttttctctagcttactttaagaatacagtatacaatatatataatacatcagtcaggctcccagtcaataacaggctactagtacttaagactttggggaatcaaaagttatatgcagatttttgactgtgcggggcgtaggggtgggtcagtgcccctaccacctgcatttttcaagtgtcaactatatatatgtatgtgtacatacacatacacacacacacacacacacacacacacacacacacgaagtgtattaattcctcagaagcccagccaggcatcttagcttggctactttttaattagaaacaactattttattcagaaaagtataaacagttagcaattagaatcttcttatatacagacataacttgcagaaggttaagtctgaggacgctgttctgggtaatttttacagtcctttttagctctaagatccatgacactgcatttttatggccaaagggcaatcaattatgcacctggttgtctcaataggcagtaaaacctaatataaataaatgacaaatcatctgccataaaaaaatacgaaaaacttttgaaatgttaatttcaactccaatgaaacaaatacctaattaaaacaattatttattccctgctagaatataaagggaacaacaagcttgagctgcaaggctcaagctttgagagcacagaaagtttttaaactaataatgcattttaagtccaagaaatggagcccagcccataatctcatgttggaattccatcaggcaaagctggaaaccacatcctgatatcatctgcaatgcgatcttctgttatttggtatttttaagatgacgccaactcttctgtgcttagtttaggagtcctttaaaggaaaaagttgaaaaaaaaaagataccacatttcagttctaagtcaacgttagaatcaacttctccc

SEQ ID NO: 338930 - DNA, 1000 bp, Homo Sapiens; identical to SEQ ID NO: 158865

SEQ ID NO: 338931 - DNA, 1000 bp, Homo Sapiens
tttttttttaaaaacacaccacttcttttattaatgttgctgtttttctttttttaaaaaaatacccaacttaacataaaatgcatatttcagaaatctaaacctcgggtctgaggctgtttgtgttaagcagcccccttgggtgagcaattaggaccttcagtcccatagttgactggagcccatgtatggttgcatttctctccttgcaggtcactttcgtccttcccgagagcagcattagagagagagtcacagcctaaataaactacagcatgagaagtatatttcaagtcctctaagggccttgtccagtatgattggttggtgtcaaatgttgtccagctccaaatggtattaggaagacaggcatgtcccagatggctgtacatgtcattgctgtctcttggtggcagcaggaatacgtgaggcaaagcccagttgccctacttcaggatgtctgccaacttctcctcgtagtataggaagttctcctgaatgtcctcccagggctgaaaggccttggattcaccctcttcttgctccacaaaattctgccagacatattcgaagtcctggggcttcatgatgcgcagtttacagccagcctccttcagcttcttcagagcagcctggatctccggctcctcccacatgaagagtcgacccaccagaatgagcagacgcaggttcttggtcttgctaagggttttgataatgcggtcagcacacgctgcacaggggctggaggacacataccaggtgacattgtaccgcagggctgggtcgaaggctggcaggatggtgttgaagaaagcttcctctgcatgggcagccgcatgctcatcctctaggtatccccgagatgcctgcacttggccccccttgccctgtgcttcaaccacatagcagaggaaggtcttgttcctcccggaactgtactccacattccggaactggaatttaaagaagttggcaggcagccgttctcctgtgacaa

SEQ ID NO: 338932 - DNA, 1000 bp, Homo Sapiens
tttttttttttttttttttttttttttttgaaatttaaagaaaaaatttattgaagatctgaaaaacaattcctaaaagattgacttttccagaaaactagctacacaatgcattgcgtctatcatgttaaaacgtgcattagacacaaatacaaaaaccatgaaacaagccaccattcttcaacaatttgagccaagataaaatgcctaagtaacaacatggatgacttgcaaaggatgggctctttactttaagcaccataaaaaaaaacaaaagcacaaatggatgagtgtgttcagttatatacactgaattgaacctttggcactaggaatcagagcattttgtcatatagcattaacatgtattataaaagtgcgtagtgtcaaaggaatagaaccaccagcattcaaaagcagctttgtcaactaggcaataaaacactctacagcatatccctctgttgtccatcattgaaaacactggcagcaattttgaaatgaaaaaaaaaaagaaagaagaaaaaaggagctattacccccttttattttttctctgtttaaaatcaaacagaaaacaaacatcaattgttatacactaacatcttcaaagcacatcgtttgtacaagagatagactaagaacaaaaatgtgtttacggagatccaaacataagtgagtgagagtgcctctcacacagctttccgatggtactcaggaggagccacttcataatcgctggcactgaacaaagttgcagaattctttgccaggtactttaggaaatcgtgaagataattgagtaataaagcaaggctcttctcatccagaggtgtataagccaacattgctccaattcgtacaaataatctcaggagatgtggcgctccatacacctgggacatgggtgcatcgggatgatctgcaagaatttcagcatactgtggtctctcaaatttatagagtagctgggtacccaacattacgttgaagtattctt

SEQ ID NO: 338933 - DNA, 1000 bp, Homo Sapiens; identical to SEQ ID NO: 158866

SEQ ID NO: 338934 - DNA, 1000 bp, Homo Sapiens
aaaatgttcttatcaagactccaatttaatttcacagcccatctgcacaggggaactgaggagaaacaggaatgaagagtgggcgacaaagagaaagcatcccttcccacacgccaagagtccagtgcaacgatccctgccacacggtcagccgaccccacttggtgccacagggtccagcctcggccactctgggctcaacctttccagcacgtctgggagcccaatgaggctatgggacagtgtgcatttccctcaaggcctccggaaagtcacctgccacccactgtgacctctgaggctgaaaggactaaggactcctttccccatcatttcagctgggccagtggctggctaaaatcagcgcagcattcccattcttctgaaagccacagctgaaataatgcaccagctgaaaccacagtggagagactgagatggcctccctctgggcctctagttggcaactttctcacccgggggctcctctttctccttttcccgctccttgttccagtccttaaggccttctggaagtgaggtgtcctcatccaagctgccagtgccttccacaaattcttcataggtagatttttccgcaaatggtctggggcccaaaagttcaaccatatcattcttatctaatacttctttttctaacaacagaagagcaaccttctccacgtcagctttcttttctgtgagaagagctactgttcttttataagcatcattaataagtattcgtacttcatcatctatcaatcttgcagtggcttcactgtaaggtttctccaataccatgtccccctgacgtgggaggtcaaaggagatttgcccaaccttttcattcatgccaaactgaacaatttgggcatatgcactctgagttacttttctcaagtcatcttgagcaccagttgtaattcttccaaagaagatttcttcagaggctcgaccacctaaagtcatacacatcctatccaagagctgctctttg

SEQ ID NO: 338935 - DNA, 1000 bp, Homo Sapiens
ttttttttttttttttttaaaggtttcattttcttctgtttatttcaagagaacaaagattcaaccatcagttctgtacaaaaacatggtgtgagagccatgggatcctcgggccagcccccttcccgcacttgagccccgggcccccctaatttgccaaaaaaccaggagaagaccaaaaaattcaaactctggggaaaaaaattactatgaaaaaaaatcaggggagaccttcctgggcctccctttctccctatccccaatctagaaatttagtgggggtcgcggttcatggccatggcaggaggtggggcagatgggtgtcggcagatttagtgtttggcaaccagtggggctgggggtgggatctgggagggagccgaggggcctggggaagggaaaagatcttggaccctgccccggcccataggacactcaaaaacactttataaaaattggggccacagagtagaagaaaaacgagtcatcagaatcaaaaactaaagagtggaaagatttttttttcttgtctaaaaggcaaaaaactacaaacagcccaagtcctgagctccccaagacctggatcctccactgtccccctgaaacccggcaggaggcgggatggggagcacaagaggtgggttcttaaaaaagtcacccctggatgggaaagctcttcatcttctgccgccttcctctgcctcccgctgctgccgaggagagagatggagaggaccggggctatgccggcaaactcaacttcttcccctttaggactttggtgatatagaggtagaagaaatcgcagtagaggactgtctggaccaggcctgccacaatggcgatgaggtcgaagaagccctcgaaatggtagcgccagatccagttgaagagatagagcgtgcggtaaacgcctagcgcaaacaagtagtggctggtgatggtctccgcctcgccggtcttgctcaccatgaacagctgcggcaagatggccactgac

SEQ ID NO: 338936 - DNA, 1000 bp, Homo Sapiens; identical to SEQ ID NO: 158867

SEQ ID NO: 338937 - DNA, 1000 bp, Homo Sapiens
gactggttgaaactcaactttattaaacttaaacagagaagctacttctgcacatgttaaacacacatggaaccaaacagctcgatggagacaccctgcactgcttatggtgatgctgcaggaatggcggcagcgatgcccgctacactccatggcctgctgcacatgtgacaggacagttatttcatctatgcttacacctgcaggtcccttaccctagaaacactctatatcttcttaggtacttcccttgaaacaggatgagttctagaggaaataaaactgctgcacttacaaacctagaaatattcagggaccaagattagttgttcagtgacctaggaaaccttagaatcctgtaggttcctcaggagaggtgcttccaagtacttgagaatccacaggcagagatgcttccctttccatggtggatgtgtatgtcactccaggacaaactgcggagtcacggagtgtggaacacatctggttgtgtacagtacactatcccagaggaaaatcacaaagcaacacaactctgcagcaaaaactagtcccaaagtcagaagataaaactagcaaaaactttgcacaatatttagagaaaagctctagggtgtggagagtacgggtcttcctttttctccatgcaccaagcagagcacagtatcattccttaagctataaacaaaaacccttttgtataaatatttaaatagtaacagacacactgaactaggacaaaaatgacccactgggaaagaaagcctgaggtatccctttagttgccatgtttcttaaactgggttgcttacacccatgatcaacacagtccatcttcctacagcactgattttattcagagatttaggagaaatgttttgtcttagaatgaaaagggactggtagatattaatgaatacatgataggagtacaaaagaaaagactgaggaaatgataactttaccaagcagcttcaaggatcaaccacaccctcgatgg

SEQ ID NO: 338938 - DNA, 1000 bp, Homo Sapiens
ttttttttttttttttttttttttttttttttttttttttttttttttttaaattcatgtttttaattggcttaatacaaaggtcccccaggaggccctgggaggagggggacagcctgggagaggcagagattcatggccagcagcccacccccacctgccacccactccccaacaagggtcccagactctttcaataatcctaaaaaaaccgacgagagcgcaggcagatgaagagccccttcatcttcacacgggtgacaggctgccctgccctgcccagggccctggtcctccccagccaagtcaggtgcccagcccagaccctgccctggcaaggtggggcagagcaatctggtcctccaggaggcagggcgccatgtaaacatcaacaggccagaccccacttcctccagccagtggggccccggagtccagtgctccaccccacagcctgctcagtcagtcaactccaggcactgcgtggctcggtggagggtgacagcctggggccaggtcccatgtgggcagtgcgagcccaactggcaccctttctggctctggaagtggtggcgacaggaccctggcccgcagggtgggagggggcacagtcacgcccgggcccccagctcgctgatgcgctgtcgcaggtgaaaggcaaattcaaacatggtggccgcgaggctctggtggatgaggtaccggggcaggcggcccttgagatctgtattaagaatccagacaaaggtgcaaacacgggggttactggccgacttgagcacgatgaagcccccagggccattctctccccggacatatttgtgcgtcgggggcttggcactgtgtgaggtggcgatccctgatgacaagtatcggtccctgcgccgctcaatgcgccggacattcacgaagtcccttggggagaccacgccgcccgcagcccctgcagacacgtcataggagatgagggtgttgtcttccactcgctgcaggatctggc

SEQ ID NO: 338939 - DNA, 1000 bp, Homo Sapiens
ttttttttttttttttttcaatattaaaatattattttattttaaagcccaatctttcagaaagcttcttagtatagctttgagccttcaacgtcaacatgtaagtcaaatatttaagttaaatattaacatcaagttaagcatactagattaaaaggtactctgaacccacccaccaggttatacatactctcactcaatcatgtaaagaattgaattctttatttgtgatatccataaacgttgctattctctatttctatccagaaaggcaattttcacctattatcacttttgttcttctcttataaacaacaacttgaatgctattgcaggaaagggctacaaatatacatttgttaaccaagcagaatacacagatattttgctttacaacttgcacctaaaataccagtatacgtagctggttcattagttgtcatagcaatttagggctattgcccaagctatgcatagcagtttacattttcaaacctcatatagaaagggctattgtgatatgaactggcaactacattcctgtgaagcccatctcagttacaagcaaatgtgttaacttccaattctgcaaagaattttgatggcaaaacttccaaatctgatgcaattgtcttaagcaagtttttaaacaaattgtttcgcagctactctgccattctgccagtagatggtgctacaaagatcgggaaagggatttccatgaggccaacagttcggatataggaaaaaaaaaaaaaaaacgtttaaacctgctctgaaagtacaaaaacgcatttgagggtaaaatataacccttatttttaaccattcattacagacaaaccagtaagagggatgaaactaggccatctgaaaaattttaaacagtttatatgaatgacatgcttaacacaaactatatagaactacacagtacacagtttgaagtaaattgtcatagaaatgaccaaccatgtcaagatgataaacaattcgctta

SEQ ID NO: 338940 - DNA, 1000 bp, Homo Sapiens; identical to SEQ ID NO: 158868

SEQ ID NO: 338941 - DNA, 1000 bp, Homo Sapiens
tctgtctcccttactttctcttggccttttttttgagacagcgtctgttacccaggctggagtgcagtggcctgatcctagctcaattgcaatctccacttctcaggctcaagagatgctcccgtctcagcctctagagtagtcaagtactatgctcaaaaacctcaatgctgctcctggtaagaaaatgtagattatggccaggcatggcggctcacactcagccagtaaagtagaagtcaaaaaaatccaaccacacaaaatcatctcctagtcacacattcaaacatgagaaacagtcacacacaaagagtcaagactattttaaaagggggggccaaattattattattttaaaatttgattacaaccaattttgttggcattaaaattagaggcattaagctggaatggatatataccaaaaccagaaattgagtttagcaaaaatgggaataggagttgttcagtaatttcagattacaaatcaatttagagaaacaaaccccatgcttacattgattgtgccacagatttaaacttcagtagtgcattagtaaactgttcacatttagatcttcaccttgagatttgacagctgtttcttgaaaaaaatctcagtaccttgtgcaaataaaatcggtcttccatgtgccttagcacacacttaaaatttatccattgtatatatacaaaacacctgcaatgtgggcagggcaaaatacatactttcataacaaaactataatatacctctcaagtatgaacaatatacacataatacatggtatacagtatttacaaaatataaaatataatacaagctgtttgtatgtaattttttaaactcatcttttgcaattgtatgttgcaacaaggcaaatttccatttctgtaccaattttctcaagagtccagggatatgggaaaaattatgttttacacacatactgaaatctgaaatctaagtttgaactttgaggagggtttttaagtgtac

SEQ ID NO: 338942 - DNA, 1000 bp, Homo Sapiens; identical to SEQ ID NO: 158870

SEQ ID NO: 338943 - DNA, 1000 bp, Homo Sapiens
tttttttttttttttttttttttttaaaaagaattgtttatttaccgaacctggggcatattagatacaaccaattttaaatttacatcttttaaatcagttttgaagtgtttcacacacacaaaaaacttggcatgcaacagttgtcctaaggtgaaagtcacctcattaataaactgttgcaagtgttctcacccaaggtggaagtatggtttatcctgaacatgaaaacctgtaacaaatttaaattaattatataaaactcgttacttgtagttttgcccttgcaaagatccaaaaaaaaaaaaaaaaagcacaagtaactaatatgtatcagtcacaacataatcctggatcatccccataccaaaaccggatgctcttttaattttaaacccatcatcagagaacaagagaaagtaatttcattttacacaaaacaagattcacatgtgccaaaaaagaaatacccaaaagaaacaaaaaccaaaaccctaatgctgacactgatggtcagtaccctgaacagtggcccaaaggccactgatcaaaaataaaatagtggctgtatatcaatgaaatgaaatccaagaagctttaaccctttggcatcagaaatccagatttttccaattatgtaaatgcttatttcttacatgccaagagtgggagaagtgaatgtgccaatgtggaaagaaaaaaagccaccactcactgggacacccagagaattggctttaacagacaattagggggttaggcagaaacccagaaatggttattagctgcttgtgtcatcaatttaagtggagatgactgagtcctaaggtacaatgtaaaaatgtatgtgggaaaatgtatgctgagtcgtagttttaaagcaaaacaagaaaacaaagtatgaaagtacccagcctggcagcatacacccaagtcagagagctctgccattaggacgggcagaaaccgtcaagattcatactgctgtttctcataagga

SEQ ID NO: 338944 - DNA, 1000 bp, Homo Sapiens; identical to SEQ ID NO: 158871

SEQ ID NO: 338945 - DNA, 1000 bp, Homo Sapiens
gttataaccacgcccaactggcttgttttattggagaaggggacgcagaataaacaacgtgagacagctgggacctgaggctggaagaaccccctcccctccccataacatgcccactgccccaaataaaaaaaaaaccaactatgggagagcagccgagacagcaactaggggcaggggaaagagacatggaactcgagggcagcggtgaagagaccatgcgtgtgctgggagggcccagaggcagcggcggcacaaacagcgcaggtacgagtctctgtgtcttccccggggttatgtataaatatagagagatgaggccttctctcccctgctctcccttccgctccgtgctgctcgccgcggtcccagctcctctttccacatgagggcgaagggaaggggggatgaacaagtcatcaccgaattgcaatcagacccacatccatcagcttctggatcttctgtgctattacaggattctttaagtgttcgctgagtgcctgggggtccttctgcatctgttccaggataaggcgcatggctgggtcactcatgatctgctgcacctcagggtcggccatggctcgtcgcttcacatcttcggggctgtcgtgccggttgtactgcgccatcatacagcgctggtagccgtctgccgcctccttacagctggagtccaggtctagcgccttctggtacacatccatggctttggtgtagtccttcatcgcttccagcgcagcggctttccgtgtataacccttgatgaaggtcggctccagctggatacattcctcacagtccttgagtgccagctggaactccaggagtttggtgtagcaggcagctcgattgctgtataatttggcatctttcgggttccttttgatggcttctgtataatgcttcatggcctggggatagtcccctttctgaaaacactcgttgcctttgttcttctcctccaaagccaggtcggggtttatgtaggccagcc

SEQ ID NO: 338946 - DNA, 1000 bp, Homo Sapiens
gcagtggagatggggtttcatcatgttgcccaggctagttttcctttctatatacagaaaaatttaaagtgaatgtgatgttggagagagtgggaaggaaaagtaatggcaagtatgcttgctcattaccaggcactgtgctaagctctgtgaatacacagataagtaaaatccacgctgtttctcaaagaactcacaatctgtttaagaagcagatgtctatacaataattttataactattattcaatgtgattagtactcacatagctctatatagagtgttatagaagaataaattagagaatatctcatttttcctccagtggtttaaaaagatgtcacagaaactgaattgtaaatggtacggaaatatggaggggtggtttgcagtaggacctatcttagcccaccgcttctcaggttttggcctttgaacttgagatatgactgttccaaggacagaaggcaaaacgaacaaaagcaaaatctgaagcaggctgtcaatagagattgactctcattgcggcacaccagtacaggctgggccaaatgtcagaatcaaggcaacttatctcaaatgcagggctgtaacgctctctcaattgcaccagtttcctcaagaggcaaatcttctaaaaaatcatctgcagcccgcagcatctgcctcagtgcagagaggatgagaatatccttcatggggtccagttccaaatctgaagcataatttccaaccatcaaaatattggaaataggaatgcctagcattttatggacattcatgacccggctttgagaagtcatagatctactcatgtttaaaaagttgtcttgaagaacctcactgcaatcatccactttagtaagcaaggccacatatgctataccacagtttaatacttctttgtgaacttgcttcacttttgccaacattttagagtagagattgtcaatagagttgatgtctaagacataagccacacagtgaatcctgtccttca

SEQ ID NO: 338947 - DNA, 1000 bp, Homo Sapiens; identical to SEQ ID NO: 158875

SEQ ID NO: 338948 - DNA, 1000 bp, Homo Sapiens
ctttttttttttttttttgaagtgccactctatattttatttcccagttaaccatgtctacattttctaagatcagtatattgttttctttgttatcatcattaggctccataatataattttacatcatatattattaaacatttatgactacaagaaattcttgaagctacttctacatgtgatcatatcaaagtataaattttgctaacaagacacgctgtgtaccaccttacagatttatagtttatgcggcagagttagaaatctgtgacaagtcctaacacttgtcacatctcaatgtggttttccttaaaaaaagcagccaatatccatgtaaacagtacattgtgagatgtaaaatttgattgatagctcctaaatatcatcccaaatatacacaaattaaaagattattctaaatgctttttcatcttacatatcaagaaactcataaagataacattataaaaggcaacatttgttaaaaggccactgtggttaactttatgtcactggagtcaatactgcagccactgtcaatttcctggatggttgaggttagaagttgattctttcaaggcaaacatcaagtaattcgatttgtctagatgactgaacagagagaattcttagccactcctttcaaatggattgttcaggtcaagttactttaatgccaggtcagtcagggaatcagagaccttggtgttgacctgtgcagaaagactcgcttgtgtaacgttgagatagatgtcatactgctggtccaggccaaggtagcagtcactcatgaaatataatgtgtagatataccttccaggtatttcaggggtataaaaagaaagggaagcaacatgatgatttcgaatatatcctactcttttcaaagcaataagttctctcttatccacttctcctaatatcaaaaaccatccttcgtcttttgatttgggaaatcgaggagtaactgcacagctctctggctttcccttgtgga

SEQ ID NO: 338949 - DNA, 1000 bp, Homo Sapiens; identical to SEQ ID NO: 158877

SEQ ID NO: 338950 - DNA, 1000 bp, Homo Sapiens; identical to SEQ ID NO: 158878

SEQ ID NO: 338951 - DNA, 1000 bp, Homo Sapiens; identical to SEQ ID NO: 158880

SEQ ID NO: 338952 - DNA, 1000 bp, Homo Sapiens
tttttttttttttttttttttttttttttttttcctgatgcaggaagcttcatgtttaatgggtggagatttttaaaaatctgtttatatcaagattaaatcaaagcctttattaaacattcctctttcaaacagcctttcaaacctatacccctccccagacttgggaactgccagagctgtgaatcattttcatctgacaggggtcagatccattcagacctcacaatattgaaaagccaagccagacacaccacactgggcagagatccaccgtctgtgccccactcgggatataggaaaaaggttggtagcgccagctctcaaaccagagctcaagcacaggagaagaggaacccacagtctgaccctgctattatagttccagacctagccatgctaaactggacaaacagctcctgggctgccatttgctgaggcgcatgcgtgtgcttttccttctcttctccacaggaaaaggtgagagatggaggaggcaattttcagttgtgtgtgggtttgatttaaggctttggctgtggtctattgatattaaaatactttctgggaacgccatcttccaagctccccattggaacaaatgtattttcaaaaatgaaaacattgagcaaagatgtggagcggcaatgctgctgctggcccaggcctctcatgtcaggatggtgtcgtccacctgctccgtggagtcggcctggctggccagcttcttcagggaccttcggttaacctcgttcagcacctccaaactggccacatccaggatcttggagagggactgaaacacctcttcaccctgccgcatcttgaggaggttgacaattgcctggtcgctgtaggccctgaccacggtgttcttatccttggtgttgtcaagaagagccttcaggatgggcttgatggcctgggggtccaggggaggcagtgggtccttatttgcccaccagatcatcttctcagccaccagcctgatgtcgctgga

SEQ ID NO: 338953 - DNA, 1000 bp, Homo Sapiens
tcagatctgaaaatgtctttattttttagaaatggattccaggaaggttaaaaagcaacaccagagggtataggtgcagaactggatgtagtcattcaaagcattcaagtaagaatatggcaatataaatatccaaaaagtatctcttaggtattcaaaacaaaacgtataagtcattcctaactaatttgagctttatagcattttcctagacaggaaggggaaaaacagttagcatttaaaagtccggaaagctttttcgttggttaattacattagacggtttgcctttgtccaaattccttctttttaaacatggataaaagtattacatgggtccactgttaaaacagacaacatgtggcaaattaattctggtatcatgttttccaacaaagctcagaaaataaaggtgttgaggtggctttggactaagtttaatagtcatctcctctgctgacaacttctttacatgttggacgcaacaggatggtatgttcaaattgcgctgtatatgatcctttaatgtcacataatggtggatatggatctacaatgcccaagtcacacagattcttcagagccatcaagtatttactttctcccaagcgatccagccatctgcggcagaaggcaagggttccaaagttttcattgatgacatttaacaagtgttttgttcttggaagccttattggcacatgtccaacatcaaaatttttcatgtaatgtgaacattccatatcatcatgaacaacaccttttcctgtactaccaaaggtttcaattgcatatacttctccttcctccattcttgttgcctcccctcctttcacaatcggcactgtttttccagcatgtattctatattgcccaattgaatgtccatttagattacggattggtttcacttgatatgtcttcccatctatttcaacttcataggactccataacttcttggatggcctcaccaacatcacacagacgaacatcaattc

SEQ ID NO: 338954 - DNA, 1000 bp, Homo Sapiens
ttttttttttttttttttttttttttttgtttcagttttctcagctcattgatttattgagaagtctgtggcttcatttcaaaaatgcaaggatattagtcatctttgactgcagaatctagtgagtcccagagttcccaggatgtcctggtggtctttgttaggggtccaggctggctggggttcattggtgtccactgggggcagctcctgtgccttctggagtctctgagtctccttctgttgagtatgagatctgggtcccccgtgggctagtggatggccaggggggcgtagatgctgggttcagctggaggttccctttcctgggatggaggaggctcagttgcctcccgtctgagggtcaagctgtgtagctgggcgtaggtcacatcctggggggcttcagatgcagcagcccgagcatccatctccaccccgtccttgggctgtgtgtccttcacggcagcattgagaatttcctcctggatgtcagcaactgggctggccctcttctgcaggccctggtccttgggctctggccccgcagcccctgcaggacggtagaaatgggccgatgtcctgtgtttgctctgatgccgatgtcggaggaggaggaagaggaggaggaacagcagcaggacgaaggccactgagaccccagtcacaacccccaggtgccttcccagaccactctggggatccaaccccgtgggggtgaggggctggtcctcagggccaggtgtgggggtggagcctgtaggtgagaggctgggatccccagagggtcctgagaccacgagctcctgggggtaactagggctggacagcaggtaggggtaggacctgattgcgctgtagcatcggtaggttccaccctgggctgaggtcacaggactcatggagaattcagcctggtgtctataagactggtactttgactttagacacagcgggggatgggctgccccctccttggtcaaaaagaaagtgtctatct

SEQ ID NO: 338955 - DNA, 1000 bp, Homo Sapiens
tttttttttttttttttttttttttttttttttttttttttttttttttttttttttttttttttttttttttttttttttttttttttttttttttttttttttttttttttttttttttttatgtataatatttataaaagagggctgccagcctccccaccctatcccagtgtggccactggggtctttggctcccgggggcaggccactctgggcctcggcctgtttcttctcccagcagtggaatgtgagctgtggcccaggcttgtggcagggggagtcccagcctccccaggactggtgaagggacaggacaggggtctcttgggggtccctacaccagccccaccctcagcagaacctgctggccccagctatggggtatgggagggtgtcatcctgtgaagggagatgggagaagagtatccaagggcccaggagtctgaaaagggcctagggaataaaaggggggaaaacaagtgggctgggggagatgaggccccagggcgcagaccgtggcctagcagcagggtcgggggatggctgcaggctgatcccagctgtgtatgttcctacaggctgtgtcacctcaggaggcagctgctgggccccagtgtatgcatctgtgcaaggagggaatgaggggcttgggcgggatctaaggcgacagccctaccctgctcccagttcaggaagcctctacagctccagagcctagcagggtagtggcccaagggccttggtcctggctcttgaacaaaaaccttccacagagaggacatggggcctggctgaatgccacagtgttaatcgcgtctttctcctcccccgactggccactggatgggagcaggggctgaagagtctgggcagggctgctagggtgagtagacagaacaggatgagggtcaccctagtggtttcctccatgccggctggtccctgaggcccagtcaatgatgatgaagctcaagctcatggtcatcagcaagaagcc

SEQ ID NO: 338956 - DNA, 1000 bp, Homo Sapiens; identical to SEQ ID NO: 158882

SEQ ID NO: 338957 - DNA, 1000 bp, Homo Sapiens; identical to SEQ ID NO: 158883

SEQ ID NO: 338958 - DNA, 1000 bp, Homo Sapiens
ttttttttttttttttttttttttttttttttattttttctctttattgttacatacaatgtataaacacataaaacagaaaacagtagggatcctctaggactctagggagacagtaaagtagaaagaggtctcagaaacatttttttaaagtacaagacattcagtgctcggcccaaaggcgtagaaggtttagagccagcagatagctgtactaaaggctccgtctctctccccagagccaggacaaccccagggagctctccattagcagccagtccacgcaggcaggatgctgcggagaaagctctatgctgagaacattccccttgatggaaagaagggcaacacaaaagggtaactaagagctccttcctctcgtgagggcgacaactgaggaacagaaaaggagtgtcccatgtcactctgaccccctccccagctgccctgggcccagatgcccccatacttggcatttaccagaacctgtcccagctcagaccctgcctagacccaccaggtacccaaagttctctggggagggccagggaagaggctgggtgtcaaaccaaacagatttttatttgcagtcgtcactggggccgtttcttgctgcttatttgtctgctagcctgctcttccagctgcatggccaggcgtaaggccttgatgacatctcgcagggctgagaaatgcttggcttgctgggccagagcagattccgctttgttcacaaaggtctccaggtcatagtctggctgctcggtcatctcagagagctcaagccagtctggtccttgctgtatgatctccttgagctcttccatagccttctcctccagctccctgatctgagtcatggcttcgttaaagctggacatctgggaagacagttcctcctcttccttggataaattgcctggaatcagcgccccgttagagcaggcttccatctcttctgtttccatttgaatcaactgctctccactgggcccactgt

SEQ ID NO: 338959 - DNA, 1000 bp, Homo Sapiens
ttttttttttttttttctgcactaaaatctttataacattgatgaatgaaattgaacaagacgcatataaatgggaaggtagcttatgttcatggtctgcaagaattaacattgttaaaatgttcgtataacaatgagaacacatggacacagggaggggaacaacacacactggggcttgtagtgggagggcggatgatgaagggagggagagcatcaggaaaaagagctaatgcatgctgggcttaataactaggtaatgggttgataggtgcagcaaaccaccatggcacaagcctacctatgtaacaaagctgcaggtcctgtacatgtgccctggaactttaaaaaaaagttcatacctgcagactcaatgcaattcctaacaaaattccaaggtcgttttccacagaaatagaaaaacaatcctaaaatttgaatgggactacaaaaggaccccaaatagccaaaacaatcttgagcaaagggaagaaggggatatcacactatggaatccccaaatatcctacaaagctacagccaggaagacatcatggaactggaatagaaacaggtatagtgatcagtgcaacagggatgaaagcaaagaaggaaacacacatatttatggtgaattgatcctcaacaaagtttccaagaacaagagagggcagtccttttgaataaatggtcctaggagaactgagtctccatggagtgtggaggtctgggtcctccctgggctagtggatggccagagcagtatacacactcggctcagctgaacgtcccctttcctgggaggaagaaggcttcattattttctgtttgagggtaagctgtgcagctgggcatatgacacatcctggggatattcatatgaagaagaatgaaattgaacccttatcccatatacaaaaatgggtgtgagaaaagcttcaagacgttggtccgggcaaggtttttttggatatggccctgaaaacacaagcaacaaaag

SEQ ID NO: 338960 - DNA, 1000 bp, Homo Sapiens; identical to SEQ ID NO: 158884

SEQ ID NO: 338961 - DNA, 1000 bp, Homo Sapiens
ttttttttttttttatgtgctgatcaagttttaataacgtggttaacaagaaatgtacaccatttagcaagcacacaaagactatgggtaggaactactgatccctggagtgtctggctcccaagcccattttctgcctacctttggcatagcttcatagttactacattcagagaatccaagaggactgcatggacagatgaacctttatttaaaaaaatagcacttcaaataaattaaaagggacaaccgtcaagtgttcaaattgtgaagaaatagttgaaaacctagagagactccaagctgcagtcttctaacctcattctttgtccaatggcaaaaacccacacatctcagtactcccactcaattttttccctactgagatgagggaagcaattgcaaacaggagaccagacggaggagaaagctgcatctgattggaatgaacattgccacgtacttgctaatacgggtttcactttatgaccaaatgtattctttcaaaaataaaaaaggggagagggaagctgcatgtttttaaaaattgaaattatttagggataaaacactaactctagtgcctttaacgggcaatagcaacttttttcctccgaagtcaaacaccatccccagctgagcctttgtgctacaagcttttcaggagatgttacctaaactttattaaaagaaaagaacaagtttaaatatagacactggactagcccagtctgtattttcaagtccacattcttcatctgaagcactgcatcagggacccccctgagtctgcaagttttcaagttcacagtacatggaaccagtttttctttttaattttttcctcactcagagcagccacacacagtggccgttgacgctggaacctcgggcggggccttttcctacaaggcctggccggagctgcccaaggtttctcctcaatgagaatcgatgctgtcatgctctatggatgggaaaaaagcaagaaaataaaagc

SEQ ID NO: 338962 - DNA, 1000 bp, Homo Sapiens
gaattcgggggggagagatggggtagaacaaaggaacctcgagagtcccctacatgacagcctccaggagggctgagtctgaagtagttacagaagagacaggggcggtaatgttgataggggaatgaagagagacaggggcggtaatgttgataccccaatgaagagagagaagcaggagcagaaaaatgaccaaagatgacaatatgctttggccggtaaactcttataaaacataaaggaatcgattaatccctaacttgatggaacaagctttgaaatactttgttcctgtctgccctgatggttaaactaaagaaggagggaggggaggagacagaatcagccagtcagattctgggcccttcccttttcactaccaagcaatctttaataataaggccacaaaatgaggttgccaaggcttagtggggtggtgggaaagaccccaccactacactaaagtcaagggacaaaatgaggtacccaaatagctgtgcaaatagatgaaaaagaattagaactcttgagggtttctttctttttggtggcaggtagagagaaggaataaagcttatggaaaaactggaaaatactgctacttcatacatcaaaggtaaccttacattctccgtaagtgaatgttttaactagaattaaggaagaggaaaaaggaaacgggtaaataagcagctatgggagacctgagtcctgagtccatggggtggctggggctgggtcagcgggtaatatgtcatcaaatctagcctccctctatctggcaggaagtggcatgctggtaaggaacaaaaaggtaacagccacggcttagtgggaagagagggaactgagaaaccccaaacctagaagtgccaagggttagtgttaaaagagacagatacacgtgcatggggcaggggtgattgttcggaccatctggaaaggcctttggctgtggatgcatcagaaaccccaccctgggggatgatctatgaggctc

SEQ ID NO: 338963 - DNA, 1000 bp, Homo Sapiens
ttttttttttttttttttttttttttttttagtagtcacagttttaattataatggcaagtcatgggaggcaagccaatgtttaccaataaaacattagttaataaattatgatacaaccaagtagttactaaaagctaagtttccaaagaatatttaaaagtactttttaaatgttcacagtacataggagaaaaaagggttaaagaaagaactgcatacatattctgatctcataggtgggatcaacccaaagaagcctggaaaaacatataccaaaatgttgaaattgattatttctgggagtagataacaggtgattttctgcttttcttttacttttgttttctctgagatcttttttttgcatgtaacgcttttatacttgcggagagaaccataaatggtattttttttggggggggcgggcgaccacagaagatagaaaaatctagttatgctttttcattcttcccatttttagactactaacaatcaagatacttaaatctatgtgtgaaaaaaaaaagaaaatgtctggggagattctttagtaataaaaatatttatcaaatctaaaagggtagaaatactgctttattggataaacttacttccaaattactttcatgttttttaagaagtcctaatgagcattcaggaagaaaacatatactgcttccacaggaataaggacaaataaaatggggttgacgcctgccacaaatgatatttcctaaaagaaaaaaatgtaatatttaacctttcttctgttgaggcaaggtaagttaactgcatatatcataaataagattttcttactttacaagaaaggagaactgagatcctgttttttgaatgcaagttaaatacaaaatacaaaatccactctctgaccaagatgaggggaaaaaaaatcatccttcaacacttcaattctcatgcaatgaaatccaaaggtctgttgaatccaccttttcgattcatgtactgcctgtact

SEQ ID NO: 338964 - DNA, 1000 bp, Homo Sapiens
tttttttttttttttttaagattacatcacagcaagcaactgtttaattgggacaaagaagatacactaaaagccaaatgaattactgtaattaaatttgtacagtttattgacttttttttcctttttatttatttgagatggagttttgctcttgtcacccaggctggagggcaatggagcgatcttggctcactgcaacctccccctcccaggttcaagtgattctcctgccttagcctcccgagtagctgggattacaggcacccactaccacgcctgactaatttttgtgtttttagtggagacaggatttcaccatgttggccaggctggtctcgaactcctgacctcaggtgatccacccgccttggcctcctaaagtgctgggattacaggcgtgagccactatgcctggctattgacatttttttttttaagcaaagaggtggggcacatccactgcagtccaggcattctggcaccacctctgttattaactggaatcaaattttaaaaatttctgtgatcttgaaggtcttgttgaagttttagaggtcttttgtttttcttttagccactagatttttcaggaaaaattcacctgctttatatgaagaacgcaccaaagggccacttgcagtataatgaaatccaagttcatttcctactttttcccagtatttgaatttttcaggagtaatatattcttcaaccttaaggtgacgccttgttggctgcatatattgtcctaaagtcaagcagtctacatctgcctcacgaagtgctttcattgttgcatatacttgctcatcattctcgcctaaacccaacattatagatgttttagaaataacatcaggctgaaccttcttggcatgtttcagtacacgtagggactgatcaaaattggcccgaggatcacgaaccttactctgtaattccgggactgtttctacattatgtgcatacacatctaatcctgacagagcaacttttt

SEQ ID NO: 338965 - DNA, 1000 bp, Homo Sapiens
gacattttctcctaattttatttaaagccatcattatatattaaaagagcagaggtaattctgtcttctccggttgtgcagcacgatctgctccagctcgtcatgccagggcccggaaaacctccaccttctcccggtacagctggtggaactgcttggcaaggcagtggaaaggggcttcgaagttttccatctctttcacggatgtttcaaaacattccaggccctggcccagcgcccatgcccgggcctcagctgagtccactgctcgtctgccggccaggtctgtcttgttcccaactaaaacacctgggagagagatgcctggagcctgtgaccgagccttctccagccacttgctgcagttgttgaaggattcttcattggtcacatcatagacgagacataagacattgggactctcccacaatttatccagcatttccgaaaacagctccttgccagcagagtcaaaaatgaagagttccacactgtctcccgtgtcaggaactggcactgtcttcaccaccaaatccattcctgttgtcagggtgtagcttttctggaaatgggctccatcactgcggaagatctgtgccagggcggtcttgcccactgctgggtctgccaggatgcatttggctgccagcttcaccatggtaaccaacactcccgcgagccgtacccagaggacaagagcggctgctagagacgcgagtgggtgggcttcgggccctgggctggcctgggacgggaaggtggggaggggagggctgatctcaagggtcagtggccgcgacgggactggggatgaccgagcccggcccttctgggccgggggcggatatcgggcgctgggggcgggtgggcaggggagggctccaggtgggcccggctcgaggcctgacacggcagtctgaaaaggtgcaagcgagcggacacggcctgtgctccccgcccagcccctcagcacagccctacccagagggttcaaggaagg

SEQ ID NO: 338966 - DNA, 1000 bp, Homo Sapiens
tttttttttttttttttttttttttttttttttttttggcagcttgaacctttatttttagtatttttttaaaaagcataattagaaactttcaatacagaaatactcctagcaaaccattgaaaagtggtgtttgtttgacaggaatttcacatcaggtccactaggacgtcggtccagccctgagtccccacccccaccccataacccccattcatgcgtgtaacagtgggacaggcacactgtcatgaccaaaatcaccccaatacctggggctgatgtccagctgccagaagccatgggggcttctagcctgggctggaagcccccaggaacccccctcttattgcttgaatttgcaagcacaccctcgctggcctcgcctgatcgctcagaggccagcatgccccccgcccaccggcacaggagccccaggcaccgtgcatcctcagggcccgtggccaaccaggacagtcccaaggacggagaccccgcttctgctcctgccgcccccgcccccgaccagatgaggctgcctgctggtcagccctgcagccccctccacagcaccctccttcccaggcccatggggctcccccaccccatcccgtggctccaaagtgaaggcctgtcccagaatcaccagcttttggcagtttgggcaagtggagagtcggtgagaagaaacccccagtttttattgattaaaaacccatccacagtgctaacatggaaactgcagtgtgatctgtgatgtgattgtccaatcagggctctccctggaaatcgcctaggaaaggaaatctaaggaaacacatcctggtgttaaactcggttcttcccaggtcacttgatccctgtagtgggaggggaatgaggtgtccgggctgggggtcggggagcagtcatcaagtgcagatgaccctggttgttctccagggcactggggcgtgtcaaaactggccgccccagccattccttcccacccgccaggaaatcc

SEQ ID NO: 338967 - DNA, 1000 bp, Homo Sapiens
ttttttttttttttttgttaggctgtttttatccatatatttcagttgaggtgctatagatgtggagaaaaccagagaaggcacatagatctcttggctttggcccaagttggggcatctcaacggacagaataggtaacatagaagagggcattccaggcagcaggaaaagtactgggttatactaacagaatgacaaagaacccatcagaatgggctgtaaacaggtaagacttaaaggcatattaaagaaaaagacttttatacatagtaacaaactgcaggtaagaatgagacattactcattttccagggtaggaagtcttatgaatgatttatatcagggaacctctaaagagtaaaggttccctacggaactctggtagcaccagttccagggctgagcatgcttcagcgagttcattgcaggcaacatacagcaaagcagatggctgagcaaactgaagcccagacttccgagtaagtagtcatcttcaaggttatcatcaccagacatggaagcagcttctgataagctgaggcaggacagggtatgtgttatctctccagagctctttttggtctcagtgagcaacgtgctgagagaggcatctgtttctgtggccatgtccttcaacatgtctgggacagctctgttttcttctatgtcttcaggaagctcaattgcgtatcctttgtgtactaattctagcccaatatcaagtttcttcccattgctagtatcatataagtagatctttggccaagttgagatcccagtctggacatagctagagatcttggctaccagaggcttccagtcagcacaatgagtgagtctatcaaactcatccaaagcttcctcttcccactggtcacctgagggagcaatccgtgccagactacattctattgcttgaaatggaaggcttaggaagtcactcctgagagccctgaggtccttcagtgggcaatctccattatctccaaagtcaacaaa

SEQ ID NO: 338968 - DNA, 1000 bp, Homo Sapiens; identical to SEQ ID NO: 158885

SEQ ID NO: 338969 - DNA, 1000 bp, Homo Sapiens
tactcaatattcttccatactttattataccataagaagcaaacttctgaaggagatacaattaaagataccacaggtgtcctagcttgtcaatattctgttttatcattttcattaacaaagcagattacaatgtagccctaatttgcattataattagttgttacaagacactgcacattctcctgaagacacacaatgatttccaagatgccaggtcactcttccaatcagtgaatggcgagctcactggcaggtgcagggctacttcctgtattccaatgatgtgcctgaaatagcgctttgcaagatgagcgtggattatgtggacacaattttgaggcaatctccattacacatttggtagaagactgcctaacttaatcttactattagtgtattagtgttgttatattatgaagacatattatattccattattctgcttagctcaaggaagaataaagaatttggaccaaaattataaccagattatgagcaatttcctaagcaaaagaaacaaagtaaatgctgaggttaataaagatgtaataattctcttcacatggcctttactgtttgtgaactgtgtaatttaaaatcctgagcttaacaaaaatctttataaatcaactcatcaaaacaggcatttggccaataagaatttaatttcacatcaataaaactttagactttagatttatttagggctgtttgcatatgtttatagaatagtttactctaaaagatgacaagacagctccccctcagtgagaccctggcctaaatatatttgctttatttatatagcaagaggataacattaaacatggaagctttcaatttgtggcactgaataatctacacagggcatccttcaaaggctacaattaaggatccacctaacttttcagcaatacaagcccgattgagatcttctggtccatttgcttgacattcatgttttatgccttgaaatttctttttaattgcatccttg

SEQ ID NO: 338970 - DNA, 1000 bp, Homo Sapiens
ttttttttttttttttttttttttttttttagcattccatcatgtttattgactcctgggggacaggtcacaaagtcagtttgtgggcaggccagactgccctagaaggaagtcaggggcctcaaggggtggcactcttccttaactcgtaactcttggaggcaagcttggaaggtgctttatttcccgctatgattataccaaccctgtggcctgctccaggcttcaggatctttagggccttcttgcgaacctactggtggggggtgctgcaagcccctccccttgcccgaaggtgccaagccccatgtgggcaaggcagttgtctgttgcatagtcaagtagttgttgtctccaacttgcaccccagagcagttgtatatgttaacgagcggtcgccctgttactggatttggctccggggtcctgcaggaccagttcatgccttgtctctcagccccctgattccctcggggtccaggacttggtgttccagttgaggtagggctgggcatctggtttctgaaagttgaggtctctggagtctggggaggttgggccatcgaatctgaagatgtgcctgctgtccaggcttgtggaacctgctcctcttgtgccctgctcctcttggtaaggctcgggcattttttaggaacagagctgggaggctcctctagattcagtttgtttagccactcagaaaccatgacatcattacgagagtgctggttttctatggttctcctaaagccatccatttctgtccctccttggcctgactctgggatagaaaatctcctattgctgctcctgagctgagacaggaaatcctttaccgtggagacagcagcattcatattgttctccaccatctggaagacttcatcagtttttggtaggcattcctggaaggagggtctgtccttgggctcactgctccagcagagctgcattagctccttcagtccttctaagccgggagtctcaggcccggcttggg

SEQ ID NO: 338971 - DNA, 1000 bp, Homo Sapiens; identical to SEQ ID NO: 246474

SEQ ID NO: 338972 - DNA, 1000 bp, Homo Sapiens
tttttttttttttttttttttttttttttttttttttttttttttttttctgattctattacttttattaaatagtgggtttccacacatggctttttaaataatccaggcaggagaagagaggagggcacacttggaactcccctccccacaatacgtgattatttacattttagtaattggacaatcccggctcaggaggaggttgcaagaatctgcaaaagttggagggagcgccccaggagaacaaacagcaagccttatttcccctagcccatcccccaaaaaaccatccatcccatcctagtgtctggtggtgtccggtggtgtccatcttccattccttcccaaattatggaagtaaggttcttctcaccagaataagagcacttgggataacagagtagggtcccctcacccaaaaaaaaaaaaaaaagaagccttggggtaacaacagggcattacctcccccagaataaagaatcctgggctgaggcaggtaagcagcttgacccaatatgggaccctaggctaggggaaagggtccctttactaaaataaaagctactggggtattggaaggaaagcacccttgcccaagtaagagcatatgaactaagtttgtgtggtggtagtaggaggtgccaatgtggggtgacacatcatcagaataagagtcccggggctcagaatgggaacaacttcaccaaaataaacttccttagcaaaatgagaagcaagaagttccccctccagaatcagggaccacaggttctgggaggaaggctcctttgtaggattgggaagggaactgggcagacttggtttatgtcttctaacccctgatcctcaatcccttaccttagtaatactggactttaatgactggtaatgacctgtaaaaccaagtcaacaaatgtccatctatccctgtgacatggccatgggatggctcttctgaccattgggggccaggccaggccaggccaggcttagggta

SEQ ID NO: 338973 - DNA, 1000 bp, Homo Sapiens
cggtggctcatgcctgtaatcccagcactttgggaggccgaggtgggcggatcacgaggtcaggagatcgagaccatcctggctaacacggtgaaaccctgtctctactaaaagtacaaaaaattagccaggtgtggtggcagatgactgtaggccaagctaattgggaggctgaggcaggagaatggtgcgaacccgggaggcagagcttgcagtgagccaagatcacgccactgcactccagcctgggtaacagagcaagactcggtctcaaaaaaaataataagttacatttaaatgtcatatacatatttaagaaaaaaaaaaaccaagtacttctcatttaagacagagtagaaattatttaaaattaggagttggtgtaaaggatgagctacatattcaagtcaaattatagtaagtattcactattccactaccaaagtaggtcaattatactaaagagaagaaatctatgtgaattgaggcattttctcactttgatatatgtgaataaatttcaggttgtctaaattcctagggttatatagttagaaatatataattctcttatagacaggtcaactaggggaaataagttagcacaatcatttgaattggttgtctacatactgggcagggcttattccttttctttagcttctttgcacatgtaaagcaggccataagatgtcctgttttgccatggacaatgcaaccatttttaggtcgaccttgacaaatcacacaaggttcaatggcattaaggggcaaactagattccacactctcttctttgtcttgggtttcttctgtctcactaattgctctccttctagatgaggtagatggtctagaaaccaaatgtgaagatgaaggtttctcttcctgaagctcttgtacaaggtccttttgatcactcccaccttcaaggtgacacctgttctcactcacagatgtacctgagtccgatgattcctgctgattgactactaccaag

SEQ ID NO: 338974 - DNA, 1000 bp, Homo Sapiens
tccacgtaacagtcctttttttggagaccacgggcagtggttcatgcttgtaattctaacactttgggaggtggaggtgagaggatctttggagctcaggagctcaagaccagcctcagcagcaaagcaagatcccgtctctagtaaaaatcaaaaaaattagctgggtgtggtggtgggtgcctgtagtcccagctactcaggaggctgaggtgggaggattgcttgagcccaggagtttgaggctgcagtgagctatgatcgcaccagtgtgctccagcctgggtgacagagcaagactctgtctttcttaaaaaaaaaaaaaaattaaaaataaagttacaaaggccgggcgcaggggctcacgcctgtcatcccagcactttgggaggctaaggcgggtggatcacctgaggtcaggagttcgagaccagcctggccaacatggtcaaaccccatctctactgaaaatacaaacattatcttgacatggtggtgggcacctgtaatcccagctactcgggaggctgaggcaggagaatcgcttgaactcgggaggcggaggttgcagtgagtcgagatcatgccattatactccagcctgggcgacaagagcaaaactccatctgttggaaaggcatccgtaaggctcccatgttgacgtagggtgccactcggcaggcgtctaggtggttggctgtgcccaagatgacgcctttatgcatctgattctcttgtttgcggcacttggctctccggttctggaaccaaacctgcacgcgcgcctcggaaagccccaggcgctggctgagctcctcgcgcatgaaggcgtcggggtaatgggtctcgtcaaaaagtcgctcgagctcgttcagctgctccagcgtgaagttggtgcggctgcgcctctgtttcagcttggtctgcccgtcctcgtcctccgacttcacgtcctcgcgcttctctttgcattcataaatcccttctgccactctcgcgg

SEQ ID NO: 338975 - DNA, 1000 bp, Homo Sapiens
tgttttttggttagaagctttggaattgcagttagtctatttttgaaattggtttgttattaatttttgtatttaaattcatttgtttgtattgttcatcttcaaagcttacaatctgaaggtgtccgttcctacactggtcagaccactgtccttggggcagctggggtctttgggaccctccaccgggctcgccggtccgtcggacttttggctgagatccgtgtcagactcctccgaatagtcgtctgttggcatcgagggctgaacccctgaggtgctgcatgaacttgaggtaaccgttgaagatgaggagagaggaggaaaagaagggggcttcgctgccgaagcccgggagaccacttgcggccaagacttcctggaggcgtggggggaagcggaggagggggcggcggccgacgggggaggggggctgtcgtttgagtgagcggcagactgcgaggtagatgcggtgctaggatcggggaagcaggcagagtgaggtaataaactagggtgctctttggcgtttcttgctgctctcgtgattgttctgtgtttgtgcaaggccgactcgagatgttgactcagagcttcctccccacagagcgcgctctcgcacgccaggcagtggtacgagccgccgccgccgccgccgccgccaccgccgccgccgccgccactgccaccgccgccgccgccggtggggacgtgaagcaccatctcttgcaggttcaccacagactggccgaagaagcagagggacttcaggtggctcctcgctgcctcctcgtcgctgaagcccgcctggcacttgcggcagaccaacttgtactgcacctttggaacaatgaaggggtcgtagagggagtccgcacttttgctttctgcttctggctcttcagggagtttcggcaggaggggggacacctcacggggggtgtttttctgttcttctggtttgggggattctttggcagggtctttgtctggggaagga

SEQ ID NO: 338976 - DNA, 1000 bp, Homo Sapiens
tgcgcaaggcttccagagggagcagacaaaatggttctaaactgaacatccactaagtggtggcaatgaaaccaagtaaccagtatggacctttggaatgcaagggttttttcacccccagacatatataattctgttaaaaaacaaaaaacacctatgggctgagggctaactatcaaggcatattcttggcagaatatattggattttaaaaagcttataggtttagcaaggtggcggctggctggtttgtttacaccggtctgagacacaattaggaacttcttccaagagaagggttcccacatctggacttaactaatgctgttcaagtgaagagatggaatggtggttggtagctgctggtgctgggttgatttttcctgaagtcccaaactcatcggagtcctaacaaagtttaagtgttttttttttttttttgttctattcgtatcacaactgccctgttgtgaatattttgttcaacagaaaaagttcgacttttttgctcaaaaagaatgaaacttcgtaataaaaataaaaaaaaaaagacaagaggaaaccgaaaaaggaggggtgggggcccctcccggcacagagttcgagtccaagtgctcggtcgggcttgcagtctgcctagggcccatgtcaccccccccactcccgtgcccccagcaagggcgagatggcgaggggtgtcctccaacatctctgaaccgccttcccttcctcctcactggcgccctcttgcctcagtcgtcggagatggagaggcggctgaagattggcaggcggcggccagggtcgaggctgggagactcagagccgctgaggctgccggagctcagggagccgcttaggtagctgtcgcggtccgacagcgagtccggggggctggggggcgcgtcgaacacgggcgagtcggacaggcggcgcggcagctggaagctgaagggcggcgagggaggtgcggcggccccggcggggagggtcgcgctgg

SEQ ID NO: 338977 - DNA, 1000 bp, Homo Sapiens; identical to SEQ ID NO: 158887

SEQ ID NO: 338978 - DNA, 1000 bp, Homo Sapiens; identical to SEQ ID NO: 158888

SEQ ID NO: 338979 - DNA, 1000 bp, Homo Sapiens
tttataattattctgcttaatttgctctttatttagatttaaaatacatctttcatacattgtttaaaaggaaaaaggaatcatgtcaaaatgtttcaggaaatgatttaagttagatataaagaacatagttctgattttgaagtgttagtggaactcaaacagaaatgattagtgctctcttaagatcatgacatgattcttaaagtggctatttcagagcctagaaataacactgtattactgactaatgtctacagagtactgcaaaagatgctgaatagaaaagcaggtggtgtgaaaattttaatttttaaatagcaaagcccctgtctgggtattgtcagtaactttcagaaatcctagagaaaatgatgattaggtcaacacaaggaaaacagcgattaacagaataggaattgcaaagagcttcagccaatggaaaaagaagcaaggcttctgaagtctcccgaccactcgtgtctgcatgggtttcaacgaccggtcccactgggtcagtatggcatttctggctcctggccactgccctgggcccaccagcctaaactggtagggactacaagggccaaaataaacttccatggccaatttgggatctgtgagaaacagccatgggatgttgggctttgccccaatgaaggaggagagttcatccatataaacaatgtaatctgtctgtatggtctcgcttttgccaaaccatttgcgctttttctccattttctcattaatatcattcatcatgtcttccatagaaggcaaagtacaagttccctttattacttgtgctgcccagcgggactggaggtcaactgtgggaatggcagccccaagggactggacaaagccaatcactgctatggttgacttctcaagtagaggaggaaatactcctttaaataaaatgatctcattgtttctgcttttgatgatagactcatcaaggaaggggtaggcaaaactataccctgttgcaaag

SEQ ID NO: 338980 - DNA, 1000 bp, Homo Sapiens
tttttttttttttttttttttttttttttttttttttttttttttttttttttttttttttttttttttttttttttttttttttttttttttttttttttctggttaagtgacttcaatatattaacacagggctgttctaccataacaaacagaagcacgttacaggacggacgctggggacgaaccctggggatgagagggaacactatgtacagcccaaggcgccggcctgcacgggcccgacctagcccgcggcatggtccccagccctcacccctcagctcctgggctgggaatcattatcatgtatgtgtgtgtgtcttttttttttttgtacaaaatctgcacgcagagcgccccaggcccggggagggatgacctggaccaaatacgatacagggaaaaaaaaatagaaatatagcgattcaagtactggcttctctgaagaaaggaggaaaaaaatcacatttgtatgtgtcatttatttcggttgcgctggggaaagagaacgcagtttctctccccgcctcctcctcgctgggtagaactaactctaaaacaccaatatctcaacactgaaccctcccaaatcgcaagagttttcttttccccttccttgtttttctttttaagctgattggcttttgtctatcttgctctttccttttctttttcgtctctcccccgcctgtgttggggtattttgtggggtttttgtttttcccttggctgtgctgaggcagcaggctgggtagggtttaggactgctccttgtcggttttctctttattcatctttttcatcttcatccttcgattctgaaaccagattttgacctgccgctcggtgagattgagaacccgggccacctcataccgacggtccctggttaaatacatattgaagagaaactccttctccagttccagcgtctggtacttggtgtaggggcagcgcttcttcctcgtggagcgggcgtgaatccagttggccacgg

SEQ ID NO: 338981 - DNA, 1000 bp, Homo Sapiens
ttttttttttttttttttttttttttgtttttgctttccccagaatataacatggagtgttttttcagaaatcttaaaatagagggattaggctttttgtttgtaagtaagtttttggaaaaaaattatattctaccctagctcctaactatcccaaaataaacccaaaggcttttgctttcacggttaagaaagatttatacgttttcttcaaatgtcagaaatgagagggtccctcaggacagcaatatcccccctagttcaacacccacctttgggaagggaaaagagggtgggggagaggcaactacaactgacccaaatccccaggccctaggtggctttgtatagtaaaaatctcaattcaaatacaacagccaaggcacagctggcaccatccccagcaggctttctgcttctgcaggaggcccaggaattcagcacatacagtcttagccatatgcttagaaaagaggcaggaccacaattaggattgactattgtggacgaggtgatgaaacgcagccccaaaggtgagatttgtttaccactctgtagccacggagggacacacatctgccggttcagaccataaattcattatttccaaagagtgctagctgttggttggaggtgcagtctgggtccacagtttttctgcggccagacatgactgtcccctctggggtctctttggttttctgaggtgagtttttcacattctttaatttttgtttgcccttttccgggttgaaggttcctctgctgatgaactgaggcttgtcttccaggaatttggtctggcccaatggtccttccattcccagggcctcattacctgaggcagctcggtagaatggagatttggaataaatctgaaatagttttctggtcccatgagatgatgccgtgttagacagacataaagaggagaccgaagagtccacgacatctaaagagtcttgctgctttttaagttgctttcgcaacttgctggaag

SEQ ID NO: 338982 - DNA, 1000 bp, Homo Sapiens
tagagtccttctttctttttattgaaaagaaatcatttctattctagcgcaaacaatgtatattttacaacataaagcaagatataatttacatattacatttcttatgagatctttataccctaaatgtcattcccttttttattaagtcacctcttctggtttaatttaacctgccaagtaccctacaaatcagcatcttgtttgaagggagattgaggacacaggcagatagttcctatgtattcacctgtatctggtatcatgatggtgaggaacagggttatgtcttgacatttgcagccctgaggacctccactgacaactggcttaagatccagaaggcatcttttccaaatcacataccaaacttgtattttaaaaatttgataataaatgaacaaaattgagagcttgtacaacatgtatatttcttgatcaagtgcttagataatacatgcttatggtattggttcaccagcagtgaatgtttctttggctgaccagcacttgttactctatgatattcccagacattgcttgcttgagacattggataaaaccacccaacttcacctatcatttgggtttatgggttcaggctttgctgtttgccactggaaatggatgtctgaatcaaaatttcaaatgattttgtttcacatgtccctctatctaaggttttccccttctcagtaaaaccttttcatgtatgatttctgttccctccctataattcaaatcttcttagccattctcttcaagctccaaacctccaaagttcaccagttacttggattatactcatttcacttagaatgtttcagtctgttgggatgtacagttccttcaaaacttgataatccacagcaactaatgggacaaatggatgaatgggggaactcttcaggaagcaagtaatgcgtgctgttcagcaagcctacatgaaccattcagtaagaaatgttttaatagtgggctaaaagaagaaggaatcaat

SEQ ID NO: 338983 - DNA, 1000 bp, Homo Sapiens
tacttttggaaaaaaactttattaaacactcaagagtatacttctcaaaatcacagaagagcctccaaatacaagtgttagaaggaaaaaaaaaaacaacaaaaagctaaaagccaatcagaaacagtttgggtgtggaggactggcggggggggacagggactgcacatgggaaggagccacttttgtattccataatttcatcttgttgtgctagaatgcatgctttttttcctccaaatgaggaattcatttcaaataggaatttcttttattctcctggaactgaaatgcttagtactatccctaacaacaaccatgggatttttgaagttatcccaaattcaatgcaaagcacttttatgtatcttccagttgtagattggaatagcaaaagtgaatgctatgaccaaaatttttgccctcctaaataaagacgtttccttctagagagcaaatctatcataaaatgtcaaaactagaagagaataaaatgaaaggaaaaaacctagaaaaatatcctaaaatatcaaatgcagtcatttctaaatataagccataattatagctttacctattgttcttattgttcctatgctgcttctacaatgttacatcaactatacttagctttactctcccaaaatcttggtgatgaagccttctgagtgtgctttccaatgtgccagaaccagaagggcattccaaggcttccccacatttcctccatttacggagacagctgtttcactaacttgcagcacttgtaaatgctttgaaagctgatcacatattatattcttgacttaatactttggtaagcctggatatctatctttctataaacctcacctaatctttgatgttactataaccttatctttgatttaacccatacacatttactcatcataatcttgatttaaactcatgctacgaaactgtagcacaaaagacatttctctttagtgtttcaggaaaatcagctcatggaatgctg

SEQ ID NO: 338984 - DNA, 1000 bp, Homo Sapiens
ttttttttttttttttttttttttttttttaggtatactacagtttttattttccacataatttttccctctatgggcatctctacttttaccaatgataatttcagtagaataagtttgtttgcaaaataggtggagtttcttcaaatgtggtctgattgtttacataagtgcagcaagagtagcaatggaccatgtaggctgtcttctaaaattttcttttctctaagtttttataaggaatctgagattaaatcttcacaaacctcttgagaataggaagccaaaccaaggctgacttcagactttgcctgcagttcatattggttcattctatctatgtttttaatataacatccgaatcaaagcattggtaatataaccaatgatttcaaatgtgtcatgttacaaagaaagcagattgttactgtacttgtgcaaatatgtgtattaccataaacatatcaattctcatgaatagttgcccaattctggggcagtcaggtagaaagcaaaagtaaatgtttcaattacggttcccagaagtatagtttattgaactgctataagctgtagatagattaaaagagaaaaattccatcaatgtagaaaacaaaccatttaaagaatcagcaaattttcaaataaaaatcataaaaacattatcttcattattatcaattatttcaatgaaatcaatgttcttcctgcttggtctaggctgggaatattatgaagatatcagcctgtttgttaaagttttcgaagttcttagacaaatttggagggttcaggaggagaatttgggatttgcttgtgcccatgggacacaggctgggaatacaattgttttcctgactcttctctgaatgccagatagactccacctaaaaccctattgccaacgatgctgggatccacttaccagagacttcgactgtcatggatttggagctttccttgccagtggctgagttacgaacagagcaaacatagagcc

SEQ ID NO: 338985 - DNA, 1000 bp, Homo Sapiens
agattacattgacattttaatcagtaaggcagatgccctccaagatgtgggcgggccttgtctaatcagttgaaggcctccactattccacccacagtaaccaccctcccacacaggcagggcctccctcctcatgtggcagacagaagtcaggacactgggggctggaaaccaacttataaaactgaaagggccaggacagaactgatagcaccctcccagggaggtcaggagcaggaggtggtggccacagaagttcaccagcagcccaaggagccctttccccaaatgtccatgggatctgcgtgcttggcagccaagaggggctgtggcccttcacgctggacttgggatgcctggaccctctggcccttctcacacgggaaggagaggtttctccctgaatggagggcagggaggggccgggagggggcgtgggatcccacctctgctgagccttcacagagggggtccttgacctttgctctcaggaaggagcccgtgccagctgatactggagtaggagtgggtgaagaccctccgggctcccgagctctagaggaaggtggtcctgacatggtttgggagcagagaagaaaggaggttgaggttggggaatccacccctgttctgggctgggaagcacttgcagaccacagagatttccagtgggaagtgatgtggcccctccctggctatgtccctggctggcccctgcgctgatcagagccacagaaagtgggccactttggggaccccctagtccccctagtgacaagagaagagaaggtggtggcaggatggtggtcaggcaggacgtgtcaatccttgcccgctggggccaggctgcgggggagcagcttggtgtggccagaaggcgacagagcggtccctgcaggggagtccagcttcaccttgtccaggatggtcttcttgatggcggctggtgacacctgctcctggtcagccatggactgcagctcccgtgtgcggatgcagg

SEQ ID NO: 338986 - DNA, 1000 bp, Homo Sapiens
caggtctttttcatggatccttgtccctgagttctaacagaacatggacagagtttaaaatttaccgatttacctgctttgttaaaatggcaactagcatctcccatctgacattcccttatgtaaaacgtgccaccagctttctaaatagccatctttcaccttcccacccaagtctgaagcatctgtctttgacccaaacagctgggtttctctctggagacagaattccagtctggttccatcttctttggtggagaaaggagcctggcttcgtgctgtaccgtgataggcaaggcatacacaattctgtctgtcctgctttccatgaacatcccgtggactcaggggcaaggccagatcttcaagcagggagtcgaggttcaatttttagtgacagctcatatagcgtatcttcatctatgataaggtctttgtcaagcaagtactgtgcgacctttggctgatgatctattctgtaggaagtctgctggaactggcgtatctctctgatgatgtgtgatatcattctcattttggagaaattgacaaggccttcctcagtaaagtttggtgttccttcttcaataaatgccaggtctgtcaagtacatcccaagataaggaactgcaggagggttacaatttttaagggtttctctaagatttttaaatcttccttcagaggaaacagtcttttgaagtttgtccattagagcttttgtctgcttagagaccttggcccaggttttcttcagcctgtagatggcacttctgtttaaggccgaggtgatctccagcacgccgttgtagttgtgcaggcatcggcagatgtccgccactgccacccatttctcgatggcgttggcacgggagctgacatcagcatagttcattatctgggaggccaccaggttactcatgtcattgaagtgttggctggttttcataatgtaaggagttctttcgtttttatccagcttcatccacccctgcccaag

SEQ ID NO: 338987 - DNA, 1000 bp, Homo Sapiens
tttttttttttttttttttctcctgggtataaacaaatttacattaattaatagcgcaacagaacccaaaacattggtagaacaaattctaatgtgacaatttaaaagcagacagtgctccactgggttaataaatcatacttaactaagagacaatactttaaataccacatcattaaaaactcctagtaggcatgtccctcttatcagttaagtgaaagagcaagcaccatactcagtactgcaggttactggactgctttgatacagcactgcagttcacagataaacacttcacatcttctcttcaagttactgaatctttcttcttccggaatggtgattttagcctcttccatacactgtttttgggcttagattttttctccatggccagtactgcctccttttctttcctacgtatctcccgtacaagggcatggaaaacatcatcaatatagtagcggtatgcagcagatgtctcaaaaaagggacagctgaattctcgggccaaggccaatccttcttccttggtgacctgtcttagctgtttgaggtctgacttgtttcccacaagaaccacaggtgtatcgtcagtacgtcggactcgataaataagctgtttaaactcwcgaacttcatggaaacttcgacgatccgtgatagagtaacagatgataaacccttctcctgccctcatatactggtcccgcatggctgtaaactctgcctgtccagctgtatccaaaatgtccagattggcaggctcatcatcaatacggatcctgatcttataagcatcttcaatggtgggatcatgatcttctgggaatcggtggctgatgaactgcatggtcatggcactcttccctacaccaccagcacccagcatcactagtttgtactcccgtgagagcccagcggggctgctacagcagctaccaactgggcgagttccagaatccattgtcctcttggggccttcctgggttgccccgag

SEQ ID NO: 338988 - DNA, 1000 bp, Homo Sapiens
ttttttttttttttttttttttttttttatatttcaccttttttattgaatttgtattaaaggaggtagtgagggggcggaagcacttaagagtcagaatccatattagactctggggagtgaaaaattaaattaaatcagtaagatggggagtgggggaagagtcagagggaactttgcccacctttgaagatcaaatcaagaaatcagggaaagcaaagacttaggagaggagaaagacattctctcaatccatcctccttccccagggcagagaattaaacaacgttactgagtgagcctctgagcagaaggctctcccatctatgcacagacttcactcctcctccccaggccttcctggacaatgtccagggctggccttagccaacagaaatagaggggtcaagggggtccaggagtacggaagggtcagcagggaccctcaatactgattcttctctggctggaggtgggcaggaagcagacatagctcaaatactgagcagccaaaaaaagaagaagatggcgagaaacaggaagagggaatcctgccagctggaggctgggtgaccctgtcccagatccacacctgtaccccggcggaaaggctcatgggcattgaagacggtggtgaaaaagccaaagggaaaagcaccaacaccaaatgagaagtggaagcccccggtatcaccaaatggctggaatccccctctgctctccggagctggtctctggccctgggggcggggtggagtttttaatctgggatcctggggcttctggctccctcgcccataaagcgggacaaccttctctctgctgatcccagctttacatactggacactcttgccgttctggccgtgtctccagccactgatgaagacatggccaacagtacaggtggccacacacactgaccacagcttcccgagcagtctccaaacatatattacattcgaaggtcgcgcccgccccgccccgctcgcgatttggcc

SEQ ID NO: 338989 - DNA, 1000 bp, Homo Sapiens
ttagcttgttttcttttttttaagttttattttgtatcagaaaataacagaggtataggcctccaggacacaggcagaacaaatttcttggaatatatgcttttcttatgattaatttcattggtgagcaggtggagaagtgagaatttgtacaaggaagtctaaaatctctgatcctaatgtcacagttgtattctttatttctaaaagttgctaaaaaaataattctagggtaaatggatgatgtaactgtaaacttcacaggaattagttttggctttggggtacattagttccctagaataacacagatctttttttttctagtctgtcaagtttttgctacatttttatattatagcattttataatatgcctccccctttattgccacttttcctaacaaatacattaaagaaaggaatataaagaattacttcttcactctgggtcttctctttctaccttttcttgccaaaacatggtgagagagaaaatgtttacatgaaatggcattgttgccctgggttctgatttattcttttaactttcctagaaaaaaattgctggtagtcataatccacagattgtatttttcagttgaagacacaataagcactgaaatcaagcttgtttcacaaccagaaatccaaaagaaaaaaagtgtttttatgtgttctggtgaaaaatagaaaatatctactgtttggtcaaaaaagtcttggaccttgcaatgttatctgtggcctaattcttgaaacaggaaaatggcttaaaatactgtctccttcccaatatgaaccatcttgacaaggctttgatgtcattgacagaaatagagtttgtatatagaggccacacattatgtttattcctttgtagacttaactctgagttggtaccgtcctgccattgactatagatgaaaactctggctgggaaaacaaaatcctgattgtctaacataaaggtaacatataacacagaaggtaaatcatag

SEQ ID NO: 338990 - DNA, 1000 bp, Homo Sapiens
attgatattggtcatgtttatttcttgccatatttataacacagcaagagtatttacaggaatgaagtagctgacacatatttttagactctgtataattcagaacagttataaatatttagtttatggattgactctgtatcctgtcatcttttcgcctacctgatctttcttggaataaaataatatatccttggggtcaagatccatagttccagaattttctcagccatctggttctgctacagcgtaaaattagactggaaataagacaacgttaagtaaaaagcttcttttacctaacccacctcccaagggctccatttgtaaaagtacagaccagaaattctaccacttcccagatcctttccagggtaccaccctattaagcattaatttcttcattttttaaatggggacaaaaatatctgctttattattaccacttacttatagaggtgatttacagatttaatgagaatatatcaaagtactttataactcacaaaaatataaacttatataatgctgtttactttgtgttgagcatattctaaattctgggactagtactggaaactttacatatatagtgttagctcttaattctcaacagaaccccacagttgctataattacatttaatgtataaatgactttagagaaacacaaaaaagattgggtgatttgttaaaggtccagctagaaaggggcagtcagaattcaacccaatattacctccaaacagaggttttactttttcctttctactcagagctaacacaacagcattatttaacgttcttaagaatggtggggaggaatcactgaataacctgctttgacaaaacaccctgataaaatctatgcttgtattttagaacccctgggtttcacacattgtttttatagttttcacacatcaagtataaggtgaaaagtgatagattttaagaaccaagaatatggtatgcaccccacccaaacttataaacaaatc

SEQ ID NO: 338991 - DNA, 1000 bp, Homo Sapiens
tgattttatgtcactattttattgatgatgtgttttatagaatcacaaaatttagaaacataagaaggatttaggtatcacctaaattcaaagaaatgtgtgtttctaggttgctaaattcaaagaaaaagtatgatttggtttggttcatttaaaacaggtcacaaacagaattatatttcaaatttagaagatacggtattaagtgattcatcttattttggacatttttcctcaaggagaatttttctggaagaaaaagtacatttatatgtgggcttattaagagaaagagagaaaggcatgctattttaatcattaaattcttgatgatgacgatcatcatcaagatgagaaagaaaagaaatatgagccaagagaatctgttgttgccagcaatcagtttaccagaacatctgcaggtgaacattttccaaatggagtgacagactaattgcatctacggggatgagaatctgccatagaagaggatgctgttggtcttattttgccttatgaagaataggaaagggtgattacaatggaactcttcattagttgaagtaggtgatgatccgaatcctactacagcggtggcagctgcagcttctgctccctcctctgtaacctccacaaaggccttgtgtaggactccagatagcacgagaccgcggctcccggtcatgcctgagaggtctgcatccccattgaagatatccaccattcccatggttctcaacgtgtccttgaggtcatagctctcttccactttgaaccgaggtaagtgtaaatcgacacgtgtctctctcatattctgcaaacttgtccattccatcaatttctcagcagtgagtttctcttcaagcttctggagaccatcgatttcatttggcagcaacacaatcatgcttagatctttgcctttgtatggtatttccaggaccttggcctgtacatcctccagcgaggcaaaatgaaaagatgtgtattgcctcatcat

SEQ ID NO: 338992 - DNA, 1000 bp, Homo Sapiens
ttttttttttttttttttttgtcacccaattatttttatttattttcattcatttccctttggctttttcatctttgccttcttgctcatgtttttccacaattggctttgtcacccggtcataggaaggtggacaagctgcagtggacatggtcagatcagttttttctgtaatagagttttcatttattctgtcaattatcatgtcttcttttataagaagattagccccacctttgattttgtttttattgtacgtaaaggaagcttgttttacagttcgctttaaaaggtggcgtctgtaagcacgctgaataatgacagcagatacttcctcttgttttcgttttaaagtagtagtgattggctgataggagaccttggaaggattggaagccatgaatcgctcttccatctgtattcgtagagcatccatctctccactctctcctagaacccgctttgtaaaagcaaataagatatcaagacagtggatccggtcaccactcaccatgggcaaatccatggcaatgagctggagtttgtttggttgtggcagattgagaggcggttcaagcgcagctgcaaactgagataatttttcaaattccatgaactgagttgcatcgggatcaaacttctcccaaacctcatagaacatctcaaagtcatcctcactcagaggctctgcactttcttcagtagcaacactgaagttctccaggatgaccgcgatgtacatgttcaccacaaccaggaaggatatgatgatgtaactgacaaaaaagaaaattccaacagatgggttcccacagtctcccttaactgagcttccagggttaactttattagggtcacagtcgggtggcttactgttgagaatgggtgctagcaatccatcccagccagcagaggttgtaatttggaataggcagatcatgctgttgccaaaggtctcaaagttgaacatgtcatcgatcccaacttccctcttaacata

SEQ ID NO: 338993 - DNA, 1000 bp, Homo Sapiens; identical to SEQ ID NO: 158890

SEQ ID NO: 338994 - DNA, 1000 bp, Homo Sapiens
tttttttttttttttagttttttaaaaaatgtttattttttcaaagaaaacggcaatagccaattggaaacctacttattcttcaactccaattttgttttctttaaatttagaagtgacttactgatttactattttaaacaaaccccccctttcccctttaaatgtttaccatctactcgtgctgaatccttccaaggagattgctccagcgtttatctccaggtcctcgctttgctccttttaccaaaaaacgcaaaacacaattccatcgtgcatcttaagggctccaatcgtcaaaaataggaaaaaaaaaatctttggaatagccaattaagttgaataaaaaaatccacacgaatgcggtttggttggggcaggaatccactcctatgttcctggtaatctgatcccgctccatgaatcctgggtaattcatcctccctatcctatccacattatgatttgaatccaatgatccagctccaaggattgggatccagtgagccctctccaatccaaacctttataaccagcaaaaccaaaaaagaggaggcaaaatgttagatactgtaatcaaaaaaggtttctggggaatgatgagttatgtctgtcatcagtttaacagatgcacatcaataactatcaaattccccaaaacaagtttctgaatggtgttcagataaattttagaaacttaatcatcatagagactaattggaagaagcattttgtatttacagttcaactgataatgccaacacttgttactgtacagcgtattacaggtttcgtggttgcaagaagttacgtaatttaagtttactggcattgctacccacctaagtctaaaactaaatctaatgctcccatttgcaatttaatttgtaaattaaagtcttttaaacatatgaaccaattatgaatattagtttaaaggggaaggtgagacttaaaagtattcccaactagattatctacaccaatacattggaactct

SEQ ID NO: 338995 - DNA, 1000 bp, Homo Sapiens
tttttttttttttttttttttttagttttataatattttattatcaataacaaacagctgctctaatgtgtctgtccagcagctgttaaagagtggaggacacccttgaccctaacaaggaaaacaaattaagcctttatgtacaagcaaatttagagctcttttaagtgtccaaagctattaattagtttaattaaggcattaaactaattctgaattaacatttttataaccaagaactaaaatgttcaaatttttttctagtacaaaaaaattaaatttgctttagttataaaagagctctgtcaatatacacaaactatatacttcagacattcacaaaaatgtgagcagaaggcttatcaaaagacatttaatacaattagttttcaacaaccccttggtggtccacatctacaaagatatccagcccaacccaaccccccttccaaatcccacccccacagaaaagcacatacttaccagaatttttagcaagtatggtttgggaatttttgtggtttttgttttttaaaaaaaggcccccagggcgagttatttacagtttaattgccactgtcaactgatctggaccttgatcgggaccgggacctctggcgatccacagatgctggagacttagatctacttgaagaaccacgtttctggctcttctcaggcacgggagacctactaacagaacgggacttgctccggctccggctcctgctcctgcttcttgaccggctgtaagatttgcgactacgggaacgggatcggctacgagacctagaggaacttctggtccgggatcgagacctgcttcttgacctactgtgccttttgctgccttcaattaattttatttttctcccatttatttcctttccagaaagtttttcaatagcattctttaagtcaccataagaggcaaactcaaccaccccttcatttaatttaggtcggtgtgcatccgcaaacgttacttccccagcttgtc

SEQ ID NO: 338996 - DNA, 1000 bp, Homo Sapiens
agcggccgctggcccgcccccgaaggccattgattggaggagactggacacagcgccggaagttttccttgagtcacatgattggctgggagaaacagaagctccgcccgaccgcagcgcagattggtgccaggcccggccggtcccccagtctcgtgattggcggggcacagcagacgcccctgggctgcagcatgattggtcgcgggttgctggtcctgggtcccgggccggagccccggtgcccgatagatgggccggaagggtcgcggcgaggcccggctcagttgccccggtagacttcgatcttgctggccttggccagcatgtcgatgatgtgggcctcgaagtccgcgtcgtgcacgccagtcttccggaactcgcccgcgtaccggttgttctcccagtagtggtgccagttgccccggctgtcggccccgaacccgtacacgttcacctcatcacacacatgcagggcaaagaaaagcaccagcatccccgtggaagggtaccgcccgtgatgctctgtccacctgtcgtggatatacttgaagaaggctgggttgtagatctggaccttttctttatccactcgaaggaaggacttcactggggcgtaggtgaatcggatctgccccgtggacaaggcgctggcgatccacagaaggtccaggaccttgaagggcaccagcacgaagctgacgttggcgggcaggttcttggcactctcagggtacatgaaatggtgggtggttcggctgccaacatcctgctcaaagcccacggttggcgcctgattcatcctcatgatgaagttgtgcccgtccacgtcctgcccatagccagagccccgcaggttgcccgagttccccaccacggcacagcgccggcactggtgggggtcccggaagcggtaggggttctcgccaggcactatctggaacagcttctccagcacctcattggtgttgtgtgacttgaactggggctgcagcatcat

SEQ ID NO: 338997 - DNA, 1000 bp, Homo Sapiens
tttttttttttttttttgtgctttgctgttttatcatcatgtttttacatggggcattcactgggtgtagaggctggccgcaaatacgatgtcccgccgtagcaaggtagccgctgtctccatcttggcacccagcacaggctctcctaccaggcgggctgccccccgcagtgagcgacacatctcagccaggcgctgaatgcagcggaccaccaggccctcaggggtccctgagagccctgccaactcggagaagggcatgccccgggcccactcatatacaacctcaaccagcccaaaattcagctcccccacaaattcctccaccgtctggttcaggccacaagccacctggacctcaccaatccgcttggccacagcccggacacgttctattccctgcttgagggtgtttgggagctgatccccagcgtccccagggctctggcagaccaggccagagagcaaggcagcaatctcctcaggccgcagggtgctcagtgcattgtcaaacatgagctcagtgaggagcaactcatggctgctcatggcacaagccacccgccctgccagcttcacagtgcccgcctcgtccacataacccagggttcggagcacctctactcgctgatggtactcaggaagcagcagcaatgactgatccgacagtaggaagcgcagccgctccatctccttctgtatctgcattcgctcccgcagcttcaggtactgggcaggaaaacgggggctgtgtacacactgagccccctggatcagctcctccagcttccgggcccggagcccaccctctacaactgacatatctttgagctgcaggtcattgacagggtcgagggtgggaggtccggctgggtgggcctgagccagacgcagcagttcctggacagcagtggtcacggctgcaaggggaggatccttcttgaattttggctgctgcctcttgctgaagtcctccaagatcttctccccattcacccgg

SEQ ID NO: 338998 - DNA, 1000 bp, Homo Sapiens
cgtgtacattcagaatttttattttaaaacaaagaaccagagtaacaatagaaaatccatatggaaatattcacaatcttctcagtgagaaatgggaccctgccttactgccaacctactgtttgaggagccagaaagttgacatgaagttgcaaggtcaccttttcaagctaaagcacactcgatagctatgtgcatttttttttttttgagacggagtctcgccctgtggcccaggctagagtgcaatgatgcgatctccgctcactgcaacccctgcgtcccgggttcacatgattctcccgcctcagcttcccaagtagctgggattacaggcgcccgccaccacgcccggctaatttttgcatttttagtagagacagggtttcacgatgttggccagactggtctcgaacccctgaccgcccgcctaggcctcccaaagtgctgggattacaggcgtgagccaccgcatccggcctcagctacgtgcatttttattcaaaggctccaggagcagagggaacagtgagaactaagaaccaaaatactgtcactgacaagggtttggctaaagggtctgagatgtgtaagcaccaagaagggaaagggagactgagcaacatatgaaaaaggggctgtaggaacaaacacagagaaaataagtcaacaataacgtacttccacccagagcaaagtgacagtgcacatacattcatcctctcaagtgtgggctacactgcacattgactcatactgtctaaacctggtttattggaaagattcaagtcccctgagggcattcggcataggaccacagtgacatggtaacagacatacgcaagcgtgccgtgagcctaaagcaacaacacactttagataataatcgctcagaaaaaaatcctctcccagagctgaggttacaaattccaagtttgctataaacattctttggggaattcctttaaaggtatgagttaaaatacaacagaaaatcaac

SEQ ID NO: 338999 - DNA, 1000 bp, Homo Sapiens; identical to SEQ ID NO: 158893

SEQ ID NO: 339000 - DNA, 1000 bp, Homo Sapiens
gaataatacaaaactgtttaatactaccaaaaatataattgtatgttgtgcggctctccctggctatcatgggaggactgcaggctgcctctgaactgtagtccaacaggagaaagggttgacagcctggggtaggggatgctgctggattaaaaaaggaggatgaggcccgtcccgtgaggtctgcgtccatgagggttagaggtgggttaggggcatgggggcaccagcaaggggagggttgtatggagtgggagagccagggggcaggtagtgggtataggtgggcagcagttccccctggagcctagggtcactctgagggagggagcacggtgagggggcttccagtttgcagtgggaagagccatagctgccaggcaggtaggctgtcgagtagctggggggtctgtacccaaagcctctgctcggttgggtggtcgcgtaccccggcccccagagcgggccgccgctggccaggttgcctcttccctgtccgcagcgggaaggtccggcgcccgagctcttggccttgcgccgaggccggtacttgtagtcggggtagtcgcgcaggtgtcgggcgcggagccgcttggcctcctccacgaagggccgcttctcgtcctcgtccagcagcttccactgcgcgcccaggcgcttggagatctcggagttgtgcatcttggggttctgctgcgccatctggcggcgctgagcggagctccacaccatgaacgcgttcatcggccgcttcaccttctccaggggcagcgtcccgggggccgcggggctcccagcgccctcccgctcctggggtcccgaagatgaggaggcagcagccgtggcagccggaggctccaggctccaggcctggtcctgtgaggagcctggtagcgccatgggttgggagaagccttaagagggcgtcctgaatgccctcccctcaacgtgaagcgtcgatcctgaaaatggaaaggtcttcccagtctggagtcgttgc

SEQ ID NO: 339001 - DNA, 1000 bp, Homo Sapiens
ttttttttttttttttttgggttgcaagatgtttattaggaataagcacctgtgaaaagaagaggaagaagaggaagcaggcctgggcataggaagtcaaattgtgctgcaggcctgacgaagccctggctggcctgggcctgctgggagtactgtctgtcagtgtccgtcccatgttggattgaaatgaccaggtgtttataccatgcctcactcagacaccagatacaggctgccccaggaagggcgtggtctcaggtgaagtggctctctgcagctgcggccaccctgatggcacttcccatagctggggaagtcctcccttgaagggagttctgggggcagctgtccctatcttccacaccttctcaactctacctcctcttacttcgccagcttgctttcaaccagagaagctgagaagaagcagtcactgtaatttccacactcagccctggctcctactgggaaaacagaggctttgtcccagcttaggaatacactggatctgacagatgagaattagggggaggggtgtcagagggacaaaggagggaaaagccttggactcagttgtaaaacaccagtcagaacctcaaagacaagaatcactagacttctgttgctctttggtcattcagttaatctactctgcaggccaatgtgcgccaggcactgggaccaatcccaccactccaggccctcagctgggggcctaacacaatctgcagattcaaacagggagggagaggcagcaccccgaagccatgcttcaccaggaagcagaaccaagccctgtctctgaccctggctgcttgcaggccctcctttaagttgctttcctgcctgaccccgtttcctcctctgacaatggagtaacacgatgggcaccatggtgaatgcttctcacctcaaacttcatttcatcctgtgaagcagctattattattatccccacgttatacatatggaaagagtcacacgggtgctcagtggtgga

SEQ ID NO: 339002 - DNA, 1000 bp, Homo Sapiens
acaggaaaaataaggcatttattacagattgaaactgatcagaagaaaaatcacagaattcacaaaatcattctttgttggaacttttcttccttccattgcattttgctgttaagagaaaaggagtgtgagggtcagaccaccgtggcatgcgttcacattccagctttggaggccagggacccaggactcctgggaattattcaaaaccagatccgatgataccagacactagagcagctatgcaaagcagcagctccttgaacaaaccaaaagggcgagggacacctcaaggccgttactcaaagtcagtatttattcttgctctgtgccggtggtttgggtaccttctgtttccaggaggcaatacccttctcatgatcccaagtgaccgatcataaaattgttcacttatggactcgtctgaaatgagaccaaatagataattgtttctccatttatgagatcccaacatgtccccaaaaatcatctcttcgctgctgtaagactcagacgtggaggaggaccagctgcagcgagcatgcacgccctgcacctgctgggcagataccttcacggtgcttctgcaaacagctgtggacacatagtagtccctctggaaggcacatgtagcgggatcttctccagaatccttcctgcatgtagtctcccggatgctgaactctaaattcatgaccaagttgttctcatctaggacctcaactctttttaatgagcttctgaatgcccgaaacagatacggactcagtgactgggaattcacttttaccacagaggcactgagggcatcccttaaggaggatggatcgtagtcgtacactgggaaacctgagcaagaccagtagttcattccaagagcaaacataatcaatatcttcatcatcatcgtcatcttctccattctggaaatcatgattgtaatcgagagacagagagtgtctctctatgtgtttggggatgacagttcttcctaagagga

SEQ ID NO: 339003 - DNA, 1000 bp, Homo Sapiens
gagaagctgagctgtttaatcacctccttggccagactcaaggcggtggctgtccccgaacaacacacctggaagccattgagagcagctggagatggagtggcagctggagttacagggtgggggtggggagggagggctcctgcgcctctgactgtcatctggcacttctgcccccagggcctgcttcagctctgagaggttcctggctggtctgaggggtgaggaaccagaaggcagaaggcgagtgccctcgcatggcaggagaatgaccctgaggcaggggcagccactccccacatggcctatgttgagggtgcggcactgtccacaccgtggtgagggacagaggcacgaggctggggaaaggggagaagtcggcgggggtgggagagggggttacctgggtcccaccaccagtctggaattaaacagcagaagagaagggctgcccttgggaacatggactcgtccccagtgacagttcctggtgatgggttgaccttggcaacagaccctagcagcaggcagttgtcctgacaagagggcggtccctgtcgactgtccctggcagtttcctgaacggagggagggagttggcctgggaccttgcccccaactacttgttcttcttaaagaagctgaagcgtttttctcgctctcgttctctgccgtctttgctgcggagcacaacaggcccctcagccccgacgggtgacactgggggcatggtcatggcccgggtcatgccccgggtggtgctgggcaccaccggctcttcaggctctccagaggcagaagacgctgtggcaatggctgcattcaccacccgtagccacgagctcatctctgcctcatccttggcctggaataaatattcttttccatcctgtaagcccagcttgaagacatgtttgcgctttcggtaatcaaaggcgacgctgccctgggccctggccaggctgacaggcacttctccgtggtatggcactcccgcgct

SEQ ID NO: 339004 - DNA, 1000 bp, Homo Sapiens
tttccatattcactgctaaaatattttattttaaaatgtaccacagtgaatggatgtatccatactggttcttataaatgtacacatacacatccatatatttgacaaagtatatatatgaactggttaaagacctatccaaaagaggaaatatttctagaaagttcatgtgtttatacttcatttgacaattaaaacttatttgaactgatgaagttttagttgcttagcaatgactaataataccaatgcctgtcaataatgacaactaaattgagaactataaatttcactgctgtgccttgggtcaaaattttcaatgatggaacctaaataagtaacagttattcctataatggggtatatattcagaaggaataaatacctgccactattaccaaaagactgttctctgtagagctcaaaaaaaggattatgccacaatacataatttttatttaaaaaagatctctttagatgccactgcaaattctgcttttactaaacagaaaggcagcaccccatttctttcttgtaaaggaggaaagtctttcataaaaaactctttgaagaagttttggtagtatgttcagagtcaaacacagcagcactttattaacaaggacagagtaatataatcacaaggaaatacttgttaagtctaaattaaatgatatcttgggcagcataaaatgaatactaacaagggcaggcatctcaatatgtctgtctcacagctgttcaatgtgaaagtagtttgtaagcaaggaaagacaagagcaacatttacaccacaaattgactgtaaaatacttcattacattgagaaaggtaatcaatggtcaaaatccataaccagaaggagacaccatttgagtatctatcaatgggccaaacagacctgttagattttaatactgcctggtatgcaactcagatactgatttcttctctatggaggaagccaatgttcatgttcttgataacagtcattaatctt

SEQ ID NO: 339005 - DNA, 1000 bp, Homo Sapiens
gcggccgcgtcagggcagggcaatgtcctccagcttcttgtccagtgccttcaggtcatccaggaagcgggtcggggtgaggatgtgtgaggagccaatgagcacctcccacttgccctcggtggccctggtcacctcgtaggcggccctcatctctgacatggccacaccgcccatgacatacacgatgagccgggggcccgcccgggcttctacgccagccttgttcttgtgccagtgaccgaagcgggcactgacagcggcctgggagctggccgtgggggcggggtcggatacgaagggccacaggttcctgtccagccggtcctccacggcgtcctccattacatccttgatgaccggggtccagcgggacagctgataggtgggctccatgcgttctctcggctccagccggctggaggtccccgagcccccggggttggtgacagtgcctcccagctgctccaggttacggatgaggctgctgtgcgcctgtacattggcatgctggatcagcttggccaggttctcctcactcacaccattccgaaggaggatgtagagcagcaggacccggatcttgtcgtaggcgggcaccgccgcgtccagcagcaccggaacgatcagcttcatggagtccttgatcttctccccctctgcgtcggagcccatggccaggtcctgctccacactacacagcttctccaccgagcccttgaagtgcttcatacaatcatctgctagatgcaggtgcgtagaatacttattcagctccttctggtactgcggcatctttttcaggatctgggataggtctttgatgttcgccttgtccgtggtcagcctcttgctctcacagaaggtcctcaggagctccgtgaccttcttggacacatctgcgatatgcatgtggcgaagctccacccacaagtcatcgtcctcgtccagcaagacggccttctcccgcgcctcgctcagcccggtggtctcatacctg

SEQ ID NO: 339006 - DNA, 1000 bp, Homo Sapiens
tttttttttttttttttatgaacctggaaaagctggttgtctttatttacaagatatcaaaaatataaaaactgtacaaaatgcaacaaaggcaaaaactggcagtgacttggtctaaatcttttagtttcccaaagcaaggctcagtactggaggtaagcaactgaaatgtctgtctgacttcaagtgtactaggttgtatgtagctgttttagctgaagtagaacatggaagctaaatttcttcacctggtttatcgagtgtttgggtgcactcaaaactcaacaggtatataaattcagatgtcagtgggtggctgtacttcctctagatctaagaaaggaaccctacctagttacatacattccattaatcatgggccaagaaaaaaaaagttagtggatcatttaacatagtttttgagtgccatacagtaactacgtttttacagcagaaacatacatgctcataggattcttcagctaaaattcaagatgatagtatatttctgaatttgaatcttgaagcaggatgaattattgaaatcaactttttttctaaatgtaataaattaaaatagcatttgaacagaaaatgcatagtttccacacaatccaaagcaccataaatgtcccctccatgatcataatacctcttattcaactaacggaaattagtcaaatgtggttgctatagaaacgtggaactgtcctgttcagatttttccaagcagcatacttccagatccatatagacaaaaacattctctgtagcttaaatattaatcactgaggtatttgcttttagtctccctttttaaaaacagtagcttccaaaaggtctttaataccgatggtttattgtggactataagctcctgcagctagaaccaggtttcttcgagtaaaatgaaggtgtacaactggtgttgatttggtcatatatgttcccaacaataactcctgtgaattctcaggtaaatttatatgcccagtggctg

SEQ ID NO: 339007 - DNA, 1000 bp, Homo Sapiens; identical to SEQ ID NO: 158894

SEQ ID NO: 339008 - DNA, 1000 bp, Homo Sapiens
tttttttttagaactcatcagaagattttattaagggttttcctgcagttggagggacaagccctgtttcaccttccctgaagtcagggtgtgacaaccaccgctgcagggcctggggcaaggccagagaggaggatgctgctgcccaggggtggtgctgggctcagtcttggagcttgctggaatacacctcagccctgtccagtggcggcccccggttcacggacgtgtaggaagactccgaggcccccagcgacttgggaacagcctcctgagtgatttgggagtcgtgagtcgtttccccatcagaactccccatgtccacgaggctgagggcaatggcgccagcaaaacccacaagtagaaagaagggcagggagcccaggatggaagtgatgacgatcatgcctccgctccgccggcctggccacgtgtcgatcgtcgagtatggggtgagctggttggtgcggatggggtctgaccacagggtctggtcctctaccaagcccgtggacatattgaccaggacatacttgaacctgtactccgtggctgccgacaggggtgcgttacagaggccctggaagttgggatcccacaggcaggtcccgttggcacccaccctgaccaggtaggcattcaggatctgtgaggccttggacacatccccaatggcatccaggctgggcaggtcactgcaggggatcaggtcaaaggccacagctttgtagggacctgtcctcccaccctctgtttgtaggaacgttgagcccagtggggtgttggtgctgtcttgcactgaggcattcctggaaatggctgagtcgaccaggacatacaggtagacctcgtgggtgccagtgagggcctctttgctgtcaaacatgcagagaggcttttccaaggccacagtggtaagtgtggggttgttggtggcgaaagtcacactggccagttggggctgcaggttcacagccgagccgaaccgcaggcagccgag

SEQ ID NO: 339009 - DNA, 1000 bp, Homo Sapiens; identical to SEQ ID NO: 158895

SEQ ID NO: 339010 - DNA, 1000 bp, Homo Sapiens
tttttttttttttttttagctttttaaatgttttatttttgaaaaggtagtacatccacatagtacatagtacacccacattttcaaaagctatgaaaggatacagttgtctccctctcaattccatccccccagccaccactgccccttcccctcccaaggtaatcagggttaccaggttctcatgtctctttccagagataacttatgaattcacaattatgtacttaccatttttctcctttttatatacaaatggcagtcactgtcctcaaccttatttttcctacctaataacataaactgaaggttatcccacatcactacataaatggtttccaagttctccttatttattcattgttgtctacccaggagtaggctgtatgaatataccacaatttagggaaccagaaccctgatatggtgtcatttaaacagcttccaatcttttgttttcacaaacgctgcattaatgaatactgtatgttcatcattttgtacatgtgtgagtatgtacattcctagaagtggaattgctggcccaaaaaccaaatgcatttgtggttttgattacttttgaataattcctctttgaatgagaagagtttttcctggacttgctatttgctggaggttcatgtgggaaaagaaaccagggccacattctaagcagatcagttttttttttttttgacaactgagaattttttccccccacagctgttcgttctttctgactttacttctcccaagtcagtaaataggggcagctgtagggctcttcacaaggaaaagtcccttctcttcccccagcatgccataactgttgctcccatcagtagactactttctaaaaatatggcttgtctgagtgactccttctcgaggccccagcctgtttctcctcagaccccaaatggtctaggaaacatcctacctcctacctgcccacgcactgttaccactgttatatctatggttccgcgcctcggggtat

SEQ ID NO: 339011 - DNA, 1000 bp, Homo Sapiens; identical to SEQ ID NO: 158898

SEQ ID NO: 339012 - DNA, 1000 bp, Homo Sapiens
tttttttttttttttttttaacactgcattatatagcacttccagtacaatgctgaaaagcagtggtgtggtgttccttgccatgttcctgatcttagtaggaaagtgtctagttggaaacatcaaggataatgttagctgtagggttttttgtagtatgttctttaccaacttgagtaagttctcctgtattccttctgtgttgagaggttttaacatgaatggatattggattttgtcaaatgctttttctgtacctattgatatgatcgtatttcatctttgagctgctaatgcatgcaatggattacactgaatatcaaatgttgaacaagccttgcattcctgatttgctaatattttgaggatttctgcatctgtgttcaatggaaatattgatctgtagttttcctttcttgtaatatctttgcctggttttgctattagggtaatactggcctcacaaaatgagttgggaagtgttatctctgcttttattttctgaaagagatggtagagacttggtatcatttctaccttaagtatctcaaaaacacatcagtgaacccagctggtcctggcactttgttttggaaagtttcattattattttttgagatgcagtctcattctgtcacccaggctgcagtacagtggcacaatctcagctcactgcaacatccacctcccaggttcaagtgattcttctgcctcagcctcctgagtagcttcgactacacacgcatgccaccatgcccagctaattttttgtatttttagtagatagggggtttcaccatgttgaccaggctggtctcgaactcctgaccttgtgatccacccgcctcagcctcccaaagtgaagtgctgggattacaggcatgaaccactgtacctggccttggaaggttattaattactgctttggtttatttaatagatacatatgcctattgaggtctatcttgtgtgagctttgagagaatgcgtcttgcaagga

SEQ ID NO: 339013 - DNA, 1000 bp, Homo Sapiens
ttttttttttttttttttttttttttttttttttgaggaggaaaataatttatgaattaaaaatgccacgcaaattttctttttcagaattggtataaaaattctgaaagagaagctgctactcaactaggatagtatccacattttcttgtgtgagctctgactctaaggcacaaggcaagtctaagtgttcttgtgacaagcgagaacttttcagggagacatcagaccagctgtcacagtatggctgaaatctctgggccaatgcattaccaaacctttggcatcggttatatctgtaagatttacctttgtgtgtatacatgtgttccaacaattggctctttcgagggaatttatgaccacagatggtacagctcatttttcttttccttgaaaaagaaaaattacagtttaattctactggctctgtgtctttggagatcaaagatacttgactgatctgcaaaggctctgtggtaccccggttggtgtggtctggctgctgttcattctccttaacaatgaaggagctgagcctgcggcattcaagggcctcgctgttttcattaaggggatgcacttcaccaaggtcattactttccagaatggaagcagggacaccgaatggcagggatccagacacatgtgtatggagatgttgccttaggttactacgggaatcaaaacgttccccacagtaatggcataagtgtattttgacactgttttcagtaaaagtggggcctgtcacctctgatgagggtgaggggtggctctgggagatcacagattctgggtcacatctctcctgcttgatggaaactgggggcttctggtgctcctccagggcctgggtggcaggacaggccctctgctggtctgcagtgccatcatccagaccaatagcaagagacaactgcaactgggggtggtcaccctggacagcagctctgtttccactgttactggaaggagcttctttgacctccagtccttg

SEQ ID NO: 339014 - DNA, 1000 bp, Homo Sapiens
cttcaccacccgcctgctctgtcactttctctacaaaggaaggacacgaagtaagacttccaaaagaacaaaacgtttattttttaaatttaagaattatgggaaacctaagtaatgggaattgcatcctcatcggggtcttctggcaagtcggaagcaccaccctctcctgtagctcgatgcttctctagtttagcaatcaattctttcgctggattgaagacgccattggtctgctggtcacagacatagcagcgcggggtggtgcggaaatgctgcagtgcacagctctcgcagaaataatgcctgcacttggtgacaactgggttttggaagctctggcgacagatgaaacacttgaatggtatttcctcatcatcgcttcccacttcatagttttcatcctcatagacaccatagcgaccctcatcaagctcacgttcgatctgccacccatgcttgtaatctgaacggtcatggaggaatttgcagctgtctccgaagccgcagaagccagtctctttgtagtccttacagatgtcgggctggtaatcccagcgcacggtggcacgtagatgctcgggcgctcggatggggcccttcctcaccatcccggaagaggcattgcccatagacgtatccttgggcttcatgtatttctgataattgttgattccccgatagatcttgtcatcctccttgcccctcagctcctcctggatcttctggctgcgctcaaagatggcttgtgcatcgcgctctttctctgtgtccagctcatagacagctgtcgctcccatatcctctggtcccacgggtttcgccgaacgggtggatttataaaccacgccgagactctcgggctcattttcctcttcctcttcgctgctcaagtcgccgtaagccgccttctgtttaccactgtcacgggtcttctgtatcattggattgtgggtcacccgcttcttttccggtcgaaccacagtgcagccttcgtcgc

SEQ ID NO: 339015 - DNA, 1000 bp, Homo Sapiens
aaaattaaggtcatataatttgtctcacgtctttcagtttatgtcagagctagattgtatcttgaaaataccgacattatctgatttgccattttttaagtcaatgcctctgaaaattactctttaatattagctgaaatgccaacaaaatgcacagaaatgattatcatttccttaaactatattaggcaaacatattcctttatttagattttatattcacatttagttttttatgcacacatttaagactttataaacactaacattagcaattccagaagggtaggtagattttttaaatataattactcttataaaaggaagaaatagagactttactaaaggactgtatttttgacttcacctataatgcaactaatcatctacttagttgctatgttaatctatttgcttcttcagcaaattatcactgactcagtggtttaaaacaacacaaatttaccatcttatggttctgtgggtcagaagtttgacattgatctcactgggctaaaaaggtgccagcaaggctgcattcctttctggggactctaatggagaatctgtttccttgccttttcaatctttttttacaggcccccttcattccttggctcaaggtgtcttcctccttcaaagccaccttttaacttccttcaaaagtagttgtctttcttatacaggatcactctgacctcctcttttgcctccctcttcaacttttaaagatccctacaattatattaggccctccaaagtaattcaggataatctccccatctcaaggcccttaataacattttaaattaatcacttctgcaaaattcttttgcaatgtggcataacatattcacagttcctgagaattaaaaacattggcatccttaggcaaatctgcttaactttttcaatttagcttcatatctttttttactccaagatagaagagtgatgtttaaagtactcaagttacagccagcatttaccaattctttga

SEQ ID NO: 339016 - DNA, 1000 bp, Homo Sapiens
cacacttcaggaaaatactacattcacccacgttgtgattcatatcggacagtttcttactcaaagataacacaaataccaattcttattcatactttgaaactatattttaccctagactgccttggttcaaaggcctagtttcgacattactgtggcaaattatttaagctctctgttttcatttctttttctgtaaatgcaggatgaaaacaatatgtatctcctaggatggctgtgaggagtgagtgagacaggacatgaaaggtgtgtatgaactgtgataactgttgcccttgtgggcatgttatatagggctggctctaggaagaagcctgtgtcttttttcagaaatccctggagcaacttaaatgtctttagaaatgacaagtctctcagttatccagttagccgtaaacaggttctggaagacacacctagatagaactcggcccgtcagttctgagtgaggcacgtaccacttgggcttgggatgtccttaacccatttatgcctgaggttgcaattttttgaatttttccaatcacaccttggcgatgaccttgagcagtaggatataaataactcccacatgcttagtgttccaataatggaacactaggcataaacaggttttaattggctcctcagtcaaccatgaccaatatctctatctcagcttctgctgatgccctagctcagggctctgcattccgtgccagggacgcctcagccccttaacatggatgtgccacatgacaggcaataatatattggccccattagcccttcctggagcagtcataatgaattacagtcatgacaggcacatgtaagaaaccaaaatttgctaaatatgtacatgagtcttcatcacagcatcgtttatgaaaacaactaaatattcactaatggtgccagtggaataaatcagagaacatcccctgctacgtaactctctgcatacatcaaagagaatggtgtggctttgctttttcaa

SEQ ID NO: 339017 - DNA, 1000 bp, Homo Sapiens; identical to SEQ ID NO: 158901

SEQ ID NO: 339018 - DNA, 1000 bp, Homo Sapiens; identical to SEQ ID NO: 158902

SEQ ID NO: 339019 - DNA, 1000 bp, Homo Sapiens; identical to SEQ ID NO: 158903

SEQ ID NO: 339020 - DNA, 1000 bp, Homo Sapiens; identical to SEQ ID NO: 246475

SEQ ID NO: 339021 - DNA, 1000 bp, Homo Sapiens; identical to SEQ ID NO: 158904

SEQ ID NO: 339022 - DNA, 884 bp, Homo Sapiens
tttttttttttttttttttgcaaaaactccacaccactttatttcaacctttatccaaaaatgtttaaactattaaaaatgtgtagctctgagcttcaggcactaacctccaattctcacaggcaggtgggaagggaggccccgggcatggtgaaaatcagaaaaccacggctgtgtggagcacaggccctctcctagcaccaaagacccaagtccctcccacccaacccccacccaagctctcctcttcaaggaagaaatatttacaattgttgaaactttgtcagggaacagggtgcatggcggtgcatggcacatggagctgacctaggagggctagggcctgcccccctgctttttggcaggaaggatggggcacagctcaacttcttcctcatcactgtcctcttcctcttcctcgctctcctcctcagaaacatcattgctcatcgtaacaatctggtgccgcccagtgatccgcacagggccagagcccgacttcaggcggaaggttacaggtggttggagctggaagtcatccagactgagcatgggttggcaggacagcttgaggttggccacagggactgcgatctcctgatggtcatggttccgggccacaacttctaccacattacactcgtctttggctccctcggtgaggcagagcatggttagtgccagcacgtgctccgcatcatcctcttcctctaccttaaaggtgaaggagcgggtgtggccggagagctcacagccgaagaaaaaactgtccatagtgaccggggccgggacccgtaggcccccgacacccccggcccgcgttcggctctcctgactcaaaaacgctaaggcagctgcagtaccggcggccatgctgtaagagc

SEQ ID NO: 339023 - DNA, 1000 bp, Homo Sapiens
ttttttttttttttttagatgcctcattttattagtcagggttctccagagagacaaaatcaatatgatatagatatagatataggcatagatatagatgcacatacagatatagatgtagatacagatctatgagcaggcatttattaaggagattggctcatgtgattatggaggctaagaaatcgcacaacagctcatctgtaggctggagaccctgggatgctggtagcatggctcagtttaagtctgaaagcctcagaaccagggaagctgattgtgtaactctcagtccaaagccaaaggcctgagaacccagggcctcctggtacaagtcctgaagttcaaaggccggagagccaggagttctgatgtccaagggcagaagaagaagagtgtctcagctccagaggagagaagaatttgcctttcctctgcctttttgttgtattgggcacccagccaacagaaggagagaatttcccactgactcacttgccaatctcttctggaaacacactcacagacacacccagaaataatgttgtaccagctgtctaggtattccttaatccagtcaggttgacatctaaaattaaccagcacatggattaacttccaggatccactattctagtttcaaaatgtggttttgggattcctagagagaactctgatgtactcttaaggagtccccagtgttaataatattttcacaataataataatgaaacattaatcgtttttcatctcattctctcagtagtgtgcagtaaagtttttttgagctaacatgacctatgatataccaataggtttaatacaaaggcagatatgataatacaaatatctcttattaagccagacatgagatctggaaaaagttaaccagtgtcacactttttgtttttttatttggacacaatagattgctttttcacaaaacatcctatctacattaacctataactgatttattaatgctattttaacataaatt

SEQ ID NO: 339024 - DNA, 1000 bp, Homo Sapiens
ttttttttttttttttttatactgtaaaatatttatttaataaaaataattttataatctatacagaattgaataaaaagtacaacaaattattttcacttatttacaaaactgcatacagtacaacttgcacattgagttcagcattctataaatatggccacataccaagatgtgaacatattcttgtcttatataagaaaaggctcaggttgtatgccacaaactttgaattaaattccagggaaatattgctttggtaacatgaacaatttgtaccacattccattaaaaaaagatttaataaaatccctcaaacagcacttttctacttgtttcggagtacacaattcccaaattagcacaaacaaaacaaagcaaaaaaagaaaaacagacagaatgtaaaatgaaggttgctacttttatgatatcacttccctttcccttccttagctagtgttcttttcctttcccttaatagtaaaggatggtgaatagaaaatgacctattcttatccccatccatttgcttctaggattcctgcttaaaccaaatgagtatgtcgactttgcaatcttgacacactattattaacactgttcagctgtgtcattctaaaaaagttaataccccagttaaaagcacctatctagattcttttcaagataaggcaacaaagtcagctttaaaatagttttcatgtctgacatatactagcagccccttggtagactgatttcagaattaaatgcatatagaacattttttcaagtaacttggtaatgaaatcactagcaattttaagcaaatattcaagatgatctacctttagaaacaaaggcagatttaaggtaaaaaaatgcaggaatcacatctatcctagttcctgtcccattgaaataattgaaaagaggctcagtttatgaaaaaggccttggactaatgcaattcctattgacatctttacttggataagaaaaacaaattaatataaaaac

SEQ ID NO: 339025 - DNA, 1000 bp, Homo Sapiens
tttttttggcaggtaaaagaaaagactttattaataatcagtgggtgggaggtgagggtgtgcaacgcactgcaagcgcccagttcctcggaggacggcgcgtggctcagtccaggctcatgtcctcctcttcgtccttcttgtccttcgtgtcgccctctttctgctcgggcttggcgttgttctgcatggctttggcaaacgcttccacatcgcccttgttggcggcctccacagcctctgcaggcagaccgaactggcacatgagggggcccagctgccccgaggccaaggctgcgctgaacatgcccagggcctgctggaactggggcgaggtcagggtattctggatctcatccgcggtctgcggcagcgactccccagatggcaagtagggaagcaggcgctcctggacatccgcgttggcgaggatgggagccattatctccggcgtcagcacactggccaggtccacttgctggccgcctgctggcccggctggtacgttcatcgtggccaggatgctctggaggtcgctcagctggatgggctgggtcgggctggctgctgtgctggctccattcccggaactgggcgcggggctcgggctagttgctgaggcagctgctggagcagaaggggctggggtggcacgggtggaagaggtggtggatgacggggtgaccgctgccgactggctccgggagctggaggaggagctgctccctggaggcccactgctccccagtaagctggccaggccaggtccagtcagggcccccagcccacccagtcctccgaggccggctggtccgatgagctgcatgagctggctgtggctcatgtttcccagcaggctctgcaggccaccctcaccgcctagcgcagagagttcgtggccgctgcttccgctggcccccagcgccccaggcatcggggggttgttcagatactcgttgactttccggcaatgctcctcatcctggtctgtcttgggttc

SEQ ID NO: 339026 - DNA, 1000 bp, Homo Sapiens; identical to SEQ ID NO: 158906

SEQ ID NO: 339027 - DNA, 1000 bp, Homo Sapiens
tctttcaaatattttttattgaaatgacaataaaataaaaaaagaacagtgatcactttaaccaaacttactttacaaatataaaaatataaccaaaacttgtttcttttatacatttgccataaacgtaataccagaaaagttctcaaaaccaaactataaatgatgcttgaatactatgatgtgaacacaataaccaaaagtttaaatttctaaatacatgacctttccctcaacagaacagcataatcaatatatcttcccaacttatctctatttttacgatatgatccattactaagatacaaaatacacctgaactggcctaatctagagttacctaggttttagtaagtttttttccacaaaaacaagcttaataactataatacaagctaatattaaaatgtgttttatggctcaaatcaaattacagtattaggtttctcatcacgatttgaacaaaagcaaactgcttgaaatgagtccagtttaacccaaataatcagtgatgtataacaagtgaagtaagtatgggaaaatcaaatcttatgctacagaaagctgacttatactacagtcaacaaccactaagccttctttggcaatgaaacatacaaaattgcaaactctgatgcagtctcagtgattggcatatactgttccaaacactatgaactagtaaaaacattaagtttgaggatggaaaagctaccccaagcatttcatctcaagtgactgaacaagtactgtaaaaataaagtcattaaaaagccgagaacataagagcacaacatttaagaaagggaattttaagccgattgcttgctggcctgttgaatttgaagtacttctacctctcacttctaattaaacatggaagaaaacagactggctaatttggtcacactttgtccaaatacagtgttaacttaatggaacccttaaatatccaaaataataagtgaatgctatttataagacaataaaaagttttaaa

SEQ ID NO: 339028 - DNA, 1000 bp, Homo Sapiens
tttttttttttttttttcatatggttatttaattcagttaaatagaactgttatgaatttgagaggaatgaagatattcaaacactaacagaaaatcattagccttatattagagcattcaaatgcttatgtaactcttcaatccatctggcttcataaaaaccaaaattttgaacacaaaaaagtggcagagtttacattaccttttgtatgttcctaagtatgaaattgcatcaatttattatgaattaaatttgaaaagcatcacagatttaaaaacaaagtacaaaagagcctgattctttttaattccacaaatacctagcatctcaaagtaacatgtaaacaaacttctatgctgctcaatgaatccttccaatttcgataataaactaaatagtattggatctagtatatgactttcatgtgtaagttatggttctatccattactttaacaatattactgatgtaacagagaaaaattttcaactattgtatttatttaaaacaaactgacaagttcaagcacctgtcttcagaaaagccagcagcatttttttttttttaacatactcaaagtaagatttggcctaagcccttaatacctttctgaacagccatgcaactaaacaccctcaggagatgttacataagggagagaagaacatggagcaatttgcactttttcccctagataatattaacaaggtaaagcaaatccagatctttatgaatgaatggctgtcatgtttaatacacttggagctctataaaactagagccactatcatatatgtttatatagatatatatgtatttttaataaagtctctcacttgcttcaaaatttaaggatgatctttttcctggtcagtcatttcaagggaacaataaataaagtagaaaaggatgaactgttttgcatatttctgtggaagaacggaaaacatactttgagaggttcggaaaattcactgtacagaatgaacagcttatat

SEQ ID NO: 339029 - DNA, 1000 bp, Homo Sapiens
ttgattgttatcttttattttcatatgaaaaatagattttaagcaaaattcaaaaataactcgacactataaataaagagggccttaagtacattctttttgttaataagatttaccagtttgtaggttcaaatatgcagttaaaatcactgtttttttttaaacatgttacgaagattaaaaaaaaaaaggctcagccacatgttggtttaaattcccatatgcaactattcccatatgtactatgtacaagtgatttataaaaacattggcattaatggtacaggcaaagtaaactacagtggagtttcagaatctcagttcactgcatcttgattaaaaaaaccatgtgacattccaattatgaagtcagtgaggtagtggaggtgttttccttgaatatatttacacaagacagtattcctcatctggctgaggcattcttttcctgattttgtccaagttgagagtcctctgtgagggaagactccagctgagacagactgggtgatgacgctgaatctgcagaggtgctggtgaccaattcccctaaagcatctacttgtctcctcaaactgtgtaaagtgccctctgtctgccgctttcctttaattaatacttctgcttgcttggacatacagtgtcggagttgggccttgagtcggtcttcccggtgacgcagtttctcccggagtgcttctccacgccagtgttcatccattatgtgaacttgggaaaagttcagtttttcttcaaaaggtccctcattcatggtaaatggaaggttctctttcaagctttccaattctccttctaggttttcgtttctttccaaaatagcttctagatctgctggtagttctggaagaaactgattaagattcttcaagctggttctgatttcatccttcacctcagatttaagtgtcctcattgcatcactgatttccatttgtcttctctccaaatctttttggtttgccatctgtttcttgagctc

SEQ ID NO: 339030 - DNA, 1000 bp, Homo Sapiens; identical to SEQ ID NO: 158907

SEQ ID NO: 339031 - DNA, 1000 bp, Homo Sapiens; identical to SEQ ID NO: 158908

SEQ ID NO: 339032 - DNA, 1000 bp, Homo Sapiens
ttttttttttcccggtcgacaattatatttagtgaagatactagatgttatttacagaagatatacatacatacaattcctacacattaaatgtagtctaattgtgaaaacaggaaaaaatgtacttcaaaattacgtactaaataaaataaataaaaagtaattatttggcacagtatctattatgtagcaaataaataactctataccattgattgaatgaactatttacaatctttgaaagtgcaaaacaattactgaaaattaagatatttgtaataacatttaagtccagaaaatatgttttcatcaggtacaataaatttgtagccaatagtaaaggtttttaatgcccaggaaaatatttcaattttgaaaaatgttttatgcatattgtgctcttctgaaatgttattttctactttaacgctggcaaatttaagaatcttggcatttcttagtggaattcttatgtatataatcctgatttgtaaattttgaaaagttacattgtaaacataaatattattctatatacattcagaaattacagaccagtcctccctaaattacataaacagccataatgtttcataataatgtggtcaggttctattccttcagaggtaagacaatgaagatggaagaatacaacctataatttggacttctatagattcctcaacaccttcccgaaaccccaggctccaaatcaagatgttgagttaaaattttatccaaatctatcccatttgtagcacatctcatcccataaacactcttagaaaaaaatgtcaggggcttgctagttctcttgacaaggctatttctaccaaactcttcacgtgggccttattcaacacttcagcaaagaagatggcacaagtggaaatgaaacagggtagccacaaactggggattcctaagctagagtgtgtaagctttaggcatgtcaaataattccttctcttgctaggtagctggtaagctgaatgcagcc

SEQ ID NO: 339033 - DNA, 1000 bp, Homo Sapiens; identical to SEQ ID NO: 158910

SEQ ID NO: 339034 - DNA, 1000 bp, Homo Sapiens
atactaatttgagttactacttttattctttattgtcacattttccaagttttgcgcattcaaacttggcaaacatcatggagatttgtacaaacatacatatacatatatacacacatatttatagccccagcttcctcattaaaccttgtgctcaggctcctgttaaaagaggtaaaatggtgagaagataaaaatcagggaaaacatgaataaatgctgactgacaaatcttgttgttatgaatttgtaaggcagacattttaaagcaaaatccattaccttgctaaaatttccactaagctacagcttcagatatttacaagaaaaataaatatcttttaacagacttcaatgtggtttaacagcaagctagctgaggagttgtattttgttgttatttcaggtaactttttattaagaaacagttaatatttcagtgattacaatttcaggtgttcaaaactcaagaagggtcatcattatactctgaagcagaattcttcaggtactcatctttaaattactacccaaatctatcacagtcacattcaggctttcaatttttaaaaacatttaatgtttggtaactaaagggtagatgcgattagtgtactctaggtcgtttgattttatttttttctgtaggagctttcctcttttgtgataatccagtcccaagttccttattattctgaataaatgaaatagcttctggtagacagtaattttctacatgaggaggtgattcctgcatgagataatcagcaatgtattctgttctcaagcagtacacgttctgggcagcagcttctgctatattaactcctgagtcatctggtttcagtttattcaagtcagaaaaaagatgtgtggcctctttaaataaaggtacagaatgaccaggtagcacctttgctcctcctgactgaagaaggcgtttgaagcctgcttctcgagactgatccacatgtaaaataaccttccacccactaaatgc

SEQ ID NO: 339035 - DNA, 1000 bp, Homo Sapiens
ttttttttttttttttttttttttccacgttcagtcgcagtttattaaagttagaagtgtctccatccaccccctacagaggcttgcgtggtggttccagtctgctaaatatttcagaatggggacctcattctatctactgatttatcaaatctcattaattaatttcccttgctgatatgaggggttgggagagaagggggacgtgggaatgtaaggaagagcgagagtggtcgggctcatggggtttgatggactgtgacccaggctggcgttgctcctctccggatttcactcctggctgaactggtgccttcggtaaacagctgcttaaagagtgcggggactgctgcagggacttcctttttccactaggcggcaccacagccaaagtgataagaagtcaagcgtggggcgggtggctggagattgtctcttcccctccttttgctcaagaattcgtccattccttctccaactctcttcaccaccacccccgcccccatctccactctcagtagcccgagccctcccattctccactccttcgacccaattccactaagtcaagaaccgtggtcggtctcagccactcactcagcgccactctatgctccgaagtccgtgtagcaccaccgctccccgtgttctctgagctggcttagcttgaaggaacctcacaaaaccaagcccggatcgctgtcagccactcactcagtgccgcatggagctcctcggacagcgcaacgtcaaatgtcttcgtatcctgagagctcgctccttgaccagaaatctcatcataagaggccaggagacatactggaaaagtgactttcccagcagacgaggcccgaaacagggagtgggatggggctgaagagtggtgatttggtggccccgatgtagttctgccgcctgcagaagatgacccgggctctgaggttttgttcattttatgattatttttctgtaacaagccccagctcttcatgtcattttt

SEQ ID NO: 339036 - DNA, 724 bp, Homo Sapiens; identical to SEQ ID NO: 158911

SEQ ID NO: 339037 - DNA, 1000 bp, Homo Sapiens
agcagcccaggatgggggctggggtaggaggtgatgcccacgcagggctgctgtggtcagccctgagctggcatccctggggcccgggatggagtggcaccaacaggcaagtggggcggccacaggacatgatgccagcccaactccaccatctgcgcccaaacttggacaggatattagaaggtgtaaaagtagtccagtataaatatatatcttctacaatattttaaacatataatttgaactttaattttggtaacgctaattgttaggaacactacctggttgcttatcctatagcagtaaattaaaaataaataagcactctggcgtgaacagtcttctcagcgctctccctctgcctttctcctttcctgatgctgagacacgatcagcactgtcctcccgacagaacctattcctgtgtcctggtgtcacccccaacagaacctgtccctctctcctggtgtcacccctgacagaacctgtccctctctcctggtgtcacccccgacagaacctgtccctgtctcctcttgtcacccccaacagaacctgtccctctctcctggtgtcacccatgatagaacctgtccctgtgtcctcgtgtcacccatgacagaacctgtccctgtgtcctggtgtcacccccgacagaacctgtccctgtgtcctggtgtcacccctgacagaacctgtccctctctcctggtttgcaggttgtgcagtttgttattcacaaatacacatttattttctgttgaaccgtggttagtagaagctaattggcagtgcataaaaacatgcagaagagaacacacacctgcctgaattcacaatattcagaaactgactgaggaagatgcacgggtctgttatgtgcagtggggctgccgtccaaacaatgttctgtgttcggaggcggcacacagatgcaattacggattccacagacaagttgtaactgacagtggtgaccactatgtcctcgtgactttat

SEQ ID NO: 339038 - DNA, 1000 bp, Homo Sapiens
tttttttttttttttaaaacataaatatatttaaaaaattaaaacacctaagaaatgcaatctatacatgtgaaaaagtaaaatatttatatgcataacaagtagttgcaacattatccataagcagcagttagtgtttattttccctatattttggtttaacaccatagtgtagtggtagttcattctttttagggaaattacataaagtacatatagaatattattagtaagttatagaagactgtataactggaaaattaattccaagtaacagcatttcctctaaaaacacatctattattaaacgaattactttaaactagcagagaacaaaatgagcctataatttattaagtacaagatatatagtcaacttgcataaaattacatatggcattttaaaaagtctattctaaaatatcagtaattcaagcaattgggatttccacaggagagaaattgccattactttcctttttatgaagaaagatctgccttaagaacatcacaacgatgttattaagaaatgctacagcatactttaaaaatcaaaatggtgaaacagatgcatcaggatattcttttacagataccagccctatagcagcatttcagaaggtgatttaaatctaataactgacttgggtttttattctcttctagaaatacatattacatgtatagtttagttaagaattttcatttccattataaatgggaacttttcatactgattatctaaaggtataagaaattaagtaattggatagtctagcacttcattagaaatatatccactgactccacaaaaacaacttttacatataagcaaattactaaaaatatctgaatcaggagaaatgaaataaaatacagtgaatggttttctcttttatctctaactgtaaaaatcccttttgcctatttatttgacccgtctctattcatgcaatttaatgaaccctcaaaagaatttacacatctttatacagaattc

SEQ ID NO: 339039 - DNA, 1000 bp, Homo Sapiens
ttttttttttttttttttggcataagatcacactttagttcagagacacatttgcataaatacttgaaatggatccacccctgcaggtggcagcctgagaacatgtggctctccaaaccctgcgacgctgcggccctttaggtgatggattttaacactgaagacagtcgtggtcattcttgaagacagcttggggtccagctttggagcctgctttgacattcaccattgactccctgccccacgcctctcttgtactaattttttcccctgtgaggtagattatttatcggggaaaccagatagaattttttttttcatttaagtttgctagtcctttgcaaacagactgacgctgagtgtcctgtctgagtcaataagtgcacttttaccttttaacctatgccctctacttgaacccgagcaaggtccagtccactggacagttgatgatagggtctgccgccccataccctctcctcttcccccttaggaatttgtgcagtactggaggggttgcggcaatgggaggcctgggtgggccgtgctgccttgatatggccaagggacccagtcaccacagtggagacccttgtctgcacctcagtaccgcatgtccaggagcacaagactggcccctgcccccctgaatcacagggggcacagctggctttcgcagggcttggcatcctcgggtttcagagccttgttgcaggtggcagaggcctggccggaggggtccctgcactctacagttcgcctctgccagccggccccgcaggtgctagagcactcagaccagtcccccagcacccactgtgcgtggagcagcggctggatgatgttggtggttgctctctctttgctgctctgcatgctaaagtccacgtcattaggaacaaagaaggtgtatttgacttttggggggaagacctcgccagggactgtcaggagctgcactgtcagaggctctggcaagggccggaagctctgcaggcgc

SEQ ID NO: 339040 - DNA, 1000 bp, Homo Sapiens
tagtttacaatttatatttattatgcccactgaacccacaaaagcagtgtttaattttacagtttaaagtcacacatagggaaatgctttacaaaataggatattgttcctcaatgaaaatattacagtataggtcccaaacggctcagttcaagtcttttacctgaataacagagctgttgtggaatgcaggctacaagacacagtaatgctttaaatagttgattaagatttgaaggttgccaaagctgagagacattttaaacaagacccgtcttagttttccaagatttttggtttttcaactgcattatataccattgcttctggaaaattgagggtaataagcagcgtacattttacatcttatatacagtatgtaaatcttcaatgattttctctaccatcaaagcaagtttcaaggtttaaaaatctgttatacctacttaggtttattacttgactttactcacagactctaatatagaaaccaaatatttatgcaattgcttctatcaaatgcaacatatttcttcagtctatttagttatctgcaaagtctatttacaaagcatatgtatgatttcctctgactaataggtcatacaaatacgtaagtagtgtttttcaactcgtaattgtagcaagatgagccatcaaggtttacgttgtgcctgagtgtataatgcaaaaatagcatccagagattatatatttcttaatcaaaagtctagctttacaaagtcacatacagtatgttcttctattgtaaatatactctcagtataggtagacgtgtttctaatatattgtgagttgttaaagaaaaggctgagatatagtcaccaagtgtttaccaataacataaattattgcaaagcttgaaaaaaaatcaggccaaatatacacgacagtttgaatggaatgctgaggacttagtgaatgctgaaatatgactcatctaaaagtctgctactccggcctgatgctcctcaaattt

SEQ ID NO: 339041 - DNA, 1000 bp, Homo Sapiens
tttttttttttttaagatagaaatctatgcactttaatgattgccagaattgcccagcatagcttcagtaaaatagagaattgtctagaaaatacaatctccaaaatgtgtgcaagtactgcaaaccggacagaccggggcagggcaaggcccttgaaaccaagtcctccttgagcacctttcccaggttagaaacccctcttcagcctgtgcttcgcacgtttccttcagcgtgccgccattcagactgcgccacttacgtcccagtgccacgctgcgtggatcaagtgtcaacgggaaagtatgagttaggcaagcgctttttttttaagctgtaaacgcttcacatgactggccccgtaagaaattgtgggagcttagatgagcctggagcttttcaggaactggatgaggactctgtacacaaatgtgtactggcagagagtctgcaccagcatcattctctgttgcctcagcatgtccagcactctcgggatgtccagcacctcattgtgttccaggcaggcgatcatgatctccgacaaaatcaccacgccagtccttcctaccccagcactgcagtggaccaacaacggagggttggggctttggggatcacttgtgctatttgtatggcgtcgaacagactggatctcttcaagatatgataaaaatcccttgaggtcttctggacagccatgttcaggccagtctgtgtattggaggtgccagacggtcctctcttgcccggtaaggaggtgcttcatcttcaggcctgtggtggcatagcagccagagtctgtgcggaaccgggtcgtgatcttaaaccttccataggtgacagtgttgtgcctggaaccaagtcgtggccagtacctaaagctcttctcccttccaccctcctcttctgctgtcaccattgctataattgcaattccctgttcccataccatctgccaaaaatcttgacaggtattctgtaatggtccctgtgtggcaa

SEQ ID NO: 339042 - DNA, 1000 bp, Homo Sapiens
ttttttttttttttttttttttggtagagatggggtttcaccatgttggccaggctggtcttggactcctgacctcaagtgatccgcctgccgcagcctcccaaagtgccaggattacaggcatgagccaccgggcccagcctacttcttgaattaaaaaacaaaaaacaaacaaaaaaacccaggcagataatgaaatcctgcatacactcaagtctgcataaagcataaggccaaactggaaagtgggcatttgaacaaccctcttcctgctcccttcccctaactaacatgggcttctgggcctatcaaccattctttggtaaagagcagcaattccccataggctctttaacaacagcattggtgtttgaggttgcatctttaaaacatctatttcaggatttggaagcttctggaaccataactttaacccagccttccataacagtctttttactttctattacagaacatgacactgcaataatagcaatgaaccgcttcagctttttcacttctgcagaagctaaaacaacttctccaatatataaaggggctggaaagctaatttcctgggaaagaaatacacagcctggccctggcattttagttcctaggagagctgagataagtccgttgatcaaaactccatgtacaattgtatttccaaacttggtgtgttttgcaaagtcttcattcaaatgcaaaggattaacatcccctgttaattctgagaaggtagccacatcagtctgtgtgaaggccctcctaagttcagcgcggtctccaactttgatgtgcatatgctgaaagtgctgcagggtcagcactggcaggttcagacagactgtcctccgaagcccaccccaccaaaggtgatggctggaaattagtgggaacatcttcagcaccctcaaatttcatcaagagcttttagcctgcttcagtcttcaaacatgcaggcaccgaaaaaataaatatgagagtggatgaacgt

SEQ ID NO: 339043 - DNA, 1000 bp, Homo Sapiens; identical to SEQ ID NO: 158913

SEQ ID NO: 339044 - DNA, 1000 bp, Homo Sapiens
ggcttctcgagttagcatgatccaaactcaaatatccatttctcgtatctttcaatgtctgcagcagacactgacttagaaaccttttttaaagccatctcgaaatcctccatagttgtaggcatgtgcatttcttctttggaaagatttcggatttcctctggagtcaaaccttcaatgcgccttctcattgccatcaaggacgcatccctgcacacgttggtaatgtccgcacctgaataaccttccatgttttctgctatacttgcaaggtcaacatcatcagccaattccaactcacgtagacttattcgtaatagctcctccctgccttttgctgacggcaaaggaatatagattcgtttctcaaggcgtcgtcttaaagcctcatctatatcccagggaaaattagtagctgccagaaccataaccattttggaagggtcatcattttcagaagtacctccaacaccatccatctgaaccagcagctccgctttcacccttctgcttgcttcatgttcttcagaagtccctcggcgactacagatggagtctatctcatcaataaatatggtggctggagaataaaatcgagccatttcaaacagaagacgaacaagcttctcagattctcctctgtatttggaagtcaaagttgatgaagagacattgaagaatgttgtcttgcattctgtagctactgctttagcaaggagcgtcttccccgtgccaggtgggccgaccatcagtactcctttccatggtctcctaatgcccttaaagaattcgggcatccacattggtaacactacggcttccttaagcaactttttagcttctactaaatcagcgatatcatcccatcgaacattgggattctgggaaattatatctctttccaaagcttctactaagtctttatcatatccggtactatcaaatttatttgtctctggttctgttactgcagcaggtgatttgttcttttcctctcttc

SEQ ID NO: 339045 - DNA, 1000 bp, Homo Sapiens
ttttttttttttttttttagcacacacaagagtactttaatataaccttaatggtctaacaaaccttccaaatggaaggaaatacaaaataaagttgacacatcaaatttaacttatactaatatacttcagcattacaaatttaccaagtcattttgccaactatgtgtagaaccacctaatatcaaaatatactatggtgggtaagctctgattccagagggctaaagccaaggttttcaaagatcacacgtaccagcagccacacacacaaagggttgcgcgatcctacggctttattgacacctttcatcatgctcttaacactgatgttttcatgggttccttccctgtaatgaaactgagtgtagataatcaatttccataaagaaatgtacagttaaattaagaatattaaatcttccacacatgggctcaaataggaagtattttgtttagtaaaatgaaaattacttttaaaaaatatctgcagtgtttttgaaatgcaaggcaccaatagagagcagacattccagctgagtgattgtctggaaaaaaaaaaaatggaaccggtcagtcctctgtccttgttaattagaatacttccttcttcgtgtctatgcaacatcttccagataatccgcaacatcactgagctgggatacagtcagatcttgtgtgaggtcatcaagcttatcactggtattgatgtcatctatttccacagaaaggtcttcttctatctcttcaccaatacttatctcacttttctctgagcgatggctggtactattaaaatcatcaacatagtcatcatcttctccagttcctaatccaagtgatccaattttatcactgatcaatttcagatctttcaaaactgtatttccccttttactctcagagtcttttaaagaaggggctcccgccagggagctgagtccactttttaaggggggtgcatccgagagcgaggccagacttcctgcttgcttcctag

SEQ ID NO: 339046 - DNA, 1000 bp, Homo Sapiens; identical to SEQ ID NO: 158914

SEQ ID NO: 339047 - DNA, 1000 bp, Homo Sapiens
ttttttttatcttaggaaaacatgaatctcagggtcacagctttattgtatagattttttaacacagccatattacaaacattgtcagggaacatttacaagaataaataagatggacttgcaggtgtaaaaagattacacttcactgtaatgtacagtcaaaaaatatatctgatattcattgacctgacattatttaccttctgcttttctgagctagaattgaaaagaaaaaaaaaacattgacagcacagtgctggcttttttaaaaagttgatttattttgttttctcttctcatacgtgctttatctatcaaacacccaaactgtacaagtgcaggccattgggattcatggaggaggctgcaaagagtgtggagactttggtctcatgcaatattatatgcccagtggatgtgaagatgtcagcctccctggagttgagcgggaaccttgggatagcttgtgagggtgtccagaagccaaggcaatggtagaggccacaactctttgtctttgattggctagtagaatgtagggtgaaaagtgcttttgagtatgattaccaatatgggttaacccggatttacatgggctagctcaggatccacctggtgatgaaatgtgtgcactggaaatgattataatcatgtgtaaattgagttactgtgcttttgcttttgcagtgtgctccaacaggccttgaatagggagtggggtagaaataacctctggagataatgtgtatggtaagaaaagccctgctctgtgtcctacttggaccttcactggttctggctgtcactcatggccctgttggtcagtgggtctgagttatggctgctctcatgagagatctacatgggtattgggtctatggcaaagcagctgttccctatggtttgctgtttggtgataaccagcctggatcagcccagtatatgtggccacaacagcatgttggcctgctcagtgggggcacttgggtgggagagcagg

SEQ ID NO: 339048 - DNA, 1000 bp, Homo Sapiens
cttacccctttattcatgtagttcctcctatcaggaatatcctgcccactctctgcttaactatgacaagaggtcatctgtccaaagagaaagaagagagtttgtggatttaggagaaaagaaaatactccaaatactgctatgggcatttatttaaaaagagaaatgaccaaagaggttaacaagtatttagatgaagctgggcagttgtagtctgtggtgctcttggtctgcacaaatcttcctcttcctccagcagtgctgtatggatgttgttgaatgttgaggtctgtctgcattttctcattttcatgccaagtcaatcactggatctggctgtcttcctttctgtcctacctatctttgcttgttttctctctctttcctttgcagtgttaaataaaaatttattcccccaaaatttggtgttctcattttgtttgacttattttactatgttgatgaagagggaggaaaagtttttctggggtacaaaaacgcatatatttatccgatatttgaggactatactacccactttggtgaaagctgttctgtttatttactggagcttaggagggaagaaggcaagtttgccctgatggtgaggagcaaagtcaaggattacactgatttgccccagcttatatttccacagattcttggtatatttagcatctcttcccctgtgccctgttgcattcttctctgtgcctattgtaatgagaaagatactaagccatagtcagactcatcttgctgtagctgttttaaaagtttcttttggcacaaggcttacaaagcttgaagggccacaaggctggtgaccagcattacccagaccttttcttgtaggaagcctgaactgagagtgccttcattatggctgaactcaaggtgttgtctttgtttcaatcccgtcactgtgtagttccctgtctctgtgaatagaatggagaaaaaatggccctgaaggcggatacctgacttctggcttctg

SEQ ID NO: 339049 - DNA, 1000 bp, Homo Sapiens
ttttttttttttttttctttttttttttcagaaaataatattttatttttaaaatagaaaaacaaaataaaaagtgttttaaaggcaaagtatttaaaagatatttttcttgcttagctgtattttctggaaaatggagactcttcttaactgggagacataaagtaattcccaccaaaatttagaactcaaagaaaagcatccataacacttcagagtgaatttttaaaaatatacacgcaggcaaagataactgagcagtatttagcttcttaattttccgcaacagtagatcctttatatttacgtacaattcaatgtttcaagagaacatgaaaccagaacttaaggtgtatttgatttgaactcaaactggcaaaaaaaagttaggaaaggttcagatgaaacatttccaacttgttaaaaaacatgtatactcgcaaagactgttaaattataacattttctacaaaacattcataagatcagtcatctcatacttaaaatgcaacaaatgttagacaattagaatgtgttcaaacaggctgggtgggtgttaggacggaatcattctttagatgtacagtccaaacattcatatataacagcgcaacataggacaatctgatctgcttctttctatgtgcaaaacaggacacagtttttttttttctattttgaaattctagttacctaaatatacagtagttggataaatagctaatcgatttacacatacatctaaactgtaactctctatagtatgaactgttcccccaacttccctgcacagtacaattgaagagtagtagtacaacaatttgaacaatcaccagttgtacaattttaatgttatattaatatatgtagactaaaagttcttaagcaaattattatttccagtcttattcattgatctacaacttccattaattgaaattatagagaagtcttcactgttttaattaaagattttgtccaggcatgagaatatcactaa

SEQ ID NO: 339050 - DNA, 1000 bp, Homo Sapiens
tttttttttttttttttttttgagacaaggtcttgctttgttgcccaggctggagtgtagtggcacgatcttggctcactacaacctccacctcccaggctcaagtgaaccttccacctcagccttaccaatagcaggtactacaggcatgggccaccatgcctggctaatttttgtattctctgtagagacggggtttcgtcatgttgcccaggctgctctcgaactcctgggctcaagtgatctgcccccctcggcctcccaaagtgctgggattataggtatgagccacagcacccagcccaaactacaaattttaatagaattttaaacccaaccactggccaaaaatcactcggtcacgaattcctaatccacaatcacatcagtaggaagggaaagcactcattctaacacagatccaagaaccaatggctaccccgggtaccttaacagcatcaactcagaacttaaaaaatcaactagagatcatccaaggaacgtaagtataattctacaaaaaaccatctcatccccattgcagcaggccccaaactccagtgaggcttccataggccatggagaatgggtttggctcttgtcacagggtagagccccatgataggggtctgaggtagatgaaaacaacagggtagccaggggcatctatagaagatgttacagagctgcctgggcctcatgacagttgcacctcagttacaaatcccagacggctctatttgcttaaaccagtttttccagtgacgcttacatgctgactttcttggtttctatagatgcttggtttcaaaaataaaactaaaataacaaaaattccaaatccctcaaatggaacaaataaataatagtaacaatatttacataagtatgtcacattgagagattccagcatgaccaaggaatggaaaatccaagaatgtgccctggcctgtgtggggctcaggcctggctcatcgtcaggtgtgaagacaccatgggg

SEQ ID NO: 339051 - DNA, 1000 bp, Homo Sapiens
tgacgggaattaaataacttttgactttatttcactagagataaaaccagcagcatcacagcttgagccccttacccacccccttgtcctccccaccccccactcttctgcctaatgtcggtaatgggggcttcgggatcgggaccttgagcgccttcgagaagagctgtattctcgactgtatcggggggagggtgagcggctctgccggctgtactggcgttcccactcttctctctccttctctcggcgttcccgctccttcatgcggatcttgcgggccatggctcgaagctcgtcttcccgctcctgccgctcatgctcctgctggatcatcttttcttgtgccgccttcttatccgccttgaactgcctgttcagcgccttctgcatcctcagtttcagcttctcctgaggcgtcagcttgggtttggcagctcctgtctctttaccagcggcaggttcggtctttttcagcttctcgcccacagcaggggacgcggccggcctggtcagcttctctcttgcgggtgatggcgaggggctctggctgcggctgcggctgcggctgcggctctggctggggctggggctatggctgcggctgcgagtcaggctgcgactgcgggacgggctgagggaccagctgctgcggctgcggctactgctgtggtgcctgaggccccggccgccccgcctgtagcggtcccctgagtgggagcggctcctgcttctgcgccggggcccgtaaccaccacgccgggcgggcgagcgggagtaccggtgtccgtctcgggagcccccacctgagtgccgccggccacggctacgggaccgggaatagcgccgggagcgggagcgggagcgggaccaggagcgggaccgggagcgggcgtggcggccggaacggtagtagcccccaccacggcgagagcgggagctggagcgagagctggagcgggagctggaggtcctcgaggcagaagaggaggaggaggag

SEQ ID NO: 339052 - DNA, 1000 bp, Homo Sapiens
gaattcggttttttttttttttttggggatgttcttctggacgtataaataaccatcaggtggccaattctcatccagagtggacagggtggaatgggatcatccctgctttcaaatagggacattgacgtacagagagaggagtgggttagctggggccccagggcacagcttcaccaccctggggaggtctggggagagcatcctgtccttcaggacaccccccaccagcggctggaggtgagcacgccatgagtcgccccaggtctgggaagagtgggtgcatgggtgcttaagaggctgcattctcagcaggccctgcacctgccccgtcctccaacccctgtaggccgacgtctcctctgctccacttgatgttcgaagccgggtcaagaccagctctgaggcctgaatcaggctgtgctgcaggatgtgcacgcccttcagggagaccacggcaagctcctgcagcccatccccggtcaggtccacgtgagccatggccagcaggggactggagaagctccgctgccacagcagatggaacccgtgctgggcctcaggaagccccgactctgggccccggtacttataacacagcagttcctgtccataggtggccaccaggacttctggccgcccatccaaatccacatcggtgaccaggctgcagaggacgctgtcaaactggtcactgccgggcaggagaagctggtcttcaagaccccggttcagcaggtcccgatacaccactgctggctccaacatgctggccacgagcacgctgtactcatcttgtagtggcctgtccttggtctccttggcggccgagaggctgaacacaatcactcgggagatgggaccgtcctgcaggaccgaccacatctgcagaacctctcgactccgctggtccacgtgggcgacacggacataaccactctgacagcccagagctgagaggcgccgggacgtgccggggaagttgtggacgtccagccag

SEQ ID NO: 339053 - DNA, 1000 bp, Homo Sapiens
aaaaaacaaaaagtttcttattaaaaaacttggaagccaacattgaaagcatggtatgtacacaacaacatttttggaaggacatataaagtgaatacaaccaaatatattaaaatggtttcaattaccagcattgaaacagtgcaaaaaaaagccaaatacaattgcacagatagtggactcccttagatcttgaaagtgaacttgattcctgacctctcccattgtcactccaagtgaaaaatgaaagcatggggcttttcttgcttcttggttagtatgagacattgtgttcatctgagagcaaaatcaacactagcatcacagcagaagtgcccatttcagcaaatccggtaaaaattgtaagttggcatcaagggaaccaatggataccttagggcactgacaattctcaatacatagaaatgcttgagggttgtgtcggttcccctggccacagtttgtcaggttgtttagccagatgccccattggtaaggtagactgaaatctcggtttagggctgaccccaagaaacagtctggttcgtgctttggtatggtggactccagtgtgcatagcagctgctgtcttgctacaagttactcagcttaagttcagattgtgattggtggctcatttcaaaagttttgagattgtactgattgatcttggcattttcaagtttggatttcatgtccagtggcttttcaaaaaagttgactaatgactgttcagtcagaagtgaagctaaaatatgttcaagggagacagtccagtccctttctgccgcctctggaagtgcctgggagtcctggggcgtcttcccagtgtctgcaaaaaccgagtcctcaggagaaggagctgaagcccgcagctcctccccacactcctgggagcagcttccagagctgctgcctcgctgccccacctccccgatctgcagcagcagtgtggtgactgtggcgatggcttgatacaaatcattttcttctggatctt

SEQ ID NO: 339054 - DNA, 1000 bp, Homo Sapiens; identical to SEQ ID NO: 157609

SEQ ID NO: 339055 - DNA, 1000 bp, Homo Sapiens; identical to SEQ ID NO: 158916

SEQ ID NO: 339056 - DNA, 1000 bp, Homo Sapiens
ttttttttttttttttttttttttttttttttttttttttttttttgagcagagaacatgctttattgaggagtagatatagaagagcacattctaccacatgtggggaagggtttagcttctgtaaaaggcctttatcccttaagaaaacccctagtgaagttgctttttgataaattttaacagtgacactgaaactggaggggagctgccactgaacatgcttaaaattagctcccccaacccacagtgaatataagtagtgtacagagatgacaagagaagggcacaaatgaccggagtcagggattgtggtgagggctccacatgaagacagcatgttggaggagaccaagttgggaagggtgacatgtcatacatcaaaagttgccccaagatagcaggttataatgggctagagagaaattagagggaacatctcttccttcacttgaacaacaccaaaaatagaagaccagagaatagaaggatggtgacaaatcccaaaaaggaaatggaggaggagttcgtggaagggcagaagcactttaatcctagagggagggtgaggcactgttgaaaagagaagcaaactttggcaggggtggccattctgccttgctgagtcatgggctgagatacggaagtcactttcaatcattttctacttctcccagggcactcagacaaaatcagtgcaaggtatatggaagtacagatgtactgtatcagactagtggaggtgaaaaggtttctgcagtataattaaccagttaatatgcagcatgaaagggaaaagtggacattactttggcacctgcaaacgtaaaaagtgggagtaaagagagaaggaaatatttactagtgagtactttacggtgaggcaaaaagtagtatccgttccctttcaccaagacactgcccactgcccactgcccacaggtgaactcaaatcaaacccagaaccaccaccccttcattcttctctccatctcattca

SEQ ID NO: 339057 - DNA, 1000 bp, Homo Sapiens
gcattttgaaaacaggattttatttgtttaacaatcaaaataatatcttttacacatttctaagattagtattcagaaattttacatttaaattaattttaacattttaaaaaagttttttttttttttttgagacggagtctcactctgtcacctaggctggagtgcagtggtgccatcttggctcaccgcaatctctgcctcctgggttcaagcaattctcctgcctcagcctccagagtagctgggattacaagcacatgccactgcacttggctaatttttgtatttttagtagagatggggtttctccatgttggccaggctggtcttgaactcctgacctcaagtgatccacctgcctcggcctcccaaagtgctgggattacaggtgtgagccaccacgcccagccataaatacattttttaaaagtaatttctgcttgtcaaagtcaaatgatttaaaatttggcttaatttaatgtctgttttctgttgctataaaggtgaatatgcagtttgatattataaatagaaagagcttttgtgtgtgtgtcctataaacattcctcccttaaatcctcttgtggaaaaacatctagctatgtaagtcagtggcactataccctagaaaaatggtgaagggaaagtccttaggagaatgggacatttctgaactcttagactttctgtttagtggctcactttgaaaagtgaaagggagggaatcacgtactcctttcccaacaactagttttccataggtatatatacatacacagagtgagagaatttcaataggtatatatatctactatatatgtcaggtatacacacacaaacacacacacacacaaacatacatatacatatccctgaatttacatacaatgtatagttatcataaatcagggacttttaagataaatataagatttaaatctctttgctgacttttctttagtaacatgtgggaaaaaacctctatttcaagatgtga

SEQ ID NO: 339058 - DNA, 834 bp, Homo Sapiens
ttttttgcgtgacaataaagctttttaatcacctaggtgcaggcaggctgagtccaaagagagtgtcagcgaagggagataggggtggggccgttttataggatttgggtaggtaaaggaaaattacaatcaaagggggttgttctatggcaggcaggggcgggggtcacaaggtgctcagtggggaagcttctgagccaggagaaggaagttcacaggttaatcgctcagttaaggtggggcaggaacaaatcacaatggtggaatgtcatcagttaaggcaggaaccggcccttttcacttcttttgtgattcttcacttgcttcaggccatctggatgtatacatgcaggtcacaggggatatgatggctttgcttgggctcagaggtctgacacacatcactaagcattgtttgatctgtaagggtgcacccttctatatagaagtaacttgccttgcttactctatggattcgcctcaaattctttcttgcaagagatccaagaatgctctcttggggtctggatagggacccctttccgttgacaagacggcacgaagtagatgctcagtaaatgttggttgactgagtatcctctgcatctcggtgacatcacatcctgcgtgccgtggcgtcattctgcattcctctgcgggaggctcagatccggagggtttaagtggttgtttataacatgcaccgaacatatccaacggaggctgtggtttccgaccgcccacaaaaagcgcggttggcgggagtgcgggttcggggtcggctggcagctgggagactccagctctgggcggaaacacactgcctcggaggcg

SEQ ID NO: 339059 - DNA, 1000 bp, Homo Sapiens
ttttttttttttttttttttttttttttttgagcaataaagctgtttatttcacctgggtgcaggtgggctgagtccgaaaagagagtcagcgaagggtgatggattatcattagttcttataggttttgggttaggcggtgaagttaagagcaatgttttgtgggcagggtggatctcacaaagtacattctcaagggtggggagaattacaaagaaccttcttaagggtggggaagattacaaagtaccttcttaagggtgggggagattacaaagtacattgatcagttagggtggggcaggaacaaatcacaatggtggaatgtcatcagttaaggctatttttacttcttttgtggatcttcagttactttaggccatctggatgtatacgtgcaaatcacaggggatgcgatgcttggcttgggctcagaggcctgacacatagggcccttttccctagcaatcttaaagatactgtcttagtctttggtgccctaagattcatcccaaatcgagttggttaccctgatacaaccgttcatataaaactagactaaaataccttgtcaaatcaatcatcttggtttccaggctctggtttttaacctttccactaaggtgactttggctcttacctgctctctcacccattatcagttgatcagattgggaatcaacccctagtgatgcatttcttccagattcttagtggagagctcactgtaacctcctgggctgactgtaacagaaatgtaaatgaatgagacagttcttttcaaagttaaattggaatccttaacatccaggcatttatactcaatgcaggtagtgggtcagtgaatgatgtcttgaaaagtatgtcttgaaaaataaatgtgataccagaaaatggttacaactctttgcagtggtagaattgtctggtccgacaggccattgcctggaattgtggtgaagaaaggggagatgaagtcactggatattaaggatgcagg

SEQ ID NO: 339060 - DNA, 1000 bp, Homo Sapiens; identical to SEQ ID NO: 158918

SEQ ID NO: 339061 - DNA, 1000 bp, Homo Sapiens; identical to SEQ ID NO: 157634

SEQ ID NO: 339062 - DNA, 1000 bp, Homo Sapiens; identical to SEQ ID NO: 158920

SEQ ID NO: 339063 - DNA, 1000 bp, Homo Sapiens
tttttttttttttttttttttttcacgtggggcttatcaagtatttactaagcaccttttagaagcttggaaagggctacaagccatggtccctgagcccaagacacttacaggtttgctttctgggaggattggggtggattagagactgccttccagtcagtgaccacaggatgggccatcttggtctctgtccgtatctggtttgggggttttcgcaggactaggcctaggctaaggacagggagggcacaagttctggctgggtccagggtcctgggacccagggccatttgggacctgtgagaatggatggacagcatgggatggggcatgtggtctgagccctcagtagattcccttcaccctcttgttgttggggtcgaagggcgacttcaggtgagcctgggcaccataggtcacccccattctctccagggcatagtccccgctcttcacaaagtccagcgagaccggcccaccgctggggtcatggatgtaaccgtaggcgatggtcttgtcgatggcgaacccaaagtcagccctccggacatggcccaccacttggccgttcctccagatggcctccaggccaaacatgggtactttgtcctccatggtgaagcacaccaggcgccggcggaggcctgcggcccgctgctgctccagggcctccctccccaggaagggcaccggcgacttgagcttgcaggtgaaggccaggcctgcctccagggggctgtcgtctggccgcaggtccgcgtgccagtgccggtagcctttctcaatgctcagggagtcgatggcgcggtaccctgcgttgatgaggccgtgcttggcacccgcggccatcacagcccggtacacaggcacgcaggacgcctttggaatgtgcagctcccagcccagctcccccacaaaggacagccgcatggctcggaccaggtgccctgcggctctcagtagcttgtgggtggagaacgggaaggcctcgttgctc

SEQ ID NO: 339064 - DNA, 1000 bp, Homo Sapiens
ttttttttttttttttttttttttttggagggtgggcagcactcgctttattgtccagcattccacatggatagacgcaggacagcaggccagggtggtgggctaagaggcagcctgccgggcctgatgctgctgggcaaaccgctgcatccgctcctcgagctccggccgaaagtggcggatcagaccctgcacaggccaggcggccccgtcacccagagcacaaatcgtatggccttctatctgcttgctgatctcccacagggagtcgatctcggccggccgggcatcccccctcacgaaacgtgccatcaccttgttcatccagtccacaccctcacggcatggggtacactggccacagctctcgtgcttatagaactcaatgaggcgggcgatggctttcacgatgtccgtcgagcggtccatgacgatcaccgcagctgtgcccaggcctgtctgtgcctgcaccagcgcatcgaagtccatcagcaccgtctcacacacagacttggggatcagtggggtagacgagccgccagggatcacagcaaggaggttgtcccagccgcccgtgacacccccagcatgcttctcaatcagttctttcaagggcacagacatctcctcctccacagtgcaagggtggttgacatggccagagatgttgaatagtttggtgcctgagttgcgttctctgccaaagccagcaaaccaggtacctccacggcggcagattgtgggggacactgccactgtctccacgttggccacagttgtggggcagccaaacactcccacgtctgcggggaaggggggcttcaggcggggcttgccctgcttgccctcaatggactcgatgagcgctgtctcctctccacagatgtaggccccagccccgcgcaccacaaacacgtcaaaatcatagccagagccacaagcattcttgccaatcagacctgcctcataggcctctcggatggccacctgcagattggag

SEQ ID NO: 339065 - DNA, 1000 bp, Homo Sapiens
aggtgcaacaatcaagctctatttttgtaattaaaaatgtatccaaagggaaaaaagaaacaaaaggaacaatatttgtactctatgttgctgcagagagcagaactgcggagggggtgctagtcccaaggggtggactgtgctgtgctagtgccctaaatcctgcaagcgcggggttgggggggcgggggagaccgctgtcgggggtcgtgagttccgggcccttgtgtgcatgttcacgtcctgtcattcttgcccccagctgagagagcagtagaggaaaggcactacatccaccagcctttgcattctcctcggagcacacagaaagacattttccagttatcttgcacacaagtgggcggcgggacccgttttggccgggaacgttgtcaggaacgctgtacaccacttccaggcggtcacgtccgagctgcccaggcagtctttctgcgccttctgctggccagatggaggctgcagaccctgcggggccatcaggagagaaccaccaagcaccctctgcacaccgcattgcctttaagactggctgaggcatcacctcctctgagaagccatctctcccaaacctgagcccagatgagccaaagcccttccttcctccagtcagcctggatcctctcatccggcagaactgtcgccttgcttctctgaagcggtgaatgccctggggctggggacgcacaggctcgctggcccacaaccaaagccgcttcctctggaggaggaagtccaggggtgccagggttccacttgctttcttcttcacccagcctaaagggcaattttcccacattccctcagaaccaggaagttcccccattcacactgagcctgttcatgacaaaaaaaaaggtctctccgatttcctctgctcaaccagttccctggctacctgaggccctgcttcacctcggggctcaggtgtgcagtcagctgttaatgtggcaaaatttggggaagtcctctgcagccgcaa

SEQ ID NO: 339066 - DNA, 1000 bp, Homo Sapiens
ttttttttttttttttctacaacagatgaagaaagttttaatttcttttcacattaaacattgtttaccacaatcagctaacagaaattactgtaacattggtcacgatgacttcataaaactaaagataaatgttatgaggaaacttcatttaacgtgaatggtaatgttagatactgtatttttccatggtaaaatacaacttatcttgaagagaaagcaaatagttcagatcagggagacatgctgaggttttaataaagaaaagcttggccttgtccagaacacttaacaaagttcaggacaatttaggtaaaagagatgagtgagacaccagtgttaggcagggacataggctcatcattcaggctttatgtacattactggatctatgcagctctcacctttagataagtgagctatatttttggcagagggatcttcaaaagtagccttggatatgaggaatcgtattttaaccaccaggcagtccaatgaattatttttaaagggacagctgagtatttcacgtatatactattaaggcatctaaatttttggtgttttcagtatataattttactgctactttttattctttttttcatattgtacaactatgatattaggtattaagcgacgtaattctttctctactagtgaaccagtttatttcacttagcaaactctaaattgagggaaatatataatctgagaacacacagaaaaatatattgaaaaaccaatagagaattatttttaaccatcataaaaactcaatcttaattaactgatagtctttaacttaaaaaaagagtaatcagaatgaaaataggtattaaaaataattaccagtagtttgttttacaaaatagagccataaattgtttaattgcccaattaagcaactaccagattctttagtcaacactaacagaattcatatttcagctagtcaacaaagcatataaatatttaacatctcttgaagataacattt

SEQ ID NO: 339067 - DNA, 1000 bp, Homo Sapiens
tttttacagatgaatcttttatttcatgggtgctgggtatgtggtctttttaagacaaaaattctacagcatggttttactaagtcagattgagtaggtcgcatctctgtgtgccacacagaacttttagacaagagtagaggggaaaaggttctgcaattcctcacagtaaagtactcacacagtaaatccttaacgaaaactactgaactgtgagtatatgctttataatcttatgcacagaaatgtatctattagtacagaaagttggaaaacatcaagattaaaaacagtgctgtaggaaaaattcacaacagtaaacaaattttgctcactcattttcctacaaatcttcagtttattaattcaagagaaactatattaggaatattcggctgatacccctatttcaccacctcatctaagctacactgtattataccaagaatggtggcaattttttccccatctatacaggcactgccatctagtggcaagttttcaccagcaattttaaaagatagtggcccaactctggtaacaaatagtggacactgatggtttgtcaaataagcaaatgcatttatttgatacacaaattccatgccaccagtcaaactatggtctggcttttttttttaaccaacagtaaagaaaactttttgggtttttttgtttcttttttgagatggagtctcacccttgccacccaggcagtagtagcacgatctcgactcaccgcaacctctgcctcctgggttcaggcagttctcctgcttcagcctcccaagtagctgagattacaggcgcccaccatcacgcctggctaattttggtatttttagtagagacggggtttcaccatgttggccaggagttcaagaaaagttttttaaaaataataaacctctaaagtgttaccctaactgtaccttacagtgatatgtgacttctctagtcactccacattatccagtgatggcacctagataataatgca

SEQ ID NO: 339068 - DNA, 998 bp, Homo Sapiens
tttttttttgggtctgtagactgtttattaaaggtgtgttaagggggcagccacttccctccgtgattacagcccccagcgtgggtggacctgtgtgggtccgtcttggggttccctcgttgaacatgctgtcaaaccaggacactggctccagcttgtgtttctgctcttggccatcgtctgggagtggacatgcaggctatgggggtggggggcacttagaaggagaaaggcctaaaactggaatctcttgtccctgaggctggctctggtctttgtgtctctcccagtccttccctttcctccccctggcgtggttggtgtggctggctagctgctaacaatggcttgggtctcagggcaacccaggtccccatggtgcctttaagcagcaggctgggccaagttctcagccagggtctcaggatctgggagacaggacagcacaggaactgccaagcacaagccccaaaaggagcccacagggagtgggacccatcccagggaggggcgggaaaaagaggcagcaaccaggcagactcccaaatctcttttattgggggaaatgggcctcttgggggtcctcactgcacggcttgttcattggcactgcttcccgagtcctggggcttcatcacatcgggcagctctggcgggctggaaaacggctcgatgcacagggcctcaaaggtgtcatctgcccggaaggccagccccactgtggctggggcctgtggccgtgctgtttgactggtgaagccacactcgcccagtgtcttgccatcatccaagagttggtcatccttgtacagccgctgctcgtcaggaggccgcttgaggatgccctcgacgatgcgcttcagttcgaacaccgtgctggactccttggcgtccgtgaagatggtggtcttgtggcgccggatcatgaggaacacgtccatcgcggctgctgcctctcccctcgacgcgccggcgcagccgcgctccgccccgttccc

SEQ ID NO: 339069 - DNA, 1000 bp, Homo Sapiens
cctggctaactttttgtattttttagtagagacagggtttcactatgttagccaggatggtcttgatctcctgacctcgtgatctgcccacctcggcctcccaaagtgctgggattacaagcgtgagccaccatgcccggcctcctctgggtagttctgagaaaagggctgtctctgtgacagaaacatagctctttctaaatgccctgatgcatgactgacttattctccctccctcattctttcccgatgaactgaaaggtcttccatgctctgttcaaattgaatgttggccaacatcactctcattcctcctcctggcaagaatggcatcctagggtcctagggcccgcgagtgatgcaagaattctaaaacctagtttcaaaagagtacctactaaagatttcattcactttcttgtggttctagtaaggattaatgttgaataagaagagacacacattagaatgtacatatacatacacatagaatatcctcctgttctaaatccacatgagaacacaggcaggcctacacttgagattttttgacacttcatttttataattatcaagaaattattaattttataattattaaaagctaccagtgtcttcaggctttgcatctctagcacaaggggtatcattattcccgagtggcacatcttcattcccaattcagaaagtacacattgccctgcacgtctcccacggcaagctgcagggtggagttagcgcccagccaaggttccaggcagctcactgacccttcgcatcggaacaggcccagcagctgcatactgggtctctcccatagcttaacatctctgtccttcgaagctgtcaccagcaactcaggtagcacatggagggctgtgacagagcccgagtgaatctttctacgctgccgtgtctttagatgtggtgttggctcactatccatgctggcatcactatccatgctggcatcagattccctgcaggtagatgggtctgt

SEQ ID NO: 339070 - DNA, 1000 bp, Homo Sapiens; identical to SEQ ID NO: 158921

SEQ ID NO: 339071 - DNA, 1000 bp, Homo Sapiens
ttttttttttttttttttgtgttcaaggatatttattgcaacaatatttatgaaaatgacctgaaattccaacaatagagacaggcttaaataatgcataaaacattcatatcatagaatattttacagctgtttaaaatcatgtttttgtagaataatcaatgatttcagaaaatgtttataaagttcaagatttaaaaagtataatacaaaactgtacatagagcaggattccaaaatttcaaatgcaaatacatataggtacatatatacatataccacaaatagaaaaatgactgaaagaaaaaaatatgaaaatgttaacgcttgttatttctatgcagtgggattatgagaggtttcattttctcgtttaaagtttcctatattttccaattttccctaaattatgtattgctttcacatttagaaaaataataaataaatgttaataataacagtgagatcaaaggagttccaaaagattccaacataaacactgtgtgttttgatcatccttttttttttttttataagtggctaaatcttccagctaaaaagtttttatttccagtagaagtagtacttgtattttttccttgactggatttggatacaggatccattgcaacatatttgatttggaaacctccagctgtcactgaagcatcacttagaaacttcaaggtcatgacatttcctgtactgatgatgtcatctggaagctcatctccacagtatcttcccacaaagccatggacatcatcgtaactgtcatatatttcaacataatcagccaagcaacctgggtcatcttcaaggtcaaaatctaaaaaactcaggtgaatacgctgaccatacttgagtctaatgtgccagtagcagatttggttatcttcgtactcatttgggaagcctggagatttaaaaatttgctttggatctgtaaagacgccaccacactcctttgcgtgtgggttgtagcaataggcatcccatc

SEQ ID NO: 339072 - DNA, 1000 bp, Homo Sapiens
ttttttttttttttttttgctttttctatatatttattacaggtacaacagaggtcttcataaatagttgcataaaatgttaaagccacaacattgcacatgatatgaagtaaaaccaaaaaacccccaatgagtgcatttacagtattttcatctgactgtgtactgctccacaatctgattgacggcttggggcaggaacagggggaggggcagtggggcaggacccaacctgatgtcttcatgtgatgggaagaccctcggacccccagaggaagccccaggtggtgggtggggggtgggtaggggaggcaggtgggaaaatgacagaccgaaggcaggaacagtcttatatacaagtaaggcctacatttcatcagagcaaaacgattcattctattttatgcaaaagtttgaggttgaatgcacgtttcagaagccacgtcgggcgtgagatgcacacagacgaggcgcctggaagctcagagccgagtggtctctgagtcctagacaaggccatgggagtggccgccacctaggtgcgtcttccccagagacgcacagtatctttgttcattaacaccagtggttgaacataggcattttgtttccttgaataaatcttgaaaacgttaaatttgcaaaattctattcatgtttgtttaaaaaagttatctttttatttttttgcagaaacctgaataaaatactgtgatacagcaatgcgacctctgccttgggcagagtgtaagtgacggtcctccaccccagcgcagcttgcagctctgtgtccaagcactgctgagcacagctcacttggaatgcaatttcacacgatgaacataccggcagctgatcagttatgtttgcttgttttctcttgaaaattcagattaacagctgattggcaggtgaaagagaatgagaaagaacttctggataggtcaaactctaggcagaagcctgctctgcagaaagtttttaatgctacggataggtc

SEQ ID NO: 339073 - DNA, 1000 bp, Homo Sapiens
tttttttttttttttctgtttttagtttttattaaataaaagcagaggaagaggaaggccctggtctcccgggctaggggggagagccatgggtcctcccctccctctgttcaaggtgcactgcgtgctgggcttgaggtgtaagctggggagggagggcagccgggaagggtcagtggtcgggacctgcaaccctttcaccccttctggaagactcgctgggcagggagggagcctcctggacctggactggggcttatcccaagggatgagagccgataggtctacaggctcggcccagggccccttccaccctaggaagaggaaggggtgccggcgtctatctgctggagggtggtcaggcaaggctgtggggctgggtggccagcccctcactcgtggacgtcccagatctccgacagcagaggcggcagcttcttgtcctggagccgcaaggcgaagacctgctccgagtgcacagagctcagcgtgcgcaggctcaccagcttcatgagcatgcgcgggaagcgcagctggtcctgcggcctcttgatgcgcgtgtaggacagcagcgcctccacgtagggctgctgcaacgcctccacgcggcccggctcctgcacgttgggccggtcggccgagaagatgttgatggcgatgagcagggcgtactcagcgtcgtccaggcccagccgccgcatggcccgcgagaactcgaagatggggttgatgaactccacctgcaggcctgcacggtggaagtcgtccttgctgtaggtgaagtccttcaagaaggtgatacactctgtctcgtggttgtagcgcctggctgtctctagcagcatgatctcgatagtggatgccttcaggagggcgatctggtcctcccggcccagctgcaggaaaccaggcacttgcttagcgaagtccacgatctcctggactgagatgatggccagctccgtgaagtgggcaaagcgttgctggcgggcatctcggg

SEQ ID NO: 339074 - DNA, 1000 bp, Homo Sapiens
ttttttttttttttttttgccattttaagaatataaagcagaagttgagcatttttagctcaatggttcaatttctaatactctgcaatgattttgatgtactgagagagtagttaatcatgcattaatctcaatatatctcagttagaatataatcatgattcattaccaaggtgcatcagcagccagtctcaatgaaaagcaaactatttactattttaagtaaaaataaaacaatacaaatttttatagctcgaattccatttcattgtcttcacatatgcaatattttaaagactagctatttgctccaaaatgactttctcatggatgattaaatgaacatctttatgagtttacataataatatatatcttatactttgtaaatttttttaaaaattggaaaaatggtgtaccataagtagagtttttttacagctatattgaaatcatgctattagaagctgtaagtcacagaggtcatgggacttccaaaatattgcggtactagtaaggccaggaggagggtaaggccagtgaggcaggattgtgctggtacagagttcaatctgtctttatttaagcttttgataatatttttatagtgctttcacattgattttcatttttaaaaatattgcattaaaatttacattaacactgagttttttagtgcctttaaattttgtgaccgaaacaagagcctcacttgctttaccatagtcctggcttagagaagttatcttttccctgggattagttttccccacaatgttcttcatagaacatgagatattaagttgtcacagtgaaaaaaagaagaaggaaacagcaagagaaagaaaaagaaaacattacatcaaatatctgttaggcatgattagctaagcaaagttgaatagctttcttacaatgctttttggagtttcagtaacggggtgcatactgagaatctccaatagcatgagggcattttgcaaactcatttgctcagagaa

SEQ ID NO: 339075 - DNA, 1000 bp, Homo Sapiens; identical to SEQ ID NO: 158922

SEQ ID NO: 339076 - DNA, 1000 bp, Homo Sapiens
ttttttttttttttttggtagaaaagacaagtattattatcaaatgagttaatattaaattagcaaatttttcatatgaaatacaagttttaatagaacttattacaatttactagcgatatagattttttaatactttcctccccttcaccccaaaccatgttgtacaagcaggacagtatagcatttcaaagtcatctagctttaaaaaaataagtcacttatttgttctctaaaagaggttatcattctgaatctcttttccataagaaactcttaattataaacaacatttatcaaatctatataatgtttcctttaaaatatttacttcactgactatatgttttctactgttataaaatacaattttccagcaattatttatgggctatcactatggtgactacaacttaataaatcacactaaaagacatttactttaaaaacagcaaacttccgtaatactttataataggcacctcaaaaactaccatagatgtaaaaaataaaacttttaaaatctatacaattatatatcgaggtttctgtatatattatacatgtgtgtacacatacacacacatataaaatacatataatcattaggtttgaaaatgaacaaaaagtggattttttcagaaagtcttttttaaactcaaacattgggaaaccctttaaacatttaacaattttaataaaaatttctgtataatactaagcagttttatctacacatataaaatgtaataggagtagtgtttaaaactacagaactccttagtatttaatggcagttacgtctggaaaaaaacaacattccattcacaaatattttcaggcaataaatacgtatttataaatagtgtaaatctgtatcaagtttagaaacaaaaatcacaaatctgaagtttatttctttgtctatgtgcaatccattatctttgtatatgggctattaatatttaaaaaaattattttggaaccacaaatgtaatca

SEQ ID NO: 339077 - DNA, 1000 bp, Homo Sapiens; identical to SEQ ID NO: 246476

SEQ ID NO: 339078 - DNA, 1000 bp, Homo Sapiens
ttttttttttttttttttttttttttttttttttttttttttttttgagtgatttggtaacaaagttttgtttattgtctaaatttaagataaaatgtgtcattttcattacgaagtacaattttatggaatactaaataaacatatataaataagccttggccaacattataaaccaggatctgacatagatataaatccatgccttccaacttcccttgacgtcacattatcttctcttaagagatagtcactttggctaatagggaaaagaaaaccagtaacatcagaaaacaatttccatctggcctggctctgactggcatcatcactgtgagccatatgccttacttttctctgacacttcaggatgttccctcctggtatcagctgtgcaccaaagctaaaagttcacaaggctctccttgccattctcaataaatcagttttgcaaaatctccaggccttcttgcagagtattcaggcatatagggttgtagttgatcagccataaagatggggctccctttaggtcctgcagcagtatggcaccagtttgaaagcctccatccagtccacataatgaaagtcagaaaaagaccatttaccacttatctgtgctttctacaaaaaaaaaccagatacctggatgagggccaagactgcctccctcatcatttcactatatgtctatgttgacaaagtcagcaagaggagagatatcaagtgcttgcaaggtccctaggcctgtccttacattcagaccttcccttgctacttgtaattccttgacagaagacattgtggtagtgggtactcaggagagaagcaacaagaatgggacaattctcccagggcaaacactgaatcctctctttctgttacagagtaaagttccctgagtcctggtcttgattgttcatgtagacagaatgataactattgaaactgtccctaatttagtaattctctctgagctcccttaagagggcccaagtac

SEQ ID NO: 339079 - DNA, 1000 bp, Homo Sapiens; identical to SEQ ID NO: 158925

SEQ ID NO: 339080 - DNA, 1000 bp, Homo Sapiens
gttcacagtagtttattagtattggtcatctgttagagaagaatagtggaggaagaaatgcaataaataatcaatgtatcagttagctttttgctgggttgttatcatgctgcccaaaacttagtgacttaaaacagttaacgttttaatccattattctggtagttgtttgggatggctgggatggatggcagaaccttcctaatctgggccagtgtattattaacctattactgtgtaacaaattaccctaaaatttagcaacttaaaacaacatttattgtcttgcagtttctatgggtcaggaattcgtatggctcaaaagatgcctctggctgaaggtccctcatgagtcaagctatctggcttacagtcaagctatttggctgtggtcctcatctaaaggctaaactgggggaggatatgcttcaaagttcactcatgtggacctttccacagggctatctcatgatgtagcagcaggtttcccctatgatgagccatctgagagagtaagcaagcacccaaaatggaagccacagtctttttgtaaccaatcttgaacatgacatcccattacctctgcctcattctattcactagaaccaagtcactaattccagtccaaactcaagaggaggggattatataagagtgagaataccaggaggtggggatcattcagggtcatctcagagactgccagccaaagttgccttgaccaagactgcatgcctaggatagcttcattcatatgtccagcagttgaaaatctggttggtgtagggtatctcaactgggatggctggtctttgctccattactgctccatgtgatcgctctcattttccaacagcacagttcaggcttttccacacatgggttcaggattccaaagagctgcaaaagtgggcaagcctcattgtgcaggcacttctcaagcctctgcttgtatcatacttgttaatgtcccattggccaacaaaatagccaagctcag

SEQ ID NO: 339081 - DNA, 1000 bp, Homo Sapiens
gctgtccttttaaattttaataaaatagattaatttcatattacatagagagcaagtccatccattcatccgtgataaaattttagaaatattttctataaaatgtttagtatttaattggaaatgaatccagtataacatgacttccacagatacagcattcccatcctcactcccattcctattttgagaaattttaaaaatacagaaaagtacaaaaaataagacaagatatccctataccacaatccagaatcaatcagtatcttcttatatttacttgaagtcttttgaaagagaagtggatgtttatataaaaagctgaagtcccctttaaccaatacccatcccacctcccacactcattattttcccttctccactcttcacaggtgaccactatcaagagtttggtctgtatccttccaatccgtttcaaaaacatgtacatgtacatacatatatgcatccattaccaatagatagtactgagttttatgaggaaacttttaattcaaatttacaaaaaagtcattgtactatctgtatcattctgcaacttgatcccccctcaacaattctgggatctttctgttaatacatgtggatttcatttgttgcattttacagatatatagtattacataagaatttcccatattgttcgtgatgggctttctcagttgtttctaatttttggctactacaaatcaagccacagtaaatatcctagtgcgtatttcctgagcattcatactcataagtagaaccgctaagtatttctcaaattgttccaaggaatgtttccctattcccaaggtcatatgcattttagtacatagcttttccatatttctgtttttaatctctggattcacttttgtgtatagttcatggtctatttttcccccttggagaacaaactacctccacttaaaaaaaatagttccattatttcctcatttcctgatgccacttgtatcatattccaaattctaat

SEQ ID NO: 339082 - DNA, 1000 bp, Homo Sapiens; identical to SEQ ID NO: 158926

SEQ ID NO: 339083 - DNA, 1000 bp, Homo Sapiens
ttttccaaatgaacatggctgtgttccaataaaactttattttaaaaaaacagttgggaggccatatttggccaatggccacagtttgttgactcctggtgtaaaaatatgaacgagactaatggttggcactaattatggagaggctcactatagatggtggagatggaaagggggggcaagctgagctaatcctaaaagaagagaaaatctgtaatataaagatcagtaaacattatagaatctcatttatgcatttaccaaaaatgcacattcatgtgtatgtataataaaggagttaatcattgttgatacaacctcattatataaatattcaatagggaataatttttataaaaacaattagattagattctcttaaaaaataactcatctgcttacatctcctgctatgcagtgaattctgcagcaaaccccactgcactgagggcatacatacatacatacatacgcatacatacacatatgctgaccagaccatatacatatgtctgcatatgcatatatatacatacatagatacagaaatatacgtacatacaggttgggtattcctaatctgaaaacccaaaatctgaaactttttgaactctaacatgacgctcaaaggaaatgctaattggagcatttaatcttggattttcagattagggatgctcaaccaataaatataatgcaaatattccaaaatctgtaagtatctgaaatccaaaatgcttctgatcccaggcattttggagaagggatactcaacctgtatataataatatgcttatatattatatatatgcttatatacataaggcgcacacacacacataaaatattgtcctatcatgactgtgttggcactttaaaaatattgatatcccacaataaacagggttatcattgatataatttcccacatattttactataaataatcgagtaacaacctgtcttgtaccattctttacagaaaggcttttctcaatgc

SEQ ID NO: 339084 - DNA, 1000 bp, Homo Sapiens
tttttttttttttttttaagaataatagtaagttttaatattcttactgagttaggctattatatgcaattgaattgttaatttgagggtattttataattctttttattaggaaccagttacctaaacaatgtaaatgcattagaccaggagcatactagatccccgatctagttactgaagcacaaattctattggcaaaacatgcataaacatacacattctagatgcaacacagcaaaatgctgatgtatagtaaacccattcaagaaaatattgtaaatatacaaaactgattataaaactccaaactacctttgaaataatctactccaaagccttcattccataaaggaaactaaagcttaaaacagtagagttttctaatgtcacagagtggcttaataacaattggattagttcagcccaatgtactttccattccataacatgatagtgaaaatttaaaagatttcaaggcagtttctaaatccactctgattcttcagtacttaacaaaaggacaaactaaagtaaatatctcccctaaatttatgatgttcctagaattgtcatatgccaggatgcagtctctgatgtttgttgagagcagagcgatatctgaaggattttccacaatcattacatccaaaaggcttctctcctgaatgaattctctggtgctgaatgagatatgtgctctggctaaaagtctttctgcattcattacagttataaggtttctctccagtatgagtattctgatgttcagtcagatgagtgctccggctaaaggctttgtcacattcattgcacttatagggcttctccccagtgtgaattcgttgatgctgagttagatgggagctctggctaaaggtcttttcacatttattacactggtagggtttttcttctgtgtgagttttttgatgttgagcaagagatgaacaatgtcgaaaggctttaccacactcagcacactcataaggcttggctc

SEQ ID NO: 339085 - DNA, 1000 bp, Homo Sapiens
tttttttttttttttttttttttgtttgaaacctttattagaaggaaacagtattctatggactcccaagaccaggatatatatggattgcagaggctgagggctgaagttgtcactctggtgatatgttttggagtggacgcccctaattttaatattcttcatctgtgacattctgctattcacagtataaagatcatgatctcctctccaagctgactttattgtttaacttccgaagtattccagaacaagcaacatttcaaaattgcatcatcagtattaaagggaaaaagtccaatttctttcatcagacatttactgaatagtgtctatgcagcagccactatactggcactggagttatcaagtcagacagttgctattcagattaattcagcaaggttcattcaaattactcatgaaatctctttcaaagtctaagtaaaacgttaatttataacttgaatcttgacataatgtggtggggaatggggatgggaaatggtaaaattacatgaagctaaccctgaaggcaagttctgaagttcaccagcgaaaattatctttgcttttgaaaatgcttccactggggaaggaaggggtaaggccagtgggaggaatgaggtgaagccactgggggaaaatgttcaccattaacctgtactttaaagacacctttgagagtagtatacttccaaacatcatcagttttatttcataggagaaagctgctatagcatatccaaaaatatcaatcttcccttgttctgcttaagcctgcaaatctgtgggcacttgattcactgctgacttcaaaactcttactcagtcatgaagctctctattgcttagagtatataatcatgcagttatgttacatgctctgagatgtcctgcagtgaagaatgctgtttaactttgatcctagcatatcatctacagtgaaattattgtggtccaaagctgacttcaaggaaagcaaaggagagagaataga

SEQ ID NO: 339086 - DNA, 1000 bp, Homo Sapiens
tctagatgtctctgtagactcaacacagggattcagtgtcatttctgaacgtgtccgtgctctattcctttctccttcaaatcctccattgtttacttaaattggattttgcttatttttccatttagtgtatttgcaaaatatcttttagtatgaactctagtgttttctaagctatcatttttgaacaaatgttattccacatttatgagatttgttgggtttctctacaaattttctgaaagtttaagcaactgatgcaagtcttccatctagtataattgtaacatttttttcagaagaaatactcttgtgtgctctggagacttatatttcatgaaaggtctttcaatagtaattacatttatgataactttattaagtctgaactctgatgtaaagtgggatgcgagcagatactaacggctttgcctatttttatatttgtttatttttttctcaagtatgaatgctttcatgtacagtcaggtgtgagaactgggtgaaggctttgccacacttttcacacttgtagggtttctctccagtatgaattctcttatgtacaataaggtttgaggactgggtaaagtttttgccacattcgtcacatttgtagggtttctctccagtatgggtttgcttatgtttggtaatgtctgagaaccacatgaaggctctgccacattcttcacacttgtagggtttctctccagtatgaattctcttatgtacaataaggttggaggactgggtaaagttttttccacattcgtcacatttgtagggcttctctccagtatgggttttcttatgcttagtgaggtctgataactgcttaaagatgttgccacattcttcacacgtgtagggtttttcttcagaatgagttctcttatggttagaaaggcttgagcaagttctgaagaccttcccacattcttcacattggtagggtttctctccggtgtgaatcctcctgtgttcactgaggtgtgag

SEQ ID NO: 339087 - DNA, 1000 bp, Homo Sapiens
ttttttttttttttttgagcaatgtgttcaaaccaccacaatttataaataaggaaattaaggctcagataggttaagtgacttgctgagggtcacacaacttgtcagttccagactcaagatcagaatttagatctccaaactcatagtccagggctgtgctctttttgcaaaccaaaaagaaatgactgcacttaaatatttagtccagaatatcctcaaaattgactgtaataaaagttagccacatggcaaggaatgaatagagttgcttcataccaaaaatgagctgccagtcacagtgataagatttctttctttctgagaaccatggtttcctgctgcattggggaatccaaactgggtttctccctcctgtccaaagaagtcagagttaggatgtacgctccactccgctttggctggtgtcagtagttctgagacactgttttcacaaagggtgctcgaaggagtcagagtatctgtgtccactgttagcttactgctgggtgtcaaagcctgaggctctggactggagtttttcatggccaaagagtccagagatcccaatggccccacacttacacttgagacctcatccatatttaaggagctctgctgaaaaccagtggccgccgttccaaaaaagagagaggtatccagactttgaggagggtcgctggtggccatcaaggacggagggtccacagcctgccctacggaattattattattagcagggaggtgccctgccagagtcgagctcacagaagccacatcaatagtcaagattccagagttcaccaatgctgtgtccagcaatgcagcagaagtactgtcaggtacatcagagaagagagacactatctctgcatcactgagatcattctgtctctggctggtaagttcactgctgggtgtaagagaatttgctgcttctagctgagctaagagatcctggcccaccttatgccttttaaccatgtgcgtcttcatgctg

SEQ ID NO: 339088 - DNA, 1000 bp, Homo Sapiens; identical to SEQ ID NO: 158927

SEQ ID NO: 339089 - DNA, 1000 bp, Homo Sapiens; identical to SEQ ID NO: 158928

SEQ ID NO: 339090 - DNA, 939 bp, Homo Sapiens
tcagctttgtgtgagccccatttccttccccagcaatctcctgaatgccctggttacctccttgttcctcagggtgtatatgagagggttaagtgaaggagtgcccactgcatagaagagaccaaagaacttgcccctctcttgggcatagggatttttgggctggaggtagacagcaatgactgagctgtagaagagggtgaccacagtgagatgggaggagcaggtcccaaaagctttcctccgcccttttgcagagttaatcctcagcactgcccaggtaatggctccgtaagagacaaggatgaggctgagaggcacaaccaagatgaagacactggcaacagccacctggatctcattgtaggaggtgtcttcacaggagagtcgaattagagctgggacctcacagacaaaatcatccacctgccgatcggggcagaagggcaggtgcagggtggatggtgtctggaccactgactccactagcccaatgacccaggccacagatgccagctgccagcacaggcgggggtggatgatggtggcatagtggaggggctggcagacagccacgtagcgatcaaaagccatcactgtcaagaggatgcactcagttgtccccagggacaggaagatgaagatctggacagagcagtccaggaagctgatggtcttctttgggccccagaggttgaccagcatttggggaacacaactcgtggtgaaacagaggtccaagaaggagaggttggagaggaaaaagtacattggagagtggagcttggggtccagcgcagacagcaggatgatgagtgtgttgcccactagggttaggaggtaggaagtgaagacaaccacgaagagagtcctttccagccctgggtgttcagagaagcccagaaggaggaagcccggtgtggagctttggttaaccat

SEQ ID NO: 339091 - DNA, 765 bp, Homo Sapiens
ttttttttttttttttttgggtggaagggtgagccatgtgttttttttattttaatttttaaaaaatttaaaaaattccctattcaaaggtcaaaaagccacataagttttgatgatgatcaatttgaacggaggctcgagatggactgagaggactgagacacagaagtggggggaccatggtttttactggctggaccacagggggaccctgtccacccgcctgggttgaggaaggtgtctggggtgctcaggtgggtttgttctcagcaatgcaggcatagtcagctcttggatcctccttggtgcctctcttgtctctgcccctgaggtcaggtccctcactgctgggcactggcagcctctgcagagatgcatagtggagttcctgctctgaggagccctgggccagctcctctccagcctctttactcttcgatgcagccaacacaggcaggcggacagaaggaccactgccagaagcaggagcccgcccagccccaggcccccgtagatacatatatcatcattccgcgataacattaggtcagggatcagggactggcctggaggtcaggaactctagtccttgctcttttaggcgaaatgatcaggggctggtgacttgcctcaagttcctcatccagagcttgtggcctgcaggatggacagactccaaactggccagtgctgtctggctgaagagaagtgttgccacctcagacattcctgcccctcctctggctttaacttctcccccagcct

SEQ ID NO: 339092 - DNA, 1000 bp, Homo Sapiens
tttttttttttttttttttttttttttttttttttttttttttttttttttttttttttttttttttttttttttttttttttttttttttttacaaagcacagtgtttactaaaggcacaaagtgaggggtcggagggcagctgctcttccggcagtgacccctcccgcttctggcagcccccgcgctcacaccacctggtggagagctattagcaccaaagtggggggtgcccacctgtgggagagccgaggaccaggctgcggggtggacctcctgccatctgagtcccaaaaaggcaggcctgagcacccccaggaccagttgcctcagatgaggagcttcccgaacccctcaagcatgtccttcactggtaatgaggggctcgggctcagaagacagggaatctccaccaggccctcttctcacctctagaacaccctgcccctccctgccccgcgattccatctccgggagaggggctgaaggcctcttcccactgcgccagtcaagagggctgccctgggggtgcttctcctgaccccacaggctgccagacaggcactaagtccaaacaggggccaacggggaggagggaggcagggcaggtggctacttcacacacagtgcagcctgaagggtgggagggaggtgcccctggccctcccagcccccaggccggcccctgttccctggcacaggggcagccagggtcacagcacatcgccctcctccatgctgaagctgctccggcggctgctggccttggaggcctcgggggacatggtggacagaagtggatcagaggccagcggtagcagtgagtcgtccaggagcatgaggtccagatccttcttggacaggctggggaatggggagccatgccccggcgccaggggttcggggtagcccgggggaccctcgtcctccctgcccccaaagctcaggctgtggctgaagtccaggtgatggaatggggatggtggctgggtgggcaggg

SEQ ID NO: 339093 - DNA, 1000 bp, Homo Sapiens
ttttttttttttcaaaagacaaaaagtgaacaattttaataagtagttgcatttatcaataagagtctacaaggtaacaaaaagtgtaaagagacatctttttgaaaattcatataaaacaaaccttccatgttattagatcaacaaatataatcacctgggtatattttattagggaaaaatgacaatattgataataaaaagagaaaggaaaaatgaaaatgcatctcagaccagaataccataacaaaacttttgtggaagctgcattttatttgaaaatccacccattttgctaacatacattttaatattgtaaacaaaaatagaatctgcagagacaatgcaacaagaatgcttaaactcatgtacagaattgctttcctacaatgaactgtccttcttaaggcccctctccacccaaatgttaaagatgtatttacacaaagcaccgatcaacagtgcagtttaattcttcgtttactaaactcttggctagacattaactttaaagatactatttccccttatttaaaaggtatatgatcataacatggcacgagccaaagaaaatgttcaaggactttgccccccttccctcccccttgtaacaccttctagagttttagtgaaaagaaggaaagtcttgaagtgaaagcaattcctcacattcattttggaaaggccctaatgtcaaatggaaaataatgacatgccaagcacaaagcagtaaagatccttcccaatgcactaatgctgaatttaaaatgtagtgcttttcctagtcagtgaactgttccctggcaaaatcctaggcacagaattgactataaggattaatgcatttataatgcttccctaaatcccacagaggccgagaattcttaagagattcagacctatggacttgccttaaaatatttagtgctctgtatgtcagctgagaaaagcattctgaatcagattcattcttgtggataaaaatcaaacatactgtgca

SEQ ID NO: 339094 - DNA, 1000 bp, Homo Sapiens; identical to SEQ ID NO: 158929

SEQ ID NO: 339095 - DNA, 1000 bp, Homo Sapiens
ttttttttttttttttttcaaaactatatatatgagatttatttcacattttctacctactcagtcatgtgagctgttgctacatttgtgaactttctgaaaccaagtgacaaatatccacaaaagatcatttacaatgtagacatcactaaagtctagatttaaaagtccagtgaaaatggcacacagttggcttacagaaataaaaaagtacaatatatttgaaatagtagggtttttgttttccatttatgcctacatcatggtgttacctgtggatatgttatcaacgatattgatatcagatactatgacccatgacatttagtatttttagcaataagaagcacacttaaatctatttcaaaaatatgacatgttaaattcttaggaaagtatcaactttacaaagtatcatacacctagaaaagtaaacatgaatttctcagtctaggttagaaaaaaagtgttttaagatttttattaaaaaaatttaaacaaaatttgtttatcttatctagaaacttatacgatcatgtaaaagtaaatttatttattcagtattatacagaacaatggaaccagtatggcctgcagagatacagaggctgtgagaggaggttggcttagtcaaatgcctctgtccacactgacatggcacttacccagcacccgaacctcctcctcccaccacacggagaaccatttctgtacttataatatagtttctaaaaatagaacattgctgctataaaaataaatgtatttaaaaaaaaccacgggtttaaacaggaacacagaatttggggttttaaggctcttcctgggggaggagcttccacttcactgagggatcaaaatcctcctcaaaatcacccagctcctgctccttggagagctccaggaaaacctgctccagggtagactgtgagaggctgtactcctctaggtcaaagctctgtttaaccttctctaatttgaagaaagcttgggctaaagg

SEQ ID NO: 339096 - DNA, 1000 bp, Homo Sapiens
acctgtaacactgactttatttttaagtctgaaaatgtcttgggaaagttttacaaaaaaaaaatcaacagaagcaagttatgaaaatatttgaccagcttcatctttggttatttcttattgcagctctgtaaggacagactgttcccaaagctccagccatggcaggaagggaagcaaatcagtccctgtataaaccatttaaccaattgaatgtatcacatgttgataaatacatagaagcaggccctagggcctacaaaaccagccccactcccaaccacaaggttgaaagtcttatggggcagaacattaagactcctttataaatatgaaaatagattaatcaacaggaaaaggtctttgaataggttagctaagagccatgaccaccacgctgccttgctgtccccttgcatagaaatgtagtgacgtggtctgaccatgcagtaagtgcaaacagcaattactcaaatgtcttagaatactggcaagaagcacccaatattcaggtctggaaacagccatgaccattacggcctcttgatcagctccatgttccactcagtagcttatatgccccaagaaaaggcaagagacagacctggggtggggaaagaaccggggtaatagctgcctgccagctcagcctagaactagacatcctctggtcctatctggggaagtacactggagagggtctggtgggaggcagacctccttgctggatttcagaggcttggtatcagctgttggccctaactaggaaggcctctcactgctgcctcccgtcatacacagccaatgggcactgggagcccagaagttgagcctggcttggcctagcctgcctgctctgtaggctccagggaagaatcaaggctgtgcacctagggggccatatggtttcagctgaaggtccatccccaaggtgaggcagggactaaaccccctcacccatcctgctttccctgggtttgcaggcctatgcctgaggtgg

SEQ ID NO: 339097 - DNA, 1000 bp, Homo Sapiens; identical to SEQ ID NO: 158930

SEQ ID NO: 339098 - DNA, 1000 bp, Homo Sapiens
ttttttttttttttttgacacttaacatttaaaggttttattggccacattaatcttcctcacaaaagttttaagttatctataagttcttagaatgtcaaagaagagaagaaaaactgactaactttaaggggcggtggaagcagcagcaacttggcaataattctgcagccgactttgcgtgttcaggcatcctttttctccagtaaaattttgtgcaactcgtctgcatcctcgctggtttttacccgaatcaacatggtgactggcatggtggcattcttctcgtcaattggtggatttggaacacagacgataagaacgttattcttccctgttcgcgtacatggcatattgggtggaatcagaacgttcagcaatatgttgcctaaattggtgtctgcccgcaccaaaagctgtgtcttctgatttgctgtaggttttaaatgcagagtacctatgcctttctctttaaactcattgtctttcttgtaaaacagtttacactttttggagtaaaaagcatcttcttcttttacttcggtaactactactttgggtggctcatcattctcttcttcatctccacctttgcattcaccactgtcaccttctgcttggccctccaatggtttagtgggaaatggtgaagagactggtttactctgggtagtatctttgccaaataaactggagtttccaggggagaaagaaaatccagtcagggggacagagcttaatgagcccaaaacagagctatcaactttcttgccgaaattaaatgaggcacttgtcgctcctagtgatgatgggtccgttttcttttcagatgccacctccatcttcttgtcaggtgtatcttcagttttgttgccatgaaacaaaaacgttgactcttgctgtaattttgttgagccaaaaagggaaggagactgtgtttcagctgccactttgttagattcactttcagaattcctgccactgttcccgtgttgctgtt

SEQ ID NO: 339099 - DNA, 1000 bp, Homo Sapiens
ttttttttttttttttttttgtgatcaaagatgtttatttaaatgcagattttacaacctcaacttgtccctttacaacaggtcttcccagagcttttaatgtgcagacaggcatgtgaacctctgataaagagagggaaaatggagaggcatcttcctctgacttaatacaaccctttttacttttggtagaaaatcataaggcatgagtgtttaaggagcacactttgggaaatgtggttctactagccttactaggcaaatatgcttctaatatgtataactaacacatgtaaagcactaattatattaataatgccatgagtccttttttctttttctgtctacttctatgatagtttaataccatgctttcttttattatcactaaaaagatggacatgttgaattattttataattttcttttacagttctgtgagttaagctgtatatagcatatgggtgtatcattctttagtaaattacatctacttgtgaactaaacattgatttcattttgactttgtgccattgtctaactttgcaaaaaatcaaaatcaaggaatcaaggtgcttcacaaaaggaacatctatttttttaaaaaaatccattctggtcttggtgttcagtgaactttttttcaccaagctaaagcaaaaacaaacaaaacccccaaataccagacatagaaatggagacctcccttcttcctcaggctagattcctgttagattccaaagaaaattgtgctggaactcagaattttcctggcggctctgcatctccttgctatgcatagtatttctcatatgatttgaagaaagcactgtggttgtacgtttcttgagtgccttatcagaattatccttccaaaaagctcaagaaagacaagcagaaaatcccccagagaatgtctaagtgacagtgctccatctgaatatccttacaaattgctacaatgcaggtttacctggggtgcaagcacagcaaacacgtg

SEQ ID NO: 339100 - DNA, 1000 bp, Homo Sapiens
agtttagatcattgctttatttcactaattgttcaacaacaaagttcattcctctcaaggtggatcttgaatcattccttgtgttctcttcctcgttctgaataaaaaaggtaatgaagaaaaagcctgtacttttggagacctagaatcttgattgatgctaataagcttttgacagcaatttcgtgttacggtatatcctgctggcatcttggtggtcacacggagctccccaccctccagtgaagatggctgtccacaactaccaccattgaaaccaaaagtaagtgttgaaaaatgcaccttttacaataaaaaagtagaaaccaattcaatttcctctttttttttttacgaatataaagtttcttgtaaatatgtacagtcttttgagctagttctatatagcagaaagcagttcacagatgagacacacaatatacattttcagggctcaagaagcccatttctcatggagatcctaaatgaaatgccaagactgaaagacccattttcagtgacctttccaaatactgtggaccaagagacaaaacttcagcaaacattcaatcaaatctgccctggggacgggaggggagggagtacgaccccacagactccaagcaacacataaaacgccacagcaggacatttgccaaaggagctaccacatggaggtttgtaggcgtttcaaacaagaaagcacttaggttaagacacgagcaggaaggagctgggatgcaggccaggttgcaatctggaaagggatctgaactgtggacacagttgaaaacacggtcatgttcacctgctgcggtggaaacgggtctacctttgagcctacctaggaggtgcctgggttgttgaggcgggcctaagagtcgtggaggacccaaagcaacagatgccttgtgggagattaaaggcagaaataaggccgcgagttagcttgccaactgcaaagcctctaggttggttctgtaccagttgccaggaattt

SEQ ID NO: 339101 - DNA, 1000 bp, Homo Sapiens
atcgataatggggatagattttcatctgtttatttttagagagatcttgtacttaactcactagtctgggatgttttatttatgtcacctaatattaactattgctaaatttcactttaataaaaaagtagatacaaagactcattttacttagcaagactgcaaataaaactaagacataaattcacatgttagtattgtccaaaacaattcctccagctatcaacccacggcaatcaatccagcagtatcatttatagaatgattactaaaacaagaatcatttctcagttacaaatggggtcattaagcccttggggctctttgaaagtagaagtagtttgcctacttaatcatcagtctacacaaaggcagaaataaaaaggaatggaaatacaaacacaaaatgattggttattacctgttttataaggaaacaagaaaaaaaaaacagtggctagaaacaacaaaaaagcagtggctggaaccctactgaatagagcttaaagaagtactggttacattcacagacacagtagccactagccaagatatagtttatctccatcaaacttaaatagataaagtcagtaagtatgaccatcttactttcactatttacgctctttaaatagtaaaggtatcggtttgaaagatacatagaaccataggaacagtgaatgatcatttataaaacagctccttttcctgaatcaatatattgctaaaattctttcagtaaccctccctttttatatgatcacagatccctccacatctattttattttagttatataaaaattattaataaactttggtttccttgcattcggtccttatattttaaaaagtgattaaaaacagtactgaatatgaatcacttctgcaaagtttaatgagtgagaaacattcaaccaaggtgatttttccttggaaaaccctacaaaaactgaattttataaacagttacttattttgatagatgttccatttataaa

SEQ ID NO: 339102 - DNA, 1000 bp, Homo Sapiens
ttttttttttttttcacttcctaactcttcaccatgctgtgattacatagttcttattccttgaataagactattctaccttccagttgctgctccctcctttctaacggcctgctccatatcttaagacatttaactcctgggcattcaagtctcagctcaaatcccacctcttagcctggacaacatagtaagaccccatctcttcccacccccaaaaatgttagctggatgtggtggtacacacttgcagtcccagctacttgggaagctgatgcaggagggtcacttgagcccaggaagttgaggcagcagtgagggattgtgccactgcaattcccagcctgggtgacagagtgaaaccccgtctctaaaaaaacaaaaaaaaatccatctcctcagggaggactttctgatgatctaatttaagttacgttccccactgcccaccccacattccttcttgaccaaaataccttgtgtttgttagagttcttatccctatttgaagttctttatttttgtgttggcttgttgattctgttaccttgactataatataaggcccacagggcaggggcattgcctgtgtcgttcatttctctttcccaagtgtccggcatggagaagtactcaacaaatatttgctgaaatagcaatggccttttggatacacacactgtgtatgagggtccagctgggggaggccctctgggtagggtttaagagcaactgtccattccagtgcattctcctcggggtttagttgtcttcttcccatgtcatgcagttgtttcatctatgctgcctagttctatttttttgtctctgctctctcaagaatctgtttcttctttaggaggaaataagaaagggcacttagtgtttagttgtgaacgcagactcttgaaggtgagaaaaaagaagatttgacttcaagaatacaagaggaatgagcaaatgacagtaaggagccggaggcagccaggctgacctgtgt

SEQ ID NO: 339103 - DNA, 1000 bp, Homo Sapiens
ttttttttttttttttttttttaaacaaagagggatttattttatttacaagaattctggagaaggatggcggctggtattggcttggtgaaataatgatagggtcaatgactctgtgattctcttggcctttttgtcatggtagcaaagtggctgctgtggctccaggcatcacaccctcaatcaaggtaggaagaagaggcccagggaggtgttagccatgcctgtgtcttttattggaaaagctttcccagaagcccaggtagacttcctcttcaatttcattggccacacctgatcacatagccatcctaagctgcaaaggagactggaacagtgaaaatctggatttacagcctccacagttggagtggctggagatacagagttgggacgacccctgaaaagtgaaccaaggtcgtctgcacggctgccctggagggcgtggtgcttgaggtcccttctacctctggggcttcatggaatgacttgttgcctccatggagcacctctggggaccactgggtgaatccccaggcattcccttggagagccctcgtccatctgagaccctctgtcttgcttctcttcacatgtctgaacaacacatggacccgagggctgcttctttggggaagtggtgatctttattttagggattgtgcatcttcagtgtaaccctcacctggcagacattaaacagcgtaaacacattctcagcacgccagtcacattcaggagcctcttggagcttgacttatacacacgcacacaggcgcaatatctgcatttacagccctgtgctggcagcacacacaggaaaagcacgacttcagtcaccctcaaaccacccagttatgagtaagaccagaacaatccctttcctccgacagtcccacgtttgcttccaggaatcaaagagcatgccagtggcagctatctgtggcagttttgggaaagtgaaaggagatgctattccagcactgctctgtcaccttag

SEQ ID NO: 339104 - DNA, 1000 bp, Homo Sapiens; identical to SEQ ID NO: 158932

SEQ ID NO: 339105 - DNA, 1000 bp, Homo Sapiens; identical to SEQ ID NO: 158933

SEQ ID NO: 339106 - DNA, 1000 bp, Homo Sapiens
gacggtgtcaaactctgctttattggaatagagaatacaggcagcaggaatcacgcttggtgctggcagctccaggtcccctgcccccacgggctctcccacttgtctggatcaggggagacctccactttgaagaacaatatggggtgggagcttccaatgtgcattctgctaccagcctcaggattagcagcaagatgccaacagcaacagcaacagcaacagcaacagcaacagcaacaaaggactggactcgacacttcaggaaaggacgtgtagaagagaaagtcagacccacagtgtcacgtgttaacaacggtcccacaacagcagacacgacactggtgtgcacggctgtaccacctgtgggaggctgacagcacaccgacagccctgaggggcccggcattctcactcccaacatgagaaagaattaacacaacacacacacatgttcacattctctgcgaggacagtcaaattaaggtaccaaagggaggataaaacatttttagagaacacaaaagcctgctgccctgccccagtaggcgtcaggctggacacgacaggctggctgtggcctgggctagccggtgagctcgacaggcagctcacggccacacagggcctcccactggcgagccaacagcgagatgagcttctctctgctctcagcactggggacaaacacctgccactggacttcacggccctggctggctctagccgggccacctggcacctccccaaagtggtccagggtgacactgcccatgaggtcatgaccttgcacgtcatcgaagacgagggtgagggcctgcgggtaggtctggtagcccatgagcactcggtccaggtcccggacgcggcggccatcgtccagccggtacctgtctctctgcggcggctctttggcaaactcgggcagtgggtagtggacacagtcctcatccaggaggaagatctcggagctggtgagcaggagtgtcttggggcgcag

SEQ ID NO: 339107 - DNA, 1000 bp, Homo Sapiens
gtgggtagggaacaatcccctaccctcaaccttccaagactcttatttgatgcttttaaacttttttctttatttagacagaaaagaccaactctttaaaagtaaaatgcaataaataaataagttaagcatagagaactgtctgaaactgactccccggtctccccttaccacccccacccccaccccattttcttttccctaaaacctcttcctaaagaaaatgatcaggtaataaaccccttgacccctccccacacccctcctcccaatacccaattaccccccaaagcaaagggagaaattaagagagagaaaaaaatccaagggcaacattgtctaaactcccagaaagagagatggcagcgtccgggccaggccgggcgggctggataacgcacgggtggtagtggtatttacacagagggaaccagcagagactgtaaacatttttaggggttcaggggaaggtcttttcctcgtgaaaggaggagggtctctgtggctgactggcagagaggcagccctcagggctcccccacaccctccttagagggggcccttgggggaggcagtgagttttaaggctgggagcccaggaatcagggatatcctacctctagctgagggtggaggggagtgagagccagcttccaagaaacccctaatgtggggaagaggctggggtgagggtgagctgggagtgtgtggcaggcccctgcggctctcctggggcctgcacgggtagaacaggcccactgttgggggaggcaagtacaaacgctgggtacagaaggcctgtcacaggagcccagcagaaggcagataccccggagccttcgagcctgttcctcgctccctcacaaaggccaaaagggcatctaggaggaaatgggcccttggagccagggaagcatagccatggcccttcagagaggcaggggggtgggaggggccggtgtcttgtgcccccgggggccacgaagcagcgtttgcccca

SEQ ID NO: 339108 - DNA, 1000 bp, Homo Sapiens
ttttttttttttttttttgaatgcaaagatctcagggtttattgttgaaggagaagatgaaggaggtggtgaagtgctaggaaaataaattctagatgagaggcagtacatgtccctcagccagggcaaggcacccctctgggtgattccatagggagcaagcaaatgcaatttgcctcattcccaggtgagttggggtcctccccagggttgcagatttacttcctcttcctgggaacacccgccgacctggggctcctgggtgcctaacagagccaggcttttcctttggcaaacctgtaggtgtgcggaggggccatgacccatgacacagtcttctgtctgtgtgctcctggctgtggctgctacctggaggcggcttgggtagtgctggggctggggtgtagcaggactggccctggggatgtcagactttgagtcagggactcatccagcctgcgggtctctgcctccaggacagtggcctcaggggcctgggccacggcaagaagtgagtgtgagaggctgtggtgcaggcctgctagctcacggctggtctgtgctgagcgggtgatgtagtcctgcttctgcttccgctccaaagtcagctgagcttgcagcaggaccacctctttctgcagttcagccacacacttggcatctgagttcttctgtcctctcccatcctgctgtgtgggtgaagaagccgtggccttgctgatctctagggaccctgcctgggccgcacgcatggcctccctcttcagcttcctccgttctcgctccacctgctccaaggtactccgcagctggacattgtggcgctgcagcctgctcctgtcaatctccagccgggccactgcttgctgcaggtgttcaagcctttgtctccatgactgcttctccattccatcaggactaggctcagcctccactcctgagacctctcccagctgcacaccctgctcccctctggaccccagttctgctgtgctggttg

SEQ ID NO: 339109 - DNA, 1000 bp, Homo Sapiens
tttttttttttttttttttttttctttgatcaagtttttaataagcttttttcttacatgtacagtcatcttaaaaagacaaatattaactattataagttaaatactatacaatttatgagaaatgtaattttgtgaatttgaaaagtaaaagggaggtaactactaaacggattaaagaagaaaattctactttttaagacattttaaccagacagaaagtgagaaattactaatttaagtaaacactaaaaacttttactgaagctggagaccttatactattttagatcaagccttcatctacacagctttaaataaactttaaaaaatcttttctagtacatataagactgctaaaaagagtgcatgactgggggaaaaaaggcatatgctagaatgtgaactcctgaagaacagaaatacatttcattcatctttatccctggattcctaacacaatgcctggttcaaactaaaatgcttaaacaacgtttgctgctttgaagtgaactggggcaaatacatctttccacctctggtccagttttcactccatattaagcacatctgaagtacctgagctgctcctggctgttggcttttgactttaaattgagtaaggtaagccaatatgcatacattttttacatcagctttctcacatcagcctcagaaccaaatcatcactgggctgggaatattctcacgtactccgatacttatttgttggacaacagttaatatcaatgtgcaaaagtaatgcattttcaatgcaggataaatatgctcttatgaatatgaatggaataaaggccctgtttctccatgttttaaataacagatacatagcatcttaaattatgacttaattagcagtttttagacactgaacataatacactgtattacaatgcaatgtggtaggcttccattttaggaaccaaaataaatttcacatgaaaaaatatttattttaattcacatcaaatacatttag

SEQ ID NO: 339110 - DNA, 1000 bp, Homo Sapiens; identical to SEQ ID NO: 158934

SEQ ID NO: 339111 - DNA, 1000 bp, Homo Sapiens; identical to SEQ ID NO: 158935

SEQ ID NO: 339112 - DNA, 1000 bp, Homo Sapiens; identical to SEQ ID NO: 158936

SEQ ID NO: 339113 - DNA, 1000 bp, Homo Sapiens; identical to SEQ ID NO: 158937

SEQ ID NO: 339114 - DNA, 1000 bp, Homo Sapiens
ttgttgtaggttgttgatggttcacatttaaataaaatctattccaatgcaatttttctattattccatcatgcacaatttatttaattgctgattagatagtaggcaaattcaggatagtaggcaaattcagtatcatatactttcattcatagttttctttggcttagaataatttcaaagatagaagagaaaatatgattgtatagttttgttaatagtgccatgaacagtacaaatttgtgagaaaatctctatttggaagtgtctagaaagaggagtgcacagtactccaagtcctcttcattttagtagtcctcagcatcaccagcacagatggcaagcagtgctttcttataatgccctgaagcaaaatttctgatatcatgaaatagggattttccatatcgctctttgtatcgtttccttatggtcagcaggtctatttcacttctggcaatgagaatcctgattacagttttattatggaaaccaaagtcatgaattgcactatataatctataagcaaaataggctggtttgtctcgaacacagagaacaattgcaaccagcagctcctgaaagtatccatcataacattcattaatggcatctaccatatcttgcccagaaatattttgaaattcctggaaaaccagccgcagctgctggtagctcttgttgcacaggatcatttgcagcatggttttgtgctcccccgtcttctgctgacaggcttcccataggaccattgcatcctgagcagccatcgcagggtctgtatatccttcctctctggtcccctggaccaagttcatgagagtatctctgaagtgtcctgaggtctctgaataaatgtcctcttggaggttattgctgtattgcaagcagtaggcttctcgcatctggaaaatttctccatttgttcttgaagctagtatttcaatgaggcaattctcatcagtgcctactcccttcatggcatgccagagctcatgag

SEQ ID NO: 339115 - DNA, 1000 bp, Homo Sapiens
tttttttagcagcaaactaaagaacatattttatttttaataaaatagtggagcatgaaaaatatcatatattacaaatatacacacgcagaaaccactctttcctggcactgtgaagagaatacactagacaaagtgtctctgccaacctagtgcttcctgatctgtttgtggaaatcatttgtttaacaatagaaagagtcaataagccctttgggtaacttttgaatgatccttctccctcttcccccctcctttccacaaatcagtccaaacgtctataacattggcttggtttccattaaaaagccacaaaatgtagcactgaagggtttctgagggctgggcctcttagttcttttgttaggagatttcttttgttgtctttatatatagcaaaatacttgtttctctttttattttcaaggaaagagaaaaaaatgtattgcacatcgtttgagttcacaaatgtgaggtttgatggaggtttctgtcttgcagagagactattggtgaaggccggagtctattttaagcaactccaaatccactggggtgtgaggcgggccccgggtcctgtctttcctctgcagggatgccgcccagcactgtggccttcctgggggtgggccctggggatggctcatttgttaacccaggggaggctcttgaatttgcaaagcagttatctgtcctcttatttgtaaatgggtagcaaagccaactcaaatacacagatgtatatttagggagggctctaaacaaaagttttcttctgagggctgaatcaactactttaccacaaattagttacacaagaggctacttcactggaggagcttcccttcgctggaaaaccaaaacaaaacaaaaccctttaagtacatttttcctttcagtgtatcacagcatcctgaatttcagggtaaacacttttttatgtatttctcttttgcttttataaaaaaaaaaaaagaagaagaagaaagaaaaacacaac

SEQ ID NO: 339116 - DNA, 1000 bp, Homo Sapiens; identical to SEQ ID NO: 158939

SEQ ID NO: 339117 - DNA, 1000 bp, Homo Sapiens
aacttcacaggaaatttattattttttgaaagggctgagggagactttacaagggtctgaagctggtaactagaaagaaagataaataaaatacgaagccagtatgttgtggcaaaattcgagaaaacacactgaaaaaaatctttacagtttaaaactgcttcactttatacataattacaaatgaatatacagcatctgggttttaacccgtcttttttatttaataggatttagcacacaaatgtccatagagcatttgcaaacaagcaatgagagcagaggtatccggtgtatcccaaccaccctcctgcggatccccacgcctcccctgcgcatcccatgcgggcagcagcacacaggagaccacaggctaagcctgaaccacaggcagactcaccaggcacgccccatggcctgtgctcatgccctcaggtggtgacgaaaggtaggggaagctcaggccggggaaggtgtggggggtgagtgcttcctgcagaagcccctccggactgcagcacaggtggtcccacctggttgtagggcaggtcactcacttcggtggcaggggacacagccagtggggggttgcacgcctttaacccttagtgagatggagaagtaattcatggcctatcaatcttttgacaattaaattagatgagtacttggaaagatgcctttattttcccttcctcccccccgcctcccttttatggcagcattaaaacacttttcattttaaagcctggccagcaggcagtagattccaaggctctggttaactaggaatgctttgctacattgaaaggaaagttcaaaaccaagcccaaactccctgccctcttctttgtctctgaggatggacgagagcgacggggctggctgggacgcatccataggtggctgcgcacctagacggtcctgctgaaggaaggcaaggcacacagatctccagcagccgctgccccaattccatccacagggttatttctaggct

SEQ ID NO: 339118 - DNA, 1000 bp, Homo Sapiens
tttttttttttttttccacatgtattctgaagggaaagttaagtaactggagtgcagaattccaaaggggcaaatcctaatgctcaaagtaaaccagattcacacccttctgttagcaggggagagaatggttttaagtatagtgcatctcaggaggaggaattaaaatgtgaaaactatatactgccatcagaggaaggaggaagtcactgaaacttgacccatgacttgtcagtttccttccaaattaatgccgctgtcaagaagactgcataattaactctcaccctgttccgctgaagctgctagcaccacgctgccactcaaagctgcctggctctcggtggggctgactcacctgctttggaaggacaaagcaaaccacctctggcacctgctttacaatgctgattagggatgagttaccactacgagtgtgcatcaagtatcagttctatgcttatctgcttcccagaggatgtggtccctgtctattccagtaggctaaaacactctcataaatgggttattgccattggaaaactaataattttctagtaatgtaaacaataccattttgtatctttaagactctcactgtgtgaacatcatgtgcatcaattatgcctacaggtaactgcattatggtggaagtctaggattgtctcccattctctcctggaaacaacagtgacagatcagaaatatagtgctgttttcattggctgtgttgaagaatccaaccaagggaaaaaagttctcttatttttcacaagcagatttcctttatctcaagttttgagtcataactttgtagatttctctaacggttgatcatactgagcctgctgcataatgtcactgactatcattttagcaatcttccaagctagctcttcctgggcctcatcagtatttccttgcacccatttcttcatagcttgtgagaacatggatccttttgatttccttacatcaggttcaggctcagattctcgga

SEQ ID NO: 339119 - DNA, 1000 bp, Homo Sapiens; identical to SEQ ID NO: 158940

SEQ ID NO: 339120 - DNA, 1000 bp, Homo Sapiens
tttttttttttttttttcctgagatggagtttcgctcttgttgctcaggctggggtgcaatggtgctgtcttggctcactgcaacctctgcctcctgggttcgagtgattctcctgcctcagcctcccaagtagctgggactgcaggtgcgtgccatcatgcccagctaatttttgtacttttagtagagatggagtttcaccatgtagtccaggctggtttcaaacttctgacctcaggtgatccacctgccttggcctcccaaagtgctaggattacaggtgtgagccactgtgcccagccagaatatatcatttcactggactctgcaggtgctttggatgatcaaggaataggacatggctgtagaagtacttttcttcttcttttttgttttttttttgagacagagtcttacctgttgcccaggctggagtgcagtgacacaatcaaggctcactgtagcttcaacctccggggaacaagcaatcctcccacctcagccttctgagtagctgcgactacaggcataagccaccatacccagcttttttttttgccggggggagggtgggcgtagagatgggatcctcactatgttgctcaggccggtcttgaactcctgggctcaagccattctcccacattgtcttcccaaagtgctaggatttcaggcatgagccactgtgcccagcctgaagtacttttcttgaactcagcattgctgccctgaaccctcccccagctgccttccctactttgggagcctctatttctagaacaggaaaacgctaggctaaatatatgtcctaatggtctcttccatcggtgtgaaggaaagaaaatgggcccaatgttgttgcaaggattaggaaggtcctgccttgccacccagtgggtttagaaatccatctttacggcctccagagaagctggtgatcaggttcccagacatcagcaatcctgtttcctgaggagcttgtgggggctctctctgggg

SEQ ID NO: 339121 - DNA, 1000 bp, Homo Sapiens
ttttttttttttttttgctgggttgtatgatagttttaattttttgagaaacctctacactgttttccacaatagccgtactgatttacattcccaccaacagtatacaaaaattcccttttctccagacccttgctgacacttgctatctcttatctttttgacaatagcagatgtaacctaacaggtgtgaggtggtatctcattgtggctttgatttgcatttccctgctgatcagtgatgttgagcactttttcatatacctgttggctgtttttatgtcttctttggaaaaatatctattttttttttttttttgagatggagtctcactctgttacccaggctggagtgcagtaatgcgatctcggctcactgcaacctccacctcccgggttcaagcaatccttctgcctcagcctcccgagtagctgggattacaggcgcgtgccaccacacctggctaatgtttcgtatttttagtagagatgggtgttagcccatcatggtgttagccaggatggtctcagtctcctgaccttgtgattctcccacctcggcctcccaaagtgctgagattacaggcgtgagccaccatgcccagcccctttgaccatttttaattggattatttgttttctttaagttctgtgagttccttatatagtttggatattaaacccctaccagataacggtttgcaaatattttctcccaatctacagtccaccttttcattttggtgatcgtttcctttgttgtgcaggagttttgggtttaatgtagtcccacttgttcatttttgcttttcttgcctgagcttttggtgtgatatctaatctttacactcctgcttatcagaaagaatgatgatccccctttcaatgtctgcatgtgaggcctctatttcaatgggctccgctggcaaaacggtaacttttgtccctgtctgctggatgaactgctggagattgacttgccgcaactccttagtcaact

SEQ ID NO: 339122 - DNA, 1000 bp, Homo Sapiens
aggggttaagaagaagagaaatgcattactttaattgcacacagagtttctgtttggggtgatgaaaaagttttacaagtagacagcggtgatcattacacaacattgtgaatgtacctaaccccactgaattacatgccttaaaatggttaaaactgtaaatgtggctatgtatatgttaccataaaaaaatttagaactaagtacccaaagccttcacaccacttgtggtgagccttttcttcctcagttgagatagtgataaaagaaattacttaggtaatactttttgaaaccctggttggtagtgatggccaatagcatcgcctctccccgtaccccaaaacacacatccacacacacacaaaatacactcaataccctatcaaatacctagaattatatttcacaaaggattacacaaccaataatttcactaatgatgcagtttatatcctcccatactgacagataaaaacacatacattctctaagcacaaagcttatagtcacaaataactctctgcttaaagacaaaatttcaattaatcacaatgggaatttagttatttaatgcaactactaatctaatgtcatcaacaaaatctaagcagttttatcacaaaaccagggttatattcagtgggcatgcattaataatctatacaactttaacattacaccagaaaaggaattgaatatataaaagttcccttgatttttggtggttttcaaatttcatggcacagattacaaaaaaaaaaaaaaaaaaaaaaccctgtaaaaacagattttaaatattttccataaaatggtaaaaaattgaatatatacctttaagttttcataccgggctgaagatttaaaacatcaagctggccccaatctgtcaaaactgacagataaatatttacaatgactagacagactttagttacaaaggtactggaggtctacaccctattgaaaaccctttagggttaatttctcaatgcaaaca

SEQ ID NO: 339123 - DNA, 1000 bp, Homo Sapiens
ttaattttcacattttatttccaactattgcagtaacaagatgccggtagtattctgcactgaaagtggcaaccttttaaagtaaacaaggttgcaaattttagtattccaacaatattttgacctatggagattttgataggaaagaattattacaatcagttttataatactacagacttatgtttcctccatatctaggaataaaaatatccaccctccctcaatgattcatcatgtacacatctctactctttacaagcactatccttccagttgtactatgaggggaaatccctctcactcctgggtttttctacagtatacagaaatagcagtcactttagcagtaatgtacaatactattcaatctttagttgaaaaataaagaagtggattgccctatttatgtcctgatagtaaaaagacacacaccattgaaacataaaacgagtcaacaaacttctatttttattgacaggagtccaaaatgaatacaaaaaaagcttcctttgcatgttatacttactttccttaaaaagctcctgatagagtcaagtagactgaaaactaaggatgtagttcagcttttagagtgaaccttttttaaaaaaggtttaataacataagccaccagtatcagaaaacatacagtcccactatcacttttagagctagaacttatcaaaagaattagatcctgcattgatctgctaagatagaggtttagaaatggtttaagccattaaaagccatttttataatctgtctgataactctgggcaattaagaaaaggaaaattccaaaacgtagccctctatatcatgtggaatgtgagagaatgccaacttatgaccaagataagtaaaaataaaagtttaaatctatgagtggagctgttgtatcactgcaaaatgtcaacaacagagcttatcaagagattatcaacttgagcgatgttacttaaacttgagcgatgttacttaaaacatatttgtg

SEQ ID NO: 339124 - DNA, 1000 bp, Homo Sapiens
gaattgttcagtgcatccaacactttacttactccacacctttctgcaaaatgctcataataaacctcctgtctacattgtgttccaatgaaaactttagtcatattttacatttattattaatataacatgctatgtaaatgtacaggagcctgacaaatgacaatctacttacataatttaaataacacaagtgcttgctgcagtctttattagtacacagctttgttatggcttcttagaaataattttaaaaagtgcatgattcttgtgggctactctgtttaggaaagattacagataacacatttctaagaatgaattagtcagctgtatatgggttcagattagaaaatattaaataaatacagggaaaaatatttttaattagcttaatttatatatgaagatattttatttaatttgtttttgagacagggtctttctctgtcacccagactggtgtgcaatggcacaaacacatctcattgcggcctggacctcctggcctcaggtactatgcctagctaattttttttattttttgtagagatgcattctcactatgttgcccaggctggtcttgaactcctggcctcaagtgatcctcccgtctttaccttccaaagggttgggattacaggcctgagccactgcacccagtcccattttacttaaatatcaaattcaaatcttcagtgttctacttattttgggtgttaattccattatacaccgtcttatttcagtaatttccatattgtgccagacaagatataaaaataattcaactccagtcaataataccatctgtcttcatgtgaccaggatgaaaagcttctgctcccaacatggaagccacagtaagaaaagaatctgtctaatccactagcaacaagcagttaatactgtagttcggaataatactaggacattaacattctaattccagcaaacaaggactgactcttttcaaaattcaactttggttaagaaatgc

SEQ ID NO: 339125 - DNA, 1000 bp, Homo Sapiens
ttttttttttttttttttaacagatgtaaactatttattgaatatttgccaccaaatattgttaaatacattatcttgcagcatatcgctttcaagttaaaatgtcagaaacaaacaccaatatttacaattcttttaaggaatgttatataatgacacattaaggcgtaaattcttttggcttataattcttaaaagaatgataatagcaaaagtgatgcaaaatcttcagtgtgagattatgattaagctacattttacaaaaatatggtgtaagatggcaataatcccattcaacatcctggattagatcccttcaggagggactgataatttatacagtcaaactttaaaatttacagataaaggcagttcaatactgccactgagaagtacatctcttaacatatacaactttcaggccacagttttgaaggtctgaagtattaagttggtttgatgaattagtcggttggcacttacgaacacatttattgccttgccatctttaaaatacgttttcagagtatcactgaaacttttggagtactttacaaattctttcttttggtgttcaagtgccctgcggttctggtattgatatttcttgaagacattattcactgtatcaagaagttcttttattgcactagctatatccttgattgtctgcagaaacctcactctgtcattgatctcatctgggatcttactgagaatttgtttaagtgctcgtgccttttcgtttaggtcttggaattctggctctggtcgttcaatcatatactcttctacatcatcagctgccatacgaagaagggactccgtgaagttaacttccacgctttttttctctaaaattttcataatgatgtcttgtgtgagacctggattttctttttcagccttgatgaaagcggctctcagtgtctgggctgcagacagatttactcgttctagctcattaaacacaggatacatgactgcatagaggggcata

SEQ ID NO: 339126 - DNA, 1000 bp, Homo Sapiens; identical to SEQ ID NO: 158942

SEQ ID NO: 339127 - DNA, 1000 bp, Homo Sapiens; identical to SEQ ID NO: 158944

SEQ ID NO: 339128 - DNA, 1000 bp, Homo Sapiens
gagatatagtgattttaatttcactcaactgtgaaaaagttttcattaatggtttacaatacaataccataaattatctccaagttcgcattaaagtaagtgggatttgatgtaaatgttttccattatgtagaatgatgtttcttgccactgtggaatctgagtaataataataaaaaccaccattgagcaccctacaatatgccaagcactctgttgaaatctgtgctttacacacttgtgaagatagtgacaaaaacttttaactactctttgtggtcagcttttgaaaagaatttctttcccttcacacctcccccaattagatattctttcatttaatatgcccaaatcttccctgaattgcaaaagtcacctatagaaaattgcacaccttaaatagcaccaaaatgtagtggtagaatgcatgtaacatactgtggattaaaattaaggaaaagtatttctaacctcttgttagccatctattctcaaatattttataaaatctggtataactgaggaattaacaatctcctgaaacttactaacagcatttgacctgtcttcaaagaaaacccttagaatgggccgggcacggtggctcacacctgtaatctcagcactttaggaggccgaggtagacagatcacttgaggtcgggagttcaagaccagcctggccaacatggggaaacttcgcctctactaaaaatacaaaaattagctggtgtggtggcgggcacctgtagtcccagctactcaagaggctgaggcaggagaatcacttgaatccagaaggcagaggttgcagtgagctgagatcatgccactgcactccagcccaggcaacagaacaagactctgacccccagccccccaccaaaaaaaaaaaaaaaggaaaaagaaaaagaaaaccctcagaatgtcaaacacaatttcagcttatatatacgtacataacttagagaggtggttcaattagaggcctacctatttac

SEQ ID NO: 339129 - DNA, 1000 bp, Homo Sapiens
tttttttttttttttttttttttttttaaaaaaatacactttattgtgacctcacggtttgcagggcagcgcagcgggcacaggcagaggagcatgcagagcgcgtggcacgggtgcacagcacatggcgaagcggcccctgcccgggcacctcctctggaccgcccctgcacgccttgggaccctcgggcccagccgggccccctcctcccaacaacccccagaggtcctgggtgagcaaacagagtggccggggcaggcttggccaccagggctggtgtgagcccagaggcggggtgggcagaagcagctggcacagctcagccggaagccttagcggagggaggagggcgtgggagcccacacctgccaatccagccctgagctcctcagcaattttgtctctcttgattaaacatcccacgaacatcaagttcacagacatgttttcttcttcatctttctgaaaacacccagaatggaaaagcagagaacagcttcgaggttcctagggccccttgacacttttgggggcagagagagttggtgggaagaggggtgaaagggccaggcctgaggcttatgcaagagacagaaggcagcaaaggcagtgtcctgggcttgtccggggagagggacggtgtgcaggtgtgtgcaggggtgtgcaggtgtgtgcacgtgcagaggcaaactgctagggcaggaagcctggagcacacccaggtgcttgctttgggaagaacaccaaccagtaactgcgaagggtgggcaccagcagggggtgggcagcatgtctgggacctccagactgtccctccccggtggagccagaatgtggggggcagggccggccacccagcctccagtccagccagtgaggggccctctggccaacccaggaaggcgcctccatggcagggtggctgccgtggcattaagagagggccacagacacggcggggctcacccctgggggaacgagccgggtagggggcagcag

SEQ ID NO: 339130 - DNA, 1000 bp, Homo Sapiens; identical to SEQ ID NO: 158946

SEQ ID NO: 339131 - DNA, 1000 bp, Homo Sapiens; identical to SEQ ID NO: 158947

SEQ ID NO: 339132 - DNA, 1000 bp, Homo Sapiens
ttttttttttttttttttttaacaggaggaaaaaaattttaataacatatgtttgcacaggagtcccacaaaatatgagactccgagaagagtcagatgatggacactcatgcaccaccgtgagctatcgaaagaatgtgggcttagggcttctgcatggaggtggccacggaagtgggaaagtgaaggcaagaagtgtgtcctgaataaagcttggctggttttcagacaaaaggtcttctgggtaataaatgttgtctggagcagccctcaggagaagaggtaagagcctgtatgggatggtgtcgctgccaacatccttccctgtgatcccacttactcttccctggctgatgagatacttggggttgtgattcatgatgattgaatttccttttgaggatttgtctttgggcagatgaaggaggctcagagaaaagcccctccctgcatgtgctgtgcccaagtgacctcattttgaagtcagtggcaaaccagcggcatattttagggtgccatttgctgaatgctttcagcatccactaatccagtcaattgttcccatttgtttcctgaatagcaaacacttccttgaaattcttctcaaactcagcctccagtctaaatcccatttggccaaaatccttgtacttgtaagaggccctgtggttctggaagatgaggcgcatgtcttgtacaaacccctccacttgggggtaaccgtgctcattcagccttttcttgattttatccaaccacatgggctccttcaggccttgacacgcctctctaatataataatagtatggaatcttggcaaaaaaggagctctcagaacagcaatagactttcaagaggaggaactcacatttcaactgttcctcaggacacatctgcctctccaggacctcagattcctgacaacactgttggcttcccggagactccttcatcctgcagaagatgcaattccacggggtcctctcagcttccacaggcg

SEQ ID NO: 339133 - DNA, 1000 bp, Homo Sapiens; identical to SEQ ID NO: 158948

SEQ ID NO: 339134 - DNA, 1000 bp, Homo Sapiens
tttttttttttttttgtagaaaaaggctgacttttattttcctgcagagcatcttcctcgggagagcagggagccccaagtcatcgagttaagagcaggagaatccccttgactaggttggggtctgagcccagaggcagggcctaaggaggtgcagagactagggccgggagtggtgaggcaaggttggggcctggagggacagctatgaccgttgaacttgcagaccctggtccaccttcttggagtggaagccagcggtgcagaaggggacccctgaggcgcagaggcaagtaacagtgccaggggagtggtcagggcagatcctttccttctcaggaggctgttgagggggagagtgtcatgctctaaacagtgaagggacagatgacttccataccccactcttccttgctggtgagaagtggaccttggagttcagtggctgaaactcagaatttagggtatggagctggacccagagaataaagtctcaagtagtagaaggggcatctccttcagtccatggatttgggcctctggcatgaagcagccagggcctggatgttaaggatttagaattcagtgggagaggaagaacagggcttgtaaccagagtgagctcctcactctgcctccccatcctggggccgagagagcaggtggagttttctttgtagctgggcccggaggtagcggaggtcttgctgatcaagcccgtgagccaggcccaggtagagggtaaggaggaaagcaaggaggagacggtccgtgcccagggtaggcaccacccacagcactgtcagcagctccacacacactgggtggcgcaggtgggagaagagtctgagagcccggggagacttcagggccagaggctcgcccagccccagcacatggtagtatacctgtttgaggcccatgagctcagcatagtcaaagacgagaaggatgctaaagatgaggagccaggagatgacatggagcacaaagcagagga

SEQ ID NO: 339135 - DNA, 507 bp, Homo Sapiens; identical to SEQ ID NO: 158949

SEQ ID NO: 339136 - DNA, 1000 bp, Homo Sapiens
ttttttttttttttttttttaagttagtttaaaattttattttttttatttattttttaatatttttatgtaataaaaagtaaaagtccttgtccagccatcctcgtggggcatctgtctgtctctcacacaggtcactcaagttaatgggaaagaaagaacagggggcccaagtctgaagttataaataatagaaaataaaagatcttccgtctccagcgggggaatagatgagaggatgggagggcaagactgggtggggacgggcaggggcagagcaggaaccccccacccctgctggaccctggccctgccctctgtgaggcccctcccattcaaggtgcttggcaggaattccccagctcccctggggaacggggggatggggggctgggagtggtccgagctgctgggggaagagacatagatcactcttccctccactcatggaggtctcaggtcgcggccaggacaatcttcagttccccggggggtggaaggggagctgctgggagggatgagattgaactggttggaggggaaagagaagagagcaggagcattagaacccaagcagctgtcccttcctccaatgccgtccagtgggggcgtgggggtgtgtctgggaaggagcggcctcctcaaggtgtctcgggggctgtcagaagcacaggtcaatcgctgtttcccagtaagccagagccctcactcatgtgcccagctcagccccccacaccccagtctggccctgtctgctgcactgaccttacctcggctaagtcaggagacagtcggggtcactgagagctggggaggcagtggggaggggggctgctggatcacaactgagcgaggacggagggaagcaaaggacagagccaggagcaagcccctggcggcggcgactgtggcttctgcccaccctacatacttcacagacaggtgcaggtcggcgggcgccctgtgggacagccctgcctccaagacccctcactcccca

SEQ ID NO: 339137 - DNA, 1000 bp, Homo Sapiens
ttttttttttttttttctttttttttttttttttttttttttttttttttaatatacaaacttttattcaaagttaattcaagaaagacatgttttggtcatttttaaagtgagattaattgaagatctcagaaaaactgtatctgatcaacacacatggctactcacagaaagttctctcttctgttaatagcagctaaatttatacacacagaaaaaattccgaagaccatgcaaattcaattgaattccatacattcattatattcatcaaaaacctgcagtaatgttcatgccaaagtgttaatttaagaaaaaaattaaaaatacacaccaaaacatgaccaagattaaactaaagaaaataataaataagcataacttatattgtattttaaaaagtttggcatcacacatattcaagtgtgttacaccaggtccattcctcagaagtggcatttaaagtgttaagcattgttaaatatcaaaaaatacaactctgttttacaatgtagtactggcataattcaaagtactgtgccaattataaatagtataatcaagtttcaaacatcttttcaaacatatttaaaggaaagcatatagacacacatttatatgcacataatttattatattcatgtaatcaaagttattttataaaagcaaacagtgtatccctcaactagtttgtatacttacgtagattttaatatctgttcaaagattttcagttcctggtatacagatttttagaagaaataaagataaaatttaattttacaagaacacacattacttcatcctccttcacaaaataatctgtagtcattcaaggttgataagaactagtctttatgaaagcaactgttgtctaaagactacagattaagtcctgcagtccaagtttcttatgaaaattcagtcagctgctgctcattgcagaaaaagcctacacggtgcttctaccaaaaataatcttcagtatctgaggcctata

SEQ ID NO: 339138 - DNA, 1000 bp, Homo Sapiens
taaaacttttcataacaaaggtttaattagaatggttaataactatgatttccaaagtgtctgagtcagttagggagttttgttttttgttccatacaaaatgctttatttaaccttcatgccttcattcagataattatacaaatgcatacagttaaaggtttaaactctatttcagttcacagctcaattcataggaaagttgaatacagaaaagcaatgcaccaacagaatatgtctgagacaccattaaaaacaataacacttgttcatttaaatctctgagaatagactggaataatcatcctctgagagaatctcattaggagggtctccctttacattatcatagggcaaaaaaatcaccattttacagtaaaaggaaaaaagctctgagtatatttacaatacatacactatacataaatacaagaacaacacttacataatattaataaacttataacagggttgcctaaacactacagagtatataaatgcagaggaaactattgggaaattaggtctttagataaactggagaaataaattcatttgcaattaaaatcctgaacagaaaaccaaatgaagatttaagaactcaacacatttgcttgccagcatcactggggggctttatcctttaatgtgtaggacctcctctgggcactcttaactccctggggtcagagacccaagagtgttttgtaaaattacatccataaagcaaatcagatgcagcccatctattcaatttgctgttcagaggcttcaagcctagaataactgttttgtaaactaaaggatgtttctgtattttcacacggacagatctcgtgatccaatcaccacgtataatgagctaaacgtcaaggaaaagaaaaaagatgcctgcttgatttggccaaagatgatatttttctttattcccatgtatttttttttcaaatatgactgagagatttattcaaaagaacatgacgttagaattgacccccac

SEQ ID NO: 339139 - DNA, 1000 bp, Homo Sapiens
gaattccgcaaaatctttaatcctgaaggagaaagtggaaaagaaaaaaaagaggaggagaaggacaagaactcctcattcccttgatgaacttaagaagcagaagcaccagcactgtctgaaaaccaaactttaagaagaaataggattagatttattaaaaccttttgagtgtggtatgggactcagcttattcactgggaatgtgcctcaaactcagaaaccaaatccctgtaaatcttaccaatcaactacttgttatgctctttccatttaggaagttaaaaaagtcgtttaggacactatcaaaccacttttaggtacttattttaaaaacatatggataagagttctagaaaacaagagaaaaattggaaagaataaagcagcgtatgtttgttcacagccttgagtttgattcctgttttgttactgtaggaaaaatgtcctatttcagagcagggggggatgggaaggcagccatgggtgccacactggaattccgtgaaggtagaatatgaagagccccacgggagaccagctctcttttcctccagtctcctcaacttggctcagtgggctgcttcaaccccatatgcaagctgaagtcaaagaggaaaaaattgtcccaacctcagcacacgaccaggaaagataccagcgcagcttctctagtgtgacctgtgcggctcacatggtgtcatggcgacggcgatgcagggacaggtggtcagaacgagaaaagctgcggttgcagtctgtgcaccgaaaaggcttgatgcctgtgtgcttgcggaaatggcgagtgagctcatctgagcgagcaaatttccaggagcagccatcccaggtgcatttataaggcttctctcctgtatggattctgcggtgagctttcaggtgagagcttttggtgtacactttgctgcatcctgcaaagtcacattggtgaatccgtcttctcttcaagtcaagcgactctcctccctgcatttgggcc

SEQ ID NO: 339140 - DNA, 1000 bp, Homo Sapiens; identical to SEQ ID NO: 158951

SEQ ID NO: 339141 - DNA, 1000 bp, Homo Sapiens
ttttttttttttttttttttttttttttttttttttttttttatgcaagaacaaatttaataataagctgtatctataattccagactttttttccctgcaaaacctgggaaacaagagggatgaaggaatataaacatcctaaaagcctcatattgttgaaggagactttgaaattcttggcgttgatagatacatgctcagatatttattaaacatttacagataccaaccagcaaaataaaaagggaattggaacttctgtacctcccttttcttttatcatgtgggaaagtctcaaagccctggcactgggagctgctcagaaggcaagggccacatgtgcccccagcttccccccacccccagcacagggccaggaagccactgctggtggctccctgtctgctgcctcccgagcagtaggtcccagcgaggtggggtggtaataggttgggctgggagcagattagcaaaccctctcctccccgcaaggaaataaccaggccagataagactagccataaaacaaaacaagggctgatgtagaaaaggattggatcataagacacgagcaagccatagcatcactcattacacagagctgagctttactgctcccagcactacagtcctgggcctgacaccagcccaggcatcggagaaccaggtgccacccccaaaaaacagtgtcacagaactaaacattatccacactgccccaggtgacacagacccaggcacccaggagaaaatagagaaattaggatcctagtcacaaaggtcacagggactttggtggcccctggtcacatgtgtgaaatcttggcaatgtgtaggaatcagtgagtgcgcgctgagtgtgtgtttgtctgaaattagaaaatacccaagtgtgggcctgagtctccctccctaccccagggcccagacttgcccacccagggccctaaggcaggtgttgggcctcaccctcaaccgtggctccctgagggcaaggg

SEQ ID NO: 339142 - DNA, 1000 bp, Homo Sapiens
aggaatcagaaaaactcaggattttattagcatatatttattttataacttcacatttataacattttactttgtataccgccaataaatgacaatgaaactattttcataaatacaaaaacacatgaaattagggtgtcatggtaaccactgcatcactttggtggaacagtattaaaaatagaatttagaaagataaatgatcacaagtgataccttttaaaaaatgcttttcttacaatctcaggatattcttcagttaaactgaaccacaatcagaaaaaataagtaattatttaaaagtcaaacctctaacaattgtcaacaactgctggaagagtcatcacaaatataaaaaacaacaagcactcaaatttacaataagagatgaaacggtttctaacaccagggtagactggaagtcaactggaagcatattagcttgttaccacacaactgtcagaacaataaagaaagcatgcattgagcagacaggaacatcgtgaaaatcctaagagcttcaatgtattgagggctttctgtgttccagatgtcatgcaacgtgcttaaaaagcattaagtcatttgttcataacaaccgtgtactctcatcttcttatttttcagatgtggaaactgatgtctagagaagctaagcaatttgcttacagtatgcacaaatctaccacaagactacacatcaactgtgttggagatttgcctagcacatataactaaatggtgctcatctgcactgcactcacacacttacgtgatacacaggtctgatctaaatacacaggtctgatctacacaaccatgtggtgctaccgcttttaaaatctgtgaacaattaaaagaagtttggatacgtacacagataccataaaggaaactttgctctaaggtctgcacaaaatgagccaatctgaaaataaaagtaaacctggtggtgaatgctgatgtgttaaaatttggttatcagcccatttgaatctag

SEQ ID NO: 339143 - DNA, 1000 bp, Homo Sapiens; identical to SEQ ID NO: 158952

SEQ ID NO: 339144 - DNA, 1000 bp, Homo Sapiens
tttttttttttttttttttttttttttttttttttttttttttttttttttccatggctatctcttccatttatttcacctttttttctgcattgctccttagacacaaggaccgagacaaatagtacaacactgagggcctgctctctatcgctcctgatcctgtctctctctccacacctcagtattttaagatagattcaaaattgaccacgagtgctttgaccctcccctctacatccccccaaatctcccacctatactctcacctgtgccttttccttcactgttggaggagtctggcctctacctcagctgggtgtaagaggctgagtgggagagatgggggaagtatttggaagcaaatggtgtgcctgaaagctcaggcttggctcagggtggggggctgctgcagcaggctggctatcacccttggtgatgatgatggaatgctgggtggaacaggaggaagaggaggcgcatgtgcccgccttggtctggtccttaggaaggtaatggactacagcattcaggagccggccccggaagtgtgggctgagaaagttgtaaaggatggggttgatgacacagtgcagcatggagaagcagtcaatgacatcatagaagaagtagagcaggtggaccaggtggcagtggagggagatgtgggtcccatgcagtgtgagcagcagcagggtcacatgatagggcagccagcacatgacaaagacggccacgtaggcgcacagcagcaggcagtggcgccggctcttgggttgtcctggctgccgcagccggcaggctgtcagcacattgaagactgtgatgagagggaagggcagcaggaagcccaggatggtggtggacagggccaccgccagggcccaggtgctgtacgtttcaaaaggtgccatgaagaggcacatgggctcagggccctccaccagctggatgtggaccacctcaggcagcgggatgatggccgagaggacccagatgc

SEQ ID NO: 339145 - DNA, 1000 bp, Homo Sapiens
ttttttttttttttttttttttttttcccatttgcaaaacccctttaatcagaataaatagagtcccaggcagggcagagttcattggggatgcccaagccggattcacccacccttccagctccagcctaggcgcagctgcggctttcgagaggcgaaactgtcttccttgtcctggtgtcccagcagggtcactgggaggcaacagtgtggtctcagggtgctgggcgggcccgtgaggcccatcgccgtccccctaggcatcctgttcatctgtgagcagggcagggggtgccgcagcctcctcggttgtcccaaccctgctcctctcctccctctccttcctctcgtagatggagtgaagcttgttgattaagaagattttgtcctcaccctcattgctgatctgctccttgagcaggcagatgaccttgcgctggccccgcaccacctggatgttgaggtagatcacggccagcagcagggctgacaccaggaagacaaagaaggtgttttccatcaggtaccggtgcacccagggcagccaggagaccctggggcctgccgcctccaggtggcgcacccacaccctgccggcctcgtacatggtgtccagggtccggaaggggccgcaggtgctcgagggcttcacctgccagacggcgtagcagaggaagacagcggcgcccaggaaggcggggaagcagagcagcgtgaggaagacggtgctcatgtgtgaggccagccagggccggcgcggcgcctggcagttggccagaaggctggtcttcttgacatagaagacgagcagcagcttgatgatctgcacggcggggaggaggggcgagaagagcacccccagccaggtcagagtctgcccataaatcagctccaggacattccgggcaatgtcaaactccggcttccgcctcctcttcagcttcttctcggagataatcctccacaccagttccccaaaaagcgtgtccagcaacatgag

SEQ ID NO: 339146 - DNA, 1000 bp, Homo Sapiens; identical to SEQ ID NO: 158956

SEQ ID NO: 339147 - DNA, 917 bp, Homo Sapiens
ttttttttttttttttttcaggtggcccgaggagaaggaagtttattgctgttgcagggactcgctgccgccgctcccagcaacaaatcacagctgcattttctcgttgatccagtcgatgtaggcggacacccgggtgtagactaccggcttcttgcgggtgttgcagccccgccgggagccaaagctgacgatgccaaacacctcccaggaaccgttctccaactggcagttcagtgggccaccggagtccccattgcaggctgagatgacgccatcgcccccagcgcacaccatggttttcttcaccctgaagccccaccagtcaatcctggagcacgtggcgtgatccaccacgggctgcaggccctgctgcagcttatcagcaatggggccgttggtccagaggcggccccagccggtgacatagcaggggtagtccttggggagcagggagtccttctctggcaggcaggccacctggatggtgtcactcagctccacatgctctgcaagcttgatgagggcaatatcattgcgcaacaggagggcattccatctcttgtggacgtggatggtgtccacacccacaaacagggatccttcttcgtcttccacctccaggttgttctttcccacggccacacggtaggtccgggtgttgctgatgcagtgggcggcagtgaggacgaagttgctagcaatcaaagtcccgccacacgtatgcctccacgtgtcgttcttgaggtactggagggagatctgccagggccagctgtggggccgggcatcctctcctcccaccactcgggcggataggttgggcgggaagctgggcaccccacagctggaggcacaggccaagagcgcagcgaggacagtgatgcccaacatggttaggtgctcaggactggctg

SEQ ID NO: 339148 - DNA, 1000 bp, Homo Sapiens; identical to SEQ ID NO: 158957

SEQ ID NO: 339149 - DNA, 1000 bp, Homo Sapiens; identical to SEQ ID NO: 158959

SEQ ID NO: 339150 - DNA, 1000 bp, Homo Sapiens
catttctctgaggaagccgagaaactttaattaggtgacggggttccgagcacttaagcagatggggtgcggtgaaggcccagggaggaggagggcagggaggtgcacgtcctctgtgccccacacactttcaaccactgcaacaaacaagcacccaagagaggctgtgcggcagagccctgcacccacaggcctttgacagcacagtgaggggcctccgcacgtggcctcgggacgctcactcgacgcacacccggtgcatcacactggcacctaaagacaggccgtgcagctaaaaggagcacgtgtggccaaggagagcaatcagctgtcccgcgtttctaaaggcagggaccgaggctgtggaggggcgagcagggcaggccggcggaggctacttgagcagcttggccacgttcaggctgggcaccacaatgtccttgaagaggggcacgtagctggggctggcctgtgctgggccctgctccagggtctccatgatggtctgcttcatgtcacggctggcgtccccacgcacagccagcagcgcaccgatgtggtcatccctgatgtctggatacttgctgaccagagtggagacctccaggtagagcagagaagggtctgtcagcttgatcacttcggccacagccacgatggtgtcgcagtatccgtccacgtcttccccgaaaccggacgccagcttccggaacaggaagcgcagctgctctgcctccctaaccatcttctcggcaccctccttgcgctcctccgggctccggaaggaaatgcgcttctgcatgaccgcccgcaggtactccaccaccacgcgccggtgcgcctcggccgtcatcctcttcttatacggctttttaattttggcaaaatcgttgaaatagtcttccacggtgacacagataatgtctacagcgtttgaccctaatagccacttcttcgtcatcaattcattcagatgttgctccaggtccaggaagacctc

SEQ ID NO: 339151 - DNA, 924 bp, Homo Sapiens
tttttttttttttttttttttttttttttttttcagcttggtggtttcctctttattgatgtgcctcctaccttccccccacaatttcagtcccttccaactacccccaaaaaagaaggtagtgaaaggaagggattgctggggttctgagccccttgggcagtcagaaagggaacagaaaccaaaacaatcactggatgtgacacagactgacaatcaagaagtctacagcaggatgggaaaggcgggcagagaaaggggaagaaaggagaaaggagagttacaagatgccaactccaccattacccctcctaagagaggctggagagaaagccacaaacattaagaagtgccggtcctgaataagggaggtggtgtttgagcttgaaggaggaggaggtcaagaaaggggggccacctctctctttgtagaatgagacccccctccagctcaggggcagcagcttcacagaccgtagacactttcgtcactgtaggcaatgtagagaaagaagtcttcttcatggtgttcctggtacagctgacccattgtggcactggtgggtggaatgacattgttgacaaagaaaaacaaggcatcctcagctcggagatgaattcgcttccggatcaagaagtagaactgaccaactgtgagatcagaaggcaccaggtatttctttttgtccaggtctcctatccgagctttgggagccttttctactatcaccggcacccggtccgggtatttctttcggatcttctcgccctcagagcggcgcttctcgaacggatgctcttctttgtacacgaacttcatcctcccgggaaccgggctggacagggctgggctgagggaacccaggggggccgggacggggggcggcgacgacggcggcgacgcgcgggcggattcagcggagc

SEQ ID NO: 339152 - DNA, 1000 bp, Homo Sapiens
tttttttttttttttgtatattattcaggcaatttattaaacattacctatagaatattatgatctgtattttacagaagttaaaaagtgatgtattagtattcataacaactgctccatgcaggagtaatagaagtcaacattaagcccaactctattttcagaccaaccatgcaactttagatcagaggacacatgggactctgcatcttaattcctaaatttacagtcaaagacattttcagagataagtattatgaattcaataagaatctaaagtaagttcttaaggcaaatagctataaaagagaagaatccttagtctctcatcttctaaaaacagcttcacaaataatttggaaaatcagcctaaaggtaaatagaaactgcatttcccctccattcttgaagccaatctttttcaagaaatgactaagcagcacctgttgttgaagacagcaataaagcctgaacctgacactcaagctttggtacaggatcagttttctggcttggactggtcaggagtcacttcactcagaatcttcattagtgattttaagcgattgtgcgttagcactatcttctctttcagctctgcaatcttttctgatagaggaacattttgaatatccatctctgatgcatttactatggcttttgtttttaagagatagcacaccattttgtcactggaaaggcagaagtgacctctcaaggcagccagggcagcatgggtagaatacagatggaaaccaacgggaatcccacaagaaccacagaataaaaggttgtaagtactgcctttgagtgaaccttcaatgccaactaggaagggcgcttccaaaacgacgttatttgtaactctggagaagaccacggccccgagggaccgcgacaggtcccaggcgaggtgcaccgagtcggcgagcactgcgtgacactgtgcgcactggaacacagcgcacctctcaggctgcagccaagacggcagctgcgg

SEQ ID NO: 339153 - DNA, 1000 bp, Homo Sapiens
tttttttttttttttttttttttttttttttttttcttgatttaaaaatattttattctttagaaaatacagcattcaaccatcccaaactgcagtgacccctgccccagccctgactgaccccacttcttgtggccaaaggtttctgggctgtgctgggaccctagtctcagctccccgggaggccaggttcatgccaggcccctgacccagcccccttaagccagccaggcagggtccccggacaccctgggcacacagacgagatgcagggacagcaacagggaagggtcacaaaatgccagcccggtggccctcggacgctgcaagtgcgttcagctgccagccctcctgacctcccagaaacactttcctggagcccaggaaggaggatggtggcagggagcggaaggtgggcagccccacagtccacacgtggccggccctgctccagcctcctagctgtcatccccattttcacccgggccgcggatgaggcgcttatggccccgcttgccccctgggcccttgggcttggcgaaggcctgcttgaaggcgtgttgcttggggtgcacctcgtcgtagaggaactctgccgtcagctctgccccatcgccaatctcaattttcttggcgatctccagatggaagtcctgctccacggagtcgaggaggcggctcttgcagctggagtagagcattcgctccttgatgctgcacttgtaccccggcatggagtagatgaacactacagactcaagggggtcgccctcatgggtgtgcttgtagaggaagaagtggtagcgggcagcatctcggggcacccgggagggcagctgggccacatccgtgggctctgtgtgcaccagctcaatggtttcccgctctaggtccagcttcatctggatgtagttgaccattttctgcttgagctgctggagtgcccgctgggcctcaggctgcagggggaaggcgaggccctgcagggtctggtgcttgc

SEQ ID NO: 339154 - DNA, 1000 bp, Homo Sapiens
tgtgtactgatgggaaggggaattttgacgtttgtggattgccttggccaaagccaccattaaacagatgggaaagctgagggtcaaacaaggaagggtcttacccagggtcacacaacagctgaatgagagcaagggctagaactcaagcttgcgtccctaacccatccccaaccccagagctctcctctgctgacccctcatctctggggctgcccaaagaggccagaccctttgggtcccccaggtctaatgagccttcttctggctctgccctcccggggtggggtcgggggtggggctctaggtggtgcaggaggcctcggcggggaggctgccacgcttgagccgaaggctgccattccacccgcggggacagatattgtagcccaggatgcctggagacttagccccggagtcctcggagtcgagggacacgtcggagtccgtgggcgagcggcggtagaggaagggcctgggaggcgcgggcagcgggctccggggactggtgcaggacgaaggaccggcgggcaacgggctccgcgggatgggcgcgaaggctgcccccggcacagcagccgagccggggcgggcgggctgtggcgagcgcatgcgcgggggcgggggcgggggcgggggcgggggcggtggcgccctcggcggggagaagggccgcgggttctcggcgcccgccgaccgcggggaggcgctcttgcgccgggccgcattgatgatgtttcgcgccagaagcgcctgcagctggcggctggggggccgcgcctcggtctcaggtcgcagcggggacaccgagcgctcgctccacgagggagacatgggcggtggcggcggcagcggcggggggctgctcatgctgctcccgcgacctggctcccacgggcccgggctcacccagccgtctaggctgctggggggccgggacgcgcccggcgtccagggtggggaggtgggcaggctctcccggcggtcctgagcctcgatc

SEQ ID NO: 339155 - DNA, 1000 bp, Homo Sapiens
agtattaaaaacgtttgtttttattttgtatttttgagactggaaactgataaaaatttctgattaggaaactttgagaatagagtctttcttctttccaaaataacaaatgtcttttagtttgagagctccagctgtggcaacaagaatgataaatgcttttgagaaaattagcaaggttttgccccacttaaatggttaacagtaacagcagcacagacccaaacttgataaaactttggtacttgttatttggactaaaattttgtctcactcgattcagacacttaaatgggagttttcagtttatcctgcccactgattcataactgggagacagattcatgggaaggcagcattggacacatactccttctcttgctgagaaccaccaatataatctaattctctttttttaggtgagagaagcagaggcccaaaggaatattgcaaatacccaaggtcaccctgtcaggagtggcagaatagggctggaacaaggactcttttctctggacagcttgcacctacaatcctttccatcttgcacctacaatccactcgaacactgcagcatggaggcagactccttgccaacgggtattgtcgagagcttcttcctaccatcatttgtgagtttcatcagctcccaaccctttgtgtctcagcttctaaactttctttctttgaccagaactcagccatagtagaactggatttatggatggaattagagatatgtcttatctgatgtgacaactccaaagaatcggtagtgctttagagacatcagaaggctctatagaactcaacaagagtaccatgtaaaattcatgatgtctggatgtgtgagggatagggaggcattgctatttttgactttgatctatcctttaggcccagaaaatcttatatttgtagacagaggggatccaggcactggagagttgttcctccatagggatgggagcctaatgttttaaaaagctaacagtgaaga

SEQ ID NO: 339156 - DNA, 1000 bp, Homo Sapiens
ttttttttttttttttttgaagtgtttgctaccaagtttatttgcagtgttaacagcacaacatttacaaaacgtattttgtacaatcaagtcttcactgcccttgcacactgggggggctagggaagacctagtccttccaacagctataaacagtcctggataatgggtttatgaaaaacactttttcttccttcagcaagcaaaattatttatgaagctgtatggtttcagcaacagggagcaaaggaaaaaaatcacctcaaagaaagcaacagcttccttcctggtgggatctgtcattttatagatatgaaatattcatgccagaggtcttatattttaagaggaatggattatataccagagctacaacaataaacattttacttattactaatgaggaattagaagactgtctttggaaaccggttcttgaaaatcttctgctgttttagaacacattctttagaaatctagcaaatatatctcagacttttagaaatctcttctagtttcattttcctttttttttttttttttttgagccacagtctcactgtcacccaggctggagtgccgtggtatgatcttggctcactgcaacctccacctcccgggctgaagtgattctcctgccttagccacctgagtagctgggattacaggtgtccaccaccatgaccggctaatttctgtatttttagtagagatggggtttcaccatgttggccaggctggtttcgaactcctgacctccagtgatctgcccaccttggcctcccaaagtgctgggattacaggcgtgagccaccatgcccaggtttcaagtttccttttcatttctaatacctgcctcagaatttcctccccaatgttccactccaacatttgagaactgcccaaggactattctgactttaagtcacataatcgatcccaagcactctccttccattgaagggtctgactctctgcctttgtgaacacagggttttag

SEQ ID NO: 339157 - DNA, 1000 bp, Homo Sapiens; identical to SEQ ID NO: 339156

SEQ ID NO: 339158 - DNA, 1000 bp, Homo Sapiens
tttttttttttttcaaagttttccaactaggaaacttttaactaacttgattatcttaaaaagtcatgttgtaccatcaacccaatcctgtttaaaacagcactcaggccgtttatgtagctgatcttggattagcccttgttgcacagggatgatttaccactggattccttggaatccgctttcgacggtctctgaatgctgcacctgattgtagggcttctagaagattatccatcacaccagtctcatcaccctctttgtttatatcaatgagttgtttctttttcttctggcgttctaacttttcttgttcagctttctcttttgcaagttttgccctcctggtcttctcttccatttctcttctcttattgttttctctcactgcttccaaaaacaaagttcggaagttgttgagatcaccaaagaactcttctatgctcactgtctttgagtcaaaaatgaagtattctccaagattctcatagagcttcatcatgttgttgtgcatggtggagagtttttcatactgttctcgggcagtctttgtaaagctggtcatcttttccacaaacttatcgtgttgattttctgcttgggggaatttcttgatgtcacgttccagatgaacaatttgttgttccattgatgcaaggttgctcttgagaatttgagctgaaactttgcttgcactttctacgtgttccagttcttcaggaaattttaggatatctcgatatttttcctcacaaatgtcggcaataaaatgcaaaagggttgttttttgatccgctgatttagtatctctgatcttacaaaggaagttgatcttaaatcccaaagactgggcatttcttgagcctgagttcatgtagtttccaacaagaagaactaactctaaaagtctgttaaagctttcacttttcttcagttcttcacaggcaagagttactgctatgatgcttggtttgatgttgtttatgtgttcttcaaatgt

SEQ ID NO: 339159 - DNA, 1000 bp, Homo Sapiens; identical to SEQ ID NO: 158963

SEQ ID NO: 339160 - DNA, 1000 bp, Homo Sapiens
ttctaatgtaaacactgatttatttaaaaaatactacagaggacagatttggattcaaaaaaaaccacagagaatcatatacagaaacaaaatgcactggaccccgagaagcagagggggagccaccacaggcccccgagggggcagggcaggacgctatgcacacgccacttagaaaagagcgtctataaaagatgcataccaagagatacgtgtaaaatatagtggcacatcacgttaacaaaaggaagggaccagtacctcatggagacaggcagtcgggggacctgggtgggcgctttgctctgtcttcaaggccgctgtcggtgactagtgcctccctccggctgcgtcacagccgtcgggggcaaagaggtgatgtgctgtaagaaccgcataaaacgatccagaggaaaccatttctatcagaaaaataaagtacaagtttaggtgatgagcgtaaagctagggcctgtgcgaggctgctggcacgaggcggtatgaaggggtgggaaggtggcttctcccggcgtgaagcctcaggggcggccacctgcccactgctctcggagttagctgctctgtcaaggtccaggagaccccgggtccctgcccagagtcacagcccccgtatctgggctccggcctggggcagcctcggggagaagatggcaggcgtgctctgtgaaatacgtgaggctttcaggggctccgtttgtggttttcctaaccctccctgatgacccccacagaacatgaggctatgtcactcacggtaattaaataagacattcgcccagttcaagagtgcagccaggaccaggactggccaggccctttcctcccacctgtgcgcaggtgcccagtggcagctctattctctctcagggcggctacacagaggcagggctttgaaatgcttcaagaactcagaaaagtgaaggctgtcttgttccaaaggaaagggccttgtaagaatctactttgtcttagaggagtg

SEQ ID NO: 339161 - DNA, 1000 bp, Homo Sapiens; identical to SEQ ID NO: 246478

SEQ ID NO: 339162 - DNA, 1000 bp, Homo Sapiens; identical to SEQ ID NO: 158964

SEQ ID NO: 339163 - DNA, 486 bp, Homo Sapiens
tttttttttttttttttttgttggtcccatcctttattcgagtttccttgcccctaccctagccccgaccctgacgttggccagctaggtgcggctgcagggattcatggcagtacccagcttgcggcagtagcagaaggcattgaagaagcggcagtagcacgtggcacatgggtcacagcaaggcacctgctgtcccaggcaggactcatgcagccttacgcagcgacgtgaggagcggggctcgcggtcctgcaggtctagtacctctgccaaggcctgagcctcctgcaacagatcctcttctgcctgttctgcagttgtcttcttcagtggggcccgcaggcccaggcctgggagctctgggagcagggcctggtcaggccttctgatgccctccatgggggccaagcccatctgggctcctcgcgtggcaggcagtgccagcagcagggcacagctcagcaccgctgcggtcagcatggc

SEQ ID NO: 339164 - DNA, 1000 bp, Homo Sapiens
caccggagcaaaaactgtatttacacaacacggggttatacaaaaatttgaaaaggcggagtgaggagacgacggtcaggaggcgccacagcgctggccggcggcgagacccaggatgtttgccttcaggaaggactccatctgtttccccgttatgccctccacgcgttccaggtcctccacctggctgaaggggccgtggagctcccgccagcccacgattagctgggccttcttcgggccaatgcgctgaagactgcggagatctcgggctgagccttcgttcagcagatccagtattttttggcgcccatgagccagtagctccgggctgatctgtagctcccagcagtcctcagccttctcctcaggctctagggcatccagggactccagctttctcttccggcctttattcttcaggatgtggatctcggcatttggggatgctgcctgctcctgaattagctgtaggggcatcaccacagcctttttcaggggctttgcccctgtgactgtgcgatgtgaaaggggccggagcattgtgggacaatggttctccttttcctcagccttctgggccaacatcttggcctccagttctttttgcttcgtcttaagcctctcaatctctaggtccttctcttctactgtcttcattagcaccatccgctctcgctttggggtactcaacagaggggccccctggctcccctgggaggcaagcagacggtccaagctgaggaggcgctccagcatggccgggtccatgctgcttagcttctgtagggggctgagtttctgggaggcagaggctggagctgccatgggctcagggctcccaatctcctcttcctcagggcctcgggctctctttgcctctggtggaccaagcaattctttctgagacagcttaacaggtcccaaggcatgaggctgcaggctctcattggtaaaaggccgattgatcacctccttggacctggcagcaaagttgagt

SEQ ID NO: 339165 - DNA, 1000 bp, Homo Sapiens
tgaaatgctaagatactttcaaaacatggaaatttagctaaatattttcagttaaagttatgacatttgagaaggtgagcaacttgtaaagaaaggcagggggaaaaaagtcttctcatcgtaattcccttgttttgtctcaataactatgaaatcaacctgttttaatacttaccattcattagcactgaatggcagattacacacactctagcttcctttctgtccatgtataacagtttacatttcaggctacagcaggaagcacagaaaaccttcccacatgctctgcagtgatgcctccttttggtgaatgtaaacctggcttcacatttcatgcaatttggagcctgagaatccggtacccatactggagccacctcacccagagtggtgaatggctttctggcagaaattccaaactgaccagctctgagatcattatctgggctatctggagctaatgcaaggcatggtctagtggagatctcagcctcataactttctaaatgttccccatttgtatcgacattagagatgtttcccaaagatggactgcatacattggttgctgagttttcccctaattttgctttcccaagaatatcatttttatttttagtattatttccactgtttgcaggaaagtcattttgtaaatggtctgataatggctttggaatttgaagtttaagattagaaggttgcttgggtcttgcaccaccaaaaggaacactgatagatggcaggcttgctactaccttgggggaagattgcccaagcactgatggaacttgactacagaaattatgtaaataatttttcttcattaggtcaccagtgctgtttaaaagtagtccactcccttctgtggcctcatttcctctctgttcataaatatttgagtagcattctgacttgctttcctctatttctttttcttctgttactgaatcttctttggagggtaaagtctttggaacaaaagaaacacctgggt

SEQ ID NO: 339166 - DNA, 1000 bp, Homo Sapiens
aagcaaagcaaaaagatttcaatgatggtttgcattgtcgcgagtctcagagtgttccataaggcactgaaggaaaaaaaaatcagtttttcctattgaaaggtcattgcaccatcagcaatattcgtgtcatgcccgacaccaaggagagtgaaatctggctcaggatccttgaagcagccacgttttcggtgatttcctctcatcacatgcctccagtgggaagggatccctagatcttaacactctctgttccatacacgttgtagccttctctgtatgtagcataattctgagtgttggtggcaggagcaggcttaaagttttgggtgttctttgtgagtttcatgcgtttggactctgcccgtgatttgtaacagaattctatcaaagccaccatcatggccagccccagacctccgacaagtatatagaaaacgcctgccacattgctcaggctcagagcgctggtcttgtccttactcccggagtccttggctccacattcccccttatcgtaccaccatttgtttttcagcttgtctaagatgccttgttcactgagtttcaatactgcaaggtttacaggcgttcctaatgctgagcctttaggggttgccacaccatagcctttggaatccagatttccaccaactttcatcgtatcacatggttttctctgctcaatgtactcattcatggttgactccagcaggaaggcgaactttcccttggactttcgcactcgggccactccgtctgctgttgttttggtaaacacagatggctccgctgatttcatgtaagaccacattttctcgtacacagcaattttggatcttctgaaaaattcttttgttgaaccggagtccagggtcccatatgcaatttcagtctgtttagctaagtcttcagcactctctatgggagaaaccatcctctccacagtcaggaaagcagcgagattggcagtataggaagaaattatgatcagggtgaa

SEQ ID NO: 339167 - DNA, 1000 bp, Homo Sapiens
gcagtttcaccaaaattcctttatgtaagtaaccctctcaacagtgctaagaagtaagtattgacattttcattttgcagatgagaagcatggattctgggacgtcaggtctatgggccatccaggtcagaactctcttgacctcgccctgcaacgggtcctccaaggaccatgagccttgggggaggcgggaaccaggtctgattcaactccgtatgaccaggtgcagcacaatgtagggctcaatctgagttggaatatgacaccaagaggaacatcccaagtccccgagtcaggggtctgcgccccggtggacagtggggtctgagagcgaccacctaccgaggctcctcttctcggcgtgggggggtctgcagctggatgggacccaggacgacgtccaccttttcctggtaggagcccacatccctcttcgacctcaacacacagcctcggtagcagcgggaagaggggtcatacgctctgcacaccaccattttacaacgcaggtacacggaggggaagcggttcaggaagtggaaggccctgaaccggaagcgggcaatgcgaagagacggcgaggagtagggtccgtaggtgtcatccctcacgcatccactccggattagatcataagtcaaagacgtgaagtcattggagtatggtgatgccacgcaggtgtccacaaacaaggtcagtacagcatcagaatggaggatttcagcctgaacgtacaagtcctggttcaggtccacgtagtaagggcggctggtcacaggatacaagaaagatgaggaagtataaaaggaaatgttcacgtcaaaattgccatactggacttcctcgacctggatggtgttattagcaacgtggatggtgtcattagcaatgtacatggtgtcgacccaggtgttctgaagcattctgcagctgacgtgaatacggaggtctgtcctcctcttgatgatgccacctgagacagctgctgtgaggaagttgg

SEQ ID NO: 339168 - DNA, 1000 bp, Homo Sapiens; identical to SEQ ID NO: 246479

SEQ ID NO: 339169 - DNA, 1000 bp, Homo Sapiens; identical to SEQ ID NO: 158965

SEQ ID NO: 339170 - DNA, 1000 bp, Homo Sapiens
tgcatagtaaaagtgcatgaatttacttagtggctgtggtttttttccaagactaattttgccatactggtcttcgctatgcactgagtagtgatctcaatgtggtggtctctgctgtggtgtggcctgtcctttatgttagctctgaggacaaatcatgagggcctaggctgagaccattgtggaagggggttcttccattccaggagctgcccagaggtccccaggtccccaagtctgtgtctttgtgctgaagagctgctcctaatccctgggcaatgttttttctccagctggggcctggggctgagggctggggcggagcctcagggctggtgaggcaacatgtatctctcatcataggagccttggccccggagccgcagggtgcaggacttctcaccgagcacaccttccaccaccatcgtggactcgtacagctcactactcctggcagtgaagaaaacctgcaacgcgatggaggttgggggtgcattggcggatcgtgcttctagcagcccactgtttggggagaccctgaaggccacagcggccttggctggctcctgctggcccatcagcatagtccagtagcttcggcacccgctcaggttcatcaggtagacctcccggactcgctgctggctcacaaagcaggtcccaaagtccacccagctggtggagagctgcagctcaggcacggccaccacagcccgcaggggcaccacctgagtggtctggttggtgtactccaggagcaggttctgagtaaacaccatctctctctctccactcgcactctgctgaatgtccaccccaggcagtgtctggtcagctgggagcttctgataggagagcagctccagggagagtgagaaggacacgttcaccagcatgttctcctgtgcttggagcaccagctgcttgtccgctgaggctgtctcctcctcacactcctgcttctggccagggccaggagctctgtggtcctggctcgccc

SEQ ID NO: 339171 - DNA, 1000 bp, Homo Sapiens
ttttttttttttttttttttatttttctattaatctttatttatatgatggttctctggaaagcacttcattttaaaacctgtttctgagataagtagcataaggcgcatttgaagaaatactattgttgtatcacagagaacttccatgccttgaaatcatttttttcagagtattattaataagatggtctagctatgcagagcaaaaaagaaaaaaaaatcttcaaaagccaagactgtcaggcacatgaaggtatgcataaacggtcttcacatttaattttgtatgattcgggagatacctccatgtacatctaaccaggtcaggcagcataagtcctcagtaaccctgggtgtgccggcttcaagccaaagtattctgttgagtttggtttgtggagagacatttgaaatgttgcttcatagcttccattttctggagaagtggaagaaatgaagcatgaaaaggcctaggaatcttcgtcttctccaggctcttctccttctgcagtttcttcctcctcctcggcttccccttccgcaccctccatggctatttcttccgtctcttctgtggctgtctctccttcttcttcattcttctcctgggcttcagggaggttgcccacatcttcactgccctctttttgtgcctcagtttctccaccttcttcagccttctctgatccctttgagtctggaggaggagccaaaccaaggaaggaataaataatattctcttcttttgcagagaagaaagagtcaaaatccccacagtactgctcctcattgaagatctggggaggcaaaggaatcccattttgaggttttttctctccaggaacattctctctcatccacctcctgttgtcttcatctccagcaatatctaattccttaaagtcgattttattcgcttccaaaaaacccactacttcttgctgtttcttcctaatcgctatggacccagaagatgtagcaacaaacactttgataac

SEQ ID NO: 339172 - DNA, 1000 bp, Homo Sapiens
tttttttttttttttttttcctaacttcatcttttatttatagttattccaaagcagatatgctatgatgagatagttctaaaaatacagttctttatcctcaaaaccctggttatacatgaggcctagaaatctcttttctagaatttttaaaacaaccagtaaaatataaagatcaacctgtaccccacaaagattcaagtaaaattatgtcttttcaaaaccttatattttcaaggaatgttctgcaaaaaagcagcttttataattaggaagtaaatcgaaataatacataaaatgtcttgtgtttgctaataaattgagaaaagacacaaaattgaattattgatattttctttttctttaaccaaaataaaagtaggctctagattcacctgttaaggccttaaacagtcaattaaccaatacaattcaccaaactagctttctatacaattaggaattaaacaaccccttttagagatatcctgagatgacatttaatgctaaaatcaaaataaataacccagcaagaacaaaagtttaaaattccaataatttccactttggggatattttttcaccaaaattaatcaacatttctaaaatatttcaatacaaaattataaaataaaaagtgcattaaaagcagaacctttaaaactctagcacaattacagttattctgcatatgcggctacagccaggtttacacactgacattcaaggaaggaaacctccggattggtaagaagtccagtatcacaagcataagtcaaataaggcttttctttttcttaaaaaaatatacaatacacaaagcagtttggaaaagaagtaatattatttaacaattttctgacttaaatatcttcacataacaaaagttttcatatcaccgtcaatattacttatatacatatgccaaaagtgaacaacaacaacaaaaaaatcaaaagatgccctttcaaaataacagtaaaatgtctatttctttagg

SEQ ID NO: 339173 - DNA, 1000 bp, Homo Sapiens; identical to SEQ ID NO: 158966

SEQ ID NO: 339174 - DNA, 1000 bp, Homo Sapiens
aacagtgcagatcactttgtatttattacattactgaactttttcaaatgacagaattcaactccaaaataaagtaataaatgcctattaaataattattcacttgtatttttctctcctaaaattttaacacagcaaaacatcttaaagacatgtgaataggttcagtgcactctcagtggctcacaatcatgaggcaaatactacatttatccataaaaatataagataaacagatcaatattttaaaatattgctgacataaaaggaaaaaataaaatactacacttttaccacaattattttggtagatgatagtagaacattgtttaaaataatgctcctctacaggacacatgctgtgcttggtatacttggcacattagcagttggtaactgctcagcttccatctgcagtttctctagcaggacccttactcaggcccactttcaaaccctgagctctgatctgcctgcctccacagggactattctggtacccttcttcctccgtctactcttaaggcttttctgtcttcccttatattcccccagattcacacttgctgccatctccattttcagcaaagatgcctggcacaaaactcacaaagctgagcacctcctccatagctcttaccccagatgttgtcccttcactgactaaattatgactattaggtaaagagaatgaatctacccacaaaaataatttggccgggcgcagtggctcacgcctgtaatcccagcactttgggaggctgaggcgggcagatcacctgaggtcgggagttcgagaccagcctgaccaacatggagaaaccttgtctctactaaaaatataaaaaaattagccgggtgtggtggtgcatgcctgtaatcccagctactagggaggctgaggcaggagaatcgcttgaacctgggaggcagaggttgcagtgagcggagattgcaccattacactctagcctgggcaacaagggtgaaactctgtctc

SEQ ID NO: 339175 - DNA, 1000 bp, Homo Sapiens; identical to SEQ ID NO: 158967

SEQ ID NO: 339176 - DNA, 1000 bp, Homo Sapiens
aagttcaaaagtacatttatttaaaatgtgggcaagatatcaatataaaagaaaacagagtataagaaataaaaataatcaaagtacaaaacatttcaaatctttaacatccataatttagagatagcaaggtctttatttacaccattttatttctagttgaagtcccgtaacagttttgtgaaaacatttaaaaacctggcaaatgaatcataaaacctaatgtgggctcttaaagtcatataatacaaaacataatttatgtttcctcagaataaaattgcacatcttaaaaagatgcagtatatttattatatctgtcttcctgcttcacagtctgatcccccaggaaagcagctggaaaacaagagcatgtgaaggaagcgcagcagctcctcgccagccagacagccagccccgcaccgcaggagtcgacatgcacggcagcctagacgccatcagttaaacttatatgattcatagtccagcgtttgagtgagcactccagtcagaacgaactctgcattgtgaacatctatgcctctggcaaaatattctcggcataaatgaaggtcattttcacaggatattaaaattatttccgacaaactcgagttctgcttgtgctccatgagcttccggaaagatggctgcttggataacacctttcctcctgcacactctacgattgccttcatagtggaaagacttgggcagattccaggtgtgatgtaaaaatattttgccttaaagagtggagaaacgtgtgcccgttttaaggattcttccaagctgaaagagaaaagtacttctgcctcagcatctcggagaatgtagttctgctcatcaatgaacttctgacacctgaagcattcttccagccactctggcgtcactatgtgcttcacgacagaaatcgccgtcaggaacttcacggtgcgagtcactttgctggcaatgaggtgtgtgcacttctgtgcagactccgcaacctctccac

SEQ ID NO: 339177 - DNA, 1000 bp, Homo Sapiens; identical to SEQ ID NO: 158968

SEQ ID NO: 339178 - DNA, 1000 bp, Homo Sapiens
ttttttaccataccaaaacttttttattattatttttattattacttatgaaaatctgtttttcagaaacacgttgtcagatatccaaggaatgtatttttaagcatgttcaccacagtaatattgtaataataaaaaatgggagacaacacaaatagaggataaaggattagttaaataaattttagcacatctgtgggaggcaatatagagaaaggatggatgtgggctctggagaagacatggcctgattccaaatcctgcctcagccctatgagctcatgggccttggtctctgtgtcttaggttcttcaactataaaaatcatggtaatcatgcccactttacaagggttattgtgaggaatgagacattacatgtaaattgtttagaagagaaacagggcatagtgagcatcccataaattgtagtattacacagattatgacttaccctttagaagaagaagggcagatctgtaggtactaccatagaagaatacttattagaaaaagactttttgccccttatagatgttgtggggcggggggcggtaaatgatccactcatatattcttagacttgagtgtacatgtccaactacatgtaaattactatgttataattagagaattataggaagagaacaatagttaagcatttttcatattttcagtccaactttcttaattttgattctgaatgaaaatcttagtatggaaaattgatcaactcaacgtaaagagtaaaaataaaagtttacaaaatcaattttcattttttgagtaatttatttaaatttgtgaatctagaaaatgtgtgttatatatttatatacagggaataacaaaagttaagtgtttaattggaaagaaaactgtgactgataatatgttgtaattaccattttataatattactttccattgcaatgacttaaaatgaagaaataagaataggaataattatgctaacaaattcactttgttttctgtgccac

SEQ ID NO: 339179 - DNA, 1000 bp, Homo Sapiens; identical to SEQ ID NO: 158969

SEQ ID NO: 339180 - DNA, 1000 bp, Homo Sapiens
ttttgggagacacttcttttatttaggaaggaggtctttcctactggcgccggctcctgccagaggtcggggtgacagcaggatcagaagcactgctctcacacacagtgggagtggaggatggcttcccgcagcctctttagaaagcccaggagttctctttatttcagagaagggcatttctatacaagacatcattccattacagtcgtcacttccaactacaggctcagggagacgactcttgatattcataggtatatatttactttaatcatattttagaaatcagctcttccacactaagatttacaataaaaataaaataatttgttctgtaaactatagtagaaagtttcaaatgtcttaaaaactatcttccatacaatggaaaaaggcttttgtgttcttttgggcaaagaagacccaaatacgctgagagaagacgcatgggcgtgttgctggagtgatgctggaagcacttctttgctacagacggttgctaagagaacagagtcactttctccccttcagcctggaagtccaactcttctcttgcttaagaatctaacctcgggatcttccaagatgcttaaggctgctctgctgttgcctggtccttggcagcagcaacaagctctgcgagagctgagaagctttttatgtcacttgcttgtagtcccaacttttgtatctgctctcccaagtactcaacatctagggccaactgcagcctgattttgtcgtcgtcgctcatgccaccactgggaccgacggggttggcgggagtggtttttctggcttgtttcagccttttcaggctctcttccatcttcttcacagagtttaatacatctgacacggtttcatagtacttatgagtgctttcactgagagtgccttctagccactgctgaattattgcttgtttgagcttatccttgtgtccgctctgaagctggaataagggcttcagagcactgtccacataggaggaagc

SEQ ID NO: 339181 - DNA, 1000 bp, Homo Sapiens
tttttttttttttgcaatttacaggctcaatatatttttttacactttgcttgaaagaaaatttcaatattttacagtctttcagtaggcattatatacactgcactttatgaaatctaaaaggtattgaaataaatttttccaacattttggtaacaaaacaaacaacgtttctccaaatacttgtgctatctacatgatgtttgctctgataatcactaatcaaaacaaacaacgtttctccaaatacttgtgctatctacatgatgtttgctctgataatcactaatcacaaaaaactgactcaatggaataattagaaaaattgtctaacaccatgcatgggtttcaatcatttttaatatcctatcctagaaacattctacaaatcttaagatttaaaaaattaagtctctgttctgatttttaaaagatacctttttatgacaatatccataacattgacaggtacatgttaaggctagtatcatccccttttttgaatttttttgactctttttttttttttttaagaaagatagtaaaagccagactccctttagggctttgaactgtacctacagaaaatcagagtgcagtgaacataatgttcagtcctacagtcaggatgcagttgctccttcccattccacaagatactgcacctttccatcaagtgtcacccgacgtgccaaaactcggtatttttcgccacatgctattctacctgcagcaccaaaataactggtaatggagttctttagatgattgagttgtaactcctgatctgctaagttattcagaatctctgtgttgagttcatcaaactgataatcttctttgccttcatcatcttttacaatttctgagttctgagtctggagtgctcttcttggaagacgacctcttcttctcctcaaatgtggtattgcagcaggccaagatcttcctgtacgcgttctttttctggagtcagataatccataatgcctggaaatgc

SEQ ID NO: 339182 - DNA, 1000 bp, Homo Sapiens
ttttttttcaagtttatagtctaaattttattatctccaagtcacaatgctgatcacaaatgggcaccctttaaaacagtaacaaaaaacaccaccacacatggaaaaatccttgcaactaaacacagtggaccaacagagacaactctcacagtgtcttaaggtctgggaatctgggcatgctgcccacaggcttgaggagacatcttcaggtttaaggcaaagggaacagcctacaaaaggcacaaccaccagctacccctagaagaatctcttagttatttcctccttgggggttacagattaagtgcctctccccactctccatcccacacctgtgactcagagtgattaggccagctgctagatggaaggaataaaaacagtgacattaccggggagagacacagccaccatctttgccctcaggttctgtagaaggacagggacagtggccaggttacccctggcagacgtatgtactgcagtaataggaatctcttccacagaggcagcagagaagtggtttagtgccatggatagggaggaaagataggagcccttgcccagaaggtgactggcttccttaggccttaagcccaggagtttttatattctgtctgcaaggacaaaaatagaattcggggaaaataaggtagtaacatctaaaacacttgtagcaggaaagacgtggagaagagcaattgcaaaggacagggtagactgcttgctggataatatttgcctttaaagagatgcattggtccacagcaactggaaaaggggtgtagcaagaagaatggaaagaagagaagcaaggccctctaattccacttacctcaaaagactgagccctgaggactatgtgaatacacacccctaaaggcaaaggctctcactccaccatccctttctcacaaaagcatctggtgtgccatctctccccacagtagggtattggccctcagcagagaacagaagcccatcatagtacaggtat

SEQ ID NO: 339183 - DNA, 1000 bp, Homo Sapiens
tttttttttttttttttttttttttgcatgagactcaagattctatttattcagaggcaaaattccttcttaactgtgaacctgtgaaaccaaacaagttatgtgcttccaaaatacaatagtgggacaaacataggatggatattactattccaaaaggaagaaagagaggaagagaaacagtcatgggactcaagcaagtacaaatcatagcaaaggaaacgtcctaagatcttaaggctggagaataatgcctttaagataatcatggcccactggggcagcaccacctccctgaccccgttgggtggaggacccattaaaagtggcagcatgacccccacaggcagggaaggcactgcccatgctgtgtctctctgctgtggccctgcccatgaggcaatttcctgtggagggtggggttgcactctcactgatctgctggccttctcttccttcactgatcccctgggtgttggtcctacctttagaaattaaaacagcacccctcccccagcccatccactctgggcttgtggtgggagaggcagccttggggatatctgaattgcctttaggatctctcttcttttgtcttggagaatcatgcatgtttgcagtgaaattgttctatggtttggtcctgtggagtctaagaaatctgacagtctttggtcattttgtcctgtttttgtttgtttcctttagtctcggttggcagtgttaccgctggtgtaatctcttctctgttcctggcttttattgagatggttgatcatctttacacagtcctttgcatgcagatgtatgtatttggagttgaacagttttctatatagcctttaaagctcgaggcatagagtgcacagtctcccttctgcatttcaattattgttagtaggttgggtgagagaatggagccatcttcccactgccaagatccatttgttggaatgtgtactagtcccatccaatgatatgacttcaccagtttaagtaa

SEQ ID NO: 339184 - DNA, 1000 bp, Homo Sapiens
ttttttttttttttttttttcataggaaaacttaaaacactttattggagtaatctagaaaattttaaaattgttacatctttggtatttataaatgtgatactttactttctgtgggtacttctatagaggcactacaggatcagaaaatgcaaattgaatcattttagcaccttttgatataaatagaaatgcactgatgcagaggtaaaaaatcttagaacttttgttgggaaactataaataattggtcctttcccatcagttctgcattggcttctccaactgtcaaggtttaggattatattgttatattgatcacatgtgctttaatttcttggccagaaggaatccatggcaaaaatcaggtttagagtcttaaactctaattcttagttgaatgaatttgatcttttaaatattaatgataaatgtttacaagaagttgctttaataagcaacagttaaaattctgttacctttttaaacttgcaataacaaccttcatttttaaaaatacagtagtaaagattgaggtatcagcttttcacaaaagtctttttgcactacaaaatgttcatcttggatgctcaggaacgtctaatggccaattccttttttactttctttgcctttgcagtcactgttctttagggtccaggttctgattgtaaactccaagtcttcctttacattactgtacttactttcttcctgttgggcagtaggggtagactgcagttatcccgtagaggtgagatcgttgttctgggagatactcatcagtaaactggccactatgtttatttactgatacaacaccatccctcctccagtctgtgtggtagaagtgatctgcatagcttacgatgctgaaggggtacttgaggttgttttgaatgacacgccgtccagttccatcaggtagtgtacactccagttttttggttcctgcatctgcccagcagagcagtttagagaaagggtcaaaggttaagcc

SEQ ID NO: 339185 - DNA, 1000 bp, Homo Sapiens; identical to SEQ ID NO: 158971

SEQ ID NO: 339186 - DNA, 1000 bp, Homo Sapiens
ttttttttttttttttttttttttttttttttttttttttttttttttctccaggacgctcacacttagtttttattagccacagtttcccacagttttctacctcctaggaaatacacagctcaccaagggcacccagtcaccattctgtcctgcttgcatggctgacactgttgctcaccgagggtgagcagatctgcaaagtcacccagggcctggtttcctcaggtacagagaaccccaaagaaagaagagccagaacttagagcccctttcttctccatatgggataggacacccaagacaaatgacccatgcatcatgaaacagaggcagggccctaagctgcccaagaggcctgggcacttggagttcctgccaacagccaggccactgaaccattgcctgtccaccctcccacagtggctaatccctggcctagttgtaaatgtcttttcagcgctgcacacttaatgcagtcggatgccttctgattactggtctctgagaccttcagctgctgaggtgcaagaatcaagcatgggcatgaaaggcaaagggctaccacagcagcatcgttctgcctccaccctgggctacgcgacccagcccagcaggctgtgacctaggagagctgctccagcctggggcatgaggggccctagagcaggatgccggggctaggagtggactgccctgctgatgggtcgtttttctgtgaagaagcttttcaacagtagcacctgactgaagctgaccacgaacagggcaatcgtctcgccaacagaccagtaagagactcggctattaaggtcttccgctcgggcccggtcctgggcctcccgcagccggtaatgcgtctgggagtcaatcaccgttttcagagcctcatggatggtcacgcaggcggactccatctgggtgagagctgtgaccctgttccccatgtctgggagaatgggaggctcatcgcccacttgaaagtcaaagtagacggtct

SEQ ID NO: 339187 - DNA, 1000 bp, Homo Sapiens
acatggtttgctgtgttttgttgtgttctgttccttatgtcagggctacagagacactggcccagctattttcagcagggacagagtcgaggctcactggggatggcttcagaggacactgaggcccctctcagggagggcaaggcacagataccccaaattccaccccacgtcccaaaggtctcccagcggggctgtccagtccatgtcagcagaaggctctgggcgtgtgagggagggtctggagaactaagcgaaggaggcaaacgccagggcccctggcaggtcagggcaccatgtgcaaccacttgaaggtgaagggcttcctgcggacgttggtgccacagtggacttcccccagaaatttgtggtaggcagaaatgtcgtcgatgaaggtgcattcgaggcccaggggctccaggaggccacgcacgtgcatctccaggcagcattcctcctcaacctgtggcccgaatggcttggggatgcccaggtccttgtccagcacgatcatgttcaccatgtttgggaagaaggctctggcacggtggtcctcgtccatcttgaacagagcgggcaggtcaatgatgtcctgctctgtcagtcccagctccttcttgaggatgtcacggttccagtccaggcagcgctggaagtacaggttctcctgcacaaggctctcgttggacagaatcttgttgatggtgattcgcttgctgctcatcccacccaagcctttgaacatgatggcctctccatggccgtccttctgcttctctcggaagagcttgtagcaggccgaggtgctggccatgagtagcaggaatttctttgtgccggggatggggacaaaggacatgaactcatccacgtggcccacagtcagccagtctgagtagagctccacgggtgcctgcacctgctgggccttcaggaagtcacgcaccaccttggtcatcctccgaccaccagacagaggaaagctgctcccgatgaggat

SEQ ID NO: 339188 - DNA, 1000 bp, Homo Sapiens
caccgtgggaaatgcccctccgccagctcttgagcctgcacaggggaaacgcgacacgggggaaacgcaacacagggaaaacgcgacaggtgagaggcttataaagcacgcaggttacctgagtcctgggagcagctgaagccagtgtcccccgtgctgctgctgtgccccaggggctgtccacctgccatgagcgcagtgaggtgtggggacaggcccaggtctgtgatcctgttggaaatgctgaagagcctggaagtcctctgtcgttgcacaaatggttcccgataataccggtccccaaagcacatgcccagtagttctttgcgaactgtcttgttccagagtccatagatcagggggtggcagacagcgctggcaaaggacagccatgtggcccaagtctccaggctcggggagacggagcttttcccccagagggcctcagaggcgatgacaaccatgtaggggccccaggtgaccatgaaggcaccgaggaccaccaggatggtgatgagggctttgcactggttggccgagtagaccacaccctgaaaggcattcctcctgctgcctgaagaggaggtggaggtgctggagttcttcctcccggtcctctgagcatcctcctccacgatgacgactgtgccacagtgcaccttgcgtgccttgaccctggccacgcggaagatgaagccatagcacaccagcatgaccagaaaggggaagagggcacaccagatctgccagaaggccgtgtagccaggctcccggtgccaagcagccacacacatccatttgaactcgtcaaactccacggatgaccaaccaaacaggggtggcaggcagccgatgagcgagtgaagccagatgtagacaagtgccatcacagcccggttccctgtgatcttcatggggtacaccatggggtacaggacagcatagtagcggtcgatggcaatgaccccgagggttagcatgctggcagagctgatcagca

SEQ ID NO: 339189 - DNA, 1000 bp, Homo Sapiens
catagatgcctcgagttttttttttttttttttaatcttttcttcttttttttttttaaagttgaggtaaaagcttcagtgtatggaaacctgcaggctgcatacacagccgctctgttccctccgaggagctcctgacatcaccacgagcggagaacgcacatcccacccgaccaccccccaagggctccacgctccgggctggggctgcgatgacccttcgcttaggcccagcctggtctccacaagcaggcacatctgtcctcagcccctccagaaagaggtggccgcgtcagacacgagggtcagagctcggggcccaaatgacaaggacaatgcgtgttgacaaagctaacagctttcaaatacagtacccatatccgagacatttccttggaaaaaattctttctcgagctatcgaccaggttgggcctaagcaaagggattccacaaggttcttcggtacgaatctcacacggttttctggggtcatcgggttagcatttgaagttgtcatctccaagtgactgaattcagtgatgaagaagagactttctgcagagttcacaccttctcatcaagtctaacgcacacacaagatagatctctgacctatgaaagcaaaaactggaagatatcataacactgaattaagaagcagacctgcacaccatggaacagaagtagtaatatgaaccacagaggggtacggcagagtctcggcgtgtgcgacatccatctgtcctgttctgtccgaagccagttcattctgagtcactgctgtcagagctggacccgctggagctgctgctcccagactcggaggagctgctgctgctgagcctggacgggccccctgagggtgctgagccgggcttctctttccgggcgggcttcttgctgctgctcagctgcccgctgacatcctgcagacgcttttccagctccttcttcttttcctgagctagctcctctttcgacttggctgcctgtttcttc

SEQ ID NO: 339190 - DNA, 1000 bp, Homo Sapiens
tttttttttttttttttttttttaggtagagctgtaataaacaaattccttttataaacaaaattttaactgaaaagccacagcagatggggggaaaaaaaaaagaaaggatattacttggtaaaatccagtgacatctacaatagttttacagcacatttaagcattctagggttttatatcttcacctgccttccatttcttagttgatccttataaaatctctcattacgaacataggtttgacctcaaaactagtcatgaatttgagtgccaggaaaagcagaacaacagtccaaatttctatcttaatatcatagccttaattcaaaaatggttttgtgtaaaacacaacgcccaactaaatggaaaaaaaaaaaaaacacacaagcagcaatatgtaattatacaaaatagtgattaattatatatgaagtgttttttaggatgacatctagaacgcaccttgctctgagactcctcaataatcaaattgacttagaccaacaatactgctaagtattaaaagcagtgaagcaaagaaaacgcatcaaatagtacatgcacatcttacagaacttccactgaactccccaatggcttctatgcaatgtgcctcttttccataactgtattaacaactaccaagaaaggaaagatgagattaaaagtaatgatactgaactgaattgtttgaagccagtgccccatatgtggggaaaagtgcatttagttcagcagcaatacagcacagtgtgaagatattgtgcttagacacagatattccagaattgaaagatgtacaaggcaagtcaagatataaaaccatagtacactgttaaataaccttgaaacatacatacattgcagttttcaaagaaagacattcatgtcattgtacaaggataggaagaaatccttaaagttacctactgtagtttatgatataataaatacatatctatatagcattgtatatacatatatagattgtgtgtgt

SEQ ID NO: 339191 - DNA, 1000 bp, Homo Sapiens; identical to SEQ ID NO: 158973

SEQ ID NO: 339192 - DNA, 1000 bp, Homo Sapiens
gcaataaaattattttattttaaagtaaatataactttgccagattttaatcaattaacagcagtttagagatatagatatacatatatatatatgtgtagaatatatactttttttaaacaggaaggcatactttatgatatataatctttttaccacaaactatatacacttctcagatattaaatcaaactaatatactaggaggacactactacttgggaccagtgcagcacctttacaagtagtttaacttttatatgtgactttagtaacaccattatacaaataagccatcttacgggcattgttttggcagtgtaaacctataagacacaggttgaatttcacaaaaagatctgcaacttgacgactactgcttagcatatctttgtacaaaatgtgcagtaccaggtgcaagtgtagcacagttgctaatagctgaaaaccggcacgaaaactttactgccctttggaaactggacagaacaatctggaactctcatctcctgttgctcctctaacgatttaatatattctaaatacctttatgtggaaataaaaaataacaggacaaaagcaggctagggagattgcatttctgtcagtaaaatttctcaaatcaacacattcatcgagtttctgacattgttcttcgagcagccgtcatctgtctaatgcaaaatgtggctttgctttgtcttgttgcaaaaggaaagaaaagcttttgttcagagctttagaaaagtcggttcagtccacataatgcattttctccttcaattctgaaaagtagctaatgctcatttggtagtgaagtgctgcagaggaatgttctcttgctccttctttcacaaaattactttatggacaggtttcgaacatgtcactcaacctcaaaacatggtgcaggcttcttggtggatgagcttacattatctgaggggcggtaggaaagcgtgctcatttttgttgaaaggtttgagtgggatttggcttt

SEQ ID NO: 339193 - DNA, 1000 bp, Homo Sapiens
tttttttttttttttgagacagtctcactctgttacccaggctggagtgcagtgatgtgatcttagctcactgcaacctccacctcccgggttcaagtgatcctcctatctcagcctccagagtagctgggattacaggtgctcaccaccatgcccaactaatttttgtatttttagtggagatggggtttcagcttgttggcaggcttgtcgcaaactcctgacctcaggtgatccgcccaccttggcctcccaaagtgctgggattacaggtgtgagccactgagcccggcctggggcacataatcctgatgtcaccttcacccacattttaatggcactgcaggcatctgcaccatctcggtctacactctgagcggcagttaggtctcggtgcaatgggaatacatgtcctgcagctaaacctctgttcccaccttccaccttctgcctggggttggtccagcgagcaaacaggagtcagtctgcgtcctggggagctggcggtatctccgcagaggacatctgcttgcctgccaccaggagaaggtgaaaggccattcctttctgttgaactagcatgtacagggcaggtccctactgtgtgtcgtgtccttgggagtaggcacatcacagcttcaccccattttacaggtgaagaaactgaggcctggagggtttgtgttctttgccctgggttggtgagtggcatttctgtccccaagcccacaaatttccaccatagttttccccacttccaaaactggcatgggaaaatagccaataggccgtttgtctcaaatattcacttctggttggagtggaaaggaatcttgcaaaagaaatgcagctggggtgttctcagcacatgggagctggttttgaaaatcactgtccccctttggttggtgaatgtggccaggatttacgtgaaggccagatactcggttttcctttgccctttatactgtcactagtgtccccgaggcaggcagactgc

SEQ ID NO: 339194 - DNA, 1000 bp, Homo Sapiens
tgccaacaagcattttcatttctttattttaaggacactgggaaaggagccagtcctctgaagagaacactctggtcaggtggtggaggccagtgggaagccatcaggcctgctttccaggaggggtgaagggttggtgcacggtgcaaggtgagagtgaggttaaaggtcagagaggaggggctgaggaggccacctcccaccaggagcagacagctggtggcttgggactggggtggagctgcgtgggggatgggaggggactgagcatggggcttcatcttcactgcccactcctcccctctccctggctgtgcctgcctcctgggatggtaggattccagcagctggagccccaggtgctgctgcggctgaggaaggcaatccccgtcagctgccttctccgttccagggtggctgtagccagaagcaggaccagacaaggacatggcctctgcattaaagcccagatcccaggcagggttggaaaggctgggcctgggaagtggggatgatgagaggacccagactgccccacaccccagcccccggccccagggccaggaagccgcctatgtctgcacatgggtcagctggatgtcgccccccacttccagtctgttgatggtgggcaggttcctcaggcgatggtagtattcaaacaggtgctgaccatccacggccaccttgaggcagtgagcttcacacaagatccacactgagaagctctggccacggacgaagggcatttttcggggcagacttcgctcctcagacccccaggagttgtcgatctgggtgttgcggaccacagcattctcatcaaaacgggggttcaggtggaaggcgatgtggttcccagagcacaggttgatgtggaacctctgagcactgggcaggacagtgcctgacaggaggatggacttggatgggtacagccctcccagaatggtggtgatgaaaggcatcggataggcggggtgggggtacatcataggtg

SEQ ID NO: 339195 - DNA, 848 bp, Homo Sapiens
tttatcggcagcactgaagctttccattctttattttcatcaggttcaaaatcaatttccaaacagtctcctacatttttcccactgccatggggtcctgggcgtccgggcccccaatattcacgcactcgcaccacgcactcatattccctcaccccaccatcacggccccaaagaaggtcttccctctcgcgaagtccaccatatcggggtgactgatgttgacgtacaccctctcgcccctccggagctgcaccaggccgccgaaccccacgctcgtgtaccagagaggcccgtacccttgtctcctggccgggtccagcactggagtcaccgtctcggcgccctcgagcagcagctcgggagtgcccggcccgtaggcgccccccgcccggtacagagagctgcgcagcgtgaccgagcggccctgggggtccccgccgccagggggcgcccggccccggtagccgacgagacagtagaggtaatagaggccgtcctgcgggagcgccagcccctcggcgtccgagaactgcgtcccgctcgtcagaaacgcctgttccttcgtcgtctcccagcctagcccctgccccttcagcggagcgcctatgaggtgggcagctgggagcccggggctgagatctgtttctggctcctcctctggcagcttctgaaacccagtcctccctgatcctggggcactaaggccagcacagccaggacagtgataggcaccgccagcaacaaggtcaccagagaagtggctcctgccacagctagcaggagggaacccctcccctggagcctcccacccctgccctccagccccagtgcccccattgagactg

SEQ ID NO: 339196 - DNA, 1000 bp, Homo Sapiens
ctccagggtttcttcaaggccatagaaggaaggtgacctctctgcattgtccgaactttattgctttagtttctgtaacttctaatgaggctgttaagtcattggctgtgtagaaggttgacaatatagtttggatgtgtgtccccgcccaaatctcatgtggaattgtcatcctcagaatcggcggtggggcctggggggaggtgactgaatgatggggacagagttctcatgaatggttgagcaccatcccccgcttggtgctgcggagggagtagcttctcacgagatctggttgtttaaaagtgtgcggctcttcctctcctctcttggtccttctcctgccacaagacgcctgctcccccttcgccttccaccatgagcaaaagctccccgaggtctccccagaagcagatgctgccatgcttcctgtgcagcctgcagaaccgtgagccaatccaacctcttttctttataaattacccagtctcaggtatttctttgcaagaatggactaatacagttgattttgtgcaaaattagactaagtaatcagaaatactgaaggaccaaataaatgatatgagagaagtttttctccctattcttcgtcttttatttctttttttttttggagacagggtcttgctatgtggcccaggctggagttcagtggtgcaataattatagctcattgcagcctcagcctcctgggctcaaatgatcttcccacctcagcctctggagtagctgggaccacaggtgcacaccaccatggctaattttttaaattttttgtagagatggggggggggggcgtctcactatgttgcccaggctggtcttgaactcctggtctcaagccatctccctgccttagcctcccaaaatgctgggattaaaggcatgagccaccttgccccacctgaaaatgcagacttttaagactgtgaactctatcacgatgcttgtctcaggagacacattcagattctgcaag

SEQ ID NO: 339197 - DNA, 1000 bp, Homo Sapiens
tctttcaactccttcagtactttcatactattctaataaatatattttgttggtatgaagctatgaagcaaaagtagctattaccaatgcatacatacagtacactggttttaagttccacctcaaagtgaatcttagagcctggtgtaagtgctccactttagagatgtaccttaattactactgtatttgcaaattaagggaaatttaggtcatcatttgattttctgaaatctaaaaggaactgaccatcattaccaagtctttctagataatcaagggtagatggctgtttttaatgtaggaattaatgtaggcattcctgctttcaggtttaagtatgaatcaaagcatattttaatttgctagtgcaaatggacccagaattggaagggctatgtaactacacagtatgcacaccacagccatgtcagtgtcacagatcctcttgtgcattcagctttcttaaaaacacatcaaaggctgcaaagaagctcagaaaaaactaaattgaaggacaggtggaatacaatgactctatgtgaggaacttgccaactcacatctttcaaagccagatcagcttatatagtacatgcattatagtcatatgaaatgttgtcttggtgctttcttcttggaggactatggcagcagctttaagactactaacaaagattattacacaggtcatcttatccacaggcaaactgctttgcacaactagaacattaacagttgtttttaagttaagttcagatgaaactgtcacaagacagacttgatgtattttatatatactgggaaactttagaaacagccatttattatttggattaaatgtgtgatgtgttctgcaatttggaatacacttttcagtttatagccagtctccacatgagcagattcataccattgcaatacacaggagttcataaataagattctactcaggtaggcagtaactagcaagttttgagtcaacaaagtctcagtattac

SEQ ID NO: 339198 - DNA, 1000 bp, Homo Sapiens
ttttttttttttttttttttttttttttttttttttttttttttttttttttttttttttcacagcaccctgggagttttattcttcatttggtggtgactcttctattaggtttttgtccaaatacttccatccctaagaatttactgaggcagttctaaattaaagaaaatgtgagtaacaaaagatgttacagaagagccttgggcagcctgagaaacgatgggcctagcggaagtagttgggacattcgtgagtaaccaaatgccaggcttgattaaaggcgtccacgacagccggctccaggggcccttcctctgccgctgccaagttctgctccagctgctccaggctggacatgcccaggatgaccgcgtccccgtgggcaccctgcagctgtgagtggtggtacatccaccggagggtggccgaggtcatgctgggggcgctggcgccatacgcggcctgcagggccttctccaccagggcaatgccctcaaagtggtgctccttccagtagcgattcctgtacatctctgcccaggtattcccaaagaagcggcccacgggctgtttcccattcttgtcctcatacttgtacttgccggtcagcaggcccccagccagagggttgaaggcatagaacctcagtccaaagtgcctgaggcaggggaagagctccgtttccacctgccgggtgatggcattgtacatgccctggtacacagtgggcaggatccagccgttgctcttgcagagggtacagatctcggccacttcccaggctgcatagttggagaggccaagctccacgaacttgccctcctggtgcagctggtggcaggcacgcagtgtctcttccaccggggtgctgtggtctggcatatgcaggtagaagaggtccactcggggacactgcagccgcttcagtgacgtctccagctggaaccggagactgtcaggcttcagggagttcccaaacagtggaatggccttggta

SEQ ID NO: 339199 - DNA, 1000 bp, Homo Sapiens
cagaggaaatgtttcgttttatttttgctcataacctcccaaaaaaatcagtaccccgccatccctcacccagacacagcccctctccaacaccttcacgaaacactgattttttttcttagagctaaaatgaacacccagtcaccaactacagccctgccctgcccctcctcccactggcctgctcatcttcccgcactgcaaacctggccgcctttagcctccctcccttagcgtagtgtcccaaggtcacctagcctgctttttgcctgtaggatatgggtccccttctcaaagcccgccctgacttacttcctcatttgcatagtccttcagctctatcctgtcgccactccacccaccccagacaaccacctgtaagaaaccaggtttgaaattcaagagaccaggtttccaagctcccagctgcttccctgtgggcctcggtgcctcggctgttatgtgacgggcatagacattgactaaggccaaacatttcatgatttggacgagaaaggagggaaggagatccagaaatacgcaagagaggtgataagcagagacagaggataaaaggataagagtagagaggagttgggtggtttggtggggaagaagggttgattttttttttttaatagagacagggtcttactatgttgcccaggctggtattgacctcctggcctcaaacgatcctcctgccttggcctcccaaagtgctgggattacaagcataagccactgcacccggccgagaggggtttggaatgaaggtagaggcagggggatgaaggcgccagagctgaagaccagcccccagaagccacacccctgcccttctagcagctacgggtcctctggctccgggccttgtaaacctcgatgagcaggtccttgacgtactggatctcgcgctccacggactctgcccgttccttcagctcgcgattccgtgcctccagcccctggcactcgccctccagggcctcaccctctg

SEQ ID NO: 339200 - DNA, 1000 bp, Homo Sapiens
ttttgaaaattgaatttgttaagaaaatgggttgagaggaggcagtttcattgtatgtttgtttgtttttgtattttccattaacctactatagaagatcctatatcttctagaacttgttagtagtggttggcctccctttactgtgtcaataagactttgaaggtgtctgggaaggagattccaaagaggaacagcaattctttctgccacaagagaaaaaacactgttagggactagattggtatagtatgtttacatgactggcttcagttcccaagattaaatagcttaaaatttcttaagcgagttcccttaacccaatgttgcttttgttctcatctttccttctcaccaaccctacatgtgtttacatctccacatcaatgtctgaccaatagaaaatcatgtctaaaatgttcaaaattgatctctccaaatctgcttctctcttatattcccagtcttgatcaacaatgtcaccatcttaccggttctagccaagctcaaacctttggagtcattctccaaactcctccttccttattgcccattccacagtcttgtccttctccaatcacccttcacatagtggttgccaagtgccctttctaaattgcaagccgggtgcggtggctcacgcctgtaatcccagcactgtgggaggctgaggcaggcggatcacttgaggtcaggagttcgagaccagcctggccaacatggtgaaaccctgtctccgccaaaaatacaaaagttagctgggcatggtggtgtgtgcctgtaatcccagctactcaggaggctgaggctggagaatcacttgaatccgggaggtggaggttgcagtgagccgagatcacaccactgcactccagcctgggtgacaacagcgaaactccatctcaaaaataaacaaataaataataaagtaaaataaaataaaacacaaatgtgatcacagagcctccctgattaaaatgctttaattactcattttcac

SEQ ID NO: 339201 - DNA, 1000 bp, Homo Sapiens
tttttctttttttttttttaattatactttaagttttagggtacatgtgcacaacatgcaggtttgttacatatgtatacatatgccatgttggtgtgctgcacccattaactcgtcatttaacattaggtatatcccctaatgctatcccttccccttccccccaccccacaacaggccctggtgtgtgatgttccccttcctgtgtccatgcgtcctcattgttcagtttgcacctgaattttgatgggccaggtgaaattactgacataaacaaagaaagtgatatttgggtggttgcgaaaatcaaacttctcattagagaaactatctttgtactccttaatgttggtttttgaaacaacaggcatctcttctccagcctgggttccagctgagaaactggcagcccaggtgatgttgaggttgaaattcttggaggcattgatgaacatgtccaaatccctgttttgttcgtcaggagtagccacaaaattgatagctgtgtaatagcgatcatcttcctgggatagactaaaggtgaactgatagtcaataagaagagtataataacatgttcctctgagagggtttccttggtatcgattttctacctcacatagctggcactcgtcccccttgacgcccttggtggtgcagaagcacttgcccgtgttggtgttgcacagagacgcgtgcccattgcacttgcatggctgacatttccctccattggtgggatcaccgtagaagccagatatgcaggtctcgcagtgcttgcctgtggtcaggttctcacacttctcacagatgctctgattgatgcatttactgtggccgttgcattggcaagctggacagtgaatgaaagaccagttgtatctgctgtcctctagacacatgctggaattgagcaggggctgtggatagaaatttcctgtaggggcttgcgaaggcatcttcactggtcctttataggaaccctctatgcatttccctt

SEQ ID NO: 339202 - DNA, 946 bp, Homo Sapiens; identical to SEQ ID NO: 158974

SEQ ID NO: 339203 - DNA, 1000 bp, Homo Sapiens; identical to SEQ ID NO: 158975

SEQ ID NO: 339204 - DNA, 1000 bp, Homo Sapiens
gagttttaaagccttttatttgtttacacattctctaaattgcagacaaaagattcactacgtgggtagtcaacattgctaaccaatcacagaacaagatactaaccacagcaaggaaggggtaggggcttgtgactcagtctttgagaacgtgcgagcattccatgggatatcgaggggtcccaaagaagaaggctgctcgatccccacattcttcatctcatcagcgacaggtctccctcccagaaccccatcaggacaggagaaaaggcagcaagagaggtggggtggtcctggcacgtgggccaccagtcttctgaatgaagagtgagtcccgggacaggagtccacatcaggtgtgggctgcttccaatctgtaggttctcctggagattgtcacaatctgccagctctctgggaatcacagaaccatcatgtccccttaggatggcagaagatgtggcacagcctcaatctccaacactgaaacactgagagagcttgatacgttccttaggcagggcagaaacatcacagcacttcacgttaggaaccacgaaagagtgggaacctgacacacgtgggaagggcacatccccagaggacagaggacaagggtggcacacacacctacagagaccgcaaccacatcacagtgaaggaggaggacagctaacggggtgggaggtgggagctttttgtttgtctgttgctgtcgttgctttttagagaagccagggtgggccaaatggagatattgtctcaagaccattacacacagcttcccaaatctgtagcccttttctgtaacctcatgaaagctgtgtcagactcagtcctggtctgaagtacccaagcagcccaaggcaaaacctcatctgcaagaggcaatgcggcgttgggtcccaaggatcagtggggagggtgttcaaaagagcaaaaagggaaaccctctttcataggcatttctctcactggagacccactctcttggtcattc

SEQ ID NO: 339205 - DNA, 1000 bp, Homo Sapiens
gcttggcctggattttatcttgaaatacttttgacagctggctggttgagggtatctgctcacaggaacgccgcatttgctggctttgtccactagtgctcgcccctggctgctgatgcggagcctcacgtggccgcagcccaagagtagggactggcttggccacctacaggctaagcttcgggctcccaggtggctgggagggccaggggtgcacaggtgcatcagagcaggtgctgccttgctggagggccagggctcttctggccagggtccaggtcatcattgtccccagccaggaatccaaggggcctttccaaacccgaataaatgttttatttctagaaaactgtgccttagccagagctcctctaggtgatcaacccatgtctggagctagctcttcctccaggacacgagagctgggggcctgagtacgtagcgccaggcccggtgtggatgctggggagaatcatcagtgtgggagccgaaagcccccgagggtggggtcctgcacagtgggccatgcctccaccagcaagatgtgcacaggtgacagggcttctccagcctagcagggccagcccaggccctcgtgccccagatggtcaggaccaggtcacagcttggctatgagcctgtttgtggcttctgtggactgtggtgaggactgggccaggaaaggctcagggtagcctgggaggaagaagcgcatggcagacagaggtgctggggagggggccacagggcacttcacaaatggaaggctgtcagagagacagggacaggccacacaagtgtttctgcacattcttcagggtggccacagactggggggtccaaggagcaggtgtagggacagaaggagggtctgagaaacgcacagcccacatgggccttgaaggatgcggcctcacccagagacaggagtcctggcaggcccccctccagcgtggagatgcctacgcgtgcggcaaggactggagggaagcgtaggaac

SEQ ID NO: 339206 - DNA, 1000 bp, Homo Sapiens
ttttttttttttttttctggatgctggagacaaacatctttattaaagacactaccaaaattttggcaaacatttcaaaacagatttgtaaacataatgcttcccttttcaactggcagcactttgaaaagacaatacaataagacaatacaacttgaatcaacattaattcaaaatccttatatttttgaccacataacttatgttcccacatgataaaacaagtgacagtttaaatcaatgtcaacagataaactccatgaaatgaaagtttgtgctgtttgatgaatcacagtatgttatggttaaatatatccactcttttttatattcctggcaccaggatgaaaaaaaaaaaatctttaaatatacctcttatgtaggtaatagcttctttgcatatctctcttcaaaaaatactttatagcagtatataaataggttacctacacatttcattttataattttgtcccaaaactatagatctgtttcattttcatgacatatcaatttttgcccaacattaataaagctgacaaactcgttgaaatggaaatgcttttgtcttccacaacaaaagtagcaatttgatagaagaaaaaaaacaaaaaaacaaaaaaacaccctacagtaacactcgtcagttgtttaacctgagcgtttggcctactaggagtagcagctttttttccttcatgcacgctcacatccacaccacctctgcacacatacagatcgagcacacacttccagatgctggtaggccacagtatgcttcccattgctctaatcaagtgggaagcagtgtagctaatgattaaccacactatgtacacaactagcaaacaccttaaggcaaccattgcaatggggggttaacttgcagggcggatttaatgttctagatcaagtcagcctgtatatacatatgtgtatgtgaatctatacacatacacctttctattttttaaccctccaagacaatgtttattttttta

SEQ ID NO: 339207 - DNA, 1000 bp, Homo Sapiens
ttttttttttttttttttttttttttttctccaacaatctggaattttattccatccatatacatgcatagtaacaacatttgttgagaaattatttctatcagaagtagaacattatctttgtgatcaccaggtgcagtattgctactcttatatttaaatagatcttatatatgaattaaattcatacttgcagcattgagtttagggtttcgatttagactgtgcctttcaaaagataaaactgattaatactacctcattacttacaatactgcttccagtaattttgttcattctttataaagtattgcatttaacagcaaaggtttaaaaattgagacagagctgcatcagcgaaagaaaatacaagtactatacaagaaaaaaattgccatcttcatttaacatacaggttcaggattaagaaaatggacggaaacatacagctacatacaaatgcaaagcctagtgactaagagactgtatctgctaaaatataaagtgcaaacagagcctgattatccaagaattgaaatcttaaggcgaacttatagcatgtgtatttagaacatctttgcaagttatattttagcatatacatatatctgcaacagcatataagaaaaaatcaagatacacaagtgcttttgaagctatttctaaaatgcttttctgtattgtgactattttctttaaaagctactatacagtgcaaaccatatgtgctacacaataactatacaataacattacaaatgactttaatataaagtttttaaataaaaaataacataaccacagctatgaatactgctggtaaaataaattaatttttttgaaaatggcaccaataatacactttactaatggactgtaatgaaattacaccttaagtcttcaactcagccataatgaattatctcctgattgcccagatgtaattcaaacagcttatttttttttctggactggttagaacaacatactaaacactgat

SEQ ID NO: 339208 - DNA, 1000 bp, Homo Sapiens; identical to SEQ ID NO: 158978

SEQ ID NO: 339209 - DNA, 1000 bp, Homo Sapiens; identical to SEQ ID NO: 158979

SEQ ID NO: 339210 - DNA, 1000 bp, Homo Sapiens
aaagttcactataaattttaatctatgatataaaatattacctaaagataaaattgaacatcatgtatcagaaaataaaacataacaatgaaatgcaatttcgtaaatacttctatggcacaaggattattttcctcagattcaaccttgtaattgtgttgtttgctttctgaaaatcacactttataaagaacacaagtagagcttgttaaaaatgattgtcacagatgtactgtttactaattcaaagaacactacattcattcatatcaattttattcattaattatgaacaataaaatataatattccatgcttttcatgaaatagtggtttcttcttccagtctaatcagggaactaataaattcttagttcatgggaaaacttccatttgatttacattgacttaattacttcttagggtctagcctcatccatggagaaaaagcactttttcttgaggcaacagcaaattaacagcactgatacaaaatatggcaaattcaatggttgtagcattgctttaggaattttgagactataaataaaactataaccataaataaaagggcttattaatatcttcttttcaggagagtgatacattctgaagttttcttgttattctgttgaatagcaaggacttccaaacttaaatgtcttaaggctgaaaattagttatattcctcaaattttagccttattaatgaaattccaaaagtattataaaataagattcaatttgtcttgaaattataaatttgtaacagatatttttcaaaatacatgccttcaaacaacttaaatgcaaaaatcattcattcttaataatacctagcagttcatgccttgcttcgcaaaagtactcatacaaacatgtgaatttaaaaaacatgttttcctgttcaaaaaataaagcttctgcccttttaaaaacttgtcaggctttcatgtgccaaaatgttgaaaactgcacatattcaaacatagttcccata

SEQ ID NO: 339211 - DNA, 1000 bp, Homo Sapiens; identical to SEQ ID NO: 160515

SEQ ID NO: 339212 - DNA, 1000 bp, Homo Sapiens
tttttttttttcagttgctgaatatcaaatgtttattctttgccttcttactactgttaaaatctctttgataagtggctcctcttaaaactggatttgatttcacagaaattttgtgaattattattcatcttgaggtgtcccatgctggggatgaggatgtgtcgaggcacagcttggacaaccaggccaggtgggccaccatgaaggttctcctccccataccccaccccacacacagaaacctgcaaacaactcagggaacacctgtgcaaagccagtcaggttgtccaagtcagctgaaaacagaacaccatactagattcaaattacaagttcagtactgtactgtacacatccagcattacacatgcttaagataatataagtatgcataatgacatatcgggtctcacttgtaaactataagcacacagttacaaaatgttaaactacaacataatcccagtttacctaaagttacaaatgttgttgcatcgacattggctgcttcagaagccttgggcatgcagacaggaagtagagaaaatattccagctaagaataatcatattccacatatttaagaatctttctagccaaatcatattctaaagaaggctatcttgaagggccagggccaatttccaggctgtgtggtttttatgagagggaattgtgccctgacacatatgtgctcttcacagatcctggaattatgaatgcaggtagaccactgtgattcccagggtgacttcagcctctgggagcaagaatacctagtggcctctggctcaggggagtctctcaaccctggaattccacccaggtctggagggctgctccaggctgatggggaccattttgacctgtcaagcccagaggcaccatgggtatagtctgacagcaacctatagtaactgcagctttcaggctaaatgaatattctgctctaccccatgagaatgctggcccattaaagatgattttgtttgcaatt

SEQ ID NO: 339213 - DNA, 1000 bp, Homo Sapiens; identical to SEQ ID NO: 158980

SEQ ID NO: 339214 - DNA, 1000 bp, Homo Sapiens
cattaaaaaacactgtacaaaaatcatggactttattatacattaaaaaatcttctaacaacttttttcctgaagccttgtcagtatatacctattgtgacaaaatgaaaaaataagttctccaccccacatgtataccaataccatgatcacataaagtcgagttcttcaaatccaattctaaagtgaaacattgcatgattttgaattgtacactgcatgattaatagtatcagtgaaataagaatcaattcacttacattacaaaatcaccaaatatacaaagcaattttgcatattagttacaacttaacccccagtctcatattaactgaagtaaatttcatgagtgaagccacagagattggttaaaaagtataatatagttccagtttcaaatctttatgtcttactagttaatgtagaaagacaaaatctcatgggagaagagtaaaccaaacttgctaaaaataaagggttgctttctacaattggtgtgtttaagtatttaaaatacaatctgaatgctaagaggctgtttcagaaccaacattaataatttcattttagggccgggcacggtggctcacgcctgtaatcccagcactttgggaggccgaggcgggcggatcatgaggtcaggagatcgagaacatcctggctaacacggtgaaaccccgtctctactaaaaatacaaaaaattagccgggcgcggtggtgggcccctgtggtcccagctactcgggaggctgaggcaggagaatggcgtgaacctgggaggcggagtttgcagtgacccaagatcacaccactgcactccagcctgggcaacagagcaagactctgtctcaaaaaaacacttttttttttcattttattcaggtggcaggttttacaacatactagctcttaggatctctcagcattaataggattcaaattttaaataatatggttcctagatataatgcaaaattaactcaaatgcctttaccatat

SEQ ID NO: 339215 - DNA, 1000 bp, Homo Sapiens
tttttttttttttttgctttttccttttccttttttttttttttaaacaagcagctcagcgatttgggaggttggttagtacaatacagagaacacagagagaaagtataaaatggcactgaacactaatgccaatacttatctcattgtggttataacgaaggatattattatttgtgttatttttgtctggaacataaatcaatgccattaacttgaacttgaggtatatacacaatacacacacaaccttaagcaaaatacttttcataagtaacattacattttaaaatattggaaacattcgaatatctgtgctgatttgtattctgacttaatggaacaagaagaaaataacattcaactagggagggttaaactgataataaagctcttaaaattcaaaatgtcttcctctccctttgtacttaccataggctacacaatgtcctgagaggattcattatgagaaaaatgtcaatcacagcttcaataacttactttggaaaaaactaatgagaaagcaaactggaaggtgagacttcatctttgttttcaaataagtggtcttaatttttcttcttatagaaaaagtttaaatcagtttattataaatatatctaaaccattaatttttgcagctttcaggtaaagtccagcacttcatttatacaaaatctatgagaagaggtcagtagagatcatctaatcttaagtcgtgacatcatccattcaagtccttggcacaatccctcgccagttagagcacagcatgcctggatatgccactggtgatctttaatagaagttagcttcaaaaactgggagatttctgctacagtcatgcattctttaacatcttgtttattagcaaaaatcagcaatccagcttttcttaggtcctcatgcgctaacattttatagagttcttctctagttacagaaatcctctctctgtctgtactgtccacaacaactattacaaactctgtgttagtat

SEQ ID NO: 339216 - DNA, 1000 bp, Homo Sapiens
aagtgaaataagccaggcacagaaagacaaacattgcatgttcttatttatttgtgtatctaaaaatcaaaacaattgaactcatggagataagagtggatggatagttcctggaggctggggagggtagttaggggctggcagggagatggggaaggttaatgggtaccacacacacacacacacacacacacacacacaaagaaagaatgaataagacatactatttgataacacaaccaggtgactatagtcaataataatggtacattttaaaataacttggcagggtgcggtggctcacacctgttatcctagcactttgggaggtcaaggcaggtggatcacgaggtcaggagttcgagaccagcctggccaatatggtgaaacccctgtctctactaaaaatacaaaaattagccgggtatagtggtgggcacctttaggcccagctactcgggaggctgaggcaggagaatcgttggaacccaggaggcggaggttgcagtgagccaagatcacaccactgcactccagcctgggtgacaccaggagactgtctcaaaaaaataataataacttagccaggcgcagtggctcacacctataatcccagcactgggaggctgaggcaggcgcatcaggaggtcaggagatcgagaccatcctggctaacgtggtgaaaccccatctctactaaaaaaaaatacaaaaaattagctgggcaggggcctgtagtcccagctactcaggaggctgaggcaggagaatggcgtgaacccgggaggcggagcttgcagtgagccgagattgcgccactgcactccaacctgggcgacagagcgagactccatctcaaaaaaaaaaaaaataataataataataataacttaaaaagattgtaactggattgtttgtaactcaatggataaatgcttgagggtataggggaaaataaagaaccaaaaccccactctagatttacccaggaaacagctcc

SEQ ID NO: 339217 - DNA, 1000 bp, Homo Sapiens; identical to SEQ ID NO: 158982

SEQ ID NO: 339218 - DNA, 1000 bp, Homo Sapiens
ttttttttttttttttttgacttcttattgaatattttactgtgttaacgctcattatttatacagacattaggtttacagaatattctgttttacatcaccaaaattcacagtccgagaataacaacataaccaggtcccaattcctccatgtaccccacaagcttctgtccaccctattttctggacagaaattagcacaacccacaggtttttcctgggccaagtcttcctttgctgccactgtcttggcttctaatcaagctctgacaggccaacattgtgaagtcctcaccctttcccattcacttctggtctcctagtctagctaatccccctcccccagaaggttaaggcagttggttcacaaccaagttgtttggtgaccttgggtgagctccagacaggcactggggtgaggagatgtctgtgcaaaattacttgtagaatgatcttgggatgctggattttaatttttgaagcaagaaagttagggggggacatatttcctgtcctgggaaaaatggagaccaaagtgatattaagaaagtagtttggatttcaaatttataaatcacttgctctgtgggtagctatcaggaactagatcattttccacctctgcttattgtacttcttaattttaggttttatacctgggaaagctgtgactctattagagctttgaatcttttcctatccttttatctttactcctacagggaatggcctcagctcccttctcttttagaattaaacaagtaaaaactaagagttaactttttaaaaaaactgactccagggaaaggacattattatattaccaatagctgatttttttttccattctgggacctaaaatgcttacaggtactagcagtacatgtcggatagcaaagacttttcctttcagacccaactaaatgatctcctttctgcctttgatactcttttccttctttgtctttcatccttgcctgtcacctcacagatggattct

SEQ ID NO: 339219 - DNA, 1000 bp, Homo Sapiens
gagaatggtggttcttgcgaaacacctgaagttttactcatggtacaaaagtatttaataagtgacacatcagtacagaaacacagagcttgtagcttgtcctttaaaaccagaatggccaagtgaaaagtcagtacagattcttatttttactattaaaaaaaaaaaatcaaagggacacactgggaattgaactactatgctttttcttcgttctagagatgacatatatgttttctgataagtaatctaccacacattgcactaaaccaaagcatacaaacagccagtaaagctgtgctctacctgctactcatgctgggctggacagtggaacaccatcttggtaggagagattttgacaggaagaaactgcagagtccctacctaacccagagaaccttacaaactggtttatacacaaaggattttcagcaaacatgcaaacacactaacatgctataggaatatgttttagtctatttctagcacacagcatacattcataggtgcccagtaaaataggaatgaatgtcaatgtagaaagcatttttgccttcacagtactaacaaacacctaaaaagcacacagcatataatactttgatctttaagtggataatcatggaagttccaagatcacatccactaggttagcctgagtattcatctataaaaatattttttttttcaaaaataatgcttaaaagagacttctagaaacagtgggactacatcaggaccagaagacagtgacacaaggactgcaaatgttaagactaggagtagcttttcacatggagcttttatgtagaggacgtctccttctgttgattcctacagccgagacaagatgtgatcacaggagactccaaaatctcaaactgggcttgagtaacaccctagataaacatcaggaaccccactgaggctgaagtactgaaactgtggcccatgtgaaaaagaggtgcaagtgcacaaagattcatgcagagcctgc

SEQ ID NO: 339220 - DNA, 1000 bp, Homo Sapiens
gggaatggagacatttatttccattaacaaaaaatgtggtatataatatttccattggaaaagggctcctctagtacatttcatgtctctaacttccagctaggtaattaaaatgacatatttgataaattggtcaaatcagatttcagcaaaacttaggttttttgggaattggtaaaatttagaactagagaaactgctgttggaattatataggggaaatgtatttcattgaggcctaaagaaaaaaattccatctagaaagtactatgtgttttcaacttatgtcagtgcatgggaatgtgtatatctgcaggttaccaccacagccgtagtctctagtttccctgtgaattggtttcattctgataagataatgaaattgtatggtacaatgtttaattctaattctggtgttcaggtgaatgacttggtaatcagtatcaggagaatataggtaattctctttaaaagtaagaacttcgttttgaaaatataaattaccaagatatacaaaggagctttcacattgtatttcatgcaatgtgtggatttttcttcaacttttcacttctcccttccatactgggttcttgaccagtgttttcatcagttgaacatataaatggtcttaaatttcctcgagtctccttcacaaaataatcaatgacactgaaaaggtttgggagtgttacaggtttttccagttcaatagtgtagttttgtcctacgctcatcactttgtagtgcttgattcttggaatgtctatctcctgccgaatagtgatggagtagtttctactgtcactaccaggcctcaggatcatatttcccaaagaagggttcttctggagcatctcagttgcctctttccgggacactgtataaaaacatgctggcatagggttcagtacatccacataatcttcagttggttccttctctttttccacggacgtactctgctctgtctcaatcctccttttcttttctctctcta

SEQ ID NO: 339221 - DNA, 1000 bp, Homo Sapiens
tttttttttttttttttttttttttttttttatgctaagttcaaatgtatttttttgataatacaaaaaagtaatccttgaaaatcagaatacataacagaaaagagcacaataacttaagtattaaacatctgtatgaaataactgttgcaaagattgacaaaaatgcacacttagaacatgcggttatttaaaaaaaaaaaaaaaacaaaaacaaaaaaaacaccacacgattctgtagaaccaatgttatgtcaccaccaggagagcaccaagcaaggcaccattggaaagacaacatacttggaaagtctctataaataaagtaaatgctaatctggtcgaaaaatcggtgtctttggtaaaaattctatgaggatgacatattccatcatgttattcgtttcacatttccttttgctcagtctccaatgcaagcacagcttgtggtataacctattgttttcccattctaataacttctcaatcgatcttcgtgttcttttactgaggcaaataactggccacatactgcaacctaatgtgcagcagcaacaaaggcagccacaaagtagccaacgtacattaacaggaaggttcttcttaagacaactgttaactctgttgatgctggctttaaattcttcaggagctacttttccagttaatgaagaagggaattcagattcaaatttgttgctcagtccaaatacggtgacgtgaccggagccgcggacgaccaccgggtccggcgagtacttgagcagctgctcctccagggcccgctcctcgtcctcctcttcctcatagatttcgtcgaaatccgccatcctgagcctccgagctcccctgcccaaagggcctgactcccggggttggcgccggggtaccggcgggcgaggcggcggaggctgaggggagtcgccgctgccgccggctccgaggccgcggagttcgctgtcggctgtctcggctccggctacagaggggatggggtctg

SEQ ID NO: 339222 - DNA, 1000 bp, Homo Sapiens
tttttttttttttttttttttttgagggaaagacaaaacgtatttattccaggccaggtcttaaaatgcacactgcacggttccctgttgttatcagcaccagtaaggaaagaacgtgccttaacggcagccccacccagagcctgctgcgtggctgctgtgaggctccccatgaatccacgcagtcttcttcctcactggtgcagttggtgaggttttctaccctcacagcaaagggatccttaactataaattcacggtatgcagagaagaggacagaatctgatttactgattgttcctcatttaaaccatgacttaatctctatcttaggatttaactatctttattttctggttaaaatttttaaaaaaagtggggagagggtgagagtcgtaaggggcaatagcaatagagattacactgtgctgacacagagactaaattctagtcagagtgaagacccatataaaaggccggctgatggtttaaaggaagtaactacatggagtctaatcgagacattcatgagttacatctcattattagccttagtaatgtaagaaaacaattctcaacaaaactggagtccacagttgtcaagtatgctttctcaggcacgggtaggtaaaagtctggagaaatgggttctctccatgcccaatgacaaagcaagacggtcctaggtttgaggttaagagcaggtcccattgccgggcggtatccgcagctcacagctgagtttagcagtggaatcgagtggagaatttgggagatacaggcacagtcagaggctggtcacttgactttatctccagaccctggtacttgcgtattggatttgccttatgcaccagttctctccgtagcctggccagctcctcttttttctgctcttcctcctgtagtctggcctcctccaactgctgggctttctgggcttctacctcagccattctcttctccagctcctgccgctctttggctctcttctcagtag

SEQ ID NO: 339223 - DNA, 1000 bp, Homo Sapiens
tttttttttttttttttaaagtcagaaactttaatttccaaatatattgatcaaaaatatacaacttcaacagcaactctttatcctaaggagagatcccgcagtatatctagggaaagggccataaaagtgagggggtagaggactttggggtatatcccaaacttcccctgcaactaaacagagtttgttctctgcattaacaacacagcgatttcctcatttcctcctacatgtttggagaggctgaaggctctgcagttcttcctggaatgacagcctgggtccattcctctctaggagatgtccaggggaaggaggacatctgcttactactcctacagtgtttctggccagatcctacaccccattttagaggcttcctgataggcatgaagggaagtcatccacatccatggtatctgagaaggaatttatgcctcagtcgtggcttgtgctgaggtgaagaccacactctttcggttttccagcctcttcttccgaatctttctagcaatgaaataaacagccaggagaaggcagagacagccaaccaagattcctacacctagactcagcatttcacctgtggtatacgaggatcctgcttggatgaaagaagcaaagaccatgcgctgattgagaggctgaagggctcggtagttctgtaccagaagcttagagggctcctcttctgtggagaacaatgtcccctgaagcttttccagctgttccattgaaatctgggaccttctataaaaaactgtccagagcacactctggtagcaagggggagttgtgagcgagccattgtagcggaagtactgccccagctgtttggggagcagctctcttaggttgaagggaggcactgaggtcttctgatctttatgcctgacttcatgcaagtgactcagaatgtgttcataagctatattcttagtctcacccacctcaattaggatgcccaggacagccaggccctgaggcctctcagcag

SEQ ID NO: 339224 - DNA, 1000 bp, Homo Sapiens
tttttttttttacaacaaaactttacatggttttattatacattactgttattgaaagcaaactttatacaaaaagttttatacagataaaaaaaatccttggctaggcaaagccgtttatgtgtgtgcatatacagaaacacacatacatacatatacacacggtattttacatcataattatacatatttataaatacattatttaaattattttacaatataccaaaacaaggaggcaattataaaagcaaataaaaaatggatgaacaattgaactaaatagtcactaagtttaaaatgctacaaaactatttttttaatctagaaagtcatttctttaaaatatcaaaactaagatttcaatacatcactgttgctttcattttggtaagttctaacatgtttaaaaataaatattttgaccaaaaacagataagcaaatcagaatgatgactagcacaagctgaacatgctgatgtgaaattagagagtcactgagtaataacaaatatagattatcatctggtaaccaaaaaggtgataaacctccctctagtgctcatttaaaacatgaggaatttgaagcttctgtgtagtatgcaatatcagttaagagtcccaggaattcagcaacttatctgcattttgacttttcaaagagcttcattagctgctggaatctttctgagacctgatttggatttttatccaacttggcggctaaatatgcaaatgttttaaatgatggccctcttttctgacactccaataaaatttcccggtcatcatttcttgtccataaaatgataatttctcccttctttttaataacattttttgcagaaagacttgtagaagtggcaagtgctgctgatgaatccttaatccctggggttgcctttaatgatgagggatctttagtcacaggaggggccttcttcttactggctttcttttggtgagcttcagtattctcacaagaatcttgggtaggttt

SEQ ID NO: 339225 - DNA, 876 bp, Homo Sapiens
ttttttttttttttttttttttttttttttttttttttgtggagcacagtgataagcacattttttatggatgtgtttaggatagaaaggggtgggtagaaaggagaggaggcagggaggtgaatgtattatgtacaaagagaaatgacagagaccatcccctcctttagctctttgctgtttctttctctttgttttccgcatcctcaggatatgcatgccatgtcagtctctcttcataaaatgctatcacaatttgtggacatttcacattagcttcttttgcaagaaccaggtcagcttcatctgtgtctttccatttcattaggaacattaaatcaccacaggaatctgttgccccaatgatcttttctggttccagtcctctctcaaagccccgagcgatatcattgctctgctctctcttttttttagatttgatgtcatcggcactgtttgagaaattggatttcctcttgttactttctgacttctccctgggtttattattttcaccctccttcatcttcttatactttttcataaattcagaaattagctcagggcaatccaagtttttctcaggttcccaagtattgtgctcctcagaaaagcctttccacttcagtagatattccacttgtcccttaaccacgcgcctgtctagcaccttctccacaacatactcctcctcatcctctgaagaagaactgtcagctgtccgcttggttttctttcccatgtcgcacaccgttccacctgaaagactaaggccaccaggtccccgggattgagagtgatcactcacgctaacgtctgccctgttcctgtatggtgaggccgcaccacaagccaccaccgccgccgcttctgcgc

SEQ ID NO: 339226 - DNA, 1000 bp, Homo Sapiens
tttttttttttttttttttggagtgcaaacgcctttttcaccataggttttaattgaaaaagggactaaagggagtcttttccaagggcatgctggaaacgcagaaaatgaaatgatagaaacttcccatgtttctatccttcctctggcattgtcttatcctatttgtttcctgaaacattccctgttaagactcttgtgattcaaggtcaggagatcgagaccatcctggctaacacggtgaaaccccgtctctactaaaaatacaaaaaattagctgggcgtggtgacgggcgcctgttgtcccagttgctctggaggctgaggcaggagaatgccatgaacccgggaggcggatcttgcagtgagccgagatcaggccactgtactccagcctaggcaacagagcgagactctgtctcaaaaaaaaaaaaaaaaaaaaaaaaatagactcctgtgattaaaaagacaaaagcaagtatttatgaaagtccatcagattcctcagtaaagctgaagtcacacactagagacaggtggtctgaaggataattgaaggaaggtaacctgttgggtccaatctgttcttcagtgagcagatcgagagctgaccttacatttagagcatgtttagaataccagatgtaatccagggtgtgcctgcactcccctgaggtccggatcttccaggtagtgtatgggggttctgactgcccatcagcactcagcagcttgtaggcgctgttcaggttgaggctggaggaagcaaagtgtttgtagacctcttctgttggctctgcattgaagtccccacacacaataaggggaatcttggctccttgggtgatgttttgcaggttctgaaggaggtcacagccttgagctgatcgaaaccgctcccagccagtgcgtgcttttagatgggtaacagcgatgcagaactgtcggcctgactccttgcactccagggtctgtgcaatggccacctggttggttttca

SEQ ID NO: 339227 - DNA, 1000 bp, Homo Sapiens
gaattccggattttattaaatcaagtcattgcacttggtcattttattgctacagcaaaacaaggcctttacattataatacttctcatttctgatttaactgattgtctcattctgctcatacatttcaagtttaaatgcaagcataaaatgtttatcaacaaatctagagagcacttggatttttaatttttctgtgatcacagtaaggagcataaaaaagagtatcttctgttacacaaggcctgttctctctttacatcttcagacttaaattctgtagaaggtaacagctttgtattaagacagaagcttagtggtcacaaacaaaaaataacactgaaatacaattcggaaattaatgatactgtgtgtctcaaagaatacctgaactatacattcactaataatttggcaatgaagattccatgctgttcaacttttgtcttttatactcacacgtagaaaaaaaaattcatgatttaccccaaggttattattaaatatcattttgtgatatgaactttagtaatagaaattaataacatttcccataccaacagaaagtaattgctagaataaaggaatcatttttcccatcaggcctgggtttgtttggttttctttactattttatcaaggacagaaaggtaagagtatttcagttacttttctattctgactgaggaggacacaagcaaaaactttaaatacatttccatgctcataagcatcttgatttcatgtactattgagaaaatgaccaacaaaaactttaagaacagcctgaaatctgctggaaacttccctcatcccattattaggatgaccagggatcacttcaatagattttcaggtgagaaagctggaggataatttctaggattacaatatttttgttttacctaaggttggtcattaaaagaaagtaagatttaatttatttaacaaggagaaaataattcatttgactagtcatttaaacctattctatttaaca

SEQ ID NO: 339228 - DNA, 1000 bp, Homo Sapiens; identical to SEQ ID NO: 158984

SEQ ID NO: 339229 - DNA, 1000 bp, Homo Sapiens
tgcacagccaaactaccttgttttattggattttgagtaaaaacatgaaccatgtcaaagtttccaggcagactcctaaaaagcattagcagatctggacccaggcaggccagggacagggaggtccctctatcaggttttgaggcgggttgagcgccgaggtagtgggggctgggagggtcgagccgtcaccttgctgggtgttttgtcctgggtgttgggctgggagggtgggcggccgctggaggtgaacagggctgtcaaagcgttccgggcgttgattgcgcaccggcggctcacaggtcgggtggtggggctggggttcttggccgccttgtatttctgcaggttctcaaagtggcccagggacttgcagtgggagagctgtgcccctgagttgctgtgatagaacttgtggcagatgcggcagatatagcccatcacgggcaccaggaagtccacaccatatgcagtattggggctgtaggtctccgagcccttccactcctctctggatatatctctggacctcacctgcttgcagagttcctcctcaacctcgatctcttcttcatcctcatcatcctcttcctcttcttcatcaccctcgaagcaacccacagcgtccactgtaatgaagtggtcctcatcttggccagcaatttctttctcaagcgacttcagctccttggctttgtccttatgcccctgggacttcacgtgctccacaaacttgcgaggggttttgaagtagcggttgcaaacggtgcagaagggtcgcaaggattgtttggcaatcttgtggtcctgtgtcctgcggtgttggatcaggtcccccatgtagtagagctggcaggtgttgcaccagcgccttggtggaggctcctcatcctctgtctccaggacgtcccggggcacgggcagcagggacaggaggcaggcttggctcatgtgctggatctcccctagccgctgctggtgctgaggctccgacatgtgg

SEQ ID NO: 339230 - DNA, 1000 bp, Homo Sapiens
ttttttttttttttttttttccaaatgttgtttatttgctctcctttacttgtattttgactactcagatagatgattttaatttcttgatgcaatttgaaatatcatttcagaaaactgttgcatcaaataatatacaaccaggtatcagtatgaaaaaggatctttgttcatcactatttcttacaaataaaataacaaataaatgaaactattaaattttaatcttgacagtttttacatatccatgagtgtttttatttaatcaaagtatccttttccgacatcttaaaattatttttatgagtttatgatcacacatgggatgaattttaagattcagaaatatcctttacttacattgttttgttttttaaaactctcttctaggtctacttgaagatttttttcttcgttaaggttcaaatggtggtacttaaaataaagttaacaattacaacagacccaatcacagacaataccagcgtagaaatattaactccagaattatgacttttatcaggagtaggagtaggagtaggagtaggatcaatgtcatcaggatttgcttgagggataaacaaagttacttgtgcaatgttggatacttttgatgtcaaattgcttttatctatacttttaatggcaataaatatgtgggttgcattttcttctgagatattttctggtttaaatgcaaagctttccttggagttggcctcctttggtgacagatcagtagtatttacttgaagagcatcatcaaaactgtctcttagatcaagaatacttgcacttattcttatgatataacgttgaacttttccaacatcaaaattatctcctggtgctgtccatgtaagaataatcttatcctcatgaactgtggcatcaaggtctgtgatttgacttggtgggtattggtcaggcaagggaaggcttgggacttgtgataccacaaatgcacctccggatgctgttcggctgaaatcctccaagg

SEQ ID NO: 339231 - DNA, 1000 bp, Homo Sapiens
ttttttttttttttttttttttttttgtaaaaatacatcttttaataaacattaagaagtacagcgcacttttattgaggttttacattgtagtttacagcaaatatactatccattgtagtgtatatgtacaagtaaagtaaacttaggtttgttttctctcccatggctggataaaccaaatctgatacatccacatttaaggttgttttccaagttggtttccataaaaggcctttaacaataataggcttttaacaacaaaaaggtatccctcccatcacaatgagagcttgatgagggctcaaaagtgacttcaaaaactgtaaataattattttccttggacggctttaaaaacagctactgatagcaaatcagaaacactaaagaaaaaagacaataaggaaacagctgtttgtctagtgaatccataataaataccaatttgaggctatagattacaaagccaaaatattcttataggaaagttaatgtttatatttacaatcccatggactaaaaaaactgtctaatatcttaaagactgagtctacctttatttaacattgtttatacacaaagacccaagggatggtagaattcttgatccttctggacaaaagcatagtgagaggggactgaaattaacaaaaagggaaaattaacattaatctcaaaattctacccatcgttgtcttaaaatgatcaagactcagctacatctgagaaaaaggaaaaggatcagaagtgaaagaaatcagaagccagtaattaaaaaaatcataaccttgtgtgctttctactgacggcatttaaaaatttatacaactagatttattcgctatatatataaactagtgttggaattaggggaaaaagtaccaaatacatctacacaaatactagaatcatattcagaattgcaaaaaggcataataatctgtttaccatataactagctgtttgtaaaatctgtaatggttaataaaaaatcctta

SEQ ID NO: 339232 - DNA, 1000 bp, Homo Sapiens
tttttttttttttttttttcataaacagccacatccgcaaggtttattcctggatcacaaaccaaccccactgaccaaactcccaagtcactttatattaaacttgttatcaaatcacccacataaatatatataataaatacaaaaacagacaggattttttttttcagtctttggtatagagagctttctcctcctcttatttccccctctgtccctgtgctctaaagacatttcctcgcattcacattatttccttggatacaaaaattgcccagaagtaaactttgtgctggaacccctgcctccattgacagtcccgccggggacccagcccacagcagcccaggggagaagcaggctgtggggactcacacgtagtcgttcagcctgtacccgctgtgcgtggccgaggtcactgagggggcccgattgtctttgtaggcagctggtggctggtaggcaggtgcggtgtttgcagtggtcgtggtggccctgggcggggcctggtagggcctgtagggtgcctcgtcctggcaggacaggcaaagcagggtgccaccaatgagcgagagggacgaggagatgaagcccaggtacagggcctggccaatctcaaacttcatgccgctgggcagcagcgggttgtagaagttctgcaccacgtcgttggtggtccaggagacggccaccatgcacaggaggccggccaggatgaagagggtgccgccgaggatggcaaaggtggtcttggcgggtgtgcccttggcgcagcgcgtgcacttcatcccgatgacggcgcaggcgcaggctatgcccgagagcaggcaggagatgaccatgagggcgcgggcagcctggaggtcttggggcagcgccagcagggatcggtagatctggcactggtagatgcctgtgctgtgccacacacactccatccagagccctttcaggtaggacacggccgtgaggatgttggtgcccacgtgcgctgtcctcc

SEQ ID NO: 339233 - DNA, 1000 bp, Homo Sapiens
gaaactggaataagtgtttattttctattaataaaaatgaattgtgacaaaagtggactctggcttcccctcccccctcccccccacccctctgggataaaaattttccagcattgccaggagctttcaggtacacattaaagaataaaatgaagttaagcagctggagtataggatagtatttgattttcaagatcacccaaagctgcactatcgtcccaaagctgaccaagtagaataaaaagaaaaaaaaaaaaaaacaacccatgcgcaaagatagacatttgcttgatctgctggctcagggccaaatgtttaatttgcttctccaaagtcattcatcttcaaaagtctgattctgggaaactgatgccactagcctaaaagcccactgaccatgtagtgtgcatcagtttcctcttgtccagtaagcatttatccaacagaagctaagataacatctacaggtgttctctctttacttctgacagtcacctgcatggtcactccatcggctaaggccagcctggacctcaccaataaatcatagccacctctgaatatacctgccagatagagcgaatgggaattcttgttctcaggtactttatcggacctctcacatggctgcatgcccagaaatgtgatgatattgttgacagcctcttcaagggttttggtagaactgagggcaaaggtttcctctttctcaaaggtatctcccacctcttcccaagcagcagcaaagttaggcttcagtactttctgaatatggtcagacacagtcacttcgagatcttccagcacatactcatcatcatacccatcctcatctggaactccagtgttagggtcacagtcccggactgtaaacttcatggtgcagctaaaggagcctgcaaatgcccatcctcagtttcttttagtaagcgactggcaattcggatcagcatgcagtaagcaaactgtgacttgagaccagatttagtaaacttattca

SEQ ID NO: 339234 - DNA, 1000 bp, Homo Sapiens; identical to SEQ ID NO: 158989

SEQ ID NO: 339235 - DNA, 1000 bp, Homo Sapiens
tttttttttttttttttttttttttggtgggaaaagccactttattaaagattctctatcacagtcccccatttctggaccagtcagattggctttgggttgaagtttctgattgtctttccttccagtttctctctttgtccatggctttctgagattcagtgtcctcgatggcatctggggaaaggtaggtgaccttggggtcctggaccaatgcagggtgagctggcagctggcagagggccaaggagtggccagccccacagcccacaaggagtcctgacgatgacagcagagcctgcaccggctttggggcccagacgttggcttcagtgccatctccgcacatgccatgctcattccagccccaagagtaacacactccaccaattattgccaaattatgctctgagccacaagagacctcagttgctccagttaagcaatgcggagacgaaggcatgctgttcggtggtcttgaacaggggagaaatgaatcttgcttttctagtttccagccttcataagtctccaacttcctccctagctgaccatagtctgctcggccccaggtaaacatcttgccagtttctgtctgagcaaccaggtgtgtccatccactccagatggcagtgaccttttcattctggaaacaatgtgcttctattttctggggcacaggaaggaaagcagcctcattagccagttgcccatgcttgttgcttccccaaacatacacctctcctgcatctgttaatgaagctgagtggtctgagccagcaagaacacacattgctttagaattctctagacctgtcactctgcttggttcctttgctgtgaaaaacaatggaagagtctgcccagggcacaaccgtcgtccacatgatgccaaaccagtcccccactggaacacgatgccactcgctgtagcagctactgcatgcctcagtccagcagcaatacaaacaaccttctctttatggagctcaatggcctg

SEQ ID NO: 339236 - DNA, 1000 bp, Homo Sapiens; identical to SEQ ID NO: 158992

SEQ ID NO: 339237 - DNA, 1000 bp, Homo Sapiens
cctaagacagtcatcacctgggtgggccgagaggcatccagagtttaggaagtgcttttattgcagactgcaccttggctaatactatcctctatgtactggctgcctgtgtcactcctgctgaggactgtggaggggatgcgagagggacgcctctctgggttctcctgagagaagcagcagatcatcttcttcatggtgccatacatgtcctcgtccttgtaggagtagatgatggggttcacgacggagttgagcagcgccagcagcaggaaccaccttttcacatgctgcacgccacactgcctgcagttcaggccgtcgaggagcagaaccaccaggcccggggtccagcataccacaaacgcccctaagacagtcatcaccgtcttcattagcttcatgggtgtcctccggcggctgatggacccacttgtatgcggagacaagacgttggttttcctcttgacgtacacgtagatccgcaggtacaccacaaccatgatgaggaaggccatgaggttggacactgtccagaaaacaaggtaactcctgctgtaaatgggggccagggaagagcaggcagagatgttgcagaggcaattccagcccagtgtggggaccgcccccataaaaatggcgatggcccagacaagcaaaatgagcagtgtcaccctctttttggtcaggttgctatggacccgcatcctcatgattgacatgtgcctctccacggcgataaccagcaagttggtgagggaagcagtcaagctactgtccagaagcccctgacggagaaaccagcggttgacagtcaaagtttttgaaactgggcctgtgttaaacatcaggaatacataggcaattccagcgaagaaatcggcagcagctaaattagccaacaggtagtagaaggggaaatgaaattttctgtttttgatcactgccgcgatgaccagagaattagaaaaaaaaataaacaggcagaaaaacgtcccaa

SEQ ID NO: 339238 - DNA, 1000 bp, Homo Sapiens
aagaaaccttcactctcaacaaacaacacaatccactaattatctgtagaattgttgtagttggtactcttcacattcacttactccttagcaaagattgctcttgaatggaaaggttgcagaaagagccaaagccaatttggaagaagtgagaaacttacaggtttgaggaatggtgaagtcagcgaaggatctagcctccttagatgatgaacaggcaaagtcagagaaggaaccacagtgagagaattggcagatgcccctaataaaatcacacaactcagacacacacacagacacacaaatattcatgcgttatacccattcaagtaactggatatttaattcattctatgcaatgaacagtcaaatgctgggaaggccccatagttctttggccttcttgtaaagcaacatatgtcttttctgcaggaatgtctgagttgcacagtcaagatcgttgctgttcattgttctttttctcagctctttcagtaactgttacttgacaacactaagttaaacctttacagaggtgaccaagccaggcagaaataaaaatggatttggttgcaccttcagaaagttattcatgtgtgctccaagatcactacctagaatggttctcattgtaattaggacaaatttttaattcttcttacttccagcctcatgaatatattacaaacactttgcaacctttgaatatgaattgctcacctctaccaggtatgacactgtggtaggtgctctattagttgatgaagagcactccttcttatggatacatgtcttcatttgcatattattgctggagaaagagaggtagaatagaggagcaagccaaggacatgagagagccaaaaagaaaagctgcaaaagggatgagaacattcaaatccattttcaaagtgtctacttattcctgtgcttcccagattgcatggctcaatggtaagtctccaggacccccagaacaattcctctattgaagaagaag

SEQ ID NO: 339239 - DNA, 1000 bp, Homo Sapiens
tttttttttttttttttttttttagtgtacgtgtctttatttctggatgatataaaagaaaaaacttaaaaaacaccccaaaccaaacaccaatggatccccaaagcgatgtgactccctcttcccacccggataaatagagacttctgtatgtcagtctaccctcccgcccccataaccccctctgctatagacatactctgggtatatattactctactcggcaatagacatctcccgaaaatagaattcctgccctgacacctgactcttccctggccgcatcagaccacccgccactgtagcacactggtgtccttgccccctgtggtcagggccatgctgtcatcccacaagaaggccacatttgtcacatggctgctgtgtccaccgtacttgtggctgagggctcgaggctgacagcaggggtagctaaacaggtgaactttgccaaagtcatcagctgaagccagcaacttcccatcatgagagcgggccacagcgttgatatcagtgccgtccgccccctcagaccagatcccaaacaccccaaaccctaggacacaagtagctgtggcccattccatgttcctcacagcatccgcactggtgatctgcttacaggtagccgggtcccagtacagaatctcatagtccccggagttggtgacaaagcagctgctgtcctgggcccaatccaggtgggtgataaaactggaatggcccgagcacttgcccaggcggctgaccttgcggccgccctggtccaccgtgtacacgtacaccaagttgtcgtgggagcccacggccaggtacgccccgtctggggagaagctgaccactgagatctgttcattgccgtctgtgtggatagccaccaggtcatgggtctccgtgtccagcagcagccatctgccagtcactgtacccacagccaggacagagccactggggtggaagccggctgagcgggcagggtcctcgatgatcctgctccaca

SEQ ID NO: 339240 - DNA, 1000 bp, Homo Sapiens
ttttttttttttttttttaaagcattgcaatggtttattcaattttatgagtctaaaaggtaccaacacttactgatctgagttttaagtgtgtaaaacttttgagtagctatggtgtaacctgatttttaagatttcaaaataagcttgaaaaaaaatcacatccattttacatgcatccattcattacttctaattgattatactacagataacttaagccttagttctttctctttaaggttccccccagttttacgagaggcatggacataattagcttttttcctttagtaaaaatgtgttatgtgctgtagcatacaccagagcttctactttccaatcaggcaacacagactccgagctgcttttgtttttggtccctggaggtgtatatgacaagttgacagaaacaaaaaggtgaagaccctgctccacccagtatagagtcctcttttctttggtgtctcatggaaacctattaacatgccttccacataagtctctatatataaaactatcaggcattatgaattaatttgcagtacagtcactttgataaagttgctatttatcttcaaagtggaaaagtcctgctaatcaaaatggaattgtgaattaaagtaggccactggcttaagtatcaggtagaaaatcaacagcttattttttctgctcagtttgtgctaacactgatggtctttttgaggaatgctgagtatgccaagggtagaactttcgtacctaggtaggtaccaatctcttaagagatccaggtttctggcatggtcctagctgcattgagaccacttgtcatgtgttaactgacacaaggctttgatttgattgtttcacagcagaataaaggtgaaaactatcaccagagtaactgcaatccatacagaagtcttttacctgtaaatgcctttcccaatggagaatcaacagattgggtgatggtggagtcggtcaggaagactcaggtcttctagaggaaagg

SEQ ID NO: 339241 - DNA, 1000 bp, Homo Sapiens
tttttttttttttttttttttgcattagtaactttttattctcaaagtgataaaagcatttaacatatactttacagtataaacaaattaagtactatgcattttgcttataaagtgacaaagtattttaagcattatataattcaatttgtacaaaaagtaaatttccaaatacaagctttggttagtagaactgattatgtactgtcaaatccatttttccaaagttgttcaaggaaaaacaacaacttgactagcacaggtaattcttgtacaatcagagctttttactatttagaaggaggggatatattactataattgctgttaattttcgaatctagataagccttttttcttctcatatgttgctgtaggagagcatatcatcacttttggaaagcaaaaattatgtagaaaatcaccttttgctttattcttaagaaggccatccgttttaaaagtagatctaagactgttagcttccttaactactgagacactttctaaaagtcacactactgaaaagagccgctttaagaattaatgtattccactggggttaaatcatttctgatttcctcaggagggtagtaatatctactagcactagtgcccagaatcaaagtttatatcatctaaaaaaactcaacattttatagactctacaatgcatggattacttttattcatatgaaagtaatataaaatgttacctaacttaaataatataaaatatcggtttaaccaaattaacaatcacaaaactgcagacatttttctattaaagttttccagttcactgagcaatatttactgaaaaatatgattatgaacttaaatatgtcctctttaaaatttgctgtttatgctagactgtacaatggtgctccctttatgatttttaaaaattttacttacataactatgtaattccaaaatagaaaagtgagtgagccatcactaaaatttactggaaactaatattctttcatggaaa

SEQ ID NO: 339242 - DNA, 1000 bp, Homo Sapiens
ttttttttttttttttttactatctggaatgtttaatcttaggatttacagcacagacctaggctcagctgctgaagctcagtgcacacagggtgctgggagagtcccacaggagtaggtggagcccggccttaggtctgagaggagggcaggcaagaggcagaggctctgctcctcccagcaccagaccctgcccgctgggggcctggcctcccacccagggcttggccagagagcaggagcctgtggcggcaacacgtaggtagcatttccaggggcctgtggcagcgacgtgtagctggaaagaggctactgccaggcggtgtggcaggatgttccctctgggctgccctggattggccccacccccagtcctagagggtctggcctcagagtgttagggtcaggtcagcccctcccacgaagcgggactggacacaggacacctggggcagctgggcttggaagcgtctgacggcggccatgttgatgccagggcacgtggccacatccaacacccggagctgcctgcacgcctgcccaatagcatccagtgtctgctctatgagctgactgcagctggacaggttgagatgctgcagccttggccaggagctggctgcctgggcccagcccttgtcactgagtcggctgcagtgactcagcgccaagtgctccaggctaggacagcccctggccacagcaaccaagccgttgtctgtgagttctggcaacaggctaagggacagctgcctcagctggagaaactggagcaccttggctaaactggcatcagtcagcttgctgcaggctgtgaggtccaactcctgcagggcccgcagcgtgagcagggaggggccctgtggctctggacaggcgtccttggtacctgaggcctgatgctccagctctgggcgtgacttcaatgaagagcagtgggccaggctgagggaggccagctgggatggagccccgtgcatacagcccagggcctgggcca

SEQ ID NO: 339243 - DNA, 1000 bp, Homo Sapiens
tttttttttttttatggtaaaaagctttaataacagacaatgtgatttcataggcaaccaattagcagattaatggatcatttaactttctttacttaaaaccaatactccactcaagaaagatgaacccaaaatgcatcctctaacactgaccaacataactaagtacaaatgaagtcaatggtgtaccccattagcatgctgcgttgtatgtcaataaaacaagccctcccccaccccgagccctggcccctggcaaaacatagataaatgattgtgcactgcgtgatgataccattaggtgagaactttggttcatgcagtcggctgccgcagaggttgcacccaaaacccgcagccccggcacccaaagtcagtcagcggtggtggctcatggtgtcagccgtgctccttccacaacaccaggtgaatactgtggtcaggcatgctggtggcaaagaccaagcccgtgtcattgtgcccatccagtccattcagccaggatgttcgcctgccaggaagcttgagcctctctttgatttcctgtactctggcagaggccagcgactaatcaggctctctgtccgcaagtccatgatgtacaggtagcggttgtcaaacagcagggcaaagatatctccaaagccaagcaaggccaagtttgctatctcaggagtcttgatgaccctgagaatatcataactggcaaagtcccactggtagagaccaagtgctgaactacagacaatgtatttgccatcaaaatgaagtcttggctgcaggcagatacttctatcctcagagacagacaatgtctttaagcacttacagttgatttctctcccaattggccaaatcttaatctcatatttgtctgcacttaagaggatgtagtctccaggactgtgcaagagagacttgactttgcacttctgcaaaactaccttggtgacccattccgtgtgcccggtgagtgtgttcaggcatgtcccagcagata

SEQ ID NO: 339244 - DNA, 1000 bp, Homo Sapiens
ttttttttttttttttgaaattcaaagcatttaatattagaacaactacggacatcataaagcagaaagcaagtccgacagtgttttgagaggcgatatgagatcttcaggtgtttcaccatccagctcccctggcagcatgctcgagtatcttctacctttaggggagccggggatggaggcgtccctgagagggactaaagaaggaaagtagaggatcaattggctaaaaactcagaacttgtttgtgaaagggtctggataaaggtaagggggcttaatttggatacatgttggcttataaaggagcatttatcctttccctgtcagtgtgattgattccaggatgtggaggtttgcagtagaaaacactgcctgaagttggcgtgcttgaagatgacagcttgagtccaaaaaattctcctttacaaaacccaggcgacttccacgaatggcaggtacgttagaaacaggctctgcggtgggaggggctacacttgggacatttttacactgggccagctgctggctgctctaattctgggtctaatgactttacactccgttatctttaattgctgcaaactaggaagggcgaatgcgcctgcaaaatgaactgggaacgcagactgaaggggctgctttttgaaaagaaaaatattttccccagtggtccagacgcattaagactatgagagagaaagggcggggcttgatgaaaaccttctaaagcgaggccaccagcgagcagtctgaccaccacatgacatgatgaaagtaaacaaaatcctgcatttgctacctacaggccatctccacttaggaagttatctggttgaaaggaagcagaaaaccctccggtccatctgcctgcaggtaggcagggtctgaaagaaagcgctctggacgggaaggtgacgcttcccagtcgcagctctatctgctccgttcccctgtgtagttggagatgaatatggaatggctgcgtatcttaagcaat

SEQ ID NO: 339245 - DNA, 1000 bp, Homo Sapiens
ttttttttttttttttgttttttccagaatttaatatttttaaaaagacagaaaatataaaaattaccaaaaaaatgtttaaaggttcattttggggctaaatactaggactgaaactcttttcttgtaattgatttatggtaaagagtaaaaataatataaaaaacacagcagttatagctgtccaaatgaaagcctatctgcaaaaaggcaggacaaggtgggctgactgagcaaatattcacatcacgaccttagtaataaatttcaaatggtttcagttcccaagatctgaaaagagaatcatcttgcacgcttagattccacttcttcaagaatccactcaatgccattcaaaaaaccagtcagagtttcagcctctgtatcctggaccagccatgggtgatttagaagattcagatgcagctcatgagccaaataaaaacagggcattctttttacatccccttgagaaatacaagataaaaccaacaatggtcttcccgaagacccaaaggctggatctgtcattgccataatatgagaaaattcatcttgccattcatgtcttttatgagcttcagcatttgcaacatagatgaacccatctacaacttcacacactttttgaatctgtggaatcacactgtaccggcttccttgttgatcatcaccttcattgtgtcgactgaacatcttgttaactgcacttgtatgctcttcccttgctctatctctttcctttctggtagttgaatataagattagaatgttgaatttatgttggttgttcaactgaaaattgactcctgatccaataccatcaatctgcctctgaggcaaaccagctgttgggcaaagttcctctgaagacatcaagctcaacaccaaagaggtattcaattcttccaaacctggtccaaacatagcaaatcgtggttcattctgaatgatcagggagtgtaaaaaagaagtgacagctccatacataggacggctg

SEQ ID NO: 339246 - DNA, 1000 bp, Homo Sapiens
ttttttttttttttttttaagcttacaattttattgagcaaaatttatttttatatgtacatacaagagacatattctttgacatataaaaaatacagaaatatttacatgtatacaaaaatattaaaacagatttcagaaataaggaaaacaagcaagtttttacaaaggatactttcttgggaaatacacacaatgaaaaaaagctttagaaaggtgacaacacatttaatagactccagaagttgatatttctgttggtatcaattgagtaagaggaacataaaatgtctgaaatgctaacagatggaaaaccagacatatttaagactgtctaggtaaaattgcatgggtttcctttaccataaaattgaatcaattttttttttaccctcagtatcactatctacttttccttttttcttaaaatatttaaattgtttgatttgtattgagaattttaaactttttctcattaaattgtaaaaatattttaagaggttgtctatcctctttatcttctggggggaaaaaaacctcaggatactacaccgatttcaacataaaattgaaaatcacaatacaattttttttaagttaaaacctaacattttctaactaacattcatgatcagtaacaattgatttaataagagatcacaatcttcgtaaattctttttgcttttctttgtaccaggcaggggacctattttacaactggctttgaggagcttgccatctgaacagtctttagtagtatgataattacagagacacttcgtacaataatcaaatccacagccttctcgtttgcaggttgcccgttgtaaatagcaatcatattttgcaggtgaattacagcgaatacaggctttgaggctttcgttctttttcaatgtcttggcaacctcagagaattcattgtgtcgactataagtagaacctttctgatcaccttgattggataacttggtttgagcatcttttttgagagaagtc

SEQ ID NO: 339247 - DNA, 1000 bp, Homo Sapiens; identical to SEQ ID NO: 158993

SEQ ID NO: 339248 - DNA, 1000 bp, Homo Sapiens
tttaccagagttctaataatattttattttattcctatgaatgtaaatcataaattttgatgttttaaaaatcctaaatggtttaaaggacttaccgagacttgattaacccagtttttaaaataaaaaatcaaattataaatttatattataaaaataactgccagttttgcatagtaatatagtaacaaatcaacactcttcaaagtttaaaggaaaaggaagctggtattggtttctgtctgaagtcagatctaacttttacgaagacaatagtttcagatcagaatcaaataaatttcagaactcagtttgagagaaaaggaaaaactttagttaaaatctttacaataaaataattatgactataaatctctttagttaaatatgtacacattacatggtatttgtataaagaatggaaatggataaagtttttcaggcaaatctaatgcacaaatacaccatcttttagagtataatgtcagtttatcattcgttaacagctgtgttagacagtggctctgctttgtgcaaaacgtgataaacaaaattaggaaaaattctgcaaaattatttagttccccaaggaaattactaaaatagaaaatggcaaaagaaaaaaaggttgcacactgaagcttgattgtatactcaggctacaatgaccagcactgatgtaacccccatatctgctaagtccttgggtagctttagtctgaagtaaaaactgaagtcctagcaattgtgctttttatgcagccacatggccaataaggtagatattgtcataaagatgccctacaaaatcttcactaatattttgagcagcgcgacgggtatttcgaataaattccctttttgacattttattcttcacatgagggctagtgaggtcaatggaaagtagaatcaaagagtagcacagtacatagacagcatcaggactaaggccaagttctcgcattaaatcagggttgcaagcacagaatctatgtga

SEQ ID NO: 339249 - DNA, 1000 bp, Homo Sapiens
tttttttttttttttttttttgaaactgcagggtgggatgctttatttcactgtggcggggagggaacctggacagggggcggcaggcggggtggggggctggcactcaggcggggactaggcaggggaagggctgcccccaggcctgttgaggagaaactgaggccagccctggcggagacctagcccagcggggtaaggagggtgggggaaaactgggtctgaaggaatgagggccccctccctctgggctttcctcctagagggcctcagtccctcctgctggctgggctgcacgacccccaatccttgctcccctaacccggaggagggggccagaccagggagggcagtggacagggagcctgggggagttggggagcgcagggcagggtccatggtgtgcagagggggtggcagccacctaggtggtcagttcctggcagcgatgaccacagagagtgccacaccccccaaggcaacagcagtcgccccaaacagccacttccatgggatggaccaggcacccttgccagggcacttagcaggcagccggctggggttgcccagcattttccggtacaaggcggtctccgtgctccgctgcgccgcatgcttcttcaccagctttgagagctctgcgtggatcgtcttgttggaaggttccagcttcagggctgccctcaggatggggatggcctcactgtactccccctgctgggccagcaccttgcccttgcggaagagagccttgatgttgtctggctggtgctccagcacaaggctgcaggagcgcagggctgcgcggtagtggtcgagcttcagctgcgaggccgccaggttgttcagacacttcaccttcaactgcaggagctgtgcctcctcctcgaacgtcatgtccactttggcgctggaggtgatagccttgatggcgaggtcgtaggagttggcggccaggacgaagtccgcccgctggtagtgggcgttgccgcactcccgc

SEQ ID NO: 339250 - DNA, 1000 bp, Homo Sapiens
tttgtttgttttttaattaaaaagaaaataagaaaacaaacaacacttcccaggtactcacaaaaacaaggagaaatcccaagagatcacacagagaccccctgtgagggtgggcccaaggcccctcccttgaggccattgttttctcagacaaacatccacctctcctgggctaaaaaaaaggaagcgcttatccaaccttgtttctcttggaagattcagccatctccagctcactggtccatgacatgcacacaggaaactgggctttacaagattttacagatgggcagtgctggggtgggaggatttaggggtacacaccactcctctcactgatccctggatctgctcaaggtttctggagggctggggagcaatgctgtctctccatggggatgcatcgcacatgtcagatgcattgttctgcagggccaccagggctgagtttcctgcactaaggccactggtgacttccttccttgagtggtagcaaaaggagtgtctgcaggtaagttggggcaagcagaataaggacttggaccaggacaagttgtgcctaggctggcactaaatgttggtggacagaaggcagtggagagatttcgctatatttgccatagcaagcttttcacactgaccttccttggctactcaaccaattctccatcctggcctccaatctctgaggatcacatagacctggatttgactcttagctctgccatttactagtttatataaccctggaaatgttacttaacctccttgagcctcagttcctcatctgttcaatggggtggtttgtgaaccttacggggtgactgtcaatagtaagtgtggccagtacagagcctagtacagcacctgccactgttagtgctgctctgcaggcaccagtatttctattgcaaagttggtgagtctgtgtgtgggcctatgtgtgataaacagaagccttaaccagtgttctagaaagagggtggattcctcggaggct

SEQ ID NO: 339251 - DNA, 1000 bp, Homo Sapiens
gacggtctctcttcagaagctttattctccctgggaggggcacacctcacccagccaagggctgcttctgactggacagagggcgtccaagatgcagacatggtgtgcaggcaggagggcttccactagccccccaggtgggaggtgctgtgcacccaggctcaagagggagggggccccagccacgagggaggggcagggactttcttctcacaaagacctttcttcagtattcgaaggtcactgtcttgacccgcaggtactcgttcagagccgcctctcctagatctttgccaaatccagactgtttgaatcctccgaagggagcggccacgtcggtcttgttgtacgtgttgacaaacacagtgcctgcctggagcttgtcactgacatacagggccttgttgatgtccctggtgaagacaccagaagccaggccaaattccgtggcattggcccgagacagcacggcatccaagtccccatcagcaaaccgagagatgatcatgacaggcccgaaggactcctccttggctatgaacatgtggtcttccacgtctgtgaaaacagttggctcaaagaagaaccctggccgagggacctgattcccgccgcagaccagtgtggccccttccttcacgccatgctggcagtactccatcagcttcacaaggtgggcatggtgattctgcggcccgtggtcggtgtccctgtccagcgggttgcccaccttcatcttccgcacctcttctaccactctccgcacgaactcatcatgaatggagtcctccacaaagagtcggcctgctgcaatgcaattctctcctttgttgaagaaaacagaactcatccccatctgcacagccttgttgaggtcacagtcagcaaagatgatgaggggtgacttcccgcccagttccagggacaccttcttcacgttacttatggcacagcttttcatgatgtgcttgcccacctctgtggagcctgtgaacccgat

SEQ ID NO: 339252 - DNA, 1000 bp, Homo Sapiens; identical to SEQ ID NO: 158994

SEQ ID NO: 339253 - DNA, 1000 bp, Homo Sapiens
tttttttttttttttttttaaaggtgctaaaatccattccatagctttgaagtgagaacttacagcccatctgaacagtgaggtttgtacccaggcatactctgaggagggcccaaaggcccagcccatctgggagggacaggcccggaggatggagacctcgcagcatgtgcaccctgcgcagacatttacagacacgcaactcagtctttctcacttggacaacctgttgtgcaaaaacactaggaatcttgaagtgagggagctctgtccacagctcccgtaatggcagggaggagagcagagcccaatgaaccttgagtgaaattaagtgctcgaataaccacataattaaattgtgcagatcagcagtcctagtctggaatttaaacactgtcaacggggcatattgggaaagatatttatatatatatatatacatacacacacacacacacacacacacacacacacacacacaaacacattaagcaaaataagatttgtccatgttataatccagtctcacagtcaagtcacccaccccagccttttgaagtcatttggcagctaatgctaaaaagtaacaggaactatgagagttgcatagaattgatcagaaacatgaataatgccaaacccaaaacctgcacgatacagtttaacagaaccaggtggcttcagatgcaactatgaaaccctcctatttaaaacaaagtgcttctccatgtctacctgggggaccttctgctggcattgaagcagaaaagaattatttgaatttctgatcccttgccccacccccactatatatatatatatatatatatatatatatatatatatatatatatatatatatatatatatgtatattaaaaaaaaaaggtttagaaaaaaaatcaacagactgaaggatcccctaactctgatcatgtaaactcagcctttaggctgggtgaggtgttgacgtacacggggaagaggcctgggaggtcac

SEQ ID NO: 339254 - DNA, 1000 bp, Homo Sapiens
tgagtggttaattacttgtttatttttaagtttataaagagttgacattacatttaaacaacaatttaattaggacaattttgaatgttgacatatcatcaaaaacatatgccatttctaaaaagtctagattcagagcaggatgccattttaggtgaactatgtcttcactaatgaaataggacgcagagagaaatactatgtttattaagaactttttgcttagagaagacaataaaacatatttaagaaaaatatataatacaaaaaataaaaaaggaaaaaacaatgccttctgtagtcttatttcactacagattgaactagggagataattttcttcttcacagacaaagatctttaagtttcttttctctgattatttgatcaaggaacaaactatattacaaacatggcacaaaatccaggctttcatttctagccaaccctcaaacaccaccaactacaaagaaaatttaaaagtctaatttgtaaccttcagataagtataaattagttttttccctaggctttcattatttggcttcttatacaatctatcttgtaaagtacattcctctaaatttacattatctaaaattaaggctaagcattatttaaatcaattaatcatacaatattttatgacaatatgcacatatttataaaataacttttccaaaagcagtaatacctcaaattaaaaaagaaatcttttattgctttgaactatctgctaaaataaaaacacacagaaagggaagaggtttaacaggtaggaagaacatagaaaacccttaaaagttttaaagtagtccagttcacttcttccaaacaaaagaattcacagtgtctcttcaggtttaaaattctaagcattcaaattgccatagtgccctgcaaaaaatcgtcatatatgaaattcgcagacccttgttgcaagtggtctcttttcctaaagaaatctgtcaatgctcgaagcttcacacagcaagcaaca

SEQ ID NO: 339255 - DNA, 1000 bp, Homo Sapiens; identical to SEQ ID NO: 158995

SEQ ID NO: 339256 - DNA, 1000 bp, Homo Sapiens
tttttttttttttttccaggttgagattctttattctggaggtaggaagggggtcagcatgctcaggtgggaagggtccagcccagctcctccagccccccagtgcatgcccagccccaataagttacccagttactcagctgccctccctcctgggtccatctgtccttctgttccaccctagacagggccaacctgactcaacacaagggctgcttgtccccagcctgtgggcagtgccacacggcaggctaggggaggggtgaagcagcaggaccatgccctgggcctggaggggcagaggggccacttctggctccaagggtcaggacttggaaaaccacatcctgggcaggcctggggcccagtcccacaaggtctgtgcctgaaaagaggtggtagttggggtggggccgccatcacacctcaattgctgggtctgagccccggccctgccgctgcagctgctcctcctgcttcatcttgggcttctctgtccgagtatgccacaccagtacccgagtgcagttggcagcccgtggctccaggtccttgggatccacaaggtggctcagaagactgctctccaggtggccccggggagcggtggaatcaaattgggcattgggcttatctaacagcaagggcagggccacggcaaatccagccatatccacagggaagggcctgctgggctcccatgctgtgtggaagcccactacccggccgtcctgtacctgagggccctcgaatcgcaggccgcccaccagccccacaggccacactgagacaccacgggtccagcgcatctcctcaaacagctcccggctgtaggtgttgtcatcgtcagcaaagtagacgactccttgggtccctggtggtggtgggtccttctccccacccacagcaccccctctgccccggagccagtccagggccttgttccgctgctcgacaccacggggatgaacccagccaggctcgccctcccgaagccgct

SEQ ID NO: 339257 - DNA, 1000 bp, Homo Sapiens
tttttttttttttttcttttttttttttttttttttttttttttaaatcctccatcttttaatgtgataactttccacaccctctccacgtagaggcacaaaggagcttgtctgggaagtttgtctggagtgtgcagaaaggtcaggctggactgcctgtcacatcctgagaccacactaaacctttataagccattgtctctgacctgtattgtagcctgtccttgagctctcgtgtcactcgcttggtgatccgtccacacatcaggccaatcaggaacaatatacagatgctcccactgatcacagagagaatgtagttcttagatggagacgtcattacttgcatggcaagatcagagaagccatctgctggggccacctttgctgcgtaactccacatctcaatccggtcattgaggcgctttttgcactcgggctgtaacctcacccgcttatcctccagtgcttccatgagacaggacatttgacgcccgcggccaggggtgatggctgcgcagtggtgtttaatgtccagggcacaagcagtatgaagtaccgggtcaacaaagatgtctgctttgctttccttcagcatgtttagcacttcctttttacacaattctgttttgatcttgagcaggttgaccttgaggcactcctccacctgacctgtctgctcttgggctgctgcttcttcagcacatagactggagatctcgtctgagcagtgcagctggagctgaggatccaggcggtagtccagggcggactcctggataatgattcggatctggtcttcacagtctgaagacaggcgctggtcagcatatctcagcttcaggcaagagatgacttgtccttctaattctgaatcatccttggccttagtcaggataccgtgacagaatttaggaatgtcagctttacaggcttttcttaacatggggtttaagcggtaatctgtgttctgggtgatctggcgcttggttatcatctg

SEQ ID NO: 339258 - DNA, 1000 bp, Homo Sapiens; identical to SEQ ID NO: 158996

SEQ ID NO: 339259 - DNA, 1000 bp, Homo Sapiens
atacaggatttatggggtctaaagagaacatacaattctaaagtgttcatgtttgagagaaaactctgcaatgatcagaaggattgagccagttttagcaaaacaaattaggactacattaatgatgaggttgactatacacagtttggagtgggagagttactctacccagtatcactgacatgttggaatgccagatgaaactgaaacagaaaaattgtcttggagtctaaaagacatctgatgtgctgatacctgttcagtcttctgcagtcatgggcgtaaactctcaaagagcaccactgggtcttagtccgtggcataaagactattctcaatgtagatattgtcttctgcttggacttccttttcaactgcattttgcaaagctttaatttgaaggctgctaaatgaaacacttagttgttgaacctcctttttgaagaaatactttttggcaatgatgacacccaaaagagcaagaagcaccaagacagaaatacagactccagcatagattcctttagtggtattggccgtcagtagactatgttctaggaacagttgagtttgattgttattccaaaggccatctgaagactctgtcacggtgtcattcccatctgttgtgtaagagtacaatggtgagctggtgggttctctccttattgctccctgcagtgtcgtagggtgggtttctgctggctgaggtgaagatggtgaagtggctactggttcatggttctgcctgggcaaaggcattggaggaacaaaggtagagaccgttgttgtcactggaacacttgttgttgttggaatgctcgttgtcgttggaacgctcgttgtcgttgaaacagtcattgtcgtcggaacagtcgttgtcgttggaatgctcattgttgttggaacagttgtcgttggaacagtcgttgtcgttggaacagtggtgctcgttcgaacagtcgtgacggttggaacagttgtgacaattggagtagtc

SEQ ID NO: 339260 - DNA, 1000 bp, Homo Sapiens
ttttttttttttttttttttttatctcccacattgacatttattaataacatttctggcaaaaacaagtaacaagttcaataactgaattcacatcaacaggtttcattttgatccattagccaatttggaaaaaagccatattgatcaaagggattaaaattaaaaagcaccttttccttgctacatatagattctttaaactaaaactccaagcagggatcagatacaaaacccaactgcaggattgtttttattgactatgacatggacttgttgcttacatttttttaaagtcatcatttatacagttatttaaactctattgggcagaaaactgaaaatacaattgtgagaattatactccatagtaaatacctatgtacttaatactgaattcttgtgtcactgagaaccttaaccctactctaagacatcttgcgataacctgcaactatcaattttttggagacatttttggtatttcggtcaagtgctgaaggggttttactccaaaatctagggctagaattcagcttccaacactctcatacccaggtaacacaattatgaatattcagaaatcaatacctcttagatcatcaatgtttcagagctatgcctgataaatgacatttgaaaaataataatatagaaataattagctgaatttatactcctgaagccacttcatctttaggctttatatttacagtgttgtccaggaggaactaaagaaaaaagttacactaattatttgtcaagctctattccagatgtctgcttaagacttgcagtttacgcagaggtgaaccattatcctctaaaattacaccacactacttcttgtagaactaatagtaaaatacatcaacccaaatcttatgaaggcagcacatctttaggagtaactagtatataaaaagtatcaacatcagtggtttgaatataaaaatttatttttaagtcaaagtatgcaacaaataaacctacagaaaaca

SEQ ID NO: 339261 - DNA, 1000 bp, Homo Sapiens; identical to SEQ ID NO: 158998

SEQ ID NO: 339262 - DNA, 1000 bp, Homo Sapiens
aatagtaaaataagtgaacctcaaaagtacccccttcataaaatgtatgtaacattagtttttctcaaatttaaagaatgtaacaatatgtacaactcttatgtattagtataataccaaaatagtacaagtcatattaacaggctgtcataattgaaaaatgtttgagtcaagttaaaatctgaggacagcttagtttcaaacaaatacaattattatgggagattcactttccaagtggaaatgacaatcgtcttatctacagtagacttcacaagaggtagtgttcaagtagaaataaaaaaaagatacatgcttaactatctttaattaacaaattcacaggaaaaaatgtgttggtttctcagatgatcagttggtggcttttttaatatgaatctcattaagaatggcccaaacagcagaattctgaataactgaaagtcgaaaggctgaaatgggattgagacttggatccaccattccttctgcaacaccattctcaaattttcctattctgaaatagccatcttctaatcgtttgtctttggtttctttgcttatttccaaaccttcactcttaaaaggcaaaacttccacagttgtgtttagcagaatatctccaggatgttcttggttgccgctatggaacaaataactttctacattgactggtttatcaaatttaaacaagatgtagtctccagctatcggtgtgatagcccagaagaaatcctctcccatgtaagttttctccagcgtatgcccttggtagaccttcaaggaagtagatacctccgcaggtgggtttacatggattttaagaagtaatggtttcatataatctttatccgtgagtttttggatttttcctgatagtgatgagtgcagaccaacatgttggaaaagggaaggtctgaagcgaattcgcagatttgctttctgtctatcacaatgttttgcatctttttcagggttgcagactttcacccagagaata

SEQ ID NO: 339263 - DNA, 1000 bp, Homo Sapiens; identical to SEQ ID NO: 158999

SEQ ID NO: 339264 - DNA, 1000 bp, Homo Sapiens
ttgagtgaatgaaacaatgaacacatgaagtctccatttattctgggatgggttagagtaagcctctgaggctgccatcaggctggctgagttgttgcccaacattgtatccagcagtctcaggcccgcgcagtgcacagccagcatggggctcacaggtgcagatggaatccagaagctcccaactatgctgcaaaggccaggcctaggggtccgggtacatgcagtgagtccttggggcagggccagccctgctgactacacaagcaaggttggtggtgagacaaggggtgtatgtttccctgccaggacagagggcaacacacaggtgggtggcgaccctcaaggctgacggcatccctgcccagagtgacgaccagggcctactagctctactaaattcagggtggcggaaatcctggatgtgccccttgtcatggctcaggggcctcctttcatcctagttcatgaagccccaacacttcctccctgggatcagtaccaatcccctgcaaggccctgcccctccctccaacttcatcccagtcaaccacacacgtccaatcgtgtagtctgttgcccttctttccttcctggggcatcctgagccctctgggatggcgtgtgcccagttccagctcacggacctccatggcccatccaccaagcaccccatcgtatcaacttgccatgtaagggtgtggaccccttccccgctcatggatgctcctggtggcctccactgaacatgtaggagaccgtccacccaaagcatattggtcaaggtgtctcatttcacaagccagctgttgcccagctcttgctgggcccgtttgtaggccctcctgcaggtcggctacctgcgtttggaaggcaactagcctggaaggccactgtcagtgctcaaggtgatagccacatattcctgaacccggtgtcgtcctgttgtagctgggatactgtctcaggccagcagcatgacggcatcatcagcactggt

SEQ ID NO: 339265 - DNA, 1000 bp, Homo Sapiens
ttttttttttttttttcgtgtttctcttctttattaatcagtcgagagatacaaagacttaataaaaagttacacagaaggttcaaacatcactgagatcttcaggcatcactcgtttcacgacaatggccacctgttaagactatgaaacagaagctgggcgctcacaggcgcacaataattcaagtatctttcattccaagtaaacccgacatggaatttcaaacacaatgggctgccaatggagggaacctgtctgtggctccagatttgctgtaacatgtctgaggggcctttgggttaaagttgccacgttagtgggtcatgtctcctggaaaagtgagacaggccccacgaggccagccaggcattttccacagcaagtgccatgagaaggaggtgggcaaagtcctaagagaaaccacccaggtgtcccgagtggcaaagtgcacaggtagtaagtggccattgtccccagccgtgggagtggagaggatggctaggattatctctggaaaaaaaagagcagccctctaaggagggtgtcaaacagtggaagaaatctgagagcacacaatggcaaaggcatggggtgagggcatttcaggaaggctgtgctccaggggatgtgagggtagcactattctccggaagaccaacgggaacatgaggatgtcaaacagccagaagtcccagttggctcctcggtcatggtgtggcgtggccaaccaggtttcccagtctgaccctgctagatgataatggaggagaagatggagggatgtcacggggcacactctacactctactctggcctatctggaagctacctcagtcatgatgacccacttctacaaatggggcattatttacccatttcatttatggggaaatgagttcatgggagatgaaagcttaccagaggctcaacagcagaggatacagaagaccaacccttaactagtctctctcaggcaccatggagttcaacgtgggccaa

SEQ ID NO: 339266 - DNA, 1000 bp, Homo Sapiens
ttttttttttttttttaactacaaaaataagcactttactaacaacaggattctcagggaatgggggctttcagaggtgtcactgggctgcactgttgaggctgtgtgcatcagtggagatgtgagaccgaaagaaattatccaggacttgctggcccatgcggggctttttccgactgcacggagaggacacctgggaccttttggaacccatacaggtccctggctgttggccctgatacacacggaaaacctttttcatggcggtggaaacagctgcggtgtgaaattcctcctgcgtcagccagcgagcacctggtggtacggtggtcactggggtctgcccttccaaggccagcccatatacttgatatgtcagcttgatgtgagagaaggtgtggacaacctccccaaggtgccggaggtgcgtggctgggaggggcccagcccaacgctgtagttcctgcagcagggccttgcgctgaagctgctctgagggctcccaggtcacggacgggaactcccacagtcctgccagcagacctgagttgggcctctgcaccagcagaatttgggccccaagggccccaggctgttccagaacacaggtggcagagctctcctccctggggggcttgcggctggcctttctggggaagttgaccactcccagggtctggtcccagggctccgagggaggcaggcacaggtggcactgtccagtgttgggagcacactcctccacgtcaggactgcccgacaggctccctgaggctaagagctgttcctgctccactctctggcgtgcccggcacaggctctccacagggcactggctgcacagtgggcgctgtggggtacacactgtggcccctagctccatggctgcttggttgaaatctcctggccgggctgggtccaccagctgctgggctagaccccagagctgctgggaaacaagggtgctgctgggatcagcaccaatggctcggacacggca

SEQ ID NO: 339267 - DNA, 1000 bp, Homo Sapiens
caattaatgtttctggtttataaaagataagtgaaattcagttacacagagaacatataatgtttggattgtaaaacctttctgagagatgatacattgacacataacatatgaaaatagcttgagatacaaaaatacagttgtgattcaggaaatggcaccaaattagaacaattttattatttaacataataccaatgtatatacattatcctcccaaataagaaacaatttgattccaaagtttaaaatgtagtttccaaaatgaacccttgtaaatttgaagaaaaagaaagaaagccctgcaagttacacaaattttgatccatgactaaaataggcaccctgtaccaatcacctttctcatacaaaaatgtatattataaataaaactttcaaaaaagatcttggatgttttattgcacatcatacagaatgttttactgctatctgaatggcttttagccctttactttgttaggtgtttaaaatatctactcaaatttgggtgaaaacaatattctggagatattatcatttcgaggatcatatatggtatttaccagaaacagaaacatataatcttactggactgcttctgtcactttttctaaaataagaatgacttctattttctactgttacaagtaattaccagagttttaaacaaattaaaagtcctgttcaaatgtcagttttctttttttcaaacagaaaccacatgtagagggatttaacctggtcattcatttctgccccctcttaggaccagcccttcttgaagcctatattgttaaatatcatactacagggttcctaataatgctgtccatcattaacagttattgttttggtctcaccatttctaaaccttcttagatgtcgttaaaccagcacaaaccagccagaatgcaatggtctcaaaaacaaaaaggttcctaataagttttcataccatctagcacagtgcctagcatagagtaggcatggaataaatatc

SEQ ID NO: 339268 - DNA, 1000 bp, Homo Sapiens
gtagataataaaaatttaatagcaatatcataaaataaacacacatattaaaaaatcaagtatttagtttcggatattagaaataatatacataataaattcaacatactgatagtgctgcaagataagattttatttttcaaattacatattatgccaaccagcctgctttggactcagaggttcaaaaactttgcttttattacgaagaacatctggactgtagacacctctaacgaaaccaggttatacttggcatattgtgattgaagctgtgtgatcaacatcttaatgacctaactaaatcctctcataacagaaagaagttcaacaggcaaacatttccctccctaggatcctagttaccaaaactgtcacagtgtcaaaataaaaataattatttcctcctttttaacatcttattgtccttgaagcttatgtatggaggaagttaaaaaccaaaagagcaactttaagctatatgctaagtcagtgttaaatccacagactaatttttcgatatagtattcctggttctggtccttaaagagaaataaaggcattaaaccaactttttatatgtcaagaaatataattttgctattctttcataatcaaatctttcaatgatttctaagactgtttctacagcctgtgtgctagttcaggagacacactgattgtaaaaggacttgagaatataaactttaaggctaaaaatttcatcttcaaaatgtatagatgtaaacagagcccttgacaaggtgatttaatgtagaactgctggccagaatgaaaacaagtactagacagaaaaaagatcatgcttaaagactccattgaaaaaccacagacaggtccttcatgacataggtaattccttcaacctaaagacatttgctgaaactcaaagttaccctattgcatagtaaatcttcaaaaccattaagtcaggttctgggtcaatgtttcctatgctttggttggatgatttaataaa

SEQ ID NO: 339269 - DNA, 1000 bp, Homo Sapiens; identical to SEQ ID NO: 159000

SEQ ID NO: 339270 - DNA, 1000 bp, Homo Sapiens
tttttttttttttttttttagaaatattacactttattgaattctggagcagctaatctaccctcccctattgaccaatgacaagaatggaagaaaatatacaatggttaaagaaagagtctataaccactgtttgtttaaaatgttgaaacaactttcactgtactggtgaaacagttttaataccctaacatacacagtaatgattcattcttgtttaaaacaagaggtgatttcgacttgggattgggatttttattttttgagatggagttttgttcttgttgcccaggctggagtgcaatggcacaatcctggctcactgcaacctccgcctcctgggttcaagcaattctcctgcctcagcctcctgagtagatgatgggattacaggcatgcaccaccacgcccaggtaattttgtatttttagtagagatggggtttctccatgttggtaaggctggtctcgaactcccgacctcaggtgatccgcctgtctcggcctcccaaagtgctgggattacaggcgtgagccgccgtgcctggccttgacttgagattctgaagtgaatttattcacactgattgtgccctctactttagtaaggttctggcttacagagccctcttcccatcctctgatgttcaattttaatatacagcaatcaactcttagaggacaaagaaatctggaattgggtagcatgagccacagctatatagcccacactaatgcatgttctgtagtataagaaggcagttcttccctttcttttctgggggcttgttcctttgtccacttgcagctaaattctttctatagatttatcacagataagaaggaggttgtttttggataacaaataagcatttgtgctattaaacaaacaaaaggtaataaggatactgtcttttccctcaaaatagaatcctgccctaaagcaacgcaagtagagcatacttctgtgcaaagccagtgatagagaagcagccttgcca

SEQ ID NO: 339271 - DNA, 1000 bp, Homo Sapiens
ttttttttttttttttggaaaagcaggtttattggtcgggctgctcaccaggacacagcaacgtgagaggttccccaagcccacagaaaactgcatctgcccacagctcaggccccttcaggccatcagcaccaagggaccttgtcccacaatccccaacctccctcggcagaggggtcttcagccattcagaggagagaagagaaccgagaaagggaaaaggaagaaaaaaaaaaaaaaaagcaaagctttgtattgtataaaaggtttgtgtccccaggctccctcccccaatcccttaaaacaatgaactgcagttctaaaaagcagggcagagaaggtaaggagcaggtggggggaaggaggaagctctcggggcctcccttcaggctgtgactggggagaggggctgttcttgcttctgacaaaccccctttaatggggaggaacaaggggactcgtgtcttgagaacctggtcgtgtcttgagaacccagtccgaacagaatcaggcctctggactgggagcaacactcccttcacccccaaagattcaggaaaagcaccccaaggacaaggaaaccaatgaggtctgggctagctctgcagctttaggatactagctctagggaaggattttttcctttttaaacagcgtctcactctgttgcctaggatggagcacagaggcaccctcatagctcactgcagcctcaaactcctgggctctggcgatcctcccgcctcagcctcccaagtagctgagaccacaggcacgtgccaccatgctcctagggaaggagcttgagaagaaactgccaggagtgaaccagggctggctgctctgtgatgttctctccccacctcccctccagctctcaacttggtggcagggccggcaccctgctctccctcctaactcccagcctgctgctgcccccttctgggaccctaattttctggactttgagaaatgggctgcccctgggggtgcctccaag

SEQ ID NO: 339272 - DNA, 1000 bp, Homo Sapiens; identical to SEQ ID NO: 159001

SEQ ID NO: 339273 - DNA, 1000 bp, Homo Sapiens; identical to SEQ ID NO: 159003

SEQ ID NO: 339274 - DNA, 1000 bp, Homo Sapiens
ttttttttttttttttttttaacagaaaaaagtcaaatgacaattttaatagactttaaaacagtgtacaagtaaaaaacactggttttgtatttcaaaagttgaaggaagatatccagtcattaaacagtctacaaaacatatgccagtaaattacataaaagactatgtacaatataaaaagagctgaaaacagtcttcactgtaaaaataatttaaaacaaacttttcaatttaaaatatcatctatagcacacaaacatcatgcaaatggaaaactaaatatactgcattctttagtgtagccaaataaattcagattgagacatcttataagtagggaaatggccattcaatacgatttttttctctggcagtaatggtcctagctgggtgttttatgcataaagaacagctatatttcaaaccctttttattgtaataaatactaaagcaacagaggaatactttattaatttaggagtgatgttcaaaaatggtctgaaaaataaatgcttactgtgcaatttcataaagtatgaacttcttgaaagactagaagcttttgcagctgagaaagttgatctctagttttaaggcaggctaagcttttaaataaagataaattataagaactagtttcattcattaactattctgctattacaagttacatcatcatgttcatctccataatactagggctagcagtttggtatttaacaccaaatcctcccaatgggagacatgtactttctggctgaattacaattaacatcttattactttggaactgtataatcaggggcctgttgctctcctcattaatggaaaacagcagtccaaaatattacactctccccagtagaagtaccattattatagattcagaaaggctttgcatattcacattttggcagtttaatacttgtggaaaagatcaatgcaagctctaccacagtgataggtatttaaacaacaatggcaaatatttcaaaac

SEQ ID NO: 339275 - DNA, 1000 bp, Homo Sapiens
gaccatagattgagatttataccacataccacacatagccacagaaacatcatcttgaaataaagaagagttttggacaaaaatgtatgtgtaaattatcaaataaaggggccaggcacagtggctcatgcctgtaatcccagcactttgggaggccgaggtgggtggatcacttgaagccaggagttcgagaccagcctggccaacatagcaaaaccttgtctctattacaaatatgcccatgtgctaggtgtggtgggacacacctgtaatcccagctacccaggagaatcgcttaaacccgggaggcggaagttgcagtgagctgagatcataacaccgcactccaccctgagtgacagggcaagactcaaaaaataaaaaaggaacattaactagggttagaaactaacttcattctttttagaattcaacagttttcctaggtcaccaattccaccttttgttcttattaaggcgcaaagtcacaggacccccttcctgggagtcactgtcattaaatctattgccgtcagctcagcccagggtaggcaaggttcaagaatgggaagtgcttttgtctggggaaacacgcaggtaatgtgatgctaggaaggaggatgtgcaggtgggtgagagcccaggagggagcagctggtgcctgacagggtgagccatcagggctgggcctgggtacagccccaggagaaggagcctgtgcagaagtagcagttcagtggattccacctcctatgtcacaatccagcaggtggccaggactcagcctgggttttaagtgagtaatgccttccctgtctcagagattagctctaacagtgtcactagaggaagccctggcgagggtgggggggcgtagtgtggggacaaggaggccagatagaaagtgctggaatgttctggaacagatctgtttctggaggagaggctgagtatggagagtcaacagaatgtgaccaccttcagagggaggagctgggcc

SEQ ID NO: 339276 - DNA, 1000 bp, Homo Sapiens
ttttaaagctgaacaattttttatttaaaaaaaatgagttttaattaagaatatccacacattaagatacctagaaccttctatactttgtcagtgcaccctactctgttgaatgggaactggaatctgtcatttgagaaggcatttacatttagcagcaagattcaagtgaaagtccctgttccaggttctggaatatcaggctgtggtcagcatgggtctatcaaaggcagcaactctccacaacgagaattcagtttcagacacgccaagtcatccgaccgtgtgggcccaatgttcagtattgcaatcgggagcttcttctcccaggcagtgaggataaacctgtaaccagagtatacctgcaaggatgatcccaccaccaagagggagtcggcttcttttacacgcttgtgcacaaaatcaaccttgtcagggttcactgtgtccccgaagaaaacgacatctggtttcagatggcctccacattgaacgcaggttgggacctgaaagctccggacttgctcctctgagagaaagacgtcaccatcaggagccaggccatgggcctcagcactccaggtggggttcaggacttggaaacgctcttgcagcaccccccggggagtctgttccccacaatccaagcacaggaccctgtccatgcatccgtggagctctgtcaggcgccgactccccgccttggtgtgcaaagcatccacattttgggtcaccaaccagtacagctttccgagtttctcccaggtgctcaaagcccagtgtgcagggttaggctggtgggaggagaattgaggccagcctacgaagtttctcgcccagtaccgctggcggattggggcactccggacaaaatcaccatgctggatgggcctgcggtcagtgcgggcataaagccccactttttctgacctgtagtctggtatccccgattcggtggagattcctgccccagtcatcacaaggagtctcttggaaaggg

SEQ ID NO: 339277 - DNA, 1000 bp, Homo Sapiens
ttttttttttttttttttactgtagagtgtgattttattttccactaaaacttgtgcaaaaatcagaatagtagggtttttaccccttgacttctactttgcccagataacaaaaatataatcagaataactattttttttagacaatctaatttacaaaatttttccctcccaataaccaaccatacacatcaaagatacctcacgtttcagttcaaaccaaataatatgaattaactttccagttctgtgacttttgaatgtgggtgctctttgctacttctaaacccccatcacttatcaacaggttggattccagcgagggaatcagaggctatttttagattgttcagtactcagctcaccacccataagaccatttctcctctgcgtgtggcctagttcttagatatactgtaatttctttcttccccaggacacttaagaaacagtttcattttcatgacaggcaagggcttcaggaagagtcgttccacagggtccctggaaatgaaacctgaatctgttcgtagctggggtggtctccgtgttaaattcagccactggcacgcccctggcagccacctggggggcaaacatggctgctgggtacaccacagaggaagtgcccaccactagacataaatcacagtgggcgagctctctgtcaacctcctccagaatggcaggatccaggttttctccaaaccacacgacgtgaggtcgcagcaagcccccgcagcctgcctcttcacaccggggaagtttctcaactgggatgctggcatcttgagttccaggttctggagcaccttttcctgataaagctggacaaattggactcttgtaattctcagccacaactccacaagaggtacatcgagttttaaataagctaccatggatctccagaaggttcttggtgccagccttgcggtgcagctcatcgatgttctgggtgatgaccacgactcgccggccctgcttgcccagccgggtc

SEQ ID NO: 339278 - DNA, 1000 bp, Homo Sapiens
gagtaaaatgttcatttaataactttctaactgtatacagtatatgcttgatagttcaaaattctccaaatgtagatattatacaataattattttaaattattaaatgagtatttaatccttttaaattacattttgaaaatttaatggcaattacacacaaattttaatttaaaataatattaaggacttaatctgatttacagaaatgaaatgcaatgaagagattaagggctaacctccattactataaaattctctggctaccatctagcacaggagcaactggattgctttcagcagtcttgaagcactaaaatatcttaaaattcatatggagaaatagtatgtatctctacattaaatttagatttgatatttattctctgacagatcagacccagaatattaatttttatgtaattgaaccaaaaacatttagcaatccttcatttagtaatcttttgtataaatataaaaatctctgataagtgaaatgttttttcaaattatacttctatttttcacagctttataggtaattataattttcaaactttaaatatttcatgtgatttgatatatctgtacagaaagagtaagataaaaacatttaataagattaaatctaatttgcaaaaattggtatctgacatttgttgtgtgctcttgcaaagagtgcataggacatttctgcagcaatcaaaaaggtaaaatctttttaaactcagatttcaagtttcctctaatattccttctaatcctaatccctggaaatactttcaagttttgatttctagatgcaatgtgttttgttacatatacacatgtcttatccttaaacttttaaaaaacagtatgatcagattcagcatgatgatatcttctcagactctgtagaagtcctctgtgcaagattaatgtcgagattcctagtgccccatcgtgaaaaaccagttaaagatagtatacaactatgctttagtgggatttcctgcag

SEQ ID NO: 339279 - DNA, 1000 bp, Homo Sapiens
tttttttttttttttttttttttcatttccattttaaattttattacatcaaaagaaaaaaacctctccacaaaacaaatctctaaaacctacaccaaacgaaagaaattatcattaaggttctaactccatcccccaaaacaaccttacattaaaaaaaatccaaaagaaatagaaataccagcttcaaaaatatttatccaaaaagtaaggcatcaactttacaaaaaaataattgaaggaggggaggaagttggaggaatgagaaaagagggaataagaagatggtcccctgaccctccaggggccaaccccagcctgccgggcatctactctgaaggggtcacaactcagaccaaacttggcatctcaccaactatggggtgggcaagctgggcggggaagctgggagacaccatccaggccaggaagggctcctgtgtattccagtttaagcagacagaattcggggtgggggagagaatcccgatttgtgataaaaggatcctaagtccttagtgcagcaggagtggctgggaaggttgcagggcccacagcaaactccatagccttcctttgaagcccagggaaaggtcagaggctgccagccacagaggagggccttttttgaggatctccagagtgggcgccctgctgccactaccctttcaccctgccccaagacagcatgacactgagacctgcgaggagtgggggattattggagttggggatggatgggaaaggaactgggcttcagccaatgctctcctcagtctcccagggtatggaatgggcacctctagggagggggaaagcacccttcctcccagggaaggcatttaatatcagatccgtcctgagggttagaaataggggagtatttttaggccaagttcttggatgggaggtgacttaaggctgatctggctctgatctcaggcctgaagggcttggggatccttcgtacctggtcccaagccaaggcccagagaggaga

SEQ ID NO: 339280 - DNA, 1000 bp, Homo Sapiens
tttttttttttttttataagcagtttttaatccataaatacaacaggcatttggtattttggccatcagaaaacaaaagttgtagtatcagtaaaggtctgagatggttcacttttgtagattcaattcagtgtatttaaggttaacaaaggctgacattgaaatgtttaaagataggcaaaaattcacattaaaaaaaaccctatatttctatttagagtaacagtaggcagtatgattccaaaagttaaaaattatttcacaacctgtagcttcagcttggcaaacagcttagattccaaaactgattcatctctattaaaatgtaagcacttaaaaaaagagcatgtctgtgtatatagacatatattttaaaggaatcagataatctttgaagcagccttagtgtttcctttaaatttgtctggaaatgaccattgtattagcttcacagaaaggactagccagcttcttggtctaaggctaacatggtgatcatttgtctaaggctagaaaggtaccaacaagatgtaaactgaggagagaaagagaagatgagggcttttcctggccgttggtagctaaaactgaagggattctagaaaatgacacaatggcagcctttcttgtctttttctttccgtgttggttctggtgaaggaggacattcctgctcttgaaatttcctgataacccggacaagttcatggaaagcttgatctacattcatcctaatctttgctgatgcctccatgtatgttaccttaagctgccgtgctaactgttgtccttcttcctgtgttacctgtctttgatgatccagatctgctttattaccaattaaaatcattgggaactcatcacgatcctttactctgagaatctgtctttgaaacttatagatttcttcaaaactgcctctatctgtgactgaaaagaccaacaggaagccttcgccagtcctcatatactgttctctcatggctccaaactcttcttg

SEQ ID NO: 339281 - DNA, 1000 bp, Homo Sapiens
ttttttttttttttttggttttgaaatgctttattaacattgacttgaacagtacagtgtggaggctctcatcacaagcagcacaggacatcctaacaagctttcgctgctgcctgacagcctctcaaacgtggagggagatgaaggcaaacagcgaagggaattccagggcagctgcaggtgggatggcagcacacagaatcccaaggtgggaacagcagtaggcgtcatggtgttatcgtgctgtggaaactaggctactggaatctatacttcaatccacattttctttactcatgaaggaaatacattgaaaaaactattacctctaccagttattcacgaaggaaacacttcggaagaattgattacctctaccacttatctatagtcttatcagaaaacttactatcaggtggttgttttgttacctatttttttcacttaaaagttgtgtaactccccttaatgatccaaaaattagagcggtacttgcatatgcagtgacagtttaaagggtaagtagttagcttgaatttccgaactagggatgaatgaaggtgttagctggctttgcttttaagaaacaaaatgtgacagtagagatttaaatgatggttttggaacaaacataaacacagggtaaagaggccaaaagaccaaagctaacagctattttagttcagcaacatgcatttcacggccactatgatatgtctggcactaattccatacatatccagcaattcctcggacttcccactctggggcactcccgacactgccagcgaatgaacctgaatgtcaggatccatggagacggctgcgcagacagcttccccgatgccaccttgcgggtagtgatcctccactgtaatgatccggccctctgtggcttttgcactggagacgatggtggcgacatccagaggtttaatggtaaacaggtcgatgacacggataaaaatatcttgtttcgaaagctcatcagcagctgcta

SEQ ID NO: 339282 - DNA, 1000 bp, Homo Sapiens; identical to SEQ ID NO: 159008

SEQ ID NO: 339283 - DNA, 1000 bp, Homo Sapiens; identical to SEQ ID NO: 159009

SEQ ID NO: 339284 - DNA, 1000 bp, Homo Sapiens
ttttttttttttttttttttttttttttttttcttttgctagtagcaagttttattctaagcaaccgcaaatcatccaaggggatgttcacatatgaccccagagcccactcccatccccccagacagcagcggggcacacattcaacactcctgagacaagccatctgtgtgctttttctgtaccctctctggaataggcaatcccagaatgcatttggaaactgtaatccgaaccacctcaagtaaggattggtgtaataggaacaaactcaaataaccactggtacaaggtgaacaaccttaagtaacaaagtagttttctactctgggaggctgcagaacatagccaggaggaggtgggaagaggagaggggtatgccgagacaccgcaagtcccagaccacagccataccatcagcaacttcactggaatctttcttctcaacagggctgcagggtctacccctccgactcttttcctcttggtccttttgagacaatttgagagcaccaggcactgcacgagggaacctagcaccgtgtcccctgctctccggcctaagtaagcatcagtgggctaaaagagccccattaacaactccctcctagagggtaggtccagtccccaagttaggaacaacttctacaactcttaaaatgtaaaaaacaagtgttgggctgtattctttaaaaaatcaactaaaatctaattccaaaaaaggttcttcagagcagggctaagcagttcatttaaattatttcttctacttattattaaacaaagagattataaaacaagaaaaaatggagggttatacttcccagaactcttccaggcagctgctcacccctatggcccgactcaaccccgtgggaagacatgaaatgccgggacgagccctggaaccagccaccagtccctgtggggtcagaacgccaaccccagcccacaagcattggcatgaatgagaaaaccagagacctgaaggtgccaagaa

SEQ ID NO: 339285 - DNA, 1000 bp, Homo Sapiens; identical to SEQ ID NO: 159010

SEQ ID NO: 339286 - DNA, 1000 bp, Homo Sapiens; identical to SEQ ID NO: 159011

SEQ ID NO: 339287 - DNA, 1000 bp, Homo Sapiens; identical to SEQ ID NO: 159012

SEQ ID NO: 339288 - DNA, 1000 bp, Homo Sapiens
ttttttttttactgtaaaatgtcattttaaatgtttattttattttgcacaattttaacagtagagtaattttgctgtggaaaataaaatttcatcttgcaagaaagagaaaactcaagaccaccaactggcgtctttatttacatattagagcgggtcagccaatgaaaatcctgggccttccgtgtggcttgtggctcaatcatgatgttgataagagaaggtttagttgtgtctgctaggctctgctccagggatttttggagttcttctggtgtttgtacaaaataccctttgcctccaaatgcagtcatgacttgctcataatgtgaatttggcagcaaacacattggagggaccactgcagtagcatcttgaaattttaacatttctttccaagtatctgtatcaaaaccttggtaaattccattgttattcactaccaacagtatgattggcaagttgtacctgcagatggtttctacctccatgccagaaaacccaaatgcactgtctccttccacacagatgatccaatgcccagggcttctatctttagccaccacggcagctgcaatagcaaatcccaaaccaactcccattgttccgaaagtaccagcatcaagcctgtgacgaggaaggtagttctgaagcacagtccgtccaatgtccatagtatttgctccttcacttaccacgaaacagtctctaggtagttgttcttgaacatggtagaatactgtgtaataattcataggcagggattttttagaagctagttccttggatgcagcttcattgctcttcattttttctctcagagttttccaccacttgctctctggaggatactgccatggtgttttatcaagttcctctaaaagctgcttagtgacagcatgtatgtttcctagcaaagtaacagcgggctttacattattccccaattcttctgcacagatatcaacctggataaacttcacatctggctgatatcttg

SEQ ID NO: 339289 - DNA, 1000 bp, Homo Sapiens; identical to SEQ ID NO: 159013

SEQ ID NO: 339290 - DNA, 1000 bp, Homo Sapiens; identical to SEQ ID NO: 159014

SEQ ID NO: 339291 - DNA, 1000 bp, Homo Sapiens
ttttttttttttttttttttccatatttttaaaatactttattttttacataatactgtcattacaaaaaaatacaaaaaaactactataaaaacattcgggggttgtcaaagtgagaaaacctaaagaccccaccccaggatctggctgaagcagtcttcccccagcttcttcactatgacctttatacaactatgggggtggggtgggatcacacaggcataaaagggctggaaattccccacacagcctccaagggtaagaaatgagtagcttcacatatcacaaaagtgggatttggaagtttgggggtggctaggccctgagttcagaggtgtggggaaaaacctgtgaccctgaatctcttggtggggaatagctgccacctgaccccaaagccctttcccttcctgatgaaggctggtagatgggccctgtcccccacctcttagccttaatacctcaggccccattccctgccctccacccttgaacactcctgagagcagcagggaggacagaacctccagctctgcaggtgtaggcagggcagctgttacggaggctgctgaggagctcacccccctgctccagatgaaaagtgtctcgtgctcaagtccctgttcacaggttgtgaactttcccttcttatcctctctcctttctcccagagaggcacagacagctctaggtgagtgcttcttgtgcatgaatatgtgtgccattaccttggacactgtggacctgggggtggggctgagaaagcaatgtcctttctagtcttttccacccccaacagcaggaagccaaagggaagggaggggactggtattagcaaagctgaggggaggaggacatgctatgtacaggcatggataaggaatctctacatatcttcaagtagcactcaggtcactctccagccactgcagtggaaactggattgaaagctagtgacatgaacattgacccctggcctgggctagctctccccacctcc

SEQ ID NO: 339292 - DNA, 1000 bp, Homo Sapiens
tttttttgaaatgaataatttaatatttttatgtataattttatgtatgtacattcatgaaaagactaaattatactagttttagtttaaatgcaacttaaatattccaataaggaggaagtgtacattgactttaccccagatctggtttcctagccagactggaggcaaataaaataatgtttctgtttatgttaagtgacatacataatgtctacttataatatctctcaatagaattcataagagaaaaaaaatgttataagttacatccttctttaaatgactaggctagaggccacacaattccctttaaactcaattatctcacaactgaatgcttcgataacttgctaaaagcagtagacaaagtgtcattagtgaaccaggagaaggggaaaccccagagcagccatcagccgtctttatttctctgcaatcagctccttcatatccctgataacaatgacaggaaaatgtatctgccatcactgccaggtctgtatcagatgcttttcctttcacagtaaactccccgtcctcagaggcctctatgtggtaacttgcagggttcaagtgaaggtaactgggcgcgttccacatcttccttatgcacctgccattgttcctgcagaggtgaaggctgcatacctcagcagctctggtcacattggctatgtagctccctaaatcagaactcacaaactgcttcacctttgtacagttggccttggatgcagttaaattcatgtctccccaaataacaatgcctgcagctcccaaggcagcactttctcctatggtgctgactagatcttgcttagaaaggaaaaataaaggttcatctctgtaccctagccttgtgtagacaaatacaggcagagcataatcatgagatgtcatggtggagatcctcatggattcatgcacccgaaatttggagaagcgcaaaatgttttcactgtctccaagggatttccagacacagatagaaggatat

SEQ ID NO: 339293 - DNA, 1000 bp, Homo Sapiens
ttttttttttttttttttttttttttttttttttttttttttttttttttttttttttttttttttttttttttttttttttttttttttttttttccatgttataaatattgttatttaaaaaacaaaaaacaaaacacacgtacattaggtcctgggtggaggaagaagtggtggagcctcagggccagggcaggcaggagcaggcactgatgctagagggtgatgaccctgccctctgccacccaggctgcgtccaacagcctgtgactcttccctggagaccccttctctcacacttttatctactggcatcacccaccccacatggcatataccacccatctctggtctggggctgagggcaaggactgcactagtccagggagtaggggacccttgaacaccaagagcaaccttgagaggtgccaacaatggtgtgctgggggtggggttactttagaaaaagtggacacagaccagactaaagaagaagtctgaggcagacggtgagggtggcccaggagccatggcctcacacagacccgaggcagagaacagctcattgggtcactggtgatcatccagctgctgtaggagtgtccgccgccgcctctccagctcaccctcactcagctcactttctgacgtgtcccagcctgtcttctccttcttgattccaaagcctggggaacggttagggagctctgcctgttggagctccctgtccttgtcctgttcttgttctttctcatcgctctccttgccagctttctcctcagggtctgtctcactctcaggactattcgacttgtgtcttctcttcttagttttcttttttggtttcttggctttccgaaggccatgatctgctccaagaagatgggaggaaggggagccccgtcctccaagggcagcacccccactttcaactgaatcaagtgaggaagagggctcagagcctgactctgaggggttccgcctcctccgcttggggggc

SEQ ID NO: 339294 - DNA, 1000 bp, Homo Sapiens
agatttatttaagggaaaaaaacagcatggtttggacaattttgttctcccctccttcagcctcctgctgctcaatgatgccacatggccaacaatatcctggtatctaagattctaagggaatcattgaggtcctatctagacatcaactgtctggtgtcactattcccccattgcttcctcctcttcctcctcctctgtccagctcagatcatcatctgaatcgtcagattcttcctcatccatctctaacacaacccctgccctagccttcttagctagtgcatcagggtgctccagctgggcccaggatcctgggtcagccttgaccagggagatttcaacccgagatggcatcaagaagacagagctctgctccacgtttatgaccccccagagcttcatctgtgcttggaacacacggttaccatcaaagacaatgtggacatgaagctcagtttgactggccttcacccagttaaacgcaggaagtggaatctggccatatacagtcaccactactaaggaatctgtctggtgccaatcatggcggcaagatgctgggagctgcttcccccagtcatgtctaccgactctgcaccctggttgtgccaaaaatgccccaaaatccagggtctggatgccacaacagctccaagacttcatcccctcatggaatcggggtgctcctgggtggtaggtacatggagtagcatcactctcagggccttggtaaacagcatcacatcctgggttctggcagctggaaccagtccggatcagactgtcaagtcctgccccaggttcctggtctaattccttctgttccaatgccatttccagggcttgggatatatttagcggcagcagcttcagaggcaactctgacttgggcctctcccggcgcaaggtctctgctgactttggaatcacattcagaggtttttgctcctgaagtgaactgcttgtagcagggccttcaggttgaggggcctcagga

SEQ ID NO: 339295 - DNA, 1000 bp, Homo Sapiens
ttttttttttttttttttagatagagtcttgttatgttgccctggctggagtgcagtggttattcacaggcatgatcacagcatacttcaggctggaactcctgggcttgaatggtctttctgccttagcctcctgagcagctgggactataggtgcatgacgccgcacctggccataacactccttctcagctcatttttgagtcatgaaaaatgctctttcaagaatcaccaggcctatgataagtcccatggaacaaacctatcactgtgtaagagctgagcaggagaaaaccatctctcctcatacacctcatttgttcattcaataaaaattcatgacacaccactatggacatcaggaagtagagatgaataaggctgggtctctgccctaagtgattagcctggaaagccatactggacacagtgtccatactggcctccttgtctcctttcctgcccctccctgcactcctttacataacagccagaacagttctctcaaacataaagcagatccccagcttaaaccctttaaagaccttcatgaggccctatgtgacaggagaagcaggagaaggtggtggatgagaagatgaggctgtactgagttcagggcacctgaactcaagggagactttcacagggtgctcgactctgtcccaactcctaaagtgactactggggactactgaggtctgaatggggtgggggtgaggggtcaagacagacatactagatccaatggcaatatggctcaaaaccctaggtctgttaagttgtagtctggcccatgagggaaattctttatttggatgcttcagtgaccaagagacagagcattaggcacacacagaagcacacacatacacacaaacacacacacacacacacacacatccacacacaatatgcaaagcaaaggcatttcacaggtgaagggatagggagtgggggaaggaggccacgagagcagctaggggcttctttgacacaa

SEQ ID NO: 339296 - DNA, 1000 bp, Homo Sapiens
ttattgtttaaacaacctttattacctgcctctgacattccccagggttacagagcagggggcatctgagcctcaagttccacggatgaagcagacactgcaataacaactgaatcaatagaggagaggcatttggaagtactggggtgatacacccagtaatggtaatcctcagcagaagatggcatagctaccaaaaatcaggcgttaccactgggatgaaaactggggaggcaagaaaatcatacggttggagtcatagatcatttccctccccgttgagcactcctcccccttccgtcccccattaagttcattctatcccacagactggtcctagtgtcctgctagctccctgctgaaagagagagggagggaaaagatgtctgaggtctcttcatttcctttgtctctgtccctaaggcaactggaagctggagctgctgcagtcggcctggcaagcccgttggctctgcagagtgagcagtccctggcagcccctggagcagctgccagttagacggcccagagttctgatagaatgcattgcttcagttcagtgccaagtgttggacgtgttggattcagttcccagagggctggagcgtgctgtcagggctgtctgaagacaagagagcagaggcagtttagtgcagttggatgtgcggggtaggggtggaggcgcaggggtgaagagggagaaactggcccgaatgggtaaggtggtgcttctccttccagggccttccagacaaggtctcctggcctctcaccattatctgggcctcagatgaggcgaaccctggaagggagttgggggtggaaggtgggaggcgcgcccagggatgagcgagatgaggagggcgcgaaccagcaatctggggctgtggttttagacccgctcagcgccctgggcgagggcaggcagcccctcggaggcaagctggcggcggccctcggcctgggagcccgcggcagcctcggcgtcggcggtcagggc

SEQ ID NO: 339297 - DNA, 1000 bp, Homo Sapiens
tttttttttttttttcagaggtgagatctttattgacttattgtaattttttggcatacaaattacttaagtatatttacaattcttacataatgtacattttagaagataatgtactttgctccatttacaatgacaaactactgtaaaactacattcatgaattagatacaaatcctctacatactaataaaaagtaaatggactgttggttatacattctttaaaatataccttttcacaggtagcaagaaatagtacatgtaataagtctttatgactggaatgatccagaaatatcacaaagcatgagtaaacacatatataaaagtagctcatcatttccaaaagttaacctttagcctttgtgtaaaataaatggtgccaacaatctttataatgtagcaagctttccctgtttaatatccaaaaaatggagggtggggaggttgaagaaaaataagaaaagttagcaaataagatagtgaaaagaccaatgcagagaaaagtttatgtaatcaaatcttgctttgtctccacattatcacattttaagtggataaatttatgtaaacagaaaaagatgtccacaaaaccatatctgtagatgtcatttggaagcatcaagaaattgataagtatgtggtgaattaaaattacttttataatgttttgctttcattaatgtttgttattgcaaaaatgtaagatttcctacaattttgtcttcaaatcccaatctagcccttcaaacttttatccaggttctccagaatatttggagtctttgttatcaaagcacaaggaaagctggcattcattatcagacttcgctgctttacaatgatttcaaatcatttcatgatacaaataaagtgcctctgactggtggtcagtcagacctgggtaatggtgccaattctgccaccagctagcaaatcaagtgaccctgctctgtaaaacaaaaggagcaccctaggatcaaaaaagtagacaactt

SEQ ID NO: 339298 - DNA, 1000 bp, Homo Sapiens
ttttttttttctgataattttctgccttttattgttatttcagaaaatatttgatcatttgttccaaaatgtacatttaaaaaatccatacaaaactgtaatttgttttaaaaccagacagaaacagtggaaaaatgattttgaaaaaaagttcaccaaaagcaaaaagacacccctccccccaacccttttttacatgaaagcataaatacggcaggtacaaattttccttgagttccttgttgaaatttggtccatatgaacaggctagagtagaaaacagacactttgtccacatttgcattatcagttgctcagggcaccagcagccttagttcatccttcagatgtttttttaaacagaggaaccgaaaaatgaggtttacagtctcatcacatgaacactcaaatctgtacccaaggaaacagcggtattatatttactgtcacagctagaccctatcaggtgaacagggctctccacctgcggctgttgcttcgcaaaatatccttcctctccacgtgaacaagtagctctagagtgcttttaggcagagtgacggtgatgtcatgggcaccacgccaatcttattcctggacaatgacttaagccccatcgtgagaatggttttttcctcttcaacacattttttaaaaatagacctctaagatgatgctacatgttctaaaagagtgccacagaaacccacccaggatcacaagaatgacaacaaaaggaaagtggctatttcttgtgtaagggatgacgactccccctcccatgggtcccatttctcccccagttgcaggtgttttaagggacagaaaggctgtggaaaggaccactggctgggagagttattgcacaacccggaagagtgagaaaaacgtgggcgggcaaggggtaggggagagggttgctgcgactaaaacaaggtaacactgaattaggagctcgaacagttctgcaacagtcagacatgtatgtgtttatgtgtta

SEQ ID NO: 339299 - DNA, 1000 bp, Homo Sapiens
ttttttttttttttttttgaagtatacttaaggaatttattcagctgatttttaagtgaaggagctcagttagtcaatatcctaccatcttgaaagctcccttccaatgtaattttcatagtctttacattttaactgtcattgtttattactgttttggctatactctctacaatttcagcagcattttaaagagacaatgtgtctatgtacaatgaaaaaacaaaatggcttgcaacatcagaaatacagtttaactgtacaatattaaagagaatccgtggtacgtataacctttttctgcaacatgaacaacttacatgtaagtatcagcattatgaatgtgacaataaagaaaaagtccttacaggagtgaaatacagcatcctgaaaaatattggtttctaccctacgaggcagttagaaaacgttcacattttaacaaatctgtacaaaccacaagaaatttgcttatgggaccatcttgctgataagaactttctagaaatgtagaataaccatgaacaaattaaaaatctagtatctatgtgttctacagccctagaacccaataaactgatttaaaaactcaattatgtccaacatggatcacttttacatcttgattgttaatgactgtctgctttttaatatctatgatgtacagtcaacttgcaccttctaggtcatttaattttttagcaaagaagcaacatcatttagcagcaattagagtgccttcaagaagacttaaaaaaaatacaatatccaattagaaaagccatattttaaacatttgtacaagaataagctgctgaaacttagtaattgaaatatgacatctgtacaacaatttacaatagagctagaagggaatttatcattatcctgcatagaactggtctgcatttggttactcactgtcacctgttttgatgaacaaggcctggtaacaaaagaaaaatacctgttatcaattctaacgtgttgaaaacactgg

SEQ ID NO: 339300 - DNA, 1000 bp, Homo Sapiens
tttttttttttttttttttttttttttttttttttttttttttttttttttttttttttttttttttttttttttttttttttttcccgattaaaaactttttatttcagcaaaataaacgtgcctgtgaaagaaccacacggtggcttccgagagaccccactgtgtacctgagccccaggtggccacacctggtgttctggaaaagggagtccagggccagtattcaggccctgctgtactgcaccctggaaactgcaccaaaccccagctccgcccccatccacggctcccagaatggtttctggagtccctgcaacagacctgtgaggagagggcagggcagggcctgcctcctgcgtccccgtgatgacctgggggatgcactgggcagggacagcttcctccatccacacagccctgtgggcaccaacaaggccactgtgacttcacacgacagcagtgttccccagctcagctgagccggggtgcaggggacagcacagggcacagtcctgtgccgcaaggccctcgtgctcctggaagcctctgggaggaggcgcccgctggtgggacgtcgaagtccaggcgctctcggcagcgaccccaggacggcgcacctaagctatgccgtggtgcaggggacgtgctggagggacaggagcaggcaagagagaagccacctgtggtcccagccccaccccagctcacacgaattccggctgcctttccctgcaggagcccagtgtcatccgcccgccacggagcctcatggggggcagtggggcctgcagcacgttgttggactggttggtgttgaatcctgagagctgctgggccgggccgtcctcgtccccgtccccgtcctcccgggctgtggcctccagctgctcctcactgccgctgtggctgccagaagccacctctaggctggcctcgctctgctgctgctccaggaagctgaggtggcccagggcactggcctccgatgaggacagca

SEQ ID NO: 339301 - DNA, 1000 bp, Homo Sapiens
aactgttccatctttattagaaaagcaaccaaaaaaagggtgaggggtgagcctggccctaaaggacccctccactgtgacacaggcagagccggctcatcccggcgtcgaggggtggatatggccagctgggtgtgggcagatttacaaagtcaacacttcatagaaaaggatgccgcctggcgtgcagatggcgaccaatccaccttcacatggctaaggcgggcccctcctcctctgggctcccatgtggtgtggacagcctgacctgggtacagggaggatgccatgaggaggtgggctgggcaggcctgggggctgtgtggggagtggcatccatgtgggcctctggtcctgcccagggtcctgcccagggggcattccaggcctggctggtcccctggggcgtggcggtggggctgcagtggcccctcaaatgtccatgtagtcgtcgtcctcgtctgtctcgctctccagcgaggactcctggctggatgtctccaggacctccagggctggctggcataggctctccttcctcacgttggcagcagactgggcagaaaggatggctgacttcagcttctgcttggtctcctccgagatgctgcctttgggggagagcagggttggggtgggtggcgtgacggtgatctcaggggggaacttggtggcggcggaggggatgaccagctttggcatgttgggcagggggcgggacttagcccggctgggctcaggcttgcctgggtgaccctctggtggctgggcactcccactgctgggggccttggagctggcagctgttgggggagagctcaggggctgagtctcactcgcagcctcctgagcctccccatcccttctcggctcaggcctcagtttcccctcctggctgcaggtgggctcagcgcctgtgcccagggcagcctctgccggccagcagtgtggctctgccggggaacttgtgggggccatcttcacctgcggactgtgccgt

SEQ ID NO: 339302 - DNA, 1000 bp, Homo Sapiens
tggggtgcatttctagtggactttattgtcctgctccaacaccacagtagaaagggacctgcaagctccaagcctgtaccatgtgtcaccacagcaaaaacatgacccacttgaacacactcctgtcccacccaccggataaatatgttacaatttaaaaaaaagaatacaacagaataaattaataacttaagtgattaggcaccaacagtgatttgaaaattaaatgtcaattttaaatggtaacaagacaagaactcaagactgggcttccactagcccattttctcttcctgacaaacagtgacaattctgcgtgaaataattctagatttcaagacacaagtagccaacaaatacacaacacatgccaccataaatcacatgacagcctggatctcttggggaccccctcggcaggtaccccattgtggtcccaggtcctaaacagcagggctagtcccagaaagacgaccccccacggaagggctttagcgctcctgagaccagtctggcttcccctgcattttatgaaggcccagatggggaaggaagaactctggaaatgggataggggtgctgggccgagatgtccccatgggagaaggggccagagggaggatgagctgagcccatgctccagtaacttcagaatggttgtgcttttgtcacaggaatggggcatactttgttaacttctacattggaaaccactaaagtcaagctaggaggggactggggataggtactgcccaccccaatcccccagaaagaagttacagaggagggagtctccccttcaagcagctgagcaccagctgtggatgggacctcagcgcagctaatccaacctcccattccacagacaggcagatcaaggacttaaggagacaccatctccctatttctcatcgttctcacttgacttaaccttgcagaagtggagctggaagtgggtgaagaaggctccttggagagccccaggcagggggcctgtgtg

SEQ ID NO: 339303 - DNA, 1000 bp, Homo Sapiens
gagtattgcaacactttattaagagtattggctttgaatcagtagctgaagtaacaattgcatgaagccagattaggtgcactgcataatacccatactcgatttattgacattacttagcaatttactggacaaaagtcaaacttttttgttttttattaagcacattccacagtacaaagctgtcatgaataatatctgtacaatttaacagtttcaatagctgttcagacacaaatttatttcaaacagataattggcaaacataattaattacaagttagaattagactatcccagtgctttaaaacattaatatagcagtaatttacatttgctcagttatggttagcaaaataaagtccagagtatggctgggaattactattataatcccagaaagtcagaactccttgggtgccaaagtcccctgctataatttagtaggcacaattcaaaggttgtctgcatattcaaaggccatcatctcccaaggaacgaggggaacttctatattaaacatgcaaaaacaacaaaaaatccattcattcattcagaattgcctcctcccctgccccctcccttccccctgggctttcctaaccagtttgatattgaagctgtaggatgaaaagtggtcaaagctaaatcactttcacaaccaccatcaagcttacaacatccaccttatgaatggaggtttattgtttacactttgagactcaacctctcaaaaacataaattaatttagtaacatgggaaggaaggattttatttttaaaagaaaaactaaaaaagcaaagccaactcaataaacaaatcacatacacacacactgatccccacaccgttctcaatgcaaaggacaaatcagagcccagggccttccctttagtagtagagtgtgcttccacgggaagaggtttactttataggaggctgtttattggtcctttaaaatgttattgacattccttgatctttggaaacaatggcgaa

SEQ ID NO: 339304 - DNA, 1000 bp, Homo Sapiens
tagttggaaaaagaaaagatttttggatatatattttatttgacagtgttttagaatatcatacagtaaacaagatttctgtaaaagttaatttatccatagtggtacgtttcataaaaatagttgctcacttacagtctttctgtgactattaatacatggaattatatttatagagatacagctgtacagggtaaattcacagctaacactacacaaatattatttggaatgggatttagatgatgtgctgtcttcacaggttatggattacagccgcataaagcaattactgcacaagtagtagctgtgaactgtgcaaactagagtttatgccagtgtaatctcaatttttttttccttttgtaatacatggaaaataaagtcagaggatacagtaccaggacgtgcagctacactacagaagcattgtccaaaaccagattcaataaattaatggcaaactatactggatttctagtccaggggagaaagactaattgagattaaaccaaaagcattataaactgctacaagtgtttgtgcttttgtttacgatgaatgggtttcatttttggaaattgcttttacaagctgcaagatccttcacttgaggctttcagccttattctcctcctgtcaaacaactaaactactccgatgtttgatgaaaattaaactgctactcaggatactgcaattacaaggagagggaatgatcagcccagggaggctattacgtgtgacctttgagatggacctgatcgccccttttactttttagactacaagtgcagggaggtggagcttatttgcatttgaactcctgtaaagagtaagaatatggaaaggatgaagcctcattcattcgggcatattaaaaagaaattgccttcagaaacactttgccttttaatatgtgtagctacagtaagtaccaatggctaattaattgaagctaacattttacaaagaaatgctaaaacagcagggaagaaag

SEQ ID NO: 339305 - DNA, 1000 bp, Homo Sapiens; identical to SEQ ID NO: 159016

SEQ ID NO: 339306 - DNA, 1000 bp, Homo Sapiens
acgaacatattgctttatttcttggtagtaaattaaggctttctagattcatacagcacgcagtgatttgaacattagaattaaaaaacaacaacaacaaacaatgagcattcaatttagcagagccaggaaggaagcaatgttttaaaacagataaatttcctagtgagacctttggtttggtctccaaaaatctgctgagctgtttccccagtaacctccatcatagattcccaccccaagggagaacagaatggatgaacaggagactgggagaaaagaagaaactggcaagacggtatgtgctgggcaatcagtgtgaacagtcagctttgtctcatgtttggaagacagtttaggtgatgcggtcagggattcattctctggatctccctgctcattctcagagtattaaaccagctcactcggaagaccccagggccaaggattagggacaatcctttgtgacacccaaatcctgaaacttcaaatagggtcacaagtcacagagctgaggaatgctgccttcaacttctttcatggttttaaactctgtggctttcactagatcctggcctagctaaatgattcatttcccccatggcacagagccttgattacacatgtaatttgatgatgttgattggatgggaggccatgatgtttgaaagaaacctcctgggcagacaccacctcatcacactaacctctccatcccccacagaagacgacagtatgcacaggagcctacagtaggagtgcagttgtcaagggtgtctaagtttgacaaattcagcataactggcttggagatgcagaggttctgcatttggataatgggcattttgagaagaaaataaatgagggatttcaacgtaacaaaggtggggcttggctagagaataatctgggaaagggccatgtgtttattagcaaaagacaagtgaatttcgtgaaaaccagcaatggaatttcttctggctatctgacttcatgcaaa

SEQ ID NO: 339307 - DNA, 1000 bp, Homo Sapiens; identical to SEQ ID NO: 246481

SEQ ID NO: 339308 - DNA, 1000 bp, Homo Sapiens; identical to SEQ ID NO: 159017

SEQ ID NO: 339309 - DNA, 1000 bp, Homo Sapiens; identical to SEQ ID NO: 159018

SEQ ID NO: 339310 - DNA, 1000 bp, Homo Sapiens; identical to SEQ ID NO: 246483

SEQ ID NO: 339311 - DNA, 1000 bp, Homo Sapiens
aaaaaaaaaaaaaaaaaaaaaaaaaaaaaagacgggctaaggtttatttacttacttaacatttaaaaataattcatttgcttcaacaacatggcagacaatcaagagtactattgaaacataattcagagagggtcaggacaggaaagatcacaacctcattcctgaggtggaatgaaagatctaagccaggcctccatcctaggccaggctcctccattaagcagagacaaccaaaagataagaaagccttggcctcatccccatcaggagatagcctgaactgctcacaaataagaaacaacttgaccagactgaggactggttcctgatgagtcaataggaaagtcagttggttctctcttcagtaggtgacttagcacccttctggagaacatagagtagtagtctggacctggaggctaaggcccacatccaacaaaggttaccttcttttcagtaacgctttgttccttttttcaacagcaagaaacctgaaatccagagaagtcatttaaaaaaccccttctggctgcaacctgaaagcatctcccaagccagactgggggtagagatgatgactccaacttcagtgggcctcttcttcgataggggagcagccagagaagaagctggtgttgctggccagagcccgtttctttttcttccctggagccttgttttcttggtattctgttgctacatgtttcaactctgggaggtcaaaaggggagggagctgggggagtcttctttgacagcacctgctccacatcgcacatctctttcaggatcttgctattgggggtggcacagacgggattaaagaagctcaatcctggggtcacctcggtaggatcctccagtttgaaggagctttctgaatcctgggtccgttcaacagtgcccaagctatccttgccttgctggcggttccgacactttgtggggtcacagcaacagtccacaccacagtctgacttttgcttcctgcacccaca

SEQ ID NO: 339312 - DNA, 1000 bp, Homo Sapiens; identical to SEQ ID NO: 159019

SEQ ID NO: 339313 - DNA, 1000 bp, Homo Sapiens
tttttttttttttttttttaaactgtaagagaatggttttttaatggaggtagcaggccaagtgaaaaaaagattctgccccctgccttcctgggagattgggagttggcagccatcattcccaagctgatgagtggcatatgactcaccaaggtggtacaacatgggtgggatttttcaaggacaattgccagacctaaaccatcctcctcagaaaatggctttgaagtgggactgcagcactaggagagggcaaattcaagatcaatggccaataataagtacctgaactttaggtctataagcagaagggcatggatttcacctgagccagaaggagatgtgtagcaatagaagcaagaatggcattgtttcagaggaaggaaaagcagagcttggagcaggatgcctctgactaaccacagtggggaggtgggggtggggcagactgtgccttcagctccacagctggtctacaccaacttcctctactcccatccaaacaggtgggctttactatcatatgtaatccacccagaggcacaggcaagccactaaggcaatgcactaccgtaattcaaacagaaagaagaggcatctggattataattgtcacaaggaagggaaaacccaaaccaggtacaaggatcccaaacagggaagatacgcaatagctctaaaaaaaaaaaaaaaaaaagcaggctactaagtttcagtgataatagataataggagaggcagccatgggtgatcagttatgtggacaatggccattgagattgaatttgacaaggcaaactgcttctgagtttcctgatacaagcaggatgttcagcagtaaggacagagtagcagacttcaccaggccctgaggccatccttgctcccttcaggtcctgggacaatcaggccacgctgacctgctttatgaaggttccagagctgaaggttggtcccaggtggtggtccagaatccaagcagagaggaaaaggaccaagc

SEQ ID NO: 339314 - DNA, 1000 bp, Homo Sapiens; identical to SEQ ID NO: 159020

SEQ ID NO: 339315 - DNA, 1000 bp, Homo Sapiens
caccagcagttcttcagagacctaaaatccagtataggaataactgtgttagttcttgaaaaagcattaaagacatttttccctgaaacatacagaacatgtcatgccaaatctcttgtttacataataaactggtaataccggtgaattgcacatacagattttatctccaagatagaataacttaaatattaaaacgtacctttaactgactttgtaacagacagcaatattcaatacaaaaatcacaaaacccactaactttaaacgctgcatagtacagcatacaaactcatctccctatgacctactgaaactatgacaactttttaagctactctagcatttaaaccttaactagaaatttatacgaaacacgattttatgttcaaatatggaaataagtaacataattccaaaacccaaaagcatcccagcattctgtaaaaagaaatacccccagcggctacatccatggtcactagcatcattgtgcagcatttcaggtaccatatcaaccagagcaacatacatgaataagccagcagtaagtgcaaatatccacatagaaacattttcagcataatgaccaatgaaaattcctgttgccattccaagatacgccagcatggctgacaatgcattataaaggacagcctgcttaacggtcatgccagcctttagtagaacagcaaagtcacctaattcatgaggcaactcatgacagaacacagcaacagaagtacttaaaccacttgataagccttcagtaaaagcagcaccaattgctaggccatcgctgaaattgtgcaggccatcacccattatcaccatccaggccaaagtggcgacgccggcatctttcagctcctcccgagagtagcgctggctgtgactgtgaggatggtggttttggtggtggtgatgatggagaatatgatggtagtcatgatggtggtgaatgagatcgtctgactggccgagtgtatcgtggaaatgt

SEQ ID NO: 339316 - DNA, 1000 bp, Homo Sapiens
ttttttttttttttttttttgtgcagtgtgtagttttatttgtttttatttccataacacaagagaggaagcgaagggccagggcccgaggcatcccctgcacggttcgaaggctttcaaccgtcccgggtttgttttgaaggcaattttggggccgcgcccaaggaaaccctgcaggctgtcagtcccagcatgaacagcttaaaataaaaatctcccgtctggttgctgctcggagaggctccaagaaatgcaaaacaaacccgcctggaaaatgctgccctgagaaccagagcgagggcttgaaagatgccttcaacacagactcttctaggaatccagccagctttgggacggccgtttcacaaaaccaaaaaacaccaagtaacatttctaaccggagaattgccggttttagcaagaaaaaggggcttcacctaaaagggagggtcacaaaacacgaagggggttccccctggcgcctgcctcttcctttctgagcagatccgtccgagactgtggagcggaatcgccaccctggcaggagggggcgcagcagccggtctgggtgggcgctcactgtttgcccgcctgtctgccaggcttcttctctggctggcctctgcctgtgcccgggatcccacctcggccccggccaccaaacacacctcggccagcgccgcccatgccgcggcctttctgctgcttctgctgctgcaagcctccgcggccgcggcccttggccaccacctcctccttgaccatgtcgatgatctcgtcggggatgcgcaggtacttgatggtgctgccgcggatgtagcactcgggcatccgccagaacttgtccccgtccctggacgtgcagatgacttctcgcaggttaatgttcatccagttgtcgcagctcaccaggtgtccattgtacgtctccccatttttcagctccaccaacatggggtgattctgagccgtcttcagcagtgacaagggaagcatggtg

SEQ ID NO: 339317 - DNA, 749 bp, Homo Sapiens; identical to SEQ ID NO: 159021

SEQ ID NO: 339318 - DNA, 1000 bp, Homo Sapiens
tttttttctctgtggaaaaagaaagaatttgactttatttagaaagtctacaaaatacagaagacgataactcgcttgctgtaagtcaggaaataaataaattctaggagccgggcaatattttttaactttttttttgagacaggattttgctatgttgcccaggctggagtgcagtggtgcgatctcagctcactacaacctctgccttctgggcttaagtgatcctcctgcctcagcctcccaagtagctgggactacaggcatgagccaccatgcatggctaatttttgtattttttgtagagacggggtttcaccatgttgtccaggctggtctcaaactcctggactcaagcgatccccctccttggactcccaaagtgctgggattacagatgtgagccaccgcgcccggcttaaacattttttgttgttgctctccggctttccctaaatataagataaaatgtgatttatttgcagatataaaatataaagcccagctcagggccatacgccacttttcccagggagcaggagctcgggctctggctggggagaataacttagatccgtgcaataaataaacagtggggaggggcagtgtggacagtgttgggggagggactgagactgggcttcccaggagaatgacaatcaaaggcaggggtcagcccccaccccacagtggacactgacaggggttgaggtgggacccttcttcttaggaccccactccagactgtagtaggactgcagggtctgtctccttgtctccctatttgccacagcagtccatggccccctttctctgactggccagcccccggacaccctggctgcagggacagcctagggctgagccaggccagctccttcccactcttccatccgtgtcaccttctctctccctctgcttctctccccctcccttgcagagagcggtctcccaagccagggaggccctcccaccacatttctgagtccctgtccactgt

SEQ ID NO: 339319 - DNA, 1000 bp, Homo Sapiens
tttttttttttcagttgagggacacatggcatgtacttttaccacacaagtttatttaaataaaagtgaacacatatgcaggctggtgcccgaggggcagggggtggggagggcaggtgggaagcagacagacaatggggtccaggcagagtttgtgtggtgaaccaggctgctggagggagtggctgggggcctcagggcagcgctgggattcagtgctggggcagggggccttgggtgggtgagcctggtgccaggaggtcatttccatccctcacatgcccccctccctttccctgaccccctgggcctacagcactacctcctcagccccctctccctctcctgacatcagccttccccttagctactgagaagccaaaagacaaaataaattagaatgggtgagtcctaccccagcccccagccatggggaagggaagccaagccaggcacactgcgccggagcccgtgctgtcagctctggaaaagaacaggtaaagtgcaaggagaatccagtaagtaaaaatataccaatgactttgtcaaatacacagctgctggctgtcaggagcaggtggctggctggggcgggtggcagcagcaccctgggaagtgttgggcgacacagcagagagacaacggaaataaatagggtgggtgtggacaggggtcccaccaactgggccagcaccacccaggacgggcttctgcctgctttccggccccatgcccccaagcccccctcgcctggctccccagtgctgcagcactgacacaaagcacccggccgaccgtgttaggaaaggactataatgtgggagtggagcagggagggaggcacggggaagccgtgcagtcagccagggctgcggccgccctcagtactcgtcctggtcttcttgttgatgctcttcaatctcatcgtcctcagggggtgcgaatccttcctctgtggcatagaggatgccaatgatgcctgagataacagggctgtttt

SEQ ID NO: 339320 - DNA, 1000 bp, Homo Sapiens
ttttttttttttttttttacaatgttgtaataaaatatttattaatttctctttataaaaatttgggaaaagataaaaggcaaaactacacatagaaaaaggtcagtgataagtgtttatacagtcagttttttctgatgtgtgaaaaaaactgataaaaaaatcctttgaggtaatatgaaagttcatgattctcattccatcaacatcactgtttgctaccatagcttcttagttgtccagctagattttatgctatgaactgatgcatgagatttcataaaacattaatacctcttttttatactacagttctttcactggtataccataaagtagtattacaaataaattatgactatacttcatcataaatagaaattaagaaagtacactttgccaaactgatttctgacttttaaattgtatttattcactccccaccaatttgaaaaatcttgtaaattacagagggtttcctagtcattaacatgaattagtaatgctataacttaattcaaaagcaattacttcttaaaaatagggcgcataccaggaaagcttagcatcagccaaagctactagcacaccacgggcaaaaggccaactctgcagggatatgtaaaggtcattttatggataatccatataaaaactgctctcaagatattttgcccattagaatttgtttacaaatggaaatctaatttgatgattttaggcctttgtgctagaatctcacaaccagaaagaataacacctttaatatgaattcttatgatattgtcagaaagtttaacaggagttattttaactcctgttaaaataatagatgacagtaaaaagaaattcaaagggaaagaaacaatatacgaaaaagctatggggtaacagatgttgagcctacaattaaaaactatttattttaaatgttttcctatgtataagacagaaataccaagcactttctacttttgtgttgtcagaaatcccaggaaaa

SEQ ID NO: 339321 - DNA, 1000 bp, Homo Sapiens
ttcaaggtatagctaattttattattatcaaacaaaactagtagatataacttccaggaaataagttacataaatataacagaataaattcattttcttaagtttcaaattaaagatgattaagaaatacagctttatgtaaagtttctgctttttctcaaccacgcctaaagaggaaagaactggcagcaggaacacttgctcctaggaaacaaatacaacaaaattataattaaaaagatcttcaagctatcaaaatttgtgagagaaggatggtaagaatgcagtagaaattaccaaatgacaaacaaaatcctatcagttttcaggttggtcaaaagtaacttcatgaatatagcctgtgatcagcatatgtcccatagcttatatgccctctatacctccagagttgcataataaacttttaacaataaaacaacaacgaatatcaggttgtaaatatttatatttctctcacatacaatgttgtatgagacacttgttttaatatgtatccataggattaatactcatatggagtataatgtggaaaagtgcagaactaaagaaataagtctatccgaaaacaaaagcacacatttctcaggatttaaaaatattgcacatagtaaggttgcacagaaattactggctggttttacaaacagaatgaggtatcagtcaatctctagataaagatgagagagaggataaactacacacacacaaacacataaatccatactaagacctaagagtgccaacaactaagaaagaaatatgaaaaagctatgtaagtagctatgatttcaacactacaaaatcatttttaggctggaaccaaacacataacaatctcttggcaatatttcgttaagttttcaacttttttccagcctaaatgactatgggcaataaaaccatttcctttaccccagttctactgtagaaaggcacagcgctgtggtaaatatcaaaccattcctttctcaacctttca

SEQ ID NO: 339322 - DNA, 1000 bp, Homo Sapiens
tggaacaaatccaagtaacaactttattgtagtatacagcacaatttttacatacatattagtggttttgacagtgttacttttgagtagaccttaaatgaatccacaaagttaatatattaaaaataaaatatacacagtaaaacaacaggcatccagatgttcagaatcatgcagataggagtggtttggttggtgttatcactgggtaccttgcctatttaactcgccagcaaataccacttcttctgtttctcattcccatataattcatcaaaatcagagagttctaaacatatacaaaataaacctcttttaaagccacatcagtaaaaaatttcaattaataaggttatcatcaaaccaagaattccactgatcatttgatcagcccattactaggaaacaggcaatatcagcacccgatctaaaggcaagcctatttcatttattaaaacaccaacaagagagattaatcaacaaagcaactattaacaacatgttaatcttaatataagacactgagagaaaagtaaaaataatacataaatatcactccactgagccaggatataactcatggactacagatacatgagtttctacctgtcaaacaatgctttaaatattttttctaggaaaaaaaaaaaaaaacacaatatatgagaagatgcaaaggaaaggcagaaatgtgaatttatgcatctagttccacaatttaaaataaatatcaaactgacaatataaagctaagtgacaatgacttaaccattgggcaccaaacaggcaatacaactgctcactgtaatacataatgctcttcaggagtttccagcagatggccatcacaacaatactgtcataatacagaaaaaacatttatccactgtggaaagagaccctgaagagaatgtggcaaaggcatagagaaaaagttggatcttttgaaaaagttaatgatatcaaaatacttttccatcactggtaaaccaagctaggt

SEQ ID NO: 339323 - DNA, 1000 bp, Homo Sapiens; identical to SEQ ID NO: 159022

SEQ ID NO: 339324 - DNA, 1000 bp, Homo Sapiens
ttttttttttttattggactgtaggtttttattaaaacaaacatttctcatagctctaagcaaagcattagaattcatcaagcggactcacatcttttctctgcacagagagggctgaaaagggagagaaagcccttatgtatgtctagatttggtaaagcgaaggatttcagcgaatgagtcactgaggctatacacgtttgcaaattgtaaggcactggcgggcagagagcacagataaaggacttctggggtcccccatcctgtccagcaacctcccagctcacaccttagcttctaccaagaagggtgaacacagcatccctgctatcttcactcagaccccagaagacacaggaaaccgcacagctccactcccaccataacttattaggagataagtcacattttatcaacttgccatcgcgcctcctatagattatacttcggtaaacccaatctgtataaattcctttgtactttgtgcactttaaatgccacgattgtgaatcacacaagcattgcccaatttgttgaaagcatttttactggaacctcaaaggcccaccatgtggggagcaattattttttaatacccactgggcaggacacgccggtgcccccaaggccgcagtagccattggggttcttgctcaggtactgctggtggtagtcttccgcatagtagaaagtctgtccctcccggatgtcggtagtgatggggccgaagccgtgctctgaaagaaccttttggtagttctctttggagctcagggctgcctccatttgcttggcagaggtcgggtagatggccgagcggtactgagtgccatggtcgttcccctggcgcataccttgggtcgggtcgtgattctcccagaagaccttgagcagttcctcaaaactcatgtgttctggctggtacaccactcggacgacttctgcatggccagttttttctgagcagacttctttataagtaggatttgaagtatagcct

SEQ ID NO: 339325 - DNA, 1000 bp, Homo Sapiens
tttctctttcaaaaccctcacggggccatgctttattataatggtctgccacaggtcctaacccacactgtatttgattatatacagtctcataattaagtcattcctctttatcacacccagcacttagtccactgctgcccatgtaggaggcactcaaattggtaaaagagaaatctatgcaagggaatgatcttctggaccccctccaaaaacaaacttgtgactagaagaggcaccagccatagccacattcctactaacagggctgatttaaatgccctttttattggcttggtcatagtctccaacaggtgccaaggcttttgctagttaaaccagttttcattggatcattttgttttctatgtgtgttttgaccaaaaacaaagataggttctctaacaacagggagagaatatatgaaataggaatatgtctataaaacgacagtctaccagtaaggaaaataagtgatccataaaacaaaacatctgactgtaggtctacccaaagaaaggaaaaaggactaacaaacaagaatatagtgctttaccatttacaaatctttcacatacattctcatttgaccctcacaacaaccctgtgaggtaggcatcacggacattctactcattaaacagatgaagacagtaaatctcagagtagttcactgataatgcccaaggctctacagttagtgagtgatttgtattaatatcagtctttggcctaaaaattcagcacccctcttccccttatacttgtcccacctacttcacagggataatgaagataaaatgaattcaaggctagaaaaatactttgagggagaaaagcactatataattatacctacaaactatgattttccccaatatatggctcattcctcttctcatctcagcttgtgtgtgaacccagagttgtatattgcctctgtcctgtgctcagtaagcaaataaggcaggcagggggtacagtgtgatcctgtttaaag

SEQ ID NO: 339326 - DNA, 1000 bp, Homo Sapiens
agctagtatcttttattgtcagaacttctgtgagccaacaaacagttttgcatggttgtacacaaagggacaaggcaaatttcttttttcgtgtgggtagacttagttggcccaagtccttaaaacttttccatataaaaataaaaagtccaagaccagattatttttcttctggtcataaatgctgatttatttacaggtgccttgttcagaccaccattataaacttgggataaaatatgtgtgtattaaagcctcagcatttaatgtcagggtcctttgaagattcactcaagtgttaagacgtttctggaatgcagcgtctctcccccatagtcaacatggttattatatctgtaatctatccagaatgatagaagctaaccttccaagtaacactttgtttttaacttaaatcttttagacatgaaagactccaaaatgacttcattcttgttctaaaaccagcactggagccagctgttgaagagtggtttataaatacagttatcttgtaggctgcttatctgtttataatacagcagacacagatggcagactttgctacatgtaaaacaatggagtcaacacgtgtttttcaaaatacagcaaagacaggaaaatccaggatttgggtttgttaataaaaccaccttataaagtaacaattgagactatagctctgcattattaaaatatacagactgtgtacaccattacacatcctttttccctttgctttttaatgctcatgaaaccatgattaaagtgttgagtttatgaacacatgcacgaacaggcaagcacgtacacttaaaagatgaaacaaagaaaaaagttgattcatgtcattccatgagaaaggctgcccgcagcactccagctcaaacacactgtcccctcgagctctccatcccccttcccactccctcaccttccctcagattcggggaaatcaggttgggaggttagtgcatcattgacagagaatgcccccctt

SEQ ID NO: 339327 - DNA, 1000 bp, Homo Sapiens; identical to SEQ ID NO: 159025

SEQ ID NO: 339328 - DNA, 1000 bp, Homo Sapiens
tttttttttttttttttttttttttttttttttaaaaagacatgatctttactggtgcttaaatgaacaaagaggtagctaaaaaaagccaccatttctctcaaatgtcatcaattacataagacctcaaaacacacactgatttgaaaaaaaatccatccgtattataaacagtgaagacagattaatgtcatctatttcatagtagcaggtcttccttgatatttgtaacgggcagaaatatttgattttactcttttgtcaccagagataattgccacatcacttgccaacatgatgaactcattttattagtcaaatgttgaattccactcaagtgcacttaatatagtactacacattataagttgatcgaaattaaagagatctccaattagaaatgggatcttcaaaaatactattactaattttcaagttgtatgtttcattggtattctaatgaaacatataaagcaaatgatttgtttccagcatctctgaaagattatttagtcctttaatgtattaaaatagtagtgagaaaatgtgcccttgaaatatagactctgaagtacaatttaaaaaattaaaactgatttgatatgattaattcaaactgcggttgaattgcaaggggacagctcagaagttcataaaagtttcaaattagtcacatttgttgaaaaaaaaaaacataaaatgcaggtgcctgcaatgtttacattgtgtcagatatttcagagccatgtataatgttgtcttgaaatcctaaacacttagttttttaaaacatttctggttactgaggaggcataaaaaatccaacaggactacatctaaaatgaggctgttctttctccttttataaaatacttttgattcctaacacaaaaaatatgcacagaaagacatttagaattttcaatccttttttaaaattgagggattactgcttttgaaaaatctctctatacagtttttgctttgctttcttcagtct

SEQ ID NO: 339329 - DNA, 1000 bp, Homo Sapiens; identical to SEQ ID NO: 159027

SEQ ID NO: 339330 - DNA, 901 bp, Homo Sapiens
ttttcatatatattttctttatagttaccaacacttttctggcaaagacaaagttttggaatggcaaaagcaacagaagttttagatctcaaagctccagaaaggaattaatctgagtcttcatcatcgagatagtcctcggcattgcttaatgttcgaactgcatctgttccctgtttctttttcaggagagatgcacaggcagcattggtagccatgtcgaaggccagcttcttctcaatgtttcttaagtctgttctagcaccttttgccagaagcaactggacgatatctgcataacccttccaggcagcagcatcgaaagctgtatctcccaacttgttctgctggttcagttcaatatttggttgagtaaatagcatttccactatatctttgtggcccccgtggcaagcccagtataaggcagtgcttccagctttgtctaagccattaacacccactctgttgtccaaacactctctcaaccagctcaagttgcctctttttgctgcttcatgcaatggattgtcaatggattctgcctgctcagccacatagttgcttggaattagtccagtcctgcctttggaggtgcctttccaccaattggtatcgctcatgtcagtaatgtagataatatcaccttcctcaaagtataattcatctggagttctgggttcaaacgtatacagggctctgaagactttaacttgccctggtttgactggtttgggtggcggcttcgacatctcgcttcctggagctgcaaatcctaaagaccccgccgaaaagcccaccgcttgcccgccacctggcactccgggcaccccagttctttttgtctggcttacaaccgtcgcctcctaggaccggcgcccacccttggctgcgggaagag

SEQ ID NO: 339331 - DNA, 1000 bp, Homo Sapiens
aactatgaaaattgtttttattttaaatcaaagtaccaggcagatacttgcaaaacaacatacaaagcaaaactcaaacatggcccttccctagggcgcctctgagcaggcacagagaagttctcaccctctgcaaaatccaatccaatcctatcttctcagaaaaccaaaccaaaggcagccatgaaaacccgtgttctgtacgtggttgagaaggtcctcctctctgagtactggctggccccaaggcgcagaactgggaggtccagggaaccctgcccccgaggagccagcaggacctggaggagccgggggcggtgctgacaacaaccttccccacccactgcagtgtggttcccatgaggatgagggcttctccagggcccttccccacgctggggcttggagcccctgccagaagcagctgggttggcggtagatgtccccgagggccttgggaagcactgggaatgggctcccagccctggtggaatgggggattgggaattaattctgaagctggttgtggcttatttttgtatggctctgaaattaacttcctctccctatgcctcagtagctaaggggcaggggcagaaaaggtcccaaccctgttcttaaaaagaaaggaaatgaacccacaacccactggaagttctgttgacgagggctgtcaaggcagacgcactcgtgactttgacaaagggaagcagctggaaggttgcgggtcccagggtcacaggcagctgtattagtgacaggttctgagctggtgggtgggggccgcagggctctcctgacccccgtagggtcataccgctgcatgctgcagaactcaactagagtggaaatgagtttaaaacggagtatgtacatcaaaaggtcaacatcacgccgaaaccagctgactgtgacaacagcaaacaaaaatgtaacagagaaaacaaacaagacacagcctcagtagcttgacatgggtgagggcagccaggacagggcc

SEQ ID NO: 339332 - DNA, 719 bp, Homo Sapiens
ttttttttttttttttttttttttttaacaaggatgaacacacacccaagctgtggctgccgtgcgtgtctatttattgttgctgccaccctggaggagccccagtttcttctgtagctttcttttctgggggatcttcctggctctgcccctccattcccagcctctcactccccatcttgcacttttgctagggttggaggcgctttcctggtagcccctcagagactcagtcagcgggaataagtcctaggggtggggggtgtggcaagccggcctggatcctgtcctgggtcctccttcctccgcagtcccgtctctattgctgggtgtagtgtccatggtctggcctcatctccagctctgtctcagcgccgtgcccctcgcttcttcctctctgaattctgcagcttggtcaccagtttcctctcgtgcccgccagggctggggcggttggtgttggcagcagcttctctcttggtgcgacctttccggcctccacctccgaggtaggaatgggccaggctatagaggtcagattcatccaggctggagtcctcgtcctccgggcctgggggctgctggggggcgctggttgctggtgggaaggtggccatcgtgcctggcttgtcttccctgcctctcttcttctcctaacgctttgtctgtctctgctttcctggccccgggcctctccactccctcagcttataaggctg

SEQ ID NO: 339333 - DNA, 1000 bp, Homo Sapiens
gtacaaagtgacttaaaaaaactttattgcagcttcttagagcagaactgagtgtgcagtgctaggaccatgttgggatcttcagagtgggaaactgggacatcacaggagaagaaagcaagccactgctgggagggctggccgcccccagggagccacaatattcacaagagctcttgcttgccacactgcagaggacccagcgacatctggccaggagggagaggacgccagggaagatgggctcagggcaccatgttccaccacttgaaggagaagggctttctgcgcacgttggtgccgcagtgcacctccccatgcctgatgtggtaggtgaagaagtcgttgatgaaggtgcactggaggcccagtggctccagcagggaacacaccttctcctccaggcagcagcggccgttgatgacgggcccgaagggcttggggatgcccaggtgcttccctagcaccagcatgttcaccatgttggggaaaaaagcttccgccttagagaactctttgagcttgaagagctgcgggatgtcaatgatgtcactctcggccaggcccagctcccgcttcagcagctcgcggttccagtcgatgcatctctccacaaatgaattatgttctctcaatgtcttgtttgacagaatgttctttattttctgctgtttttttttcttgatcccttcgaacagcagggcctccccgtggccctcattctgctgctcctggaacagtttgtagcaggacctggggctggccaggagcagccggaagcccttcctgtcgggtgctggcacaaagctcaggaactcgtccacgtggcccacggacagccagtcagaatagagcttcacaggggcctgcacctgctgggcactgaggaagtcctgcagggcctggtgcatctgccggctgtcattgctgggataacagctgtccccgaagagaatcctgcccagcgggtattccttgcccctgactgtgactggggggc

SEQ ID NO: 339334 - DNA, 1000 bp, Homo Sapiens
tttttttttttttttttttaattcagagacctttttttattaaatgtgtaaaaagcagttctcatcttacaagctcaaaatcagacgaatgtatgagggtgtataattgttatatttataaactgtatcacccaaaaactcaatgaggacacaatctatattacattcaacatttgcatatttacatgatacttactgcaaagtaaatacaaaatgaactcccatcattttagttcagaacacaggtgatataatttcaaaacaaaggcaatttttttcaacaaagaacagaagtctcccaagtaccaattcactattttgcagaaaaatacaacactaattataagatttccattccagtttagtcagtaagatacgttgtttgtttgtttgtttgttttgtttttagaaacagggtctcactctgtcatacgggctggagttcagtggtgcgatcagaattcactgcagccttgaactcctgggctcaaagaatcttcccacctcagcctcccaaagcactgggattacaggtgtgagccatcacagtctagtaaggtatgtttttgttactgaaatacagctaaagttttggattttaatcaccaaaataacagtacttctggtttacaattgactttaaaataaaggatactaatatatatttattttcacattttttttaaatcttcaaaactgaaatacaattctgaaagtatttgtgccttgtcatttgttcaataaatttgatttgtttttaaacaggtcacaaaagttcaattagctaaccagaattctatatctattgcctgtctactggggttcagtcttaagtctgactatatcaaaagcagcagctcagaatttatttcataaaattaatcccaagagttactgggtagcttttaaagtatttcatcgcttataatacaactcactagatagatagtctatactagtgactcgtgacatcaaaattatctggagagttttttaaaaa

SEQ ID NO: 339335 - DNA, 1000 bp, Homo Sapiens
cagttctctagtatctttattatccattcccgggggcactcctggctgcccaactcaggggtgcagatgtctccctgcaccatgccaggtgtggtgcagaatgggaggcagggggatggagcagagagaggcctggactgcctgtggcctttgtcgagtcactgcccttctgtaggctctgctctggaaatgctggggtcagaggcaggtgttggggagcagccctgtctccctctgtcctccaggggagcagctgggcctgaggaggaagcacccctgccccatggtcccgaaggccccagaggacccatatccccctggggcagttggttgcccctccctgaccttgggctctggaaggtcagagcagcagagcagactgcccgttttcccccatctcagggcctggctgaggcagggcaggcaggagagaggcccctgagggcgggtttcaggccctgggccaggcactcagatggggtgcacgaactggtagacgaggcgctgggagatgtctggcttccggatgatgcccttcttgtaatactggcggatggagcggctcagcttgtcgtagttcatggcgggacggttcttgcggatgccccacagccgggccacctgggctgagtcctcaattttgaagatgcccttctccttgttgagccacctaatgaagcggccatagctgtggggcttgagtagcaactccttgaggaactgccacaggtggatgggctgcccggagcatgatgagtccacctcgctgtcggtccagctctcctcactggtcgaggcacagtagtgaatcgccccaggtgaagtccgctctttcatccaggccgctgacttccagatgtccaggtgggcgtgcagcacatccccacccaggggcgagcgctggcggaactgctcctccgacatggcgcacagctccttgcccgccagctcctggaaggccttgcccatggggggcagccggtattggtgctctgtccac

SEQ ID NO: 339336 - DNA, 1000 bp, Homo Sapiens; identical to SEQ ID NO: 246484

SEQ ID NO: 339337 - DNA, 644 bp, Homo Sapiens
tttttttttttttttttttttttaagattctgaccaaaacatttaattaacaaaaaaatattacaatagcagagaaaataataataataacaataaagagaaattagaagtgggagtcagggtagaaaaaaatgcaaaggccttggtccctaggagaccaacactccagctgagctggccttagccccagccccttctgagttttccttggctgctggcttctcatcttctcccatgagacgaatgttgtgcttttcccggaattcatttagttcttttccctttgcctgaagctgctgtgtcagtgtctcaatgatcttctgtatctgctccttgttgttctccaaagcgggcagcacctctttgacagttcgctccaccagcactcctccaaccatgcggtagcacttacgagtttcatctacctccttcagtgtatcgatcactaggctgtgctcattcaactccatctccaactcagctgctttggatgccaggcctcgctgttcctgccgaaggcggttgaagccagcaatcacctgctctgcggacaccgcccccttccccgcgccgctcccgctgctcttgccggcgcgaccgctgttctccgccatcttcgccgcctgctgggttccccagggagc

SEQ ID NO: 339338 - DNA, 1000 bp, Homo Sapiens
acggagattctgctatactttattccatatcatgttacaagaaaacaacagtgacagctgacaaaccattacatctttcataatacagacaaattacaactggtaacaaatatgcaacatgtattattccattctccttactatgtgtcatttgaaagtataatagttttctgaataatgctaccacatttcttaggtaccaatcccctgttagaaagtacacatctcagtgcatcatacaaaaaaaaataaaagataaaaggaaaactttaaaaatccactcccaactagagaatgtaggttttgtatgtgcctctaaaatatgctgctgtgggaaaaggaatgagaatagaagattgcttattttattgatttttttggtgtgtttttggtgtatgagaaaagtacaaggcagtaacatatacagtttcctctgcctacaagccagtaagggagatggaagttatgcgcaattatgcagcatattcctatgtataaggggcaggcaataatctaccccagtatatacagcctaaacatcctcttatataacaaagattacaaaaccaataatattcacagatgagtatcatatagacgcataacctagggtattgattatactggctgtcatatacacactgaggaaaggataccaagaggcctcactttctttgcaagcctggaggtgctcctagaaactttctagtcactcttgcgaggtagaaatcgcttctcaccccagaatcagtggatggacagccaccctgctttatgtaccctattttttgctgagtactgcaaacattttttttcacatcctatgtatctcatatttttaagtcaacaaaactgttattttaagaaaatgggaattaagtgtcaaatctcctttcagaatactgtgtgtgcagtgatgtgctaaggtgtttgtactattcttaccatctgtttgagttcaggctattccttcatataaaaataatctcacaaaacattc

SEQ ID NO: 339339 - DNA, 1000 bp, Homo Sapiens
ttttttttttttttttttatgaggaaatgtccacgtatcatatatttgataaattaaggacttgtaagccagagattattaagaactcatttaactcaataaaatgagaagacaagacagacaacccaaattaaaaatgagcaaatgatttgtatacatttcaccaaacaaagtcaaacaaatggccaataagcacataaaaaaagctcaacctaattagatattatggaaatgcaaattaaaaccaccatgagatgccactttgtacctacaaaaatggctataatcataaagacacaatcctggatgttggtgaggatttgaagacactagttttaaacattcctggtgggaatataaaatgtcacgttgggaaaacagtttgactgtttcttacaaagctaactattgatttttcatatggcccagcaatttctagcctagggaatctccccaacagaaaatgaaaaacatatgtgaacacaaagatctttatttacatgttcagagcaacattattcctaacagcccaagaagtgggaacaatccaaatgtccctcaactggtgaacctagaaataaaataggtcttttccatgcaatggaatagtattcggcaataaaaaaatcctaagtatcaatacatactacaacagatgaacctcaagaacaccatgctaagtgcaagacgccagacacaaaatactacatgtattatgattccatttatataagatgtagaaagaaaaacttataaagacagaaaacaactcagtggtgcctaggattgggaatattaatagacatgaggaaacttcttagggtcatggaaatattctaaaactggattgtggcgatgcataacgctagaaaatttactaaaagtcaatgaattataaaattacagtgtgtacattttacggcatgtaaattgtagtttgacaaagctgttaaaaataagccagttatgtgatcttgttaaaaactggaggaaaaaaatg

SEQ ID NO: 339340 - DNA, 1000 bp, Homo Sapiens; identical to SEQ ID NO: 159029

SEQ ID NO: 339341 - DNA, 1000 bp, Homo Sapiens
tttttttttttttttttggcattttgtgatcaaatttattttttgtttaaatttcatttactttgttttactgtaatttacacaagagactggcaagtaaactaggtattttacattcaccacacattccctcaaatctccacagttgttagaaaaacattaaaatccatgcgccgggctctcatttccatgtgcgcctaagctcccaatgatactacagatgccagcgagagttaagttcattaaaaggagagggctagactctttatttcacaaaattagcaataatcttcctcgcaccaaacactttgcagacaatgattatgctctgacaaaacctatcttacaacagtgcccagagagtaaacatcagtctttatcctgagtacacaaaggatgtatgaaatgtgggttttgttgctgaggataacagggtattgcaatgcagtagtgatcctacacatccttccttgtctgattcactgaaatcactccagtgggggagggatgcaggacatgtgggaaaacgaggagcaggcagggcaggactgtcagcaaatcagattactaatgtgatttgactgcaggggttggcgtgttttaggagggacaggaggttacaaaagacagtttgtgacctgaaggcttcaacaatataattctattcaagcttccaggactgacagaggaaaaactggattcagacagagaaagctgataaaaatcttacctagctattgttccttcctttaaataaaaaataaaattaaattaaaaaaagtggcagccgtttctgaccagcactctcatgatgcctattcagaatctgtcctgatgacgtcctacttgagagcacatcccacagtcagatgtccaccagtctcttggcggggcctcctcaccgcacgcaggccagactcacactgcatcttaaactgttcctatctcaaagtcactatctcctccttgaagtgtgtgttcccacaagaagagcaaaatg

SEQ ID NO: 339342 - DNA, 1000 bp, Homo Sapiens
ttttttttttttttttttgagatggagtcccgctctgttgcccaggctggagtgcagtggcgcaatcttggctccactgcaagctccgcctcccgggttcacaccattctcctgcctcagcctcccgagtagctgggactacaggactacaggcgccagccaccgtgccgggctaattttcttgcatttttagtagagatgggttttcaccgtgttagccaggatggtcttgatctcctgacctggtgatccgcccgcctcggcctcccaaagtgctgggattacaggagtgagccaccgcacctggccaggtctcagctttcaaactgacatccccatttccaccccagtccatgccagatgcccctcctttgtgctcccacagcgccctctgtacttctgtatcctaatacttatcactgttttgtagttgcctggttacttctttccctcagtaggccctaagcactgtgggcagggaccgtgttttattcactgatgtttccccagggcctaacgcagtccctggcaaatgaaagcactcagtaaatatttgctgtatgaatgaatgcatgatgaaggtcagcaaacccaaccccctctggatctggtgctcttaagatccatagctatcttggtgctggctaaaggacaaagctttggctccaactgaggctgggagagaagactgggccttcaaaccatctctgaaacctgtgacttcagctgcctggccccagctcttttgacttgatagggttctggtgtttgattagactgagcttgtctccacccaggccaccctcctagagtccccgacaaattgacctcgctgggcctgcttttatgaaaggtttattcctagtgctagatcccaatcttcttgggctctaagcacaattaaactgggtgggtgggtgagggtaggcctattcagatgcaaggccagcaatggggctccccattatccccacccctttggtcccagtccccttctctg

SEQ ID NO: 339343 - DNA, 1000 bp, Homo Sapiens
tttttttttttttttttttttttttttttttttttttttcctgtattttaaaaaagtttaattttaatccttcctagaggaatacagatttgaatgaaatacattcattccataaatacattagcagcaaaaccttcccaccagagtcctctactccagcccagaggttgtgccttgagcaggagagcatgttccatcaatcctgtcaacttaagggtgggtctgcttctgagaaacgctggatgtgcatgggagacacaatgaccaggtgcatgggtgacttaactaagctgggaccctgaaaacaggcccatgtggtcactattcagccttctttaccttccaaaaatcctttggcatcttccatgcttctctgatgaggttcctcagcactgagacaactgggaagacctaactttgcacatgcattaaataatgttattttgagttggcaatgttttaacacttttcataaggtaaatgaaacataaaagattattcccttccttcccttcctcaggtgagtccacatgtactcatcaggagacaatccagcaggcattatttgggctctctgtatctccaggccccctttgtctgaatggctggatgtttactggagacagggagccatgtctaaacctacaaagatctccacgttacaataaccaggtgacttgctcaggcttccatcaaagctaatttcttgggcagaggccaggcatctctcctcttgttctctccatcactgactactgactgactgctgcttttttatttgccctccaggcacctgccgaaactttggaaaacaagatctaccctaaacttccaagtggccaggagcagttaaggcaggtcctgctttaaacttactagctgccaagtagcacacttatgctgctgtgtcccaatccattctgtggtgagtataagtcacaagagtctgcataaaacactatcagcaatcaggatggctatggggcaaggaccgtttaga

SEQ ID NO: 339344 - DNA, 1000 bp, Homo Sapiens; identical to SEQ ID NO: 159031

SEQ ID NO: 339345 - DNA, 1000 bp, Homo Sapiens
gtacggacagcatgacgggccttgctttctctcatactgcctgtgtttcatgcttacataaaaacgtgaaattccatcatataaataatacgtacatgcttcatcccagactcaaacgtcctctgcgtgcaccttgcctttgagtccttgcttccaagaagcacagcatctctgaccaagtgtgtgtgagtgtgtttaaaggaaccacaaagcaaagataaggtttctctttttttcagagttcatgatcctaagactttctgtgttctctcctgtgactgagctgagtggggcttgtttgtttctcttctgtaaacaaggatattgttttttcccttttaggagtagagtcatcatttcaatcacatgaaagaaactagcttctccctgtgtccgtctggtccggagagcttgcgttttaggaacgtggtaacgtagtagctgaaaggagccaacggcttgatgggatagtctgtgccgaaactcccgatcccaacatgctgcgtacagacacacgagcgaaaacggttcgccctcccctgggtatccaaggatgaggacgtgagtatgaaagtggtccccgggcccagtatccattccgtcgtgtgacagacaggctaactgaccatcccttctccaataccaaaacattcttttttgttgttggggttggttgcttttttttttttttttaaatcgtttttctttttctttttttttttttaataagttaaagttaatacaaatataaaaaggggaaagtcctctagattcaatgacatccacaaattgtacattatttacaccaaaagcacagggctcgtgtgggtgaacagtctgcagtcaaagccgatgctgggtgtcctgtagtgtagcagcccccgcgccgggggctcaggctcaactgagggttttgtcattttcaagtctgaaagtggctgttctcctgcctttgttgtttcttcttttcctggcgtctgggtttttctcccaatggggt

SEQ ID NO: 339346 - DNA, 1000 bp, Homo Sapiens
ttttttttttttttttttttttttttttttttttttttttttttttttttttttttttttttttttttagtatgtacaaggatgtttattgtttgcagtggcaaaaaactggaaataatctgaaggcccatcaacaaggcaatgattcaatcaatcatgatacatctgtattaagtgagattacgtagcaatccaaaagaatgagtcagctatctagatagctgttgttccaaagagtttcatgatgcaatgttaagttagggaagccaaattgcagatgaataaatattttacatacatagtatttttaaaaggcataatcaagttaaaaagccctcacttgtgtatctgagcacagttaaggtggagcctacatctcaggctggaaggaggggacaggacgggggaaaatgggtggggaggaaagaaaacaaagagtaggcagggcgtggtggctcacacctgtaatcccagcactttgggaggccgaggcaggtggatcacctgatgtcaggagttcgagaccagcctggccaacatggcaaaacactgtctctactaaaaatacaaaaaaatttgcagggcttggtggtgggcacctgtaatcccacctacttgggaggatgaggcatgagaatcgcttaagcctggaaggtggaggttgtagtgagccaagatcacgccactgcactccagcctgggcaacagaatgagactctgcctcaaaaaaaaaagtatagaaaaatgagtagaaagcattgaattaagttaagtaaaaatttagaatataaaagctcacttttttattgcaaatatgaatgtttacatacgcaaatgcttaagaactaggaaagtgcaggggaaacagcaaacactgactcaatcagatgctgggattgttgtattattttggtctggaatatctgttgtaattttcatgtcacttttacaataaacttatattttaaaaagtcaacacttagcaggggctacgaaagca

SEQ ID NO: 339347 - DNA, 1000 bp, Homo Sapiens
ttttttttttttttttttttgggcggcaggatgctggtttatttactgtaggatctccagggccatcaaagccccctcgtgggatagggagactatttacacagccagggaggagggcagccaggaggcagagaccgggtcccgtatttccctctgcccgaatgaggaggggaggggcgtcctgggtcctgcagctgtagtcttggggttcagatggaaacttcatactcccgcgtatccccagcttcatacagcgggttgctgaagtccgactccacggtgatggggctgtaggagtgggagcccgagaagccgaaaagggactttccctgaagcttggtgtagtagatgtaaacgccactgccgaggacaatgaccaagcctagaggcagcaggatggccagggccaggttccccccttccagctgccgtgatggatctgtggtctgggtcacttccagttttcggttgtccaggagctcctcataggcaactttgcagagtgggggctggctggtccactgggaggggtggccgggcacacaggtgatggtgacctcgccgataagctcaaagccctcatagcagaagaagcgcagagactcgcccgcctggtagtggtgcttgtacagcgtctggtagccattctcgggaacccccgggttcaggcacggctcgtacttcaaggcgcatttggggaccctatcgctccacttgggtgtgcctgtgtcccggctgtagcaggtgagcatggctgccccctcgaggctgtaccctggcaggcagcggtactggacgtgggagccaacggggaagccggcgtccgaggcggtgcggtgcccgttggcaatctcgccagggtcagcacaagtcatgatcttttggcaggcgggcggcgcggcgctccaagacaggtcccactggcaagtgagaatgtcggagcctagcagctcgtagccaggctcgcactggtaggtgagcaccgtgccccggatcaggt

SEQ ID NO: 339348 - DNA, 1000 bp, Homo Sapiens
cccagaagcatttcctaaacacttgtaggaaaaataaagtcggactaaaatttttttttttttagtatctttgccttttttttttttttttttttacataagttttacaagataatacatttttacagtgacctgatgtggatacaactttgcaacttggcaaaaagcaaatcttaacttacattataattaatttgctgcattttacacatctctgattctcaattttggcaagtacaacaggttaagggttctatttagtgtccccttctgatgaatatgatgatcttgaacccattcttcctcctcaagcacggtcatcctcctctgatggcaacagcagaacctctgggaaaggaacctttcggtatccagaactcccaggtggcagcccagtgtgggatttggagcatgacaacaaaggcattttctcaacatttactaaaggagagtggggtgttctatacgctactgatggggactgtacatgaacacatttaaattgaattacaacaacattttagataggaaatatagaatcttataagaacataatctaaattataaccaattttaaatagcaaagtttaacaataaagctacttaagtgtttgaattagaaataaacagtaaaacatctgtattaattataacagagttgacatttgtttatattttatcttcagtattaaccaaaggagtggaatttagccagggttgcactttttaaaagttgtatatacttttatttattttacaaaaggaaaaaaaaagacatacttttcccataaaattccaggtcttactatgtaaaataaccatgcactacttcatgttataatcataattttagactatttccagtaggtaagtgtcataaagaaggaagagatatggcttccacagcttcaatgaggtgtaaggctagaccatattgcccatgtttttctggtaaaagctcaattactttatttactagtttagctgttgttgcaattgg

SEQ ID NO: 339349 - DNA, 1000 bp, Homo Sapiens
tttttttttttttttttacaatgatataagcacatctttatttttcatttaaacacttaatatttacaaaacattaaaccactcaattttgactattgtatcaaaagtgatatattttgcaacatatactgtaatttaaataattctattaattttcaaaaagtacatttaattaccatactaattttcaaaagaagagcaatggaatgtcagaagtaatctttcactatgtgccagtagcttgagtggttatattctgaaaaatgaatgacacattttctgttattctttcaagaaaaggatctgtaagatttaaatgatctccagaaaaatgtttccattgcttcagctgggacatagaaagaggtttcagggagttagatttctggtgatgtggaccaagctgacaatctctagagacaatgaatttttccaacgaatcacctgtatgaacttcttctcctgtacactcacagtcaagcagatcatgagtaacacaatctgaactttcatgtaatgtgaacaaatttttaagttcttctactgaaaactgaatatgttcagatgtcttggtgaggtcgacaactgccccacaaagaccttgcttactgatctgcctttgatagatcttttcttctattgtacctgtagttaggagtctgtaaatatgtacaggatatttctgaccatctctccatactctagacattgcctgaatgtcagtggctggattccaatcaatgtcatagagaattaagtgagatcctccaatgaggttaagtcctacaccaccagcttttgaacttaacaaaaaaataaaaaaagaagagtgttgactgttaaagccatcaacaatctgctgcctttgagagattggtgtttgtccatcaagtcttgtataagcatatccatgacgcttacatacttcttgtaaaatgttcaaggtttgtgtatagttggataccaacaccaccttttcagtaggtcgaagttcgtggat

SEQ ID NO: 339350 - DNA, 1000 bp, Homo Sapiens
tttttttagaggtacaaacaacaacagcaataacagctacaatttattgagcacttactaggtcttaaatatttgctaaatacatacacagtactcacaatagccccaggaaattatagatgtatttaagttttggatcaatgagtaatcgttagctgagtagaaagctcttttctaccctacaataagctcgacattaaagactgacattccaattaatataattaaccctggacttatagaactgttttctcataataatgcacatctactgctaaatgactactctcaaagttgttttctttttcatgttcaaagaaaattacatttctttcctttcacttttccaatagaatactcttcagttctactctagaatctcttaggaaattatttgaaatagaaatcaatttaagccctataactagagctttttctcttgttgagctgctttgcagggagaaaatggcatacatatacaaaataatactctgctgaaacacataacactgactcccaagaatactgcttacttactctttgtcaaacactgttacatgctaccaatattagatgtatcaggactcccttttcagtaactatggttcttggagtcctggataacttaaaaaaatagagacctgtctggctaaagaaatttaaaagttctctaactctcaaccagacaccttgggaactacaatatggatatgtcctacccagttcccaggagtacattatgaagaagttcatatacatcccacatccactgcagtatctcaaaactctcctagtaacagcatcctcccatcaccacaaataccaagagtattaattaaagagggacaagcctgccactatatccttcactcacaattccaaagatgtttgtcctggaaattctatcttatttttgtgagctcttagcatattgtgatagcatgacatcttcacatcaagtatactgcttggctagcatcaataatagttcaaacaaata

SEQ ID NO: 339351 - DNA, 1000 bp, Homo Sapiens
ttttttttttttttttttaaaagacagaaacaagtagaatctttattaaattctgtggaaggtataaatgagttattattaattgcacttggagcctctatagcttgatgattaaaattttcaaaagtttagagttaattaggctccaaatcctgagtcagactaaccacaaaataggaatctcagtaactattggtattcaagtattagtaattagcagttcaaaatttaacagctaagtatgttatgcctgagagtattttggagaattttagatttgatgagaggaaactgacttcactattttctaccgtaccttgtaacaaaagtggtgcaaagttttcattcatttatccttgaagtccatgccaaacctcatcaaatgcccaataacaaggcttcctctctggcatacagctatgtggttacagaagattccttctgtcctttgcaagtcttacatcttacatctaatatgatgctgtgtagcatacttagggaatcatattctatgtgaagttactgagtcacatgcacactgaaaggtcgaaggaacatgtttgagtgacaaagcagtctttttctctatcagaagattcttaaaaaaaaacaacaacaacaaatgaaaatataaaaccccatgagatatttatataaagttactcagatttgggccgacatggcttatctgaagagtgcatgccgggtaaattcagggtggcttttttctcagggtctggaagtgtgagagtttctggggcagactttttccggggccgatctttgggaacggacagaaattcgggtgcgtctgtggagagaggggtggatggagcactagaaggcgcactgcggacggaagaaggcagcagggggatgctggagatagaaattgcaggtgggaaaatgccgattttcttgttggtggcttcctgagtggctcgttcaaattctcggacttcatccattgtcatgtcataccactcatcaacccatgcaa

SEQ ID NO: 339352 - DNA, 1000 bp, Homo Sapiens
ttttttttgttttttgcttttagcatagtaaactctcctgtaatgaaaatgccacagttttggcagtgaacaaccagaggaatccccattaggattttccaacaaacagagataaatagctctttttcatgtacagaaatattggcttcaaaattagtgtactaaacacagtatatagaatgttgaataccattgttacatagtaaaaattgctttttttctgtcttagattatgttaaaaaatgcaaaccatggccgatttttttggcaattatttcttaagaccatattgcacaaaagtccttaaatacagatataagttatgctactggattaaatattacaacaactatgtggcaaatgaagcattttactttgcacatgcagtctctggagatacacgaggagactgttcataggactacaaatacactttgcttgcaagtagaatgagtcttgaataaaacaaacaatttggcaattcattgttttgtgtggtattttctccaaacttaaccatggaaaaccttgataaaaatggagacaaagaccataacggttgtgttttcacagtagcctgaggaatgctaaactgtagttctccaggaactcagtttctgatgttatttaactacttttatttcccatctcagccctccaaaatgattgtttttaaatgaacattaagattcagaagaagagccagcagtactttcaacaaatgacttataaatttgagagttcaaaaaccttggaaaagaatctctgtgcattaaagtatatatctgaagttgggcatcttcatacatgtgaggattgggatccaacagatttctattgatcacctctctaactcgagaatcaagactgacctcttttggtgatagtatagaaatgtaatcttcatatatcatcctagccttttcttcaattacttttttgttctgctccttctttaagtcttcacaagcaagccagaaaagtaggttctcttcactgt

SEQ ID NO: 339353 - DNA, 1000 bp, Homo Sapiens; identical to SEQ ID NO: 159033

SEQ ID NO: 339354 - DNA, 1000 bp, Homo Sapiens
ggtgaaaaattgtaatttattgaaactcaactcaaaaaatataagatgctgtagtgtacaatatattacacaaagcaccctcaggtgcacattcaagtcaagtaagaactccatatccctttccctagccctcccaccctgggaccttagtatttgttccatatacaatcatgcacacttaatttgaaaaaggaagccccagtatattttgatgtattaattagcaccaaacaagtgtacagttccatttttttaataaacaaacaaacaaaaataaacccaatcattaaaccaactggagagctaatggactcagccaatactgctgacatagatattatacattcatgtaaatacacagcctattctaccctaaacaacggtgtggctgcttctcagcctttgttcgagttggcaaatgtccccatgttgcagtgttggagccagtctgttactaaaacaaaattgctacttatgaacttcctacacaaagctcatctgtcttttttgttggaaataagtctaaaattggtgtggaaaacttagatctttcaagaaccaccactggccgaagataatgaagctgttttaaggcaagctctccacagtctgttaatgctttgtccaatacaaccctcaggttttccaaggaaggaactgttgttgtttcagctactattaaaggtgggattgcagtcaggttctcatgaattgtagagtcactggaagaatgaggtatgtcaacttcaggttcactgtcattcaccatattatttgccacaacattccctgttaaatcattactggactgtgaagaattacttaatgttaagtgctctgaaggctcccaatcatcaaaatcatcttctttctcttcactttcctgaataaatttcagaaatgaagattcaaatcccataggtttgtaagtcttcaaatcaaatgaccggggctgtgaatgtttcctaaaattctcttttgggacatgggttggattttt

SEQ ID NO: 339355 - DNA, 1000 bp, Homo Sapiens; identical to SEQ ID NO: 159034

SEQ ID NO: 339356 - DNA, 1000 bp, Homo Sapiens
ttttttttttttttttaatgtttcaccatgtttatttgatatcatgatttcttagtccttacacaaagggaaataagcactcccttcccttttttgttgcatgtgtgttagcaggagtcggaagaacagaatatgagggaacaagcagagggtgcagaaaatagaaagatggggaaagaaagatgctgttgaagacacagagtgagtgtttatatgaacccttctctaaataagcagtatcaacaaagagtacaaagctgacaacatggagtgtcttcttacagaaataatctgggaccacattcaacatacattatacagcatcagggtacaggttttccgtcagaaattatgtgtatattcttttttctcgcttttaagtttcattgatgacattgttcatatacttttagtgtattattaagcaaatattaatttaatcatataaaccaatcctggtcagcaaaaagcactgttagctgccatgtaaaggtccttctgtcaagtaaaacttcattctacacttctagcttcctatcagaggaacttcttgaaggaactctttcagttggctttacaactcatctgcaacaccaaatgtggattaaattcagatcacaccttggttgtgtatatatgtatataacagcccctggcacaattagctaatatcttgtaattgtaaacgaattgttctcttttagccatttcccccccatttcctataacggtctttatccaaatgctttggtgctccataagtaactgtgagtcagaggtgcctcagtgctggagatgcctgtcacagagaagatcagaatgtgtgaagataaccctgcattacgttcatctcatcagttctgcccaatccacaggggtaaaaaatggatgagatttgatatcttcaacaccagcaactccagcaccaagtcgttccagaggattgaactgcaagagctgttgaatgagtgagcgagcctcttcagagacacattctggc

SEQ ID NO: 339357 - DNA, 1000 bp, Homo Sapiens; identical to SEQ ID NO: 159035

SEQ ID NO: 339358 - DNA, 1000 bp, Homo Sapiens; identical to SEQ ID NO: 159036

SEQ ID NO: 339359 - DNA, 1000 bp, Homo Sapiens; identical to SEQ ID NO: 159037

SEQ ID NO: 339360 - DNA, 1000 bp, Homo Sapiens
tttttttaaaaaaactttaaaatttaaaagataaatattaagaaaataatacaagtagtactaaagagactgaagtttgggaaacaacggctatagtctgagtcatattttttagacgtgatttcaaaagaaacaataaatgtggattagaaaggaaacatccattactgtattttcgatacttgtgatgttccacagacgagctcatcacagtcttcttctacatcaggtgatttccagagttaagattcaagcaaaaatataaaagtaaaaagaaccaatttcacaccatcttggactttataaactcgtagtaccataaatgtgcaaataatctgatatttatcacagtcatttatttaaaacataaactttccaatttctgcagctttttatttggtctatactaatgcctcacaaaggcaaactcaggttgtagagttcctcctgcctggtcctcagagcaataccacatctattttctgaactcttcaggaaggattcaggactgctggccaagacttccaatggcatatgactgttcttccactgttatggccttgaagagagaaatcccctcctcctctgaatgatagtctcatggccaacattcttctgagaggactcttccatgctcacaggcacatcatgctgattttaaaaaaggaaagttggagagaaagaaagcagagcttctcctctgtggggaacagcttcttcatcacagtgcagttatgatatgttccctccttatccccctgaagccaaggcaatagatctgaaggatggtgtcagacatcataatcgggagccttgccctgggcttgccttagccagatctgtagtgtaacaaatgctcccacagtcacatgaaagaaaagctgccagaggttgcgcagttcatagagatacatgttgcatagacagattaagccaaaagtcaaaaaagatttgacattccgccagccggtgtagtagacaagtaaataacactggtaaa

SEQ ID NO: 339361 - DNA, 1000 bp, Homo Sapiens
gagacggagtctcgctctgtcgcccaggccggactgcggactgcagtggcgcaatctcggctcactgcaagctccgcttcccgggttcacgccattctcctgcctcagcctcccaagtagctgggactacaggcgcccgccaccgcgcccggctaattttttgtatttttagtagagacggggtttcaccttgttagccaggatggtctccatctcctgacctcatgatccacccgcctcggcctcccaaagtgctgggattacaggcgtgagccaccgcgcccggccaggtcaattcatttttaaggacaacagctgctgtttgtttcatgcttaacaccaacactcaaaatgacttatagtattttacaaattttacaaatgtttataattactatgaagatttacaaaaccctaaaacctatagcaaatatcgaacactcattacaaacattctaagtatttaactaattttagatagaaaaaactctaaaatatgtatggaattgccacttactaaacaggcagactttctgttcccttttttctagagctcttattagtgtttatccttatttttaatccctgtttctccaagttgatagctttgctctgaaatattcagtaattcacacaaaagaaaaaattagcaatatagaattatagacgtggaatcacgaagtaaaatcttttttgttaacaaatctggatctcttgcccaatgggtgacgttgtgctgaaggaggaggtgaatgggcattgttttatgtcaaaactaagtctatccacaggtcctctcctgtaacaaagatagaagaggtctaaagaagcaggagaccggccctcgatggaggtgcctcttagaaattagatgagtggttatgatttttgctcaatgttgctagagagcatggtttctctccttctacaagaaagagaaaaatggggaaaatttggtgagatgaagggtgaactcttaattcctccaagtcttgtaggt

SEQ ID NO: 339362 - DNA, 1000 bp, Homo Sapiens; identical to SEQ ID NO: 159038

SEQ ID NO: 339363 - DNA, 1000 bp, Homo Sapiens; identical to SEQ ID NO: 159039

SEQ ID NO: 339364 - DNA, 1000 bp, Homo Sapiens
ttttttttttttttttttttcaattcacaaaggtttattttgatgatttataaaagaaacattgccatagcaatttaaagctatttacaaatttaaaaataaatgtacataaatgtattcacatcacattaaacagttttaaaatattacacgtagtgttgaacacaaaacataaactaagttttaagccacataggtgttctgaaagcatgctcaacaaccacagccactggaggatggtccactggaaaaatatgatttcaggaaccagaagtaaagatgattaccctagtctcaggtgatgtggcctttaaaagtcactttaactttaaactgcaacacaaacttagatgaagacagactgaacaaacagtgagaattaattaaaaaaaaaattctcgtgtagcttaaaaacatagaacaggctgggcacagtggctcatgcctgtagtctcaacactttgtgaggccgagacaggaggatcgcttgaagccaggagttcaaaaccagcctgggcgacaaaacgagaccccatctctacaaaatacaaacgaacaaaacacagcacatagaaatttatactgtgatccatgtgagagtagatttaaaccaggatgatcttatttgtgattgactgggcatcgcacttttctttctttattctttttttttttttgagttggagtctcgctccatcgcccaggctggagtgcagtggcgtgatcttggttcactgcaacttccatctcccaggttcaagtgattctcctacctcagcctcctgagtatctgggattacaggcgcccgtcaccacgcccagctaattttttgtatttttagtagagatggggtttcaccatgctggccaggctggtctcgaactcctgatctcatgattcgcccacctcagccccccaaagtgctgggactacaggcatgagccaccgtgcccggccgcttcgcatttttcttttgcaggttgcatgccagccaatatt

SEQ ID NO: 339365 - DNA, 988 bp, Homo Sapiens
tttttttttttttttttttttttttttcattttaagtatttattgaataaaatgattctatcaacactgctactgtattcaagccagtgcaataaaaaagtgggtggacagaggtcattcactttgactttgcctgccccctccaaatccccagtgtaaacaggaaaatgagaagtcacaggtagaggacatgctgtccaggcccatgtaaccaggcatgtaacatacaaaggaagcccctctggttaactagtcctgaagaaggtaagcctcaagtatgcagcttaaaaaaaaaaaagtagaggcctcagctcatttgtgaaaggaagcaagagccataattaatgtaagtcctttgggaacctcattctggctgtgtgtaggtttcctggggcccctacataaatgggtaagacgaagtgcttcaaacaaactgtacggctccctttttaatgtctgaaggtctatggggactgtctcctaggatctttgcatgtctgttgaaacaaggcagctggggaacagtacttgtgctactgagtccataggctcatctgttatttgcctggggagccaggggggtaaattcccgaatccagcattgctctcctgcgggctgtttccttggcaacactgtggtttagccgtctcagtcgttcctgagcattctgtagaatgttgttaaccaagacaacgcgtcgccgggcattaagtagcttcttaacataggggtcaagatccagggccaccttctgatcctcatttatgcggcacagttctgtggctaggttgtcaatttgttcccggagctctacctggctctctctgacggcgtgtacgtgagagtcgagctgctgcacagcgggtcgcaggaactccagcagcccttcggcgaaaaggtcgcggcctgtgggccccgccaccggggtccctgcccccgatacagcggcggaaccagcccccgccatcacgaattgtcctgaagccc

SEQ ID NO: 339366 - DNA, 1000 bp, Homo Sapiens
tttttttttttttttttttttttttttttttttttttgctgtttttatttaaaattttattgaaaccctctttcacccgtttaccacttcctaagtaaaaatgcatgtaaactctgagcctgatggtattagcttcaaactattccttaaatacctgaaaatgtgacttttgaaacttgggaaagtgacgttaggacaaggatccattttacatgcctgcttctttgttcattcatgagcagagctagactaagaaacctttcaatgagagggagagcatgtatgcaggagtataactctctattctgaattctaccctcgctgggcccatgaaaggtaaggaacactttagatagggtggggaaggaggtttggaaaacttgtgataaagaggagtaaatttttcctaaattcttagtaaaacctaacaggttacccacagagtccgtgtcttaagttaatgcacttatataactagcatcagagtctccttcaagtgccctgtatatctgtcatcagtttcctccttcaaagatttctcttgtgtatactactatatagttagcaaggccagctttccttgcctatgcctatgacaaattggctagaataatttagggtttttgaatgccatctcttaactatatctcattggaggtgtctgcatgtacgagtgtgtgtggtttttaacagaataacaaaatgccttaaggccctttaacgtgtttttaaaatctacctgtagaacaaatcctatgcatgcgaatgaccatgaatagttcctcacatattcaagctacgaatgtttaaagtattacataaatttagaaaatattatctaaaggtatttcccattaaataaatctagaatatacttagttcaaatatttagaaggatttaattactgttactcaaaactactctgctgtgaatttgagtatcacaatataactttgctcagttattaagtggttgatagctgtccaccctctgcagaag

SEQ ID NO: 339367 - DNA, 1000 bp, Homo Sapiens; identical to SEQ ID NO: 159040

SEQ ID NO: 339368 - DNA, 1000 bp, Homo Sapiens
taaagacgaagacacattttcttctattttttgagacagtacactttgtgattcacaggataacttgcatcagacgcaatttaatgaaagctctcaaataagcgattttattcctatccatgattgcagacatttacaaaaccataacatctgagttcaccttaaaaaataacttatataaagcagtgatatacacagcacaaaatagttcagggagggggcaggagcaacttgtaataattaaaatgtaaacgtgaaaaaaaggatggaataaaagtccctacttatttctacttaagatgtcatgtgataatattttacaatgtcctgtgggtcaatgtatgtatgtgtatatgtctgtataacatacacatatacagtacattctctttcccacacatatacatacacacataattatttgcagttcagtttagggcaattctaatatgccactccgtacagttgtttgaatcacatttggacccgctttcttcacaaaagaggggagagagcaggaaataaaaaggttggtttggtgtgactgagattcctttgtttaactgtacactgtgatgaataattttcttccgtagtagttctgtgaagggctgactcactgtggttttcatgaggagacttggtaatggatcacacgctcattgtcatgctaggggagtaactctcactctgaaaaggatttaagaaatttccccccatttcgccatcatcccttggagtgcccggttgattactcaggctcatattattgggagaattcttggaaatactgtccatatctcctgagcctaaagagccattcatgtgatgtgactccattcctcctaatccacccatgggaccatctgacccaggacccattggaaaattaggtctgttaggtccaggaggtactgcattcattaaagtatacatgttatcaccagagttggttgaatctgctggactaggcatgatgggtgttcctggtggccctcca

SEQ ID NO: 339369 - DNA, 1000 bp, Homo Sapiens
ttttttttttttttttttttttttttttttttttttttttttttttttttttttttttttttttttttttttttttttttaacgtgtggattcaaacatgtttattgagcgaatcattaggacacaaaataggctgagaaagatgttccaaaaatccaggagactatgggctatttccattaaacacagaggtgctgcccttctccactccaaacagaacaggaaaaaggcaaggggactgggccacagtgcattagggaggacagggtctctcggcttctctaccccagagggaaaggttaggttagaaaaacaatgcccaactctttcccctcagagcccagggctgaagcctgggggaatgcttcattttgctccttttctctttgccttttccaaatggtcacattcttgaggtagggagtggagctggggaggggcccagagtcctgtcagaaatcctcaatatccagctctgtagaatctaagaggtccagcccgcgctcactggtggaagagtagctacttgcttgcatgtctgtatcctgccgttcttcatttgactcatcctggatttctaactcttcttcctcgtcctcttccataaggctgagtcgcatcagctggttgcccaggccaggacctgaagggttgtgtggagtctggaaatattgtggacccaagaaccttgacctctcggtgcctgcgacgggctgaccctgggcaaaatccaactctgagccatcttcttcctccatctctttcaacccccacaggggctgcctgctcttcacagctgtggaggtgagggtgggcgtgggcgggatgctgttcagctgcagactttcttcctgggacgaggagacgtcctctctgttaggcttggcaggcccttcaacgcgcctcctcttggagctggggaggacctgagggctggtctctgctgtgttctccacagggctgagggagtggcagtaggtggtgactgggccccagggat

SEQ ID NO: 339370 - DNA, 1000 bp, Homo Sapiens
ttttttttttttttttttttttttttttttttttttttttttttttttttttttttttttttttttttttttttttttcccttcagaggaaggctttattgtaacataaaatacacaactttgtgactgtaactctgcataggatatatttcttttttttgaggcagagtcaaatttgaggccccaaattgtacacaatacttttttttggtggctaaataactaatctgccttgacactaaaatatgtatctgaaataatttcaccaagttttaaaaagaaaaattataaaaagtatactttcattttaagttatattcgattttagtctccccctaccccctagaaaaaacctgcacatctcacacacggagctgaaacttttgaggacttgtgtgtgtctgggagtgggtgagaggctgatggggtcgagacacaccactacctttatcttgtggtttgcaggaacaaggaggagagagaagatagaacgcagagagcgagcacacctttcatcaaaaatctccactctctaggcacagcctcggtaacaccgaggacagctcacaactggacaagcagggaaaccccagctcagggaagccacactcatcagctctcttcctccccaacccagtgccaactgcaaagtgagccaggacggcctggctgctctgtcctcagcaggccctggggtgggtccactcccaacctgaaagtgtatcaagtctgaccccccaaccagggttgctggaacagagagcgaggtctcagaggcaggtgctggtgaagcatctctgggagacgggcagggagtgactctacgagcctggatccctgagcaggcaggctctccttctcacccttccccgatgcacccatcctcatggttggaattttcatcaaatcttgaggggtagggaggggctgagtgggatgcgggtagcctgctcctcagaggcagagagactctactgcctggcatagaaaaataaatcag

SEQ ID NO: 339371 - DNA, 1000 bp, Homo Sapiens; identical to SEQ ID NO: 159041

SEQ ID NO: 339372 - DNA, 1000 bp, Homo Sapiens
ttttttttttttttttctttgtcttctttttttttaatttaatttttattttctttttctttttctgtgagcctatggcttgtattgaaactttaggttttcttgagctgtggtgctgagggcaggaagaagacactaacagcgaagcatgtgtttgtggttgttggaggattcctgcagttcacttgaggtggcggaatcttctggtggagggatgccctccggcgtgggtctggggttgtgtgctcctggtggtcctagtggttttctttgcctgtggtccagatactgctggatactggcagctcctgtggttgggccagtttgtacacttggcgttaggcttgatcagtgatgttgctgaccctcgcccatgctgggtaagtgtccaggtggaagaggctaactccccaggtgttgatggccaccattactatcaccagtccaataacgttgactcccaggccagctttcaccatatctttgatctggcagtgcccatagctgaagacgatggcattagggggattgcccacaggcagcatcactgcaaaggagatgcacatggtgactgggatcagggtgtagagggggttaatgtgcagcgtttcagacaggctgcacaggatgggcaggaagatggtgatggttgctgggttgctcacaaactcagtgacaatggacacgaggatgcatgccagcagggtgacagcccacggtgggaggctgctcagggacaacatctggttcccaatccatgtagagaggccagagctcttgctaccagaagccagagcatagcctcccccaaccagaatgacaatctcccagggcatggtcttctggaagtccttccacgtgatgatgggctcggtccccagtgagtgctcctggttctctccatcattctttttcccaaagcagggcttcttcgctggaatgaggaagaggaggaagccaaggaagacagagactgtggcatcagtacggtagcctttct

SEQ ID NO: 339373 - DNA, 1000 bp, Homo Sapiens
ttttttttttttttttttttgaggaagggcagctgccaaaggttttattctccaggaggaggggctctcgggggctgtgagcagcaggcacgaggactttattgcacgtgtggttaggtgatgacgacctacagctgcactgggaactgggactcagagtgccccgacctcctgctctatctctctctgtccctctctccctctctgtctctctgcctctctccctctctgcctctctccctctctgcctctctccttctctgcctgtctctttccttctctgcctctttccctctctgcctctcttcccctctgtctctctctccctctgtctctctctccctctctgtctcctctgtttctctccctctctgcctcctctgtctctctctcctcatatctctctcccctctccccacctctctttctctctcccctcctctccatctctctccctcctcctttccctccctgacccccatttatgcacctgggcccccctcctgggcaggcacacacacaatgccaaggccactgtctgggatgtgtgggcaaggctgcaggactgtggtcctggtgtggcacccccaccttccagcacaagtggggtcgggggtcccaggcgtgactgcgctctcctgcgtgggcgccctgcactcagggaagcagaagctgcaggtctccactggctcgggggatgtgctcacagggctgccggcttccatcgcgtgatcctgggaagacttggccggactttgacggggccttgagcggggctggcaggagcagggatcccccctcttcttgaggaagcaggccaccgccaccaggaagcagcagaggacggcacacaggcagagccccagcgtgctgtagaccagggccacctgatctgcactcagcttcagccccgggagagctggacttgcttctgagcctctgtgctccaatccttggtaccttcccgagttgtctgaattgttttcaacttctccactcc

SEQ ID NO: 339374 - DNA, 1000 bp, Homo Sapiens
ttttttttttttttttttttttttttttttttttttttttttttttttttttttttttttaatccccagctcatatttatttgggcacagagtgggcactcaaatatctgatgaacttgatgaactgaaaagaggtctccttaaacaagatatcatctcccgaagagagaagtcccaaccatataaaatgtatgatcaagtcccagaaaactttgccttcccaaggaatgtgtttctaatttggtttcaaagcacactggttcccacttttaccactttcatgacattggacaatagtactactcttttctacttttcttccagacctggggacttgatattctcttagcctcatatcatctttgcaaggagttcacagagaggattattctccatcttacaaatagaactgaggcccagaaggaaatcccttagtgtctttttgatggaacacagttctgtgatgggaagctatcccagtctcccatccttgcaaaactgctgcttagtactcaggtgttctctaggttgttctggaacatttacaaacttctttgggtgtgaggatgtgctgccacaaggccaaaaatcacattctctctctctctcctctcctctctaccattctcctcagtgccaggtggggacagattccacccactgggcctgggaggaagaaaagcaccttggccactagtcagggaggagtcacagccagcaagaagagagagacctaagtagacaagagtagtttcaatgggaagaagcagggccaccagtaagaaaaccaggagactccttctgaaaggcttccacctgggaggaaagatggcagcagcgccatgaggaggccagatccctcctcctcaatcctctgcgccgggccctcccagagtcacttcttcagggcacccaggctcttcagggtctcttgggcctgggtcagctgctgctgcagcctctggcgggtgctctcgttggaggcccgcttcaggtggcc

SEQ ID NO: 339375 - DNA, 1000 bp, Homo Sapiens; identical to SEQ ID NO: 159042

SEQ ID NO: 339376 - DNA, 658 bp, Homo Sapiens
ttttttttttgtaggtgtcaacaaacttgtttatatatatatatatatatatatatacacatacatacacacacagtcacattccagtgtgacaaatactccttcaccaggagacagcgctaccactccgggatcttgaagactctctacagagagcctaggcctggcagtcttcacagatgacacccaacagggagcacgtttattaaagtgggaaggggtggggtacaccccagggtgtatactgacagggacctcatgcaggcccagagctctgctgcaccctcttcatcagctcttcatcctgcatagacaactctgtcaactttttgcccatccgctcatggatgtccaggtacttagagacacatcggtccaggcacacagactcgcccttggagagctctgcttccttgtagtgaggaggcacacacttccggtggcaggcactggtcattctgttgtacatatcggccatcatctccacctccagctccgcagccagctgttgggccctgagaggatccatctcagcctagcaccgtggaagggatctccttctggcctcctaatccactgcctgggacggatcacaatgcccacggagaccccaacttctgacaaatactataacgttaccmcgctcycgtgaggctcc

SEQ ID NO: 339377 - DNA, 423 bp, Homo Sapiens
ttttttttttttgaacatttcatcttttactttttagcaccaacagacttgataacagcctgatgctgatctgacaatgggttgatagccttcccccactgacccttaaatctgcttagtaacaagtcctttgcttctgtcattctcctgggggatggcctactgccctcctttctgtacaatctgggcaaaccgactggtgatggcaagagtggtgtcaatgaagcggtctacacagctggagagacaattttcagtgcgagagtctaggcgattccctggcttctccacacatttatcccaacataactccatgaagtgatgcacctgtgcagtaaactgcgccttctgctgctcggcggccaccaggcgctgcaactccgcttcatcggcttcgcccagctccgccattgttcgcctcag

SEQ ID NO: 339378 - DNA, 1000 bp, Homo Sapiens
tttttttttttttttttttttttttttttttgatatttccatttattttactttgagtaataaaaatttttctatctcatacatgatcgaacacataagttgctttaaaattaacagtcacaattgaagaaacaatggtttatttttctaatcaagtgaccaagctgctgaatcataaggcctcaacaaatgttgcatcttattatttcactgaacaataagaccttctattgtgattattcctggtaaatagcaattttgtttctccagcggtttccatttgccaaacagtcatgacagatggttgaacatggtggctactgctttcaggggattctatcagatgagtcctcatttccaataaagcagctgttggcaatctttcatcaaaagttcatccatcaggacttctctatcgtggttggccaaggagtcctgctttggctgccagggcttcattctgctgaatatgatattcctgaaatctcatggatattctttgtgtcatttttaaatatttctgtaagcaatgttctgaacaggtggtctcttcaggttttacttctcttgttgtgaagtctttaacacagtccaaaaagcaggtctctgtaagtttattgtaggtccccagaaattccttaaactgttttatctgatcagattctggtatttgtgcagccatattcttctggtacctttattagtcaccttttctgatgcatgagtttcctttctgttctggaaaagtagttgtccaacctttgcttgaatgtctccaataaggcctgattcttacttaagcacaggctctcgcagccgacatcagtacaaggctggcggttgttgggggacggttgagccttgggagggagggtcagggtctggacaggagccgcggccgccagatgggaaagaacacgtgggagcagtaatgtcaagtgacacttaaacccttagacgccgattcgttataacgcgaggaaatctaatcccacgtccc

SEQ ID NO: 339379 - DNA, 1000 bp, Homo Sapiens
aacaaatccaaagtttaattattaaggattacaaatatttttagcagtgtagttaggcaatccaagcctggacttccacttcattcctactaaactacttgcagaactgaggaggcaggagactagagtacagagagcattttagttctatcacaaaggtctagaactgtttctacagtcacaggaagaaacaggtatggcaccgtggccagaagggggtaggtattcacaaaaagtgggtatcaaggtgtcaaactttgtcttctgatagttttccagagattcctgtatagaagggagcagggagagcctactatccgaaaccattccctgaaccctctgaattctgaagcatgtggatttctcagtcttgttctacccatcccctttcccagctttctgctccttcccactcacctttccttccccctggccattttcttcctcatcagagtctaaaaccaagtcccctatggtaatgacggagctgcacagagacggaggacacactgtatgagggaaaccagaatcaaactactacttctagatgaacacaggctcttgagagtccccaagagaggaggctgttgatccaatcctgactcagactacctacctggcttcctggccctaggaggtaataatgatagtctcagggggtccatgtatcaatccaagcaattcctgaggtgagagcaagcaaagaggataggatgaagggaaggcaggcaaagaatgtgctcctattaagaagcaactctgttccactcactccttttgctctgtggcaggcaagtcaactgggttctccttcagagcccttccccccagggtctggtatggacccttatacttcccattggagggtgctcttgtgcccatggctaggtctgctgtgtatatcgcatgttcttccttgctctcaggattagatatgacctgggttggtgagccgagattcctaaagggaaacagcatgactgtggggcgctccttatgg

SEQ ID NO: 339380 - DNA, 1000 bp, Homo Sapiens; identical to SEQ ID NO: 159044

SEQ ID NO: 339381 - DNA, 1000 bp, Homo Sapiens
ctatgtatagtcagttaggactttggcaaatataaagcacaaccaatatactgatgtagggtggaaaataatttaaaaaattaatttaataaaatgcctggagcagtaagtaacaattattaacaatacaacaatgaagctgtctgtactttcatttaacaacacacttaaggcaaatgttgaattaatataaaaataatatgtggtaaactgatacttgacatgatacaataaaaattaattttcacgttgaagacctagttatgacaacatctctatatgccttctaaatacctaatttctcagttgtgcagagcatagctcactatggcctaataagatgtcaatcagaatatccagaatatttcttaatatagagcaatacatttcccctaccacatcaggcaaaataatttaatatatttattttcacaaaaggctcatactaactccaaactatagggttttttaaatttctagtactaattctgattcttaaagatagctatcattggtattctaaatttcatgctgttcttaaaaagagcaaaatgcttatcctgtaagttttactctaattcacccctaaaatttactttatgtgggaaagtttcaccataaaaaatctactatttatataggtcgagattgattctactacctttgtagaacaagcagaggctcatttgtataagataaactgggtttcaacatctaactttacactgtgactctgggaaggttacataaattctttgagcctcactttctgaactacaaaacgagaacatgatgacagtcctcaaagtgtagcatggaatttaaaaagagctagtgcacattcctagcacacgggtaggagtagtatagaacagtataggtgttaatgttaatgactttttctcctctctttcccatttctggcatattttggctaacgggagattagtgagaaaatatggaagaagttactggaataaatcagctctactaaaaggct

SEQ ID NO: 339382 - DNA, 1000 bp, Homo Sapiens
aaatccacattctttaatgaaaccatccgttctaggtagagacatatgttaggtcctctccactttctctttgaaactgacatcatttcatgaaatgtaaaattacacaaaataaaaaatacccatatgtttacatataatactttaaacaattttcctttttaaaaataaaattttaggcatttggtattactcttcagaagttcggtctacaaaagaaactttaaaaacatctgctaaagccaagggaacatttgttcacaaatggaacgctaacaataccaatctgaaagctatcaaagggacccaatcaatagaaaatctcaatgtgaatttgctagttagcaggattttacaaattatttaaatcagctgagcaattcatgagtgatatgaaactttacagcaggggtgtcccatcttttggcttccctgggccacattggaagaagaattatcttgggccacacataaaatacactaacgatagctgacgagaaaaaaaaaaatcacagaaagaatcttacaatgttttttaaaaagtttacgaatttgtgtcgggccatattcaaagccgtcctgggccaagggttggacaagcttgctttagagagaaattgtaaagtagaaataaaaaggaaacttcaccttacaggtaaatacctctaaatatttaccttagaggaaaatagagggaatagtggatcaatgaacagcctctctttctctgtttgaagaaattccactggctaaagttaattccagattttttcctgccctgcaatccaggcttagcttttgctagaccgggttacaccagaacggagccaggctaaaaacccagaccccaaatccttcattagcctgttgtcctaagacaattctctgaactaaaactattcttgcaactcactgtcatccccaaagcttggtacccaattaaagcacaaagcaggctgcagtgatatcttctacctctgctgtttgcttctggggatgc

SEQ ID NO: 339383 - DNA, 1000 bp, Homo Sapiens
ttccaattgcagctatttaattcatgtgaatccccacattatccctaagtaaatattttgtttcacagaaagcttgtccttttgtttttctgtgtacacgtgcgcactggcgcttgtgcgtgtatgtgtgtgtgcgtgcatgtgtcatttgctaccaggtgaatgtttcagttctggtttctgtttagtcttccttttttttcttttttctttacttaaaattatttttccttttagaaagttcaccaggaaaccagctcccctcccaccacgccgggcaggccacagccatctttttaaaatccgcgctgattttccctcacacccccaaacaggaactcctcaggatggcctcagaaggctggagtctctccctgtctggcgggacaccctggtggcggtgaaggcccctctgccacaacggaggtttctgattgtgggacacagtctggtttttgttttcttcctgtcttctaattaaaaaagacattcctgggtgacaggcacagtgcaggagtgtgagctatcgaaacaacctggtgaagtctcgcaaggcccagcaaacttgtttacattcctcagcactagtgacttgcttgtggaagtctgtaagttgtttgtgtgtcactgtgacggctcccacggttgtttcctttggcaaaccttttaaggaattttctaaccatcgacaaaaagtcggtctgtcaacctgcatgatctcccagagcacttcagccacatctggtagggtatagggggggaggcaaaagcagcaggtgtgcagcagctggctgacaagctgctgtccaagctggttcatcacctgtccaatcagttctttccgtaattcaaagtcttcttcatgatcattggctacccctgtatgaatgaggtctcgtagaaacctcatgacactacaattggcatcccggtggtccagggtagtagaggcaatggcccactgtaagatagggatgaccacttggctccgcagcaaggt

SEQ ID NO: 339384 - DNA, 1000 bp, Homo Sapiens
ttttttttttttttttttttttttttttttttttttttttatatatatatgtatttataactggttacacgttggattcataattaggcatcaccagtagtagttggcacagttttgttatttaagctcagggtcaagttctgtttcattttgtcgttccaaagtacaaaaagaaaaaaaaaatcaaaggcatttcatctccatggtgttttcttaaatacagtaatgtcataggaaacagtatgtacagatgagcagtgcctcctgacccctcctctgtctcttggagataggggctggggtccgatggagacgggtcaatgcggcctgctgctggactccgatgcctgcctcttgcgtgaaggggtgtagccgttgagacagccattggtctgccgtttggagggccctccattcaggatgtcctggatgtgctgcacgatgaggttgatggccaccagattatctgcacctctagggatgatcacatcagcatacttctttgttggcaagcagaattcctcaaaggcaggcttgacgaacgtaatgtactgagataaaatctgctcaagatccctgcctctctcgctgatgtcccttaatactctgcgtgagagccgggtgtccgcatctgtatccacaaaaagcttcatctggaacaggtctcgtacctcctgggagtagaaggccaggatcccttcaaagagcaccacgtctgcgggatagacagtaactgtctcctccttccgggaatgggagacaaagtcatacacggggatctggactgttttcccttcagtgatttctttgagtgttttgagaatgagttcattgtcaaaggcatccgggtggtcaaagttgaactggcccttcagggctttggccttctgctccgaggtaaggacacggtagaagctatcctggctcaggatgaccacctgcttctggcgatagtccacctcattctgccccaggagctgcacgatcttagcacacacgg

SEQ ID NO: 339385 - DNA, 1000 bp, Homo Sapiens
tttttttttttttttttttcccttcttgtcattgttttccttttatttcagtgagagacacacacactcacactgcactcacgcacacaagctgcgggaccaaggccatttggtcacgagtctctgagctggggggcaggtggggaagagtgtgtggctgcagcccctcctctccggggcctgctcagtgctgtccgcttggggcacaggagactgggaaggtgctgtgctcgggactcagtgtcacagggtgggagtcttaagtgttagctttcttgcagctgctggcgctgcccactttccgttctagccagctgtatggctcgaaggccgaggaacccagttcgtagccggcaggcagatccaggagcggggccgaggaaaagcagacagctggcagagggggcggcagtgggggggacgctgaggccgaggacagcgggttgaggcgtggggaggagttcctggggtcacctaaggaggtgcccctgtggctggcaggtaggcctggcaggctaggggtcagcgccaggaggctaggggccctgggcacagagagcagccggccctgctccagcagccgcagaatgttggaggtggcaaaggcctcggaggctgaggaggacgcccgcttctccaggtctctgctctggtctttcttctgcttggtgcggcggttctggaaccagaccttcacctgggtctcggagaggttcagctggcgggccagctcagtgcgctcgcggcccaccacatactggcagcgctggaactccatctccaggcggtacagctgctcggcagtgaaggatgtacgtgtccgcttgggccggtccaggtccaggcccttaggcaggacaatttcccgaattgtccctttggcatctcgcaccagtatgcggcggcagtggtctgcctcgccgggcccgggctgcccgtcgctgtcggctccactctccctggagcctgcgggactggaggctgaggtcccggccacctc

SEQ ID NO: 339386 - DNA, 1000 bp, Homo Sapiens; identical to SEQ ID NO: 159049

SEQ ID NO: 339387 - DNA, 1000 bp, Homo Sapiens
tttttttttttttttcagatctgtaagtttatttgctcaatgtacgacagctacataatgactcacattcatgatattccatcactgaggaaactgctaaagatggtccgtgtgtgaaataattccttagagaaacacggagctggaaaaataatcactgattagaccttaaaaatagttcactgcataacatgacaaaaagcacaaaggctcattcagagaacatatttgttgttctccaacactgtaatagttataatttcaccatgacaaacaccagacattaagattaagctaacactggtgtttcttttgctcccccccttttaaaaacaaaatatataactgcatgtcactatagcaacatccaaaacagatcaatttgttacaatcactatttggtagagcaaactttacccccaaaaggaaaaattaaattaaaaaaaaaaaacctttaaaaaatttgaagacttaattttttttgtcataggaatacataacacctacagtataagttaatcaatttcaagctactgtatagaaatacaacactagcatgcacaatattgtatcaatagagtaatggaggagtaatcatttcactggagagacagtatcataggcaagtgcatttctttaaaaataaagaaaagaaaaaccattcaagctgcttaaatatcaagtctcccattccctctccgttttcagccctcaggtgtgatttttatcttgcattattctaaaaagcagccagagccaaagctgaaatttaaaggaaaaataggttttgtaattccagtaaatcatttccaaatgctacaaggaaaaacgcaacactgctcactggacatgaagataaattagggaaagccccacctaccctgccccccccctccccccccaaatcgtcttcctcccatggcaatgactttaggcgcctgtgagaggcacaaaagcggcaaagcttcttctactagttcttctggtaggcttcacttaa

SEQ ID NO: 339388 - DNA, 1000 bp, Homo Sapiens; identical to SEQ ID NO: 159050

SEQ ID NO: 339389 - DNA, 1000 bp, Homo Sapiens
ttttttttttaatgggattccttatatgacaaaaagcgacaagaagaggacaccgtctgggtgggatgcacgtcagcctggcaggctcctgggctcagcgtcctgggtgcgtcctggaagctcttctcagtgggctgtgctggggcggctcctccgagggtgccgtgagctccgcttctgtagtctgcgtttgtaggtggtggggtctgtgcaggtgatccgaggctcctcccagtgcccgctgggctggcaccggatggtgggcatgtggcgctggacaaacccctctgtgcactggtaccgcaccagggaattgatctcataccggtccttcttctgcccgaaggtcctggcatgctccaccacagggggctctccgcaggccactgtgccctttttacacgtgaaggggaggtggtaattgcagggaacatcattccactcgcccttctcgtgccagatcatcaccacacagtcctctccagcggcaaaaaagttgtcaggctggttggggcgccagttctcaaattgcatggggtgtccatctgaccagcggaagtccccttcgatggtcctgtcgttcaggccgatccactggtagtcttgggcattgttgttgacaaactcctgctcctcgggggtgacgatgctgctcaggtgtgactgctgctcccgacaccggcgctcagcatccacccaggtctcgcggtccgggaagtggcggtaacagtggccctggtacttgttccagccctcctcacatacctcctggtctatgttacagtgctcgccagtgtagccaggggggcacaggcatatgacgtgtccctctgtctccttgcaggtcccagctccacagggctcctctgcacaggacctggcgggggctgcagcagttgattctgattcacgtttccattccggagaagctgggatggacgcatctgttggggaggtggctgtttcgactgtgtgagtctcttctcctgagtacaggagg

SEQ ID NO: 339390 - DNA, 1000 bp, Homo Sapiens
tttttttttttttgctctttcagccatttctttttatttacagtttgtgttcaatgcaaatcaattccataagaagttactatgaatcaaagcgtaaatacacaaacacaatatacaatccaaaatagatgtacagcattctggaataaagcaagagtgttcattcacacacacagtagcttcaaaactgttcgatctgtttgttcccatgtagttttctaaagatggaaaaaaaggactttggtcatcaagactactgtggccatattagattactggaacatctaagcatcagtgtgtgaccatgcgaacaaaagacttcggggagtgtctatttttaaaaaggtttatgtgtgtcgaggcagttgtaaaagatttactgcagaatcaagcccacttttaggcttaggaccaggttctaactatctaaaaatattgactgataacaaaaagtgttctaaatgtggctattctgatccatagttgttttttaaagaaaaaaaatgtatatacagaaagagtataaaagtttgtgaatttaatgcaaattagcttccagtcttcacttcccaaatacttgatttatagttttgactcctttacatttttgccttcttaatttcaagatttgcaattttgccttcaaaacagatcatttttttaaattgtaaaaagtattcaacatatgcagaaataaaaagcattttgatggctgggcgcgggggctcaagcctgtaatcccagcactttgggaggccgaggcgggtggatcacctgaggtcaggagttcgaaaccagcctgggcaacatggtgaaaccctgtctctactaaaattacaaaaattagccgggcatggtggcaggtgcctgtaatcccagctacttgggaggctgaggcaggagaatcgcttgagcccgggaggcaaatggtacactgatctgagatcgcaccactgcactccggcctgggcgacaaagtgagactgtctaaaaaataata

SEQ ID NO: 339391 - DNA, 1000 bp, Homo Sapiens
tttttttggttttcttttaaaataagactttactgaatatatcaacaaggtactgtatagtgtagagtgaagtttgtcattaacaaagtgtgcgacatggtaggtctcagaggatgtgtgatgcagaatctttcagccccttatcagagagaacacactaaacagaaaccagaagcaaatcagcatatggttcaaacaataacaaatcatcaggttaactttcagtgaatatacactagtcctatgagcgacacacacttggcaatgccttcaccttgccttaaacattataaatcttacattccagggacacctttacaaatgcccctgtttgtgtgtgtgtgtgtgtgtgtgtacaagcatgtgcatgtttgataataatttttaaatgcctgttgcaatggccttgctttgtgctcttctggtgggtgtgcaggtagaaaacaaaaaactatagtaaaaaaatttgttttgttataacaacggtatcagacatatacaaaactctttctccacagtgacaagcattccccattgctagtaactgtcttttgaccctgctgaagaaatcagagaaggatgtaggttatgccttcttagcattcatattttgactttagaaagagcatcaggcaaggtttgacaagaccaagaacaagaccaagaactgttttgttctgtgtgagtatcttttttccatttggggcactgttttctgctttgctttcccatgcagctggaatggtaagtcatgagcaaaactgctattctcatgttctaaagtaaaatgtaatgtctccttgttataggttagagaaaaatgctataagcaaagacaccaatgggaattaaccccttcacttttcaaaagctgcgatggcctctgcagccaaggtccggagatcaagtgaagcatccattccctgtggactgcaatattgcctcgtgttctgaatggatgcttcaatcacagcatgaagatgttgtcctccctggtggg

SEQ ID NO: 339392 - DNA, 1000 bp, Homo Sapiens; identical to SEQ ID NO: 159051

SEQ ID NO: 339393 - DNA, 1000 bp, Homo Sapiens
ctcattgtgcaatacacttttattttccttttacctttgcagtcatcttcgagtaatcgttgtgtaaacaatagaatggaatgaaattacattaaattgtatgcaaatggctctagaacaccttaacaattatgacaaggcaattataaataactttttttccttagtaatatatatttgctttttgaagtacattaaagagctgccatatctagggttagctaggaaagagcaatggtaccatcctgggagcccacctccttgaaagattagactccaattttcaaaatcctaaggtttactagttccataatatacagtcaagcagggggctacttgggttgaaagtattgattcttgaaccttaacagcgttttaccttttagtcattgcacaaaacccttccaattttcactccacctgggtattctgcaaaatttcaagtaaaactcagattctgatattttcaagtttatcacctttagaataacaaatcctatcacttaaggagagccaaatcagagatgggtatatagttagcaatctaacagaatggcaacattttacatagcattctaaacggtccaatgaagcaaaacttaacatatgccaccttatatagaggaaattttagatctgagactattccagagtaaagcagcctcaggcacattcttaatgtgaaagtttgcaaggcacctccctctcccaagagacagtcagattgtaaattggtttttaggcaaacagactaaaagaataagcatccaaattcctaattcagtcatttcaaaatttagaagttacaaatactccaaagacagacccaaaactttttgtttaaataacgagattaactgcaagaagcatataatcaaaaccctttttttcttatagctaaggtgtgtaatgcataaatatatgaaaaataaaattcacagtcagttttaaaactagaattcaagtttggctaataaatcttaattttataagtatatta

SEQ ID NO: 339394 - DNA, 1000 bp, Homo Sapiens
tttttttttttttttttttttttactagtaaagtcaattttttacttgtcaattgaaagtctagggtcacaatctgggacacagatggaaaaacaggatctattccacatagaatatgcttcttgaattttattatttaaagagcaaaataaaaggaagtaatgcacattcaccaaagtcaagttttccgttaaatagaagaaaaatctaatactttgtaataaagaccatccagctaaaaacagatcattaaaacaacaatagcgatttgactctgtattttatttcaatgagcacacttcgttcattgtctgcaggaaaactaggctaggtctcaatagacaacagtcacagttactgagcaagtaaatactccacacttgcatgccctcctttatttcttgatgtcttcagtctcatctggctctctctcttgatgctctctttcccacctcatttcttttaactcttgtctgtacttccgttcgatgaaccgcttctgatgggccatctggggaaaattatatttttcaagcgcatccattgctgctcccatttccgcttgctgaatacttggtcctttcccacagcctattctttctcccttgaaataaacagccacagtgtaggttcgggcatgggatgggcccactgtctgcagagtcttgtacagaggaatgtctggctcttttccttctgtcctaagtgtcaagcaacactgctgaagctgggatttggggtcattccaatcctgattcaaaatgaattctttcaatcgtggaaagaagcagacattcatgaaagtatgaacatattccaaatccttatcagtgtacagcgctgcaataaatgattccaaaaggtccgccaaggtcttggtgcgaagcgccacaggcctcttggtcttgtcgttggttatggcgtactcctgcatgcccagctcctccgctaccttggcctgagttctattattcaccaaagagcttcgcaacaaagttaa

SEQ ID NO: 339395 - DNA, 1000 bp, Homo Sapiens
tttttttttttttttttttttttttttttttttttttttttttttttttttttttttttttttttttttttttttttttttttttttttttttttttgaattcaacaagtatttattgagtgtctattatgtgctagatactgagacacatcagagaacaaaaccaaaagccctgcccttgtcgggcttacagtctagcacttaccgccagttaacctgcaggctacctggagccccgggcaagtcaccgcacctctgtgcctcggtcctcagctgcccaatgggagaataagcagacctggctcagacatgaatcatgtgcttggtgtactgcagatgccaaactgcatccccacaacccaccacgtagacagcagacagggctggaagttgatttttaatgataaagtacaatgaagggagggcagaggggctaagcctagctgtctggggtgctgtggtggtggtagactggctacacaaactgttgctgctgctgctgcttcttggtggccgccttgctggcgaggtccttggccttctctgtagctgccagtgccgtctcctttgccttctccttggcttccttggctgtctcaacaagtgttttggaaggggcctcgccttgcagcttagccaagatatattcaaaacccttcatagtcttggtcacgttgcttttgaaccgggcaagaccaaattcctggacagctctggagacaccaaataagctagaggagacccaggcttcccggcggatttcagtccagccactgttgtcagagttcacacagtaaacacatcgttcctccaccaccatcagccgggcgtggttgatgttccaggtgaaggtagtcatggtctgattctgtgggtccacaatagagtcctccaggacgtacaccgagtgagcaacattggcaggaaatagtcgctcggcccagcgtggcatcctgttggtcttggtcaggagtcgccgggacagcagtttctggtcagg

SEQ ID NO: 339396 - DNA, 1000 bp, Homo Sapiens; identical to SEQ ID NO: 159052

SEQ ID NO: 339397 - DNA, 924 bp, Homo Sapiens
ttttttttttttttttttttttatttcatacataatttttatatttaaaatgcaaactataaatataatacacatatttacttgtacttgtgcaaataattctataggcctgactgaaagggaatgttccacctttctacctttttttaatgacaaatttctgataaaattccttgttacctaatgaatgacttcagtttcaaaatatgctaaatgcattcagtttccagtagttctgggcacacactgtatgctaagacttggtgaacttgaggactgaaagagtttcttggcctgcttgtctggaaagtgcagtggttccttgcagaccttttgtcttcattattttcaaaatttcttctgggttgttttctttaatggtaactaaatagaataatcctcttggtgaaaggagatctggaaccaggggaaaaaacctgtccatgacttcccgaccatttctgccaccagcccaagctgcctctattccgtgacttcctacctcttgaggtggagtcactacataggggggattaaacaccagaagatcaactttttcggtcaatcttggtagcaagcctttgaccaaatctgtaataactggttgaatgtgaactttgttacagcgtgctgtctctagggtacaagctgctgcctcagggttgatatcagtgcacatgtacaaagcctgagggcctatcatagaggctaggaatgcagatactacaccagaccctgaccctacttccaggcatatttccactcctgccagttcggcagccgctgcctcgagcgcgtccaaaagcagaaacgtgtcctccgcgggctcgtacacgtcgctgaaggcgccgcggcccacgtgcccgtggaacggcgtagcgaagttctcccctgccatagtccttcgctgcgttccatgcgcgt

SEQ ID NO: 339398 - DNA, 1000 bp, Homo Sapiens
ttttttttttttttttgggattagctaagaaaattttattttgctccgtgcgttcaaggagctcacacacatgcacatgcatatgcatgcacacacacacatacacacacactcacatgcatacacacacggctaatactgctcaaggcatggctcctgggcacagagttctggggccagaattctgctctgggccctcctcactctgtcatctcctgcactgcagtccagggtccagatagatttccgggatacagcaccttcacacctccaggccaggacccttgcttagtcccagtgcctgcaccaggtcatctccgagcccactcttcaacgtccttctcaaagacttgcggttgccgcgggaacgcttgcgttccctagcagctaaggcacgaggactgctcttggtcactgactgcaccagaaggtccatgatctcatctgatgtatcactgggtaaactggagcctgggggttcttctggggatgcagtggagggccccactgtgggcatgattggggagctgctctggaccatgcctctgctgcggcgattgtgtgtggtgtcctcaagcctgctggtcagcagactcttcatactagcatgactgtcagcatctccccggcctggcccgctgctcactgctactgggacagaggggttgctgggggcttccccagccacacctgagaacttctctgtctcggtgatcatgcgtccccgggtcttgttgcgctcacggtatgtggcctgcttctgctgctgctgtagcactcgttcccggcaagtccgatactcaagcgcaaattcccgcagcgtgtggcagaactgcatgatgcgcacttcacgggccgcctgcggggtgtagcccaggtagagcaggaaggcatggaacctattgcagacacggcggtgcactatccttagcatggcaacacggcgggcacactggtccaggaagtgggtgaggcgggcacgcagggctggggccagctc

SEQ ID NO: 339399 - DNA, 1000 bp, Homo Sapiens
tttttttttttttttttttttttttttttttttttttttttttttttttttttttttgaacagtagcaaggtttattatgaagagcaaaaggacaaagcttccacagcggcaggcgacctgaacaggttgctgctgctggctggggtggccagattttattcccttatttgtcccctcccatgttccgtttttgccctatcagagtgccctttttttcaatcctccctgtgattgtctacttttagaatcctgctgattggtgcattttacagagtgctgattggtgcgttttacagagtgctgatgggtgcattttacaaacctattgctagctacagagcgctgattggtgtgttttacagagcactgatgggtgcattttacaatcctcttgtaagacagaaaagttctccaaggccccactcgacccaggaagtccagctggcttcacctctcactaatacacaaattacatattatgttatttttacagtttgaaacaaatatatagaaaaatatgtatgtaattaatttacactgaatgatacattttcaaagcattctctggtttgggaacattaaccattaacatttcaagaggaccttgcgccactgtatgtttccagggctgtgtttgtggtgggggctgagttgcagggacctgaagttcattaaccttttcctccaggaaagctgctcgaccagctttggatcacaaggaaggaatgatttttatctctatttctaccttactgcctggccctttgctctctgttgagaaaacttggcttggatctaatctagtttagataactgagatgtggcatacatttttgccttgctttatgcagtgtttatgacctcatttgtcttcttagagagtacataaatatctctctttataagtaaactcaatgtctgaaaagtcactaataggaagtgttaagaacagggggaaattgttagtaaatccagcaaatcctatacccatttacctgg

SEQ ID NO: 339400 - DNA, 1000 bp, Homo Sapiens
tcacctacacaaaaaattatgtaaagacaccacttctatgaggaggtattcattgtagatgtacagaagtcaacggaaacttaagtttacagaaaaaataaaccagattatcattccacccaactgtatattcccacagatgcttaataaaagctatctgatgatataatgaattatcagttcttgaggaagtatatacagttggtgactatttttcaaaaatcatcatccaacaaatttttttcatttaaaatctttcatattaccctttcgacaatcagttgaaattttaaaactaagaacatttaaaaatataaatgaaagtagcattagctatagactgatattcaacttcagacgttaaaataaatacaagtgtgtattaagagtaaaattatgtcaacaatgtataaatgaaaactgccaatgtaattaatgtttcttttaacatatcccatccattgctttccctccaaaagacaaaggtagcaaaagacgaagcaggaagaactgcttcagaaactgaacatactgatttaattggctaagaagtccaaatgctaatactcctaataattagccattccttttgtgttttggtgacatatatcctcatacaatgtatatcaaatggaattttttgatttacacctgacatttcaaagtttccatttttgaattctcctagtcttaagtaactagaacattgtctcctttgtttgctaggcataacgttttccccaacatctagggctccatgatgcaaaatatcattttgccgatcttctgttccagtatttactttaattttttttattataattggattttcaaatacaatcacaaaaacatctcctgttgaaggtggtttcccccaaaagtactcatcaacactactgtaagccttgcttgcttcataattttcaaacacattcatgttggtgtacagacttgcaggggggttatcaggaatgtcaaatgactcctcttcaaaatcatc

SEQ ID NO: 339401 - DNA, 1000 bp, Homo Sapiens
ttttttttttttttttttttctggggcaagcattttatttgttaatacaagaatagaaattctgcaataaatatcatctaataaataacatctccaaataaataaatattaatacaacacacttagagtcatgagtgggtggggctggggggcagggccttggggagctgccaccctacaccccaaaatgctactgcattgtaaactttcaggaaatcctgtggtgtggctatggttgccctccccagcctggcaacccacagataccctgggaaagggggcagagaagaggcaccgtaatactggaagacaattcgaggcaaggtcctgatgctcagctcgggttttgtttgccactctgtgctttggagactcctgggtctggtctggtctgtccctgcccctgtgctttcagtattttctcttctggtttatagggcacctccaatgcagaccccaaccctgcactgttaatctcatctctttttgtgtagaattgccaccatgtttgtttcctgaattggatgtatagagtgatttggggataagggagcaacacccatccaaggagagtggggcagccaaagggcttcaccccagaaaggcatgtgtggtggtggcccctcaacccctgccctccagatgtgccacctgaggggctgggtgggcactggccaagtggtaggcaagaagcaggaggccatgagcgcctctgcaccaacctgaaccacttcacactccctcgagcatgacttcctgtagaaacaggacaggacagggcctactgtacctcctccccagctcggtagacctttgggaggtggggaggagacagggctgatcgcatcacacgcccagccggtccaggaaagggccagaggctcacagcttctgtctcctggctcaacaggtgttggcatacagggctggctctcacaaagtgggagcagggtttgaagggggagcgaagaggagaaggtcagaagtcagaagccatgag

SEQ ID NO: 339402 - DNA, 1000 bp, Homo Sapiens
gaggctgccattacctcaggagcttaccaagaaacccatgtcagcaaccgcactcatcagaccatgcactatggatgtggaactgtcaagcagaagttttcaccctccttcagaggccagctgtcagtatctgtagccaagcatgggaatctttgctcccaggcccagcaccgagcagaacagaccagagcccaccacaccacaaagagcagcacctgactaactgcccacaaaagatggcagcagctcattttctttaataggaggtcaggatggtcagctccagtatctcccctaagtttagggggatacagctttacctctagccttttggtgggggaaaagatccagccctcccacctcattttttactataatatgttgctaggtataattttattttatataaaaagtgtttctgtgattcttcagagcccaggagtcagtgctggtggttggagggacctgcccccactggttcatttaaccctctgtctcggtgccctcagaacctcagccagaaaggcaaggaggaaatcagagcaggagcctcatactcttggtgatctattcattctgtgacctcaggggtcacatataaggtcagtgtttctcgtccccgccggatctgcactgccaactgggattgggttcgaacagcttcataaacatcttcagcattttgtaccatctgctccccaatggccaaaatcacatcaccaggccgcagaccagcccggtgtgcaggggagcccaggatgactttatggatgagtacaccatgctgaacatcgggaaagcttggttctcgaagctgtagttcagcaaggatgctgggactcagggtcagcatcatcaccccaatgtagcgccgctgggacccactgattccggaggaggaattcttcttttccccacgatgcagaaactctcgaagacgatcagaagggatggcaaaggagattccagctgtgaccttcatggtgttcactccaatcac

SEQ ID NO: 339403 - DNA, 1000 bp, Homo Sapiens
tttttttttttttttttttttttttttttttttttttttttttttttttttttttttttaagaagcaacatgtgtattattaaattatttgtcagaatttccagaatcagagtctctactgggcaagtagaaaaatagaaaagtttactactttgaaaaggaaactatgacaaacaagtatatattcaggaaagggactcctagaacttgagcaacaaaaaagagttcaacctcggcacagtggagtctgcagtgtctccgcaacaacagaaatgaacttgtgttcctcacatccttgagagtcgaggtttgcatttctctacagagctagggctgaatgaagcaaagagacctctgccacccccactagctggcccagtcctggaagcggaagcagtcacttgcgatcttccacactgtgttgctgggtgaggcctgggcggtcaggatgaagttctggttgaagtcccgttgtttgttcccctcaaacttcactgatccacagatgacaacaaggaccgtggtctggcttggtgtggcttcatcatgaacaggctggcagtctaccacgctgatttggaactcgctggaaggcaacatttcaaaaaactcactcaaggattcttgtcctgaaacagcattgccattccagaccagggtggctgtgcccatgtacaggcgggacagcaaacgccgccgcttatccatggtggtgtagtagacattgacaaactcctcagcagctctgcaggcctgatccacataggtcttgaaatccacagatgccatctctggttctatggaaggagggctccaccagggtatttcctctgccttggggaaccaggggctgcgcggcgacgtccagggtcagcgcgggccgcggcccccacggtcgggacgccccccgcgtgggacgcagttccactgaggggccggccgcggaggtcacaaggtgggcccaccgaagcctctggtaggggcacgggaagagccgcct

SEQ ID NO: 339404 - DNA, 1000 bp, Homo Sapiens
aatgctttcctatcttttattaggtggcttttgtccataaacaattgaattctaccggccaaaactgagttttaagttctgtgtgtttccatcttttctgttacttcctagggagtttttaggggagttaagagatgttgtttaacagttggccaaccagtttcaattcaaaccaaaatttaagtaaatattttgaagacagtgaaaatacaaaattgaacacacaatataatttcatgcacattaaaatgcacagaaaaaaagactagaatgaaatagaatgaagagttttctccttaaatgtttaatatatttatgactgtattatatttatagtaggtaaagaaaaatacactataattttaaatatatagggatttttctaaagatctccttttgaagcaaataattcttagtgggagataggggaaactataaatgttgcttgggattacttgtgttatttataagatttccttaacagcaggatttatagggtttaaaggttaggtaaactttgattaaagctgttaactaaatgaacaatatttataagtttcctcttctatgattattgtgaagatgtgaattatgatcaaatcccttataatattcacggcatttgtaaggtttctctcctgcatggactctttgatgaattcgaagagctgagctatgactgaaacctttaccacacttagcacattgataaggcttctctcctgtatggaccctctgatgaatgtgaagattagaactgtgactaaaaccctttccacaatcatgacatttatagggcttttctcctgtatggactctctgatgaatgagaagatgtgaacgctgactgaatcccttgccacactcttcacatttgtagggtttctctccagtatgtactctttgatgagtgtgaagctttgaactcttactgaagcccttcccacattcaggacaagtatagggtttctcccctgtatggactctctgatgaatgcga

SEQ ID NO: 339405 - DNA, 1000 bp, Homo Sapiens
tttttttttttttttttttttttttttttagagtataggagactttaataacttcataatgtctggtataaatgatatacctaaggctatggacgtctctccagcctaaattcccaaaggtacagtaagtctgcactgaacatcatcaataggttcttaggaactgcaactttaagtgaaatgatgtataacaaaaccaattttaccatagactaatggatacaaacaagagttaagttcctaaggcaaatgtctggtcacaacatcatcaaacttctaaagaccccaaacgcttccaatatcagacattaaaataaatctgagctatatacacatttaagacggattaataaaaacagataagataattatttaccctgttattccagtacagggccatgggtggacagagcgcatcctagcagctcagggcaatggtgggaacaaaccctgattaggagccattccactgcagggcacacttcctcacaaactcagactgagataatttagatatgtcaattaacctaatgtatacatctttggggtttgaaactggagcacccggagacatagggagagtgtgcgaactccacacagtgtccctggctgggaatcgatatttttctcatcaacatcataacaattataacattataacaaaacaaaaacatttttcaaggacctgctataaacaaatgcagattttaagaatacatatagattaacagcaatacatacttctcccattgcagttgataaccctttcccaactctagtctccattcaacagcaagacaacaaagggtattgtcaggagtggagtaaatggctgttactgttgtcttagccattgattcagagatttctgtccttagaagtattctcttatattcgcatgagctaatgatttcttgtgaccttcttaaaagggctgagttttattaaatatcaactccaagagtattgtttggctttgctaatgtctacttcgtcaata

SEQ ID NO: 339406 - DNA, 1000 bp, Homo Sapiens
tttttttttttttaagagtgacagaatctgtttaatgttttaacaagatcatcctggttgctggatgaacaatacacgaaaggacaataaagggagaaggatgaaggccagatggagattgcatcagttagattttgctatacgagagataaccagaaaactccagtggtatacagtgataagtttttatttttgtgcttagagtttcagctgatctagggtggctctgctgatctcaggtggatttgttcgtgagtctaagggttggatgggggttggctgacctaggctgggcccacatttgaggtcatgaaaagtgtgtctttgatctcatgtggcttggccacaacatttttaaggcacccttctctgacttgcacaaatttttattcccatattataaatgagtaaacaagttctgaaaaatgaagtggcttgcctacattaagcttctagcaaattgaaaagctacttcttggatgaagatctcaacttcaaatcctccacaaaatgcttctcctaatgtctaatgccattgagatacatagaggaatgttatttaatatgtgcaataattttttgagataggtattactaccccattttatcagtaaggaaattaagaccaagaaagggtaagaaaactgtactgattcacacagcatattagaaacaaagtgaaaactcaaattcagtggcttgctaaattttcattgccttttttttttttaaagcatgccactgctatctaataaagatcacatttatctaagcttgcaaggatccaggaactcttccaatgatgaacttaaaccaaatcccacatattccctatctactccccactcccaccccaggccattgggctccttttagaacctgcacagaagtgtctcctaatcttgggggaaattaaactgtctactaaagaaatcactagatgtctacatttcctgatcttaaaagtttgcagttattctgtcatgaaataggaagtgaa

SEQ ID NO: 339407 - DNA, 1000 bp, Homo Sapiens; identical to SEQ ID NO: 159053

SEQ ID NO: 339408 - DNA, 1000 bp, Homo Sapiens; identical to SEQ ID NO: 159054

SEQ ID NO: 339409 - DNA, 1000 bp, Homo Sapiens
gggctttgaataatttttactcattatatcatttatcatagcataacagcgtacattccaaaaaggaaggcccaacataaactgagaaattgaatagatacatccataatccctttctattctaatccatacacaaatattttatcataatggttttagaagtgaatattatttctatattcttttcccacacttttcactatatatcatagacactttcctaaaatttataaaatcttcacatgtaacaacagcaagtgctgtaaggaacagattacaagctatctaattggaagatcatgtagtaaaatgatgcactaaaatatggttttccagcctaagttctaaacactacagcaacctttaaattttctcaataagcccactagtgttagcattccatttactctttatggaaaaagagtctagcactggcagttggctttggcatatgattttctctgattcaggtctgagtgctttctgcaaggaaaagtgccagtatttattattttcataggaatatgtcataagaatcaagtttaacattgtatatggaattgccaggttgaaaagtcgttcatagactttccccctttcttttccagaacaaatttgagacacacaattaacagagggctggaagttttcccacatatattgtttttatagtagttcttccaactacatgtactaccttaaaataaattttttaaaagaatgaataaaaaggaagaaatcccagctgatttacaaactagttacattcatagagtttctcttcagtatgagttgcctgatgcctaataagtttatagctattaatgaaagcttttccacactgaatacatgtaaagggtttctctccagtatgagttctttgatgcacaataagtcgagcactcaagctaaatgtttttccacactgattacattcaaatggtttctctccagtatgagttctctgatgttgagtaaggcatgaactctgtctgaagga

SEQ ID NO: 339410 - DNA, 1000 bp, Homo Sapiens
tttttttttttgatctttttgctgattttattatactatatagatttgtatttcttgtgatctgagaaacatcaaaattctattttaaatttgttcttaaaaatatacaatattgcactttaatttttggcagcttaacaggaatgaatgagtacaaaaaatcatacaagaaactagaatttttattttgcttcataataagagctttgtgaaaaacaaaacttacagtagtgccaaataaaccaaatatttacagtatagatattaaagtcttacctctaaaggaagattcagtgtattggatgtaaatattattaatataagaaaagtcacccccactgcccaattctgctgaacattttaagccaaagagtattggtgagaaatgcttctgtgatttctttctcaagacatacatggaagggatgcttgttcttggagcatctaaagtgggtcattaaacttttacaaaaatgtttcctccataacttaaaaaaaacctctactctaagccaagaatccaaggtaagcttattttttattttttaaagttcttctgtagttactctctcttttttttaaaataaatagaaatgaggtgtcactacattgcctaggctggtcttgaactcataggctcaagtgatcctcctgccttggcctcccaaagtgctggaattttataggcatgagccaccgtgcccggccagttattctcctttacttttataagcatgtaagttagttggtaggttacaattttaaggtctgtttcctgtgctttttctaagatatattgaattggatactgaatacacatctgcctgattttcaacttttgttacattgtaataaaactgtatacatttactttgacccacaatttgtttttactttttttttctcttaactagggtctcgctgtggcacccaggctgaaaagtgcagtggcacaatttcagttcactgcaacttccatctcgtgggctcaagccatcct

SEQ ID NO: 339411 - DNA, 1000 bp, Homo Sapiens
ttttttttttttttttttttttttttttttttttttttttttttttttttttttttttttttttttttttttttttttttttttggcaggaactttacagtttataaagcttttgcataagtcacctctggttcttcccaaccatcttacgacgctttattactgtgatttcagagaagaaacaggcttacagaggttaagggcttgagaccactcaactggttttaagtggaatccagaccagaggtgccggctccacgtctactgccctttccacggtgccatgctgcctcccacaaaacatccacagtgcccttggccaatgaggggccgccatcggaggtcacaggaagccttttcacagtccctctggggcatgagtggggagcagctcttctccccagagctttaaagccccatcgaggaaggggtgagaactgacctcctgaagtgcccgagtgtgtgtgtacggggagagtggactcaatttttatttttgaaacctcatgcacagagttccttatattccccaggtcccacaagagtaccaggtgccatttcagaaccacctttctaaacctctgcccacccactgaaagcaacacggcccttcacagcctggcttccttcttttgacacacagcccttccgctccagtggagaatcgccaaagatcatgaagggtaaatagtctcctctgaacccctggtctgggaaacccgtttcaaccccggggggagcccagtggccactggtgctgcccaggggctgctgtggggcagagataacacacagaggaagggtggggtggcaggagccctcccaggagcagggcttgcctgtaaacaatgagctgccgcctcgccaaggcaggaggtgattcatctcccccgctgctcagctcctgctggctgcgctcaccgggcaccaaaggactggggcagccctggccaggcgctgacgcctccccactctctgcacaggtcaggatctcacccca

SEQ ID NO: 339412 - DNA, 1000 bp, Homo Sapiens
agatttgaaacattcgtttccctttattagctcagtgaggctgatgtgtactgcacatttaaaaaaaatcacaggaattttcatacaatgaataaaaccacaacaatacatgtagaattggcaggtggaaaaaaggcccggcaagggctcaactaatcgctcactttccctcttcagcatagttcaaccaacagtattacactttcacctacaaatcttaaagtagctccatcaaatcagcagttcacattattgaaaatgtctgtcacataggtacaaatttagaatcatcacattatagtacatggctattctaggtcatctatagatcaggtcttagactacagtgattgaagttctcattacagccatcaagaaaggacacataatcattacctactggaagctcacatctaaaggcatgaaaaggtttccttttatcaactgacccaaacatcataccccaatagtgcaaagttccctctctgctgctttgaatgttgacagcccaactgttgttctcggagtcgtttagcaaaaaattgattttgttgcactggaagaattattctgctacatctcttttaaaaaagaaaaaaatccacattactaaagcaccagttcggttaccaaaattgtagatgtggtacttaccacggcatgaaggcaatggcccacggtcttctaaaaatcctacagatctatgctgaaatttgcctccagtgatgatggggtgcacgtgttcatttgaaatattctctcccaaaaaaataaaaataaaaatgagaggagcacagcttacattttgatgggctacccacagtgtctgcagaagatacaaaagctccactaattctagatgcaatttgaagtccattgaggaaaactatcttcatggtaacaatatttgtcaggctgggggtaggggggataaattaatcctcaatatgatatctgtagtgctgtcttttgataagtaagaaaagaaaccaagtattcc

SEQ ID NO: 339413 - DNA, 1000 bp, Homo Sapiens
tttttttttttttttttgctttaaagtctttattatcccgaatataaaagacagagtcctctaggatataacagagttctttacgtggaaacattatttttttacaagtgaaaaaataaatacctcttggaataaaggcttatatgctaatatgtgccataaaaaagtagagttttaatatttgacaaaatgtctgtgcaaagaaacaaatgcataaacacattactgctacattaaggcaatatgaaaagtatactcagaaatctcagtaaagtgacagtgtaggtttctagctttaccttagctagtattgcacccgataaggtcatctaggtctcccgacatcccagaaaacctgctagctgaccagcttccaaaatgcccaagtgggagtggaaaacatgtttaagaaaacagaagcaaaaagaaccaaaaccccttcgaaacatacagaggggacaacccaaagttaatacttaagcacttactttaaaaaaacacaacaaaactccccccccaaaaacagaaaaggacaccatatctaaatacttatggtaaggctataaaaggcttgaacagttcaagcaaagcaacaccagtgggtgaagctgggatcgagtgcttgggagaagtgatgagttaactaccctcagttgtacaccatgaggctccatctctcactcagcaagctccgctttcccttcccaaggagagtgctctctgttttcagtctgaaataaaatattccaccagctcagaaggcccggggagtacttgactactccacagtaatcttataacaagattggtagtattttataatcgaaaggcttgtggggtagggatagggggagcgtaaaggaatagggagccacccacattgagtgagctgctttttactagccacactggtttaaatctgacaacattgtcaactttttaaaagtcacagaattgatttgtaaacctgtttgccttccaatcattcttgatcaagtta

SEQ ID NO: 339414 - DNA, 1000 bp, Homo Sapiens
tcacgagtcccaggtccagctttattacctaatacaagtccaacctctggaacatccaaattcgctgttccaaagtttaattaaaaacacaatttacaaatatttaatatcttctgaaaagcatttctaagttaagaatgaaaaagtatgtacataatatataatcaaataccaggcagcctcaacttccaccaggtccacactcagcaacatccgtctttttaggttcttcagtgtcttctgtcaaatccacaaagttgttttccatgacgggggaaggaatggaaatccccattgcttttcgaactccatacgtgcttacgatatcacctggagttacttgctgtgcaagttctttaagattattggtcacttgttcagcaagatgcatttctctgtatgagggacccaagagacagatcatgttcggagggggtctggtgctcaaacgttcattctgggcttcctggagttccctgagcaatctggtggtctcatcaagtttcttctggaatatttcagcttcttcagagtcaaaaacttcaactggaacgccaaaatttgttactgctttcagcgctatgagcctgtcttgagtactggagtccaaacgccctggtggctctacttctgtaatctccatttcttttgctgtgtcaagtgtcctagtatggccttcatcttcaggcaatgacatctccatctcttgtagggtcctggaatgccctccttttgttaaaacatccagtaaactatctgccatgacatacggataatcttggcacgtggccaaaaactcatggatgctgaaatcacttggaagatcagagtcttccccataggttgaatagattaaatcagaatcatccttgctgatatttgcaaatgtggagtcataatgcggtgcataagaactgtagggcccataattcaaatataacactggagtgactttgttccttttatcctctttgaacccctgcaaagtattcactccaga

SEQ ID NO: 339415 - DNA, 1000 bp, Homo Sapiens
ttttttttttttttttttttttttttttttttttttgaggaggccacacatgtttattaggccggtcctgacacctgcctgcggggaaggaccaccgagaccagatcctgggtgccatggggtgcagggacagaccggtgcatggcagcggctgcgcctagccgcgctcgcagatgacctcaaccacactgggctccatgggcacagggtctgggcagcgcagggcagcagaggccaccacttcgtccagcagcaagtgcacgagttcttcgtcggccacaaaacgccacaggtagagctgcagaaagtggcagtccacttgcacctgctgcagcccgaagcgcccaaaggtgcgcagccgcacacactccagcagcgtcttcaggctgatcttgatgatgccggtcagcaccgacaccttgttgaactccacagggctgaacacatcaatacgttcagagaatagcttctggatattgctcaagaggttggtgtccatcggggcactgggggtatagctgggggcgtagcggccctgctgccgagagctgctgtacacggagaaagtcctcttgctggagtcgctgctctgggccttgcgaacaccctcttcgtacaggagccccacctgcacgtcgatggcggtggtatcctccaccacccgcttcatgacggcccgcacattccggggctccagagtgctgagccagtcgcgagtctccacgctcttgcgcagcatctgtgatatgaccaggccctgcaccttcacgtagtgggtcagcagccgccgcgccgtttccctggcctctgcacacagcgtgctcacgggcgtcactgggaactgatcctgcaccagaaactgttcatcagtgagagtgaggatgtaggagatggtggccgtctcgtagtccaggcagaggcgggagagcagcaggagcagggcaggtggtgtggcaccccccttctccccagggctgtcgcagaagctctgagccgtctg

SEQ ID NO: 339416 - DNA, 1000 bp, Homo Sapiens
ttttttttttttttgatttggtaattaaagtttatttgaacacaaaatactttctctgtctataaaattggctgttagcagtagcagcagcatgtcctggccaaggggagtagatttctccagactactaaagccatgtatatagccattcccacttcccatattctgtggatatgtacatgtgcatggtagctagagtccctccaccagagtatctctctcatgatggtttcttcagggagaggaagaggagacctgggtgaagagctgggatggttttgagtggggcaagccattaggctgtaccttgaagcccagtctctctggatagctgtactgcaggtgtcctctgaggcccttctctgtactctgtctgctgagggaatggggtattttgactcccatagaaagcactagcctaagtcaccaaatgactgcttggtccccactgaagcagtgtagctctccatagtatttttggtggttatggattacatgtgtggccagctcatgctttttcttgagcaggggctgtccatgacctgtgctcataccatgctttctaagttctctttggacagggcctcagctgctgcctcagcctgagtttcagagagtgtgtaggagtcctggtaatcttgaagcagtttgaccacctccagatggttgaactgcacagcatcatccaggggaatgttgccccacctgtccttggcaaaaggattcactttgcaagcctcgatcaggaatttaacaacttcgatgtgtccttcagctgcagcaacatgcagagctgtgcgcgagtcatagtctttctgttccatatccatggctgacaaggcaaaccttcgaagagctgagacatcgccactataggcagcaaataacaggttgaccacagtcttgttccgaatttctgccccttcacgccgtgggtctaacttccgagcacagtgcctcaggttgtcatagttgtggaaattgaagagagacaccaact

SEQ ID NO: 339417 - DNA, 610 bp, Homo Sapiens
ttttttttttttttttgagttttcgtgctgttttaatgacaaagtgtaggggaaaatgtgagcagggattattctgttagcaggttctgggaatcccatggtcaggtagaaagagggattcctcaacaatgaggagtgtgatcatctccctcaattgcagacacacactgaggtcagggagatatctctcgacacttgcaccatcttcacaaatgatggcgggattcgatggacaaagccgtaaatgcgtatgccattgacctttatctcatactcattgtaatgtacgtagatgcacagctcaaattgtttgccatcctcaaagggcacgtagtctgttgtctcctccaacatccatatcccaaactcacgcctgttcatgaccacatgattgccaaagtgcactcggaaacggaaggcaatatctgaatcctcatccatgtcagtgtagaaatccacctgcagctgtgggtcattgataaaagagtggattggtgtccctttgattatcacgcaggaaccaacagacaaagacacaggcagtttgtatggcacgggtaaagaagacattgttctctccttcttggcgaccttcagaattgagtccagt

SEQ ID NO: 339418 - DNA, 1000 bp, Homo Sapiens
ttttttttttttttttgcatggaaaacagtaatgtttaattgagcacctcatctccaccctgactctcagggctgtgacagctgcacctacagcaacctgggcacggaggcaaggggggcccacaagtgagggagggcacacagagtcagagggcagcaaggaggctgaggggcagtgggagtgccaggagcagggtcctggatggggctggcagggccagggcctgcccgttgaggcagtcccagatccagtgttggtaggaggagacctgtaggtagatgggtggggcctcgctcttctggcagcctgcaccccagctcaccaatcccaccaggtaccacgtgccctccatggagcagaccaagggctctccagttagctcatagcagaacttctccctgtgggtgtcctccgcacacatcatctgggacttgatgatctgaaccagagtggggattttggtgaagttgtggtagaaattgtcacactctttgttgttcaggatgatgacttccttctcctgaatggtccggaactgaggccacatgccgtcagccttggaaagtccccagcccgtcacagtgcagcgggaatggtccttcaacacatagtccgtgccaggcaggcagatgggccgcacgtaattgctgtacttgagttcctgcttgagcttgaggaggccgatgtcgttggcctggcccacccaggaccagaaccgctgggcccggtacctgctatgcatgatgacctggagcaccgggacatcggaggcggtctgcgtcatctggtcaatccacggactccccaccctcactgagtagataacatcacgccagatcaggcagtgggccacagtcagcacccactgggaggcaatgatggtgccggcacagatgtgtgtgccattggcccgcacgctgaccatccagggccaccgccgagccacggcttctgggtccctgagggtggggtcctgctcgtaggaaaagccacaggagc

SEQ ID NO: 339419 - DNA, 990 bp, Homo Sapiens; identical to SEQ ID NO: 159055

SEQ ID NO: 339420 - DNA, 1000 bp, Homo Sapiens
tttattttaggaaacttcttttaaaaaatgttttctgttttgtatgtgtatgtgtatccagaaatgtccatcctccaagctggccaccactgttccctgaatttggcagtgcctgttgcttgcagctgtcagcatcctgaaaaccatgaggtgccttcaaagtagactctgtggcccagccgcgcgagtggcctccaggaccctgccgcacgatgtcattctctccttattctgaatcctgtctggctctgatgctgagaaaaaggacaaagtcggtgtgtctgtctgcgtgtgtgtgcatctgtgcctgtgtgtgtgtactgagttttggttttttttggaacctttttttctttttttaagaaaaaaatgacccttggattactaatacagagttcagccctcctttagtcactataaaacggactccatgttttcacaccactcatggtcttccaggttatagataaactttgtcctatgtgtctggtttgcgggcacagggtccctccccaggttgtctagggtcagagtagaggcaaagaactcactggtgctcagcccgccctcgtggtttttgatgtagcgtttatagtttttcctcaggcactgccacgtggtggtgtacaggatgaaggcgaaggatttgagcgcgatggcgatgctgacatacaggtatcggtagaccacattgtcgtagaggacgcaggcgccttgctccccacagaacgtgctccagaacaggcaggtggagtcgatgccagccccgaagatgaggggtggagggatgaagcccaacaaacgaaggaggagaaaaagaactcccaaagcgtaagacttgagttcagggctgactgtcctgatgaggatgatgactgagggtgtctgtgccatggcaccgatcaggctgcagatacacatcacacagaggaaagtgaggaaggcctcttggcacccaggactggggcattttccaggaaccacggttgcgttctcagca

SEQ ID NO: 339421 - DNA, 1000 bp, Homo Sapiens
agaatttcacagatagaagattcagcatatgactgttttcttcccatcttttcacttaaaggaagcaccttacggtttctctttggcatatccgaacagccagcatcactaccagcatcactactctggtgctttggggccctaatgaagtaaaaaaagactgacctgaacagaagcactgtgataccaggacgggcgatctgacgactaagtgactgaccggcggggagcatctacggcctggacgtggggaacacagggacggtttgcatcccagatggcacggcagagactctccatcacactgctcagaacaatgcacaagggaaaacttgggaactgtttgaagaattttccatttaatattgtcagaccgtggttgaccgcagataactgaacccatggaaagtgacaccgtggataaggggggactactgtggacagctttcctgggtgattgggagacgtttttctggtagaacaccagggcaaggcttttctgaggatgatctacgaattctccccagagcacttcaacctcccaaaccaagctctgcggctgtgccattgcacagtcttcccacagcagagaggtgtgttttatttaaggcacaagactctggaagaatgggctttgtatttatttatgagacagagtcttgctctgtcacccaggctggagtgcaatggcgcgatctcagctcactgcaacctctgcctcccgagttcaagtgattttcctgcctcagcctcctgagtagctgggattacaggcatgcgccaccacgcccggcttgtatttttagtagagacggggtatccccatgttggtcaggctggtcttgaactcctgacctcaggtgattcacccacttgggcttcccaaagtgctgggattacaggcgggagccaacatgcccggccaagaatgggctttagtatctgacatttggccagagtgatcaggcatttgctctcatcttagagcttccagataatc

SEQ ID NO: 339422 - DNA, 1000 bp, Homo Sapiens
ttttttttttcattttgaaaaagctatttactttttttccaaatattatcccaaataggtgttttacagataagggtcaatacgaagtcaaacattctacagaagaaaatcgtttttacagacattaagaataattttaacagaagaaaaagctcacatctatctagatgtggctatgttccatgggaaaaatttcagcatccaaagtgcaaagaaaaaatgactgtagcttttcttaccacaaaatattgacaatcttcccttatagcctactctttattgttagttgggatgccaaaggatgatatattgacctttagaagttgggctccactggacaaggttgggggtatgggggccaagcatcagaatgaattcaattttaaaagaaaaactggctttgaccccaaatgaacccaaagttcagccagcggcacatcagagataaatacgagttgtactttcacatttacaaggttgtgccactcaacactattaaagacctaatcatccaaatcaaagctacgcatactcccatcactagttctgtcctcaatgcatcccatttttatgaaagctccatattatagctcagttcataatggggaatgagaacttctggttcttagaaggaggcatcctaaatcctctggtctaatcctttctttgccctgccctcccacttcccaccctgagacaagctaatcttatcagataggtagggtttctgtcattgtctcacggaaatcagttctaaatgaaactagagaaagatcattctatgagcagcatttggctttaagccaaaggaacaataacccccttccccaaaaagaatcacaaccaattccatactaacccttctacccctggaaagatgtctcatctaaaagctcccaacaatgaccagcacaaagtgctgatattatgtgacttgaggagaaggaaggggagatatatatagttttaataaaaccctcatgcacaattaaacttgagt

SEQ ID NO: 339423 - DNA, 1000 bp, Homo Sapiens
cagatacaaagcagtatttatacatttatttatatatgtatatttacttcagaagaaacgaacatttcggggacaggaagcaagcaggcccggggctgcttccctcactgcccacctcagagtcagagttggcacatgacaaataccaagctcagggagaagaactgggagttaactgggaagtagggggcgctctatgcacacgcaggcttctaagggtgcacggtatgggcaggaggatttgcactgggaggccctatgtacagcttgaagctagggggagattagcccagtgactacaggaacaaacgccaaaggagagagaagaagggagggatgacctgctggaccccagggcagggacagggccaagacactcacaccattgccagccgggcagctggcagcttccagcaggtggcccacttaccttccctgaagcccttttaccacaggcttaaggcaactttggtccaaggttgaccccctcaagcagcttggatccccagcctgtccccaactcctgcactgaggaacccctccccaggcttggaaacagagccagctgctaacggttttggggctgtgctgtgtccagatgggctccatggggcagtggacggtcactttccagttaaggactgagggcccgcagtccaagaacatgaacccccattgaggaagcccaggaatcctattacatggagtggggctcggcagttttaaggcatagggaggattcccccagtgggagggagaacaaagtcatcataaggaaggctcagcccctgcatggtttgggaatcgtaaaattcctatgtcaacggaaccaaattggggagggggctgggagcaagctatccctgctattcctgcatccccctgctcttccctatcctgaggacaagtgctttgagatcaatggcaaaagggggcctgcagttcataggcttcaaggaaaggcctccactatagaaaggcctcccattcaaagctgaga

SEQ ID NO: 339424 - DNA, 1000 bp, Homo Sapiens
ttttttttttttttcaatctgtgaaaaacatttattctgagaatctaaaatctggacaaagtactggactttagaaaaagcctacacaaaattgtctcattcttccctaatacattaataatctaagaataaggaggtgaaaaaaaccctttaaaaataacattgctccagtttgtctgcaggtatgtgatttaaaatatccctgttttattgaggtataggctgcaaactttggtaaaattagaaaaattaacaaaccctttcaaaagaaaaaaaatacaaaaacaaaaacaaccaaaccctaacgttatatctttcttggtacatatacagtaactacaaaaaaaattcatttagaaaatgtgttcattaagagaaaaaaaaattaaaaaaaaaccctcttgtaagttctcacttgctgagttaaaaaaattgaatgtaaatgatctataaggctcaaacggttcccaagcacccatccggtgtcaggaagaactggatgaccgcagtttctagaatctggttgacattttcaataattcagtgctaacaacaaagactgtcgtctttagaaagaaggaacgaatcaaaggcacttgcacgtgacttcgtgtgctggcgtccgtccgtggccgccttcgtcggacagcgtcagtcacacgcctggccccacgtggagcagagtccccttgaggccatttctgcgtggccccaactccctgctctcgtgggcagaggacttttcacgcggatctcagacgctaagcagtctggtgggggatggctttgaggcaaaggtttgaactaggcccgagatgtttcctcttttccttgcaacaacttcaacagacagctgagccacgccatgccacgggctgccacgggccaccacggggaaccatgtcactggactttagatgacaaaatgctgtcaggaagatgcttgctctgaccttgggggccagaaccctagagaaggactgatcctgtcgccttctta

SEQ ID NO: 339425 - DNA, 1000 bp, Homo Sapiens
ttttttttttttttttttttaattttattgtgttttatttcaatacatattaaactatattcttttgtatgtatcacatgttacatcagaagaatgtaatttttaaaaattaaagcaacaaaagaacaattagtttagaagtttggtccttacatttaaaaaaagaagtaaatacaagaaaactaagcattacatgccagcagtacatatttattattattcatgaatggtgaaaagacttacaaggcccattattatgagtataaccacacatatgaaatatcacttagcggcaacatgggatgaaaaggacagttatatatttatattaaaaaaatacacgtttgcattcaatgtttgcctagaaaaaaaatacatgtacacacgctctttcaagtgctccccataaactgctataaaagcaggaggcatcaagctgtagaagttccaatatacataacatgttgaaatatctcaagcataaaaactgtacgtaacttgcaaaaataaagttcctttcttcaaacattttgatctgagctcaggcaaagcaaataatgaacaccaatgatttttatactatttcacacaatttaaaataatcaacatgaaaaggtcaacagcttcaaaaatcctgaaaatatggaggttacgagaatgaacaatttcatctgaaaagtctacagcagatctgcttcatcctgactctcaaatatttaaggatcataatttactatactcaaactccaagtttagccaggacaaacaaaatgataaaaagaaaaattactgcaaacagggcatgactgccctttagtttctttagacaatttcactagtgcaagagcatcatttacctgaaagatcctaagagtcacaattaaagtactcatacaaaactatttcctttgttctttaaaaagtgccacatactatacttttcatttaaaaaaaaaaaagaacccaacacaaataaactaatgaaagaccgtttgtctcc

SEQ ID NO: 339426 - DNA, 1000 bp, Homo Sapiens; identical to SEQ ID NO: 159057

SEQ ID NO: 339427 - DNA, 1000 bp, Homo Sapiens; identical to SEQ ID NO: 159058

SEQ ID NO: 339428 - DNA, 1000 bp, Homo Sapiens
tttttttttttttttctaaataccaatgcagttttgctacggttacaattttgaaatattaactgagcctcaaaatcaccctttctgtcaagcatatcttggcctctcccatgtctcagtgttgcctgcatttctcccaggacttgggggtggggtgaaaagcgtacaaaagatacttaaaagggctcctggggtacacaagcccagcaggtcctgagtgaagccgtgggccctccaaatgctcgttttatagcaacctctctctaccctagttctccaaattcacttctgccttcctcaggtttgatatctggcaggtttgactatccagaggaaattaaatatttttatataaaattaaattataataaatattgccaaatgctttcctttagcattgttccaagtctaaatgttaacctcaagctactgcaatttagacaatgaaatgggctgggtctacccccagccaccagccctcatcctctctacccagtgctctggtttatgcttgtctcctgactgctctgcttaaaggtgaaagtagcaggaacaacaacaaaagccaaccaaaaacaaggtagccagtgcaagacatctcactcttctgacatcctgcagtccccaccagtcctgaccgtgggcccctcaggggtctgggagtgtgacgttgtaatcttcatccgtctctatcccaacttcctcaaagaactgcttcttgctcttggggtatccttcaagtattgcatcagacagctctgtagccatcctcttcctcttcctccactccttacagtacttctgcctctctctgtacacctgctctttctcttctggagtcacatgattggtagctgctttaatgttcttcaatctctctctgtagccagcgcattccttctttaactcctggatttctttctgcatctcagcctccatgtagcggcagctctgctgcaagctctgcaccttagcagtgagggccacgattttgccatct

SEQ ID NO: 339429 - DNA, 1000 bp, Homo Sapiens; identical to SEQ ID NO: 159059

SEQ ID NO: 339430 - DNA, 1000 bp, Homo Sapiens
ttttttttttttttttttttttagtaagactattttatatacttttttacattgatcaagtacattatttttaccaaacaacattgtttcccactacatccatggttatgtataaaaaaaacgccattgtcaattaagatgttaaaaaattatttccataagagtattaaattctaatctatgattcacttaacttcctactttataaacactaggtaaagtaatctcacaagctgccaaagaacacatcccaagcagtaatcacagacgatgaagcaccttacaggacccctccaccctcaaacgcgcatgtccagagaagtattaatgccttaatagactactgaaggttaactatttacatcattctaaaaatattttaagctgtattacagtgctataaattctccttttaaggaaaaaagtaatagattgtttccttaccgtgtttgaaaggaaaaaaaataaatccatagtaactaatggtctgccgattttttccctgaatttttaaactccaacaaagcattattttgcaaaaagtcctttagcccaaagtcagtgtctctgttttgatctctttgtaaaagaactctctgttcatccattctctttccctgggaccgtaaaataaggctgaaaaagtcttcatctggtactgtcggaccctttgtggtagcaggtggtggagcacatctttgatcatctaatctggatccttgacattttacaaggatgtcaaagaaatcttcatcagcctctttgttgtcattagtcatcaggtggctaagtaccgactggctgttttgtgttagacgaagccctggcaaattactgaaactagccctctggtcatccagacggcgactctgtgagctggcaagaagatctaaaaactcatccgtgttgggggataccacaggaacagatgatgtttttagcatcattttagggggagtggaagaagttgttgttgaagctgtatggcagttcttttctt

SEQ ID NO: 339431 - DNA, 1000 bp, Homo Sapiens
ttttttttttttttttttttttttattccaaattttcacgtcgttttttaatttaaattatctgaataattctctgtctcacgcggagttggggaggtctgtccgggaatcaggtgggcagctcctccgcggggccagggcggagacggggtctgtacagtcccccactcgaggggggggcacccgcctgcctggttttccaggaggaaggggcccggcgaggacagggctgggcagcccaagcggaagggggtgccggcgttcgggaaggggccgcggccggtccggggccgtcgcgcttgggggcccggctaagggagcccccaacccagggagcgaggaggaggggcaggggcgcggcggggagaggggcaggtcatccaccggggtccacgggggaggaaggcccgggtggaggcgcggaggcgtggtgcgatcaccgcttgaagcggtaggtgatgggcagcagcagcttgctcttcttgagcgcctgcaccttcttgagcgtctcgtcgtccagggccagaaagcagcggcgggagtactcgagcaggcgctccttggaggggtcgaactcgcccacctcggccagcttctcgggggccacaatgagcagctcggcgatgggcgtggtcagcgccacggtgttcctgtccacgcggtggtgctcgaaggcccgcgacatgctcttgagcttctggaaggtgcccaggatcttcttgtaccggcagaggaccccgtcggcgtccttcactcgctgcctctcccgggccttgggcttcccaaagcgcctccgactagcacctcccttctgcttctaccgcctcctctcactggcactgccttcttcggacgctccgctgagggaggaggctgctgactcagggtccgaggcctcgcccccagccccaccacggctgtccccctccatccgcctgggcccaggcttcatccggcagtggtcctctgcctccatccgagcagaagagatgaatttgtc

SEQ ID NO: 339432 - DNA, 1000 bp, Homo Sapiens
tttttttttttttttgtgtaaataaagttttattggaacaccagccacactcattcgtgttcatgtagtgtctgtggcagcttttacattacaacagcagggctgagcatttgcagcagaggctatatggcctgcaaagcctaaaatcttcactttctacccctttacaaaaaagtttgccaattcctgctagagaagagatgacatacaactaagaacttaaacgagtgatcagggaacacaaattatttacataataaaatttcagagagggggggctggctgaatttaaaaagcatgaattacgtgaggcttgattactgtgaagagataagtcaacttaaagttacttacatttaacatacaatttatatgcactggtttaaaacacgcacacacacacacaaaatgtaacacaagccaactactgatctggtacagatgacaaaagggtgatcagttccaacttcaaaaggaaaactggctatgatgagtccatattgaaaaagtcactgtcatttatgggtggtccaagggatttttttcaagggtaattttacctgcttcattgttcatttaagggtacacactgaactttggaactaacgcttgcatgggtttgtgcctccaaagcagtcaacactgaagtcttggctgggctcagtggctcctgcctgtaatcccagcgctttgggagactgaggcgggaggctcacttaagtccaggagttcgagaccagcctggccaacatggtgaaaccccatctctactaaaaatgcaaaaattagctgagtgtggtggtgtgcaccagtaatcccagctacttgggaggctgaggcaggagaatcacttgaacccaggaggcggaggttgcagtgagctaagatcatgtcactgcactccagcctgggtgacagagcaagactctgtctcaaaacaaacaaacaaacaaacaaaaaaaaccacacacaaaacggtatgttggttcattaggctgct

SEQ ID NO: 339433 - DNA, 1000 bp, Homo Sapiens
tttttttttaaggaacaggtcgatacaaaagcgagatatgcctttataagataaagaaaagtttacaagaaacaagctcaatagatataaaaaaatgattagagtatgatgaatatttttttcctttctacttgctagatactcaaagtccataaatatgtccagatgtccactgaaatatctctcatttattcttacttggtttctatatgtaagaatattttgatttaaatagtttatatgctcctgaaatttctgagaaattcaagtcattattttaaatgacttcacaataggaatcccatcatgtatattttcttttcctttttgtttttgagatagggtctcattttgttactcaggctgcagtgcaatggtgtggacatggctcactgcagcctcaacctcctgggctaaagcacttctgccacagccttacaagtagctgatactacaggtgtgcacgacgcctggctgatttttatatttttgtagagacagggtctctacaaaagaccaggctggtcatgaactcttggcctcgagggatacttccacctttgcctccccaaatgctgagattacaggcatgagccactgtgtctggccacataaattttcagttcaattcaacaaacatctactgggtttcattagagggaccatcaatccttttattgacaccattaactcccaacaatcttataggtaaatctgggttttcttatcttaggtttacttatagtaaggtacttggtaagaagataaaatgtttcctattcttcatttatattgtaagtcatctgcatgcttatctagaatttcaacttacaatttgcctggtacattgttaccctactctgattcttagaggagcccaataaccatatccattcttcgtgtaagaaactgtcactgttgaaaagggactccaaatgtgcataaaagataatctcaaaaccaatggttgcaaaatgaaacatgaacagtcaagctgcct

SEQ ID NO: 339434 - DNA, 1000 bp, Homo Sapiens
ttttttttttttttttttgcagattgaacgcctttatttttctcaaatataaaatcagagtctcctgaggcagcacatgaactccagagagagaatcaacaacaagaatcacattgctaaaaagaacaggcctatatctacctcccgccctccctccccaccaatctgggagagggaagagcagagatcatggcctcaaagctctcgagcacctggctgaagcccagtgctgggcgccatgtgagctggaggaagccagggtgggtggagcccaggctggcttgattgtgaggtctgtcagtgcttgtcagtggggcgaaggttcagagatgccaggcgtcccaagggtccacggcgagaattggttgccagccgctgctgtgccaggaatgactgggcatgggcaggcgcccgctcctccccagctcgctgctgcaaggccatgcccatattataccaggcactgatgagcagcttttcttcctgctcccgctgacttcggcttttctcaaagtccatctccaggtgtcggatgcggacatcccgttctcggagctgtgtcctcagggaatggagttctggaggtgcccccgcagctggccgctgcttgggttccatggtctgcatgaccatgcgggccttgtccacgtagcggcggtatcgctcctccatggcccgcaagtccgcgtccttcttctgcaagttatgctgcagctcctcgatccgccgggctgtgctgctgtcagtgggtggctccagctcctcaatgtactcccgcttcctctgcaactccagatctgcctcatgaagcttctgcaaatgttcctccagcttccttttcagcaaaatggaaatggcatcttcagtcttgcccccctgctcctgcagggctttctgcaggtcctccacctgggcccgcagctcggatagctgctgctggttcagccggtgctgcgtctccaacccgtggcgcgcgcggttggcatcctccaggtggcgc

SEQ ID NO: 339435 - DNA, 1000 bp, Homo Sapiens
tttttttttttttttttttaaacatttgacatcagaagctttatttgtaaacctcacacagataaggaccaagggctggcggtgtggccagaggacaggggaagctgaaggccccgtgcttgagctcggcagtcctgctccttgcagtgaagccaccatgggtgaccgtccagcctcacccggtggcctgcacagtgagggaagggcttcagggccatctgctcccagggcaggggacaggccaccaaggacctttggcaaatgaaggtttacatttctgtagtttgtttgttttagagcttaatttgtagttttttagctattaaaaccatttgaatttttaacgacctgatgagggcatcaggtaaattaaaggattttgggaagattcttattttcaattctaatatctgacagatgccatcaagaataagcattaaggtataaaaaatactgtgtgtataaaacaatgccaaaccacattcctacagcaaatgcactgtgccatttataaccctgacatcacctcccaaggctctcaaggaagatttattttaaataacttaaatagaagtcctagatgatattgtttaggaatttaagagggtggtggatatggtcctgtgaatagcacttcccctgaagccagctcatggtctgttcatttggtttaaaaatgagcttgtattttgcagaagcccaacaaaaaaaaagtgataaaagtgttgttggtataaattacaaaaaaaaaaaaaaatacaaaagtcataagactactagtaaaaaatgttcaatcaatgccgtcacaaaagacagtacaaaaaccaaagtgcccaaatagaaggagcagcgaacttgcccaaaacagaaaagctctaaatagaactttagtatatacaaaaaccactcggtagagttttagaagtttcttccatgtaagtgaagcatcttgagtcactcaggacttggctgtcctcgcacccgtggcaggctggggacg

SEQ ID NO: 339436 - DNA, 1000 bp, Homo Sapiens
ttttttttttttttatttttaaaaataaaaatatttatttggaaaatattagtagcatgataactcaacctcaccagatattaacagttcatcaggtcaggcaatagaacaagtccacatgagcttcttaaaaagaaatggatgaccacttcaatagctgactccatcttccattttattactggatgattcataatccaaaatatgaagttttgggactttttctcaaaaggagaaactttgggaaagtgtctgaagcaatggtattgatcttttttttccccctttatgaaactttaactgcatacttcagtctggtggaatcttttgtgttattctgactgtcaataagaaccaaaggactatgttgatgattcctgatgatttcagcaacacttccaaagtactcttcaccatttttctttctgcccaaggcatattgttttgttgcttcaataaatcgcacaggaatattatatactcgcttattaaagaatacaactagtgtatatggttgtttggaatcatggccagagcttttccgaataagaaatgatccatccttgtttgatctgtgcaatgcctcttcagcagactttcgatcacaggctccagcataccatggcttgcagagaacgccagcttcctgttctgaaatagtggaattagatgaaaagctgggtaggggcccatccacagttgggtttcccccttctgtaaatcttggcagaggtatgggtttttggtggatttgtttctgggcaggaggaaacactggtgactgcacagcttcttgtctgtgacttgaccctcggtggcgttcagcaggtataggtttttcttcacaaacacttgaagcattctgttgagaggcaactggagttgtcttcagtggtgtcgttggttttttcccggcccgtggcaacggggatggtgcagctggtggaggtgacttggtttcccaggccccactgtttcgacctgaagctgttcctggagg

SEQ ID NO: 339437 - DNA, 1000 bp, Homo Sapiens
tttttttttttttttttttcatcatcaagttttctgttttatttaagattttagttttaattctgaagaaagaggtacatttccttgtttttagttttagcgtcaggttataaccaggtttctgtttgcttttctcctgtcttttcaatactgcacaaacgtccagaaactacagggttaagtaaaagctgcaggcaaggaggtcagagatttgctcccgatggtgatcagatggccccagagcagtgctatctcagagtgccctcgtcaggtgaatttatggtaaaacaaaaaagattccgacagaggagaaggactgaagaaatgacttacatttcagctcttatattattaataggtattaaatctgtgaatacttttttctttaaaacatttcaatttactttaaatctaaagccaaaaaatttttctcctttaaaaaaattacttctcacctccttatgaactctttagcaatcggccagttactactacagatgaatttgtctttccatcaacttccaatacattcttttgcttaatgacacaatcaagtccttgccatcaacttgccaaaagaattaaaaattaatttaaattaaaagcattttccctgcaataatgataagctgaatacaagatggatgctaggaccactgctttcccccatgcatttagcaatctcacgtaaatgaacctggttttcaaacttctgcagttgataatgcatttacttgagctttcctatagattaatcgtcattttctgctaagcagattatgtcattattatgcgcaacagacaaacaataattttctaagtattgagactgccctttgatttttttttctctccttaaaaaggcatttttagaaacattcaacagtgtcactcaaatgctggatcaacaaaaatttttacaattaataaagagatggtaatgaccctgtgatcgcattgcatctggggttagggagaaaaaaaattgatcaggtactgg

SEQ ID NO: 339438 - DNA, 1000 bp, Homo Sapiens
tttcagagagtctttgcttcttttcttttatttggatctataattcagcaaatacattttaagaacaatttacaaactcaagttcataactgctggaaatacagccagagaatactcttttaaatgacaaatcttcataaccagttactaataaataatcatcatcacaatagcttcagtaaaaaaaccaattcaatttaaaggtgctttcttattgttaccttgaagccaccgaacttgtgtagctggtccatatcccttttcattctttgctgatatcctgaacacaatggcaggcctggatgtataatcaatatgtgcatttgcaagttgcccagcagttactatacatgatgtcttaagaccacaataaatcctcatgaacacaagttgacttggattatcttgtatctgtgctgtgcggatagccaagtaggctgaatattccaaaatatttccagaaggtgaggttggaggttcccaggaaaggtggataccttcaacattctttgaaattctgactgcagaaggagctccaggaaaaccaggaatacaagttttaaattcactgattttgctgaaaggacctatcccacaaccattgattgcagcaaccctgaatctgtatcctgtgcctggaacaagatcttgtttcttaagcaagctgtagtcaggtacatctgcatttcctacctttgagatgctttgcttcccttttggcagcaaataaaactggctcaccaaagctgtattatttttaaaaattcccacatcacaccattgtcgttctcccgctttcactgtggccactggatttgaaggagtctctttagaaaacggcgttgctgtagcatgtgtctctacacggctgatcttcgttgcaggcagtgcatatgtttcatcaacttcagatttggtactgaatgttgttagtgaagtttcatctttaacaactgccccatttgtactggatgattcagttttaatggtctgctgggtt

SEQ ID NO: 339439 - DNA, 1000 bp, Homo Sapiens
tttttttttttttttgattttttttcacgtttaatgtaaaaatgatctcgtgacatttacatactaagtattaggcattacataatattaattttgatggctatgttacatcatctaaaaataatatgacaattggtggcatagtatgtgtttttcaaaactgctgtaaaacagaaatagtgtgaactcaaatacatattgctgaagggatgaggatcgctcttaaatgcctggatggcatgaactttacatattagcatggtaagaaattactaaatcttttcttttcctgtattaaaataatgaggatctaagacacattaaatcaaaatatttacaaaaatttaataatgttttagaccaaagaaaaaaaggacaaattaaagaaatcattcttattctaaatttaatttttttaatgttagttctcagttttcttagcttttttttctgttggttctttgaaacaagcattgtaaagactttttaataatacaatagcttttaaactcttagtgaaaatgaaaaggttgctttttgtagtagcctctgccactcttcaattaggctgggtaacaaagcaacaagttatcctagttatctgaaaatatcttcctgttagtttcacagaaatattttgtaccattcaacatggatgaaacttgggtaattatctcaagaaaatgttgcctcatctgaaatctgaacttcaaaatagtttatctaagatatctttgggacactaaaaaaaaagacattttatgaaaattataccaatcttcaagtagatgctttaaaaggggctttttaaaaatgaataattatttctgaaattagcaagtcgacatccttttctaaattatgggaatatttattggtaaaattaaatttattaatctttataaaatccttcctctgatttaagtaataagtaaccaccactgatactgaaagttatctagtgataagaaattgcacatttagtcaaaaaataaatcat

SEQ ID NO: 339440 - DNA, 1000 bp, Homo Sapiens; identical to SEQ ID NO: 159062

SEQ ID NO: 339441 - DNA, 1000 bp, Homo Sapiens
tttttttttttttttttttttttcaaactgcaaaacccttttatttttaataaaaggcctcacttccaaggagagcccagcccaggagatccccggtgaatcgtcaagcctgggtcctcggggagccggcgttcctgctgagctgatgttgtacttctgaaggcctgtgatcgctaactgcaccatgaggcagaatgcagggtgctctcaaccagctgggggttggggttcaggctttttttcatctttcggccaaggcagacaacaacggactcatcatcccacgcgactgagtgacgcgaggcttcaaacgcaagcacgagtgtttagaatcctgcattttcaaaggctcttgcccactgggaactacatggagaggagattaagaacaacaaccaaaagaggcagggggtggggcaggcgtgaggtaggggtggggtggggatgacagtcaacacagcttggaccagaagcccatggcgcctggctccctggaaaggcacagggcacagacggatgccgcctttcttgctgggacactcctgccaccatccacagctcccccgtcactccacgttcttgtacttggtgaacaggttgtaaagaaccctcagggtggatttgaggtccaagttaaccacgtcttcaggacgagccttgggtttcttgaggcctccgtccagcatcagctcaaaggcgaaggacacattgtggaccttctgatcgaagctttccggagtcaggtagaagtggtggagaggaacaaagtagtcttccagaaggcccatgagcagaaccaggtacacgccatctgcaaactgggtctccagttccgtcacctccaaattcagcttgttcaggtgcttgttcacaaaagtgatgagagacttcttcaccacgctgagcttatccggggcgtggtcgaacagcgtgtcgaaggcatcccgctcgaaccggcccatcatcatctctgtagttgtggtcagctcctccgagatgt

SEQ ID NO: 339442 - DNA, 1000 bp, Homo Sapiens
tttttttttttttttttttttttttgtttgaaaataaatctttattttgaactttataaaaagcaatgcagtaccccatagactggtgttaaatgttgtctacagtgcaaaatccatgttctaacatatgtaataattgccaggagtacagtgctcttgttgatcttgtattcagtcaggttaaaacaacggacaataaaagaatgaacacattcctcgtgtgtgattcactcttgtctaaatgtcccaacctgtgacttctttactttccacaccactaattatccaagatcttgaagaagtattgaacctctaataggccatcctctggcagatcagtacagtgaacagcattctggatcttagttttaccaaagattgctctgagagttccagggcgtaaatgccgggcaatttcaggatcagcaggtccacaaaattctcgaaatgtctttgtagcattattctgttgaatctccattgctacacaagggccagaatacatttctgtcaccatgtcatgatattcggtcactactcctttataaacttcatagaattcctcaacattaacccgatccatattgaacatctgcatagctgagatttcaaaacctgcatctcggatagccatcaggatctttcccaacagtccttcactgacagcatggggtttaacaatgcaacaggtacaattagtaaatttagcagtgtttgccggcccacaacctccacttgaaggaaaaaacaactccatttctctggccgcagaagcaaaagaatcagggccatgcgctgcatttcttatgccatctgttccaaagagggctctaatgctttcagaagcatctgtgcgtgccactccagagtttgcaggtcccagcagtcttttccattcacatatagcatcatctcttaaaatctccatggcaataataggaccagttgtaataaactggatcagctcattgaaaaagggtcttgactggtgatctacatg

SEQ ID NO: 339443 - DNA, 1000 bp, Homo Sapiens; identical to SEQ ID NO: 159065

SEQ ID NO: 339444 - DNA, 1000 bp, Homo Sapiens; identical to SEQ ID NO: 159066

SEQ ID NO: 339445 - DNA, 1000 bp, Homo Sapiens; identical to SEQ ID NO: 159067

SEQ ID NO: 339446 - DNA, 1000 bp, Homo Sapiens; identical to SEQ ID NO: 159069

SEQ ID NO: 339447 - DNA, 1000 bp, Homo Sapiens
ttttttttggtgtggggtcagtttattgggcatgcgtcagtcagaggctgggctggccagggtcgggtagggcagcagtttgtctggaccccgagaaacccaactggaatccagggcctcatctgcttcaaagccaaagtcttcctcaaccttaatctgcaccggggccagctctggagtcagcgcatttcctgctcggcgtccatcccgtggcactcgccgcctcttccgcccactgggcccctcaccgggggctgggctgccgggttctgggggtgcaggagtccttctgggcggggacagtgtctctttctctggaggctcattctccgcattgcctggggtgggggcatccgtgccctggctgccctcatcctccagcacaatggtgaactggctggcccggtagtcatccccgtaggagtccagcactctcatgaggaacctccgttcctgctgcagcctccgagttatcctctgcacctgatggagcctgttcaggacccgctcgttcacctgctcgatctcccggcagcgccgacctagtgcctggtactttctgcgatttaattcccgctggcgccgccgccgaccccgggctgcctcttcctcttcatctcgctcccggagccctgagccgcccagaccacctgacacaaactccacttccgtctccagctcgctctccaggatgtggccaccaaataggggaggcaacgccaactctgagcctggcggcgctgagaactcctcaaagcccacggctgccatggtcccttctctctgctccaattccatctccgcgacctccggaagccccgggcctcagagcttccgacctcttcaatcagtaggttaagccgttcgcaaaactacttgtcccatcaggctcagcagccgaggacggcgggacgtggccctaggccttgtgggagttgccaacgtctttcttcttgtctcgacgccccgtcgtccggccacagcgattctctgcttagca

SEQ ID NO: 339448 - DNA, 1000 bp, Homo Sapiens
ttttttttttttttttttgcattatttcttttatttttatgatttttttaataccaaaaaaaagagacaagattttgccatgttgccgaggctggtctcaaactcctgacctcaactgatcctcccgtctcggcctcccaaagtgctgggatgacaggcgtgagcactgccctgccttgtgcttttatttctaaacacattttcctaatgtatttttctgatgactctcaaggggaggatggctgttttggctgggtgtggtggtgcacacctgtagtcccagctactcaggaggctgagcggggaggatcgcttgagcccaggagtttgaggctgcagtgagctatgatggtgccactgttctccagcccaggcaacagagcaaggccctgtctctaaaaaaataaatattaaaaacaaaaacaaaaacaaaacaaaaacaaggaagagcaactgcatagctgcctgacaaaacgagagcgtggctcagccccacggccctgcgcggcctccctggaagcccctgtgctgtgccgggcactgggctccccatgcaggtgctgcgtctgcccggctctgtgctctgagtgcatgcgatgtgcccgaggtgtcggggcagggaggaggattgatctcgatggtgacccagtgaggtaggtgtcattggccccattttacagatagggaaaccagggcatcagtgtgacctggtctaggcaaggcctttgcggcagacccagatctgactcagccccgagggtgcagggagctggctttctccgccagacaagcaggccaactgctgcactcccccctcagtaaggggctaggggtggggaccccaccctgtacggacccctcaccagcatctccccgaggatgccgctggggactcctggcaccccttgcctctgctgtggctgtgtcacacctgtcctgccaactgttgttctgggcgtggacatttggggctccccgttgaggacgcctgggctgcgct

SEQ ID NO: 339449 - DNA, 1000 bp, Homo Sapiens
ttttttttttttttttttttttttttttttttttttttttcacaattatgatgtttatttaggaaaataaacttgaagaaggttttctattaaaaaaacataagaatcatatccaaattttagactctccatcttctttggtatgaaaatcaacattcataatagaaaatattttcttttgaaaggtttagttgttattgggtctataacggttttccatataaggaaaatacagtattatctgtaatcatctcacttattgaacaaccaatgaatgcatgcaagtaaccaagcatatgtgtgcagagaccagcatcaaggaaatattcattcatagataaatgttttctaataaaatatattttaagtttttaatgatcttctgctatcattttttgccatgttatctgaatagccatccagatctgtagtaaaacatcctgttagttacataactcaagaagtacttccccaaggaagctcacaccatcataccaggacttagcaacatttatctttcaacatgagtataccattaaaatttttttatatttctcagaattgtattcttcagtcttttccacaatatagtatatggaaattgctaatagcattaaattaatattaataaaacccaattctatctaaacctttttctcataagaaaaaacattactttaaaaaatagactttttgtttcttctaaaagtagtactatatggactgctcaattagcaatgccaaatacttccaaaaacaccataggaccaccaagctatttctattgctttgataatttcttttcctgctccaatttctccacgttcctgctttcttgtgtcaaaatatcttcccttaatttgttaaaatgaatctgagggaaaaaaatctgataatctggggtaaagaaatttttttttttgcatagactcttgtgatcacaaaatgaccaggtaatttatagcttcagtgctaacactgtgattgggaacaagaagag

SEQ ID NO: 339450 - DNA, 1000 bp, Homo Sapiens
tttttttttttttttttttttttttttttttttttttggatagaagggcttttatttacaggaaaggaggacagatgaggatttaagtgtccagtgctcccagcgctagttggtaaagggaaatgcagtgttatctcttcttttgctggcgacgtagttcattgtttcgggtcatggcctgggctgcccgagctcgtggcccctgctgtgtaaagtggtagccaaagcggacaatagagggacactgctctagcacggtggccatctccatctccactgcatcaccaggccactggcgctgattgtctacacggagctcaatgagtgtggcattttcccgaactgccttcagcacagccatgagtcctgtgctgctaatgaagttggattcgatgtttaggctctggaggctacgattctcacgcaacatgtcagccactgcattggcaatggggtcaccactcctcgtggctaccagactgaagctccgcacataggtatttgccttcattgcctcacacagctcacttagcatgggtattgggatgtcctgtatattattcaagttcacctcctccagctccttgtcattgcttcggaccctctttagtatctcctcaatgtttgtgggatttgggggttcatccggcactggcttatacttgtcaggctgtaccacactgctaatgccttcagtgttgcagatttctccactgcagagggcatcatagtattgcttgttactcatcagtgtgtacatgtccagaattgctgcaatgtcacacatttcagcatctgtggcatgtgccagtgcctcctccagctcaggctccagggtgatctgctcctctgctgggatttccctcttgggctgaatatagggtttccccttcttctcgcctgtgaagggcaccaagtcatcacgctctttgacttctagtgcctgttgctccaagtactgcaaaagggcctctcggtccagtggccccgttgggctctt

SEQ ID NO: 339451 - DNA, 1000 bp, Homo Sapiens
ttttttttttttttttttttttttttctatttaaattggcccttggacactgggtttttctgtccttgtttgtccacacacagctgaagggtgctggatgggggtggaggtaagtgtcacagccttgggtcccctttgggagaagaaacctagagcggggagaggatgtttctgatcccctttcctagttttccaagagcagaggcagcctggtgcctggcacaccagaccccaggtcccccaggccccgttccaggtgcagatgcaaagtcattatccttgttccccagggaggcatcagaatgaagggggagcaattctaagtggggcccacctccctaggcctcccacagccattctggaacatgctaacattgttgatctagagcctctgggggctgtgggtgggaaagaggccagggaagaatgaggtgcattcttctcgggttgggtaggccattccagaggcgagggtaggtggtatccatccctgtgtcctggtgcccatggtggccaggatgtttgcaaagtgccaagactcccccaagagaatggaggccaggtggttgttccttgccttcaccctggcagggttccctagcaagagggcagagaggatggcgggtgggggcaggctcagggcaccatgttccaccatttgaagggaaagggcttcctgcgcacgttggtgccacagtggatctccccctgcagctcgtggtaggacaagtagtcatcaatgaagatgcagtgcaggcccagaggctccagcagggactgcaccttctcctccaggcagcagcggccattgatgatgggcccgtagggcttggggatgcccaggtacttgcctaagaccaccatgttaaccatgtctgggaagaaggcttccgcgtagaagtttttcaggaagaagagctggggaatgtccacgatgtcactctctgccaggcccagctcccgcttcagcacattacggttccagtcaatgcatttctgt

SEQ ID NO: 339452 - DNA, 1000 bp, Homo Sapiens
gttgagtgataggtatgttaattacactgatttgatcattacacatgtatacttgcattaactatcacactgtaccccataaatgagtacaacagttatgtgtcatttaaaaataatgacaaaagcgtatcaagattcaagcgcctcttgtagcgcttcccacagtcctcacatttagatgttttctctccactttggtctctttgttggtctttaaggcatgaactgtgcacaatgctcttcccacagtcctcacattgaagtagtttttctctactgtggagtctctgatgggttagatgagttgaggcccatctgaagctctttccacacttctcacatttgtatggcttttccccagtgtgaaccctctgatgggaatgaagctgtgaattctcagtaaatctcttcccacactcttcacatttgaatggcttttcatcaccatggagtctcttatgattcaaaatacttgaggcccggctaaagctcttcccacattctttacaattataaggtctctctccggtgtggaccctctggtgcatgtcaagattaaacttactgttgaagcccttcccacactcttcacatttgtatggctttactccagtgtggactctgcgatgagaataaagttgtgaattctgagtaaatcttttcccacactcttcacatttgaatggtttttctccactgtggactctacgatgggtataaagttgtgaattctgagtaaatcttttcccacattcttcacatttaaatggtttttctccactgtggattctctgatgattcaaaagacacgaggcccagccaaagctcttcccacattccttacaattatagggtttctctcctctgtggaccctctgatgaaagtcaaggtccaacctccttttgtagcccttcccacactcctcacatctatatggcttttctccactgtgcgctctctggtgagaataacgttgtgaatttgtataaaatcccttcc

SEQ ID NO: 339453 - DNA, 1000 bp, Homo Sapiens
ttttttttttttttggaacactgaatgaagtttattgaagagaaacacgtactgaaaacgttgaagagaagggaatcacaacacagagagaaactgcaaacggccaccacaggacacaggtcccacacaggtcccgggccccctcctcctgaggttcctggcaagacgcctcatctgctcctactcctgctgcagcccccgctgccaactccctccttcctgagggccccggggtctgcctcttgccaggaaggtagactctggcagtgtccactggctttagggagccccctcccaagcccatctgctgggacagggccctgccctatggcccgcacaggacagtcacaggacactggaaaacacagcagggaacaccctaccaggtcaaggaaactgagtcatgagtaacaacaggggtggaacaccaaagcacaaagctcctcgggagcctcaggcagggcagccccgctccgtcctgggtccagttcttcctcccacagtcacggtcaccatcgtggtcacagggtgagcgtccgccttgccctggtgcttccttcctgtcatctcctgggactgtgctgggggactccggggaggagctgctcagagaagaacacacacagctccacaagaacaagcagccactggcctagatctacacagggaaagcagaggtggtgctcatgacgcgggacagcagtgagcagagcctgggctcacaggaagctcacagcatgtgccttgggcccagaggcggccacctgggtgggtgcatagcacactactttgcacaggaacaacggctagcggtgggtgggcgtctgctggacgcgtgggtcactacaggggcctacacaggtgaggatgagcttcctggaacagggggcagcctgtcccgggaacggtgagttgggggacccctcttgggagacccaggcatctggcacccttgagagggcctctttccccctgtcatctcccagctcagggctggggg

SEQ ID NO: 339454 - DNA, 1000 bp, Homo Sapiens
tttttttttttttttttttttttttttttttttgatgatctgacttgctttaatctgcacactgcgggggtgggggtgggcatgctcctcagcagtgcattctgggacacgggcgggcgggggctggcacgggaggacgagagcacctgcagggcagcgcctggcgggcgggcgggcgggcgggcgatgtgtcagctgcagttcttgggcaggcggtagacgccggccgagtagacgagctgctggtcccgcaccttcttctgcaggtagccctgcagctcctgcaggtcaatctcggccagtgcaggcccagtcaccacaaacatgcggagcatgttgtagatacgatccagtgagaggctctccaggttggtcagcatggcctggatgtacgtccagaagagcagcagctcctcctccttctggtcggcctgggaggccatgccggagtcgctctcgtcgtcactgtcaatgagcaccatgttgtcccggtcctgaggccgctcctcctcaatgacagagaaggtgccggggggctcctcacgcagcacaccctgctgcagccacacggacatccgccgccgcagcagcgccacgggcatcttcaccgccttgctcagttcctccagggtccagctggcttggtcctgaaaatacagcaagatcaccgcctgtactggggtgaccgccacagacagcgtgcggtcggccagctccacgtccatggtcaccaggcccagggtgtgcttccaactgagggtccgcatggccttgagctgctcatacttcttgcagtaagcctccagggctgccctgatatcctcggggacctccagcttctcgtccttgaagggcggccagaactcactggacaggatgacagcgtagaccccgaacggtggctgctcctctgctggccgcttctcatcctcctcccggatgttggcattgatgcggcgggagtccgccatgtccttcagcatgacttcacagaagtgca

SEQ ID NO: 339455 - DNA, 1000 bp, Homo Sapiens; identical to SEQ ID NO: 159071

SEQ ID NO: 339456 - DNA, 1000 bp, Homo Sapiens
ttttttttttcaggtgggcactggctttatttgggacctgcttctggaaggcgcagggctgcaggtctcctggctgggtgctcagctggtcacaccagcagctttccccacaaatcccaggtctaggccaaccctggcctgcggccgctgttaccacctcagacactggtctaagtccagggcagcctgggatccctactcctcttgaccccaaaggccagcaacgtgggctgacacccctccccggggcatctttggacgggtcctgcatccagcagggatgtggtcatctctgtcctctcagggcctgggagccagcgggtctggccgagtgttagggtggcttcctggtctccttccttagcagggagctggccacagccaaggcgcccccctgcacaaacctcacgaagttgtccccggccagcggccccatggcgtacaggccctcctggcgggtgctctggtaggtgaaggggtccacgtcaatggggttcctcttggcgctcagcggctggtcaggatccactgcaaagtcagcccctgccccaggcaggaaggagaggtcggggtgggagccgatgaggaccagcaccagggagaccccaaacaccttctcgacaccctcgaggtcctggaacacggcctggcagtcttccttgaagcacagcagctggtgcctggggaggctgcggtaaccctcataggggctgggcgacaggatggactgctcccgcatcatctggtgcaccttgtggtactcggggtacagcatcttgggcagctggttgaacaccaggccagggtcgtccacggcccggcggaaggcatggatcaccgggatgttgtagtggcgggcgtagaggaccgcgtcggccgctgacagccccgcgccaatgatgaggacagggtctgaggccggggtcaccgcacccacccttgtggcggcctccagggcagacagctcatggtggatgaagggcagggcctccccggggat

SEQ ID NO: 339457 - DNA, 1000 bp, Homo Sapiens
tttttttttttttttttttttttttttttttttttttttttgaaagaataggtttaatttattagttgctctttagcaaaggctatatagaacattattggggtgaaaattaaattctagttacagattcatgaaacttgaagccaaattagttttatgagactatcaactcccctttcatcctcctacacagcaaggtacctcatagtctatataattctttgccgtttttaaatgatttaagcagacataatacataatgcagttgatattaaatatcttgaggaatgtcaatagaactactttcactcttaggcattaactgatcacttataaatgttctgtttatccacttttcattttagattttctccttaaaaggactttatgtgtgaactagtcatcattatctgctattcgtttgtatacatgcatcgtaagtcttccaaaataacatttaaagtctttcttaatattgctttagaaatgttaacctttaaggaacattcaatttaaaaaataaagattcaggcactgactcaggaagacatgttcagctgggtcaagattttgtttcccctgaccagataaaagactctaacaacatacggtgtgtcagcttcttctttgcccaactcagagaaagtcatataaaggagaaaaagaaaacatgcttgaaatcacagtgaccaaaggatttgaagtaataattacattaaataaccataacttttcatttaactattcacattccacacagtggaaattatcctctcctccagatttttcacttacactcttaactttgaagacctacagtaacaaaaaacaacttacagacttccaggatgtgtgtttttttcttttaatgccaagcacaaagtgtacatcataaaattcatatttggtgtttggcattattttaataggtatgatcaagaccacaaatatcttgccataaaaatattctactataataatgaaaaaatatatcattaca

SEQ ID NO: 339458 - DNA, 1000 bp, Homo Sapiens
ttttttttttttttttttttttttttttttttttttttttttttttttttttttttttttttttttctttttcttttttttaataaaattatagatatatagatgtagatataaaaacataaaacagacacaacgcaagcagacgctgtcatgtgcttactctcaggtccctgacaccaagggaagcactgacccctccccagtgtgctttcccacggcgcgagcaccgcagccaggccggggctgcggacgtggcatgccttggggtggggttctccagtttggcagggagggcctgagggctggggagggggctctgggtgtcaccagccccctgtggcagcatcacccccgtgcctgctcccgcctgcccccccgtcgcctcccacaagagcataaagcaaaggttaaggctttgatgaaagggacagcggcggccggagcactgacacatcagacacggcgcggcagcacagcacacagacacgggacacatggagccgggcccccggccacagctggctggctggccgtctgtccacctatccaccaccacccagagcaggccagggcagaagcatcagccttgccaagctacaagcttccagcggggtccgtgaaaggcaacgcgttagttaggagtagcctggcgggggacactcggtccgggagcccacaggctgtgtcagaaggacggtgggggccctgggtgcctctgtccatctctgggacctgtccgtaaggggaccattgggggctggcctggcggtgatctggggtgctgggtgatggcagtgggccaagcctggctgagagagggtgccccaaagaggctgactgggccccctcactgccccagccatgggacaggcccagacacagaccagcccagtggcccttgtcccagtgagccgacttccccatgggcagatgagtggacgggcaggcagagcgcttggggcaagctgtggaggcgtggcactctctcccgccgatgggt

SEQ ID NO: 339459 - DNA, 1000 bp, Homo Sapiens
aagaatctttcaacttttatttctagcatacattcatctggacctttttgtttctttacaatgttccccctaagataaatgaatacaataaaaatataatccaactaccagcaatgtttctaaccagaaaagaatctaaaatctctggtgtgataatataggatttttttaaaaaatataaacttcataccagaaataaagcctgaatattctctttctttaaaaatataatttttccttctttgctcttccaagtaaatcttaaaatgaacctgttctagtctatttttaatctagcaattataacactacctagcagggttttttcctttataccttgttctgtactgtgaatcaactaataattgcaaacgtctttaaaaagtgagatgccatttggctgtagcaagattcttcaagagatgctgaaaattaaaaaacaaaacacaaaaaatccctattagcaaactgaaacccacttaacaaattatcctgtttctgaaattagaaaatgtataaaagcacttttgcaaactgtaaagttcaaatggaaaacattttttataatctgtttggactataaagactgctgactgggacagaactttagggacacaaggctctgtgaaatccatttttttctgcaactccttagttttgaaggggaggtttataaattgcaaacaagctggggtatggatacaggaatatctcataaagattgattggtttgtcgtgacatgtgactgtttttcttaattgagaataaagaccaaggggcacagggagagttctcttagatcaatactttataccagactgataaaaattagacagtgttttccccacttctgactagttcctctatgcagagcttcattatttaagtacaatccagtttaaaatagtattccaaagctcagcataaatggtctggggatgatttcctttccttgatttaggaagataataaagcctaattataaatatgggtacaaca

SEQ ID NO: 339460 - DNA, 1000 bp, Homo Sapiens
tttaccgtatggtcctttttattctccccagtaaagtgcacctgtcaagatcataatgtgattagggtattttacagccaaagtagacaaatccactctaccctataaaacacagatcatcacattgacagatgaaaaacaaaaacaaacagcacaagcaaacagaaattataatcatactctatcacttcatgcaacagcctggaaaatgatcagaattttggtctacgtgagactgtgtagactgtttattgtgacacctaggttttcagttccttttagtggcttacactgattctttgaagcctacagggctgctttgcctcagccccaccatatgtaagtgcacctgaggtgcactggttctctactaggctttgcccacctttacaatggttccaactcaacactccacccaggaagcattctttgtaattgtgggagcactccacactctttcagacttattattctcccagtttactttgtaggaatgatctggaaaacttggtgaggactgactcaccactgaagactgtgatcatcaatcaggttcccattgagaggactctatgacctgccatggctcccattccaccctttatatgcatctaccacgatgcctatcttatactagtggcctgtaaaactcttaatactaagatgtgttattacctattgtcactgtttcctcaaacaatggcttagaaaatgctgacttaagataactgattgataaactgggctaagatattagacaaaaattaaatagaaaaaaaaatccaggttaaacagtaaggtgggtggcagggggaggggggctctaagatcaggatatgaaggtgaagggaacacaagatgaaagttggaacttgtccaatgacctccccaccaacaaaaataaaaaggcacataaaaatatttttattttctataaatacattaggaaatgtatttcttcccaacccagtccaccccattaactcaattttttctacat

SEQ ID NO: 339461 - DNA, 1000 bp, Homo Sapiens
ttttttttttttttttttttttttttttttttttttttttttaatttttctgaaggataatcaataatttatttctctttaattgtcacaattaccataattatctagctacatgaccaatgtcactacatatcacaggaagattgtccacctacactttactgagacaaagacaatggccatttatgtgttaaatgtacaatgggatgttaacaccatttatgtgttaaatgtacaatgggatgttaaaagcagtggcttttatgtgtaagacaagatgtggcacatgatttattacgaacaggtttgatttaaaatgtattatgccaagaaacaagcatagaaatattttggcattgagttattattaaagtagaaaataagtaaactagagaaataaatccagattttcacttacattagatacattgaagtaggaaattaattggctcctcagtatttttgtgcaagttttttttgttttctttccttttgtttttgattttttataaacgagtaatatgaatatatcacaagtaaaagaaagatctcagccaaaaagaaggtaccagtatatgaaaaacaaatgaaaaattaccaggtattttttgcttacaaaaaatttaaactataaagagtcacaaaatatatataaaaacgccacattgaacgaggcaatcatactctaccgaaactggtagcatcctcctaaaatcagtcgcatgcattccattcattcggtcatacagtggtcaccgacaagaaggcattatggactctcgtgccatctggagacttggccccatgggtcatcagttcttggattgtcatccagttgtccaaaattttcttgtttctctttttcatcatctttttgtgactcagttcaatgatattgatctccttcttgccctcactgccgctctgagggctctccttgagacactctaacctgcttcgcatcatgaactcacggcgacggcgctgctctttggcccta

SEQ ID NO: 339462 - DNA, 1000 bp, Homo Sapiens; identical to SEQ ID NO: 159072

SEQ ID NO: 339463 - DNA, 1000 bp, Homo Sapiens
tttattgtgattttgacatttattaaaaagtatttgtcatcagtaaccattttggatacttgcaaatattacagtaaaactctgccttaattcacagggcaggagtagaaaatcaattatgtaaaatacagtgttccatttttgcaacattaaccagaaacattgtttatcagtttgtactgatatttcaagtgcacacatgggtacatatacacacacacaaagctaaacttcagcagatggtataatgtatagagaccaaacgttaagaaatgcagcacatctctgctcaagatggaacaaagggtgggaactaaccccaatagggttacaatcaaattaatgttatttcagatcatcataatgcttattgttctacatttcaaatatttacttgaaatgattttattaagattacttgcaggatttctcctccaaatacattttaagttttaaaaaatgcgcttaaaaatttcaaaccttttacctttacatacttttagttatttagcaaaaagtactgagcacctacattgcgttatgaaatgtcctagttttgtagactagcaatgaacaaagtcccttctttcaccaagcttacattctagagaacatggatttaggcatgctcatcactgtacttttattaaattcctgaccatactcatattttataagccttagctcctgtgcaatgactgatgttaaagttctaacaaaatccctcgtgaaacccctctcattaaatgtctctgttgtgtggtctcctggccattatgaatgttgaagttgggcagcaacattacattttaatttttaaaaattctttttctactgaaagaactctagtgactggaaaatttcagctcccatttgaggacttcaaaacaaaacagaatcttcatttctgtgtagattctctgatgaagggtagtccttaccatagtcttcgcttttatagaatttatcactactatggactctttgatgaatgagaaga

SEQ ID NO: 339464 - DNA, 1000 bp, Homo Sapiens
ttttttttttttttttttttttttttttttttttttttttttttttttaagtagaaaatagaattttataactacgttttacagattattccaagagatatcattggttattttattcttttgaaaatattacttatttaaacaactaaaaaaaccggtaaagcctgatataatttcaacattagaaagaataaattattgaaaaatatgtagaacaaaaacaccatcttaatgccattggtaccactatactgttgagcaagtattatatgaggtattgaacattgcacataattatacacttaggatttgagattgtagataaaccagttgttcaaggccactaaaatactgaaaaaggattatgattattaacagtgaggaggaaaatacaactataaaagcccttcaaactcaaatctggaaatggtaattttactcaaaaatataccacaactactaagagattttagtaattcatgacacaaaacaagacatccacctctaatttttttcttatctattacatgaattcagtggtgatagaccacatatttgggacctccatcacagtgtgatatttagtattgttatattttagaagttactcatttaattaaggattttataaacgtgaatatgtggtaactggattttatcatttctgataaatggaaaaagtttagattttatactaaaagtattatcatgcctattcacatcatgtaaaatatttaaaattcatgtattttaattgaatgaagtgctgaaaaatttaggtatgactaataggtattacttgcttatatgataaaattcagttttaggtggtactttattctatagattcggaaatagctcctcttttctactaatttaaaataattctatggctctggttcttaaaatgtctaattattttcactattcagtgcgtactgttagaatatatttctttcaatgatttgtaagatttggtggagtgaaaaacctcaggaaa

SEQ ID NO: 339465 - DNA, 1000 bp, Homo Sapiens; identical to SEQ ID NO: 159073

SEQ ID NO: 339466 - DNA, 934 bp, Homo Sapiens
ttttttttttttttttttcaaattcttcaactttattaaaacattatgagatttttgcacaaaccattgttttttgttttagctcatcagctatggttactgtattttatgtgtggcccaagacaattcttccaacatggcccagggaagccaaaggattggatacccctgaactataccctagggtggggagtggctaagacccctaggccagggtctttcccccagctgaggccatagtgcttccccatggccaagacagtgaggtatttaagaatggaattactggcttagaagccaaagttgactgtaatatctccaactctggctcctgttttgaaaaccagaattctttggaagttaatggaaaactcaaaatagcagattctgcctttggggtgtttgcagagggctttgaagtggtctcaaattactgacaagtgaagatcaggtagagttaacaaagcaaccaatgtagaagcaggtctcaagggcaattcacatttatttcctgagcatgctgactaaacatacttcaaacacagcagaaggtaaagagtctgttttgtaagtaaagccgtttcttgccaacagcgaatggtggtccatgaagagtaccttgagcatcatcttcaagctgaggctccagctctgggcaaacagctgctgggtggacctggtccttctggcctggatgggggcctccaaggaactacttgttctcatacttgtgcttgatgtgtttccacagcttcccctcgttgatgtggtcgtagatagcgtccgcgccttgatcgaaggcgcgctcgaagaacatgacgcccacgatgatggtgagggcgaaggtggaggtcctgcggaacagcagggagtacaatttcgaagtcaacgtcgcggccgccatgtttcttcacagtccaactcgcgccaccgc

SEQ ID NO: 339467 - DNA, 1000 bp, Homo Sapiens
tttttttttttttttttttttttttttttttttttttttttttttttctgccaacaaatgtttattaaacacctatgtgcacagcacagagccaggatcttcatctccactgcagttcatgcttctggagagctgtccaaaagctcgggttgggctggtttgaggcctgggatccaggcccgaggtgaagatgggaggaccagcccagccccaagagctcccagccttcagactcctgggtggccttgactggcagcaacagccttaataagtattggagctggagaccaaacccaacaccattttccaggaggggctaatccatgaccaaggtgcttatgagagcatccttcctgggccttatgagagcatccttcctgggcccttctcttgccagaaaaggccgtggatggcagacctgcaggtgcgccctggagggagtggctgccgaccggcctcccacagcgttggctcttggcctgagcctttgcctctctctggcctcctgtgatatcacacccagggtagtggtcattgtctgtgttctcagggacactgctacgtgttaaagacttactgacacagaattaagactttcgagagaggaactgagaagggaaaagttggatgagaagtgggctcctaggaaagtgagtgagtgtgggacaaacatggagtgtgtctgttcctgccaacttccagacccaggcccaggaggaggcactgcccaaggcctaggtgacttggaaactggggacccactatgggagcagaggagccatcagtggtgctgcctggatacctcaagagcaggccatcctccagtgacaggcagtctcatgggaatggcctcccctaggatttgaggagggcgtgtgtcaaggggcagtcacaaggaagatccccataaccctttggttcagggccatagagcctagacagggcctctggctgtatcagaactgccgcccattgttgggcaagaagttgctgatggcac

SEQ ID NO: 339468 - DNA, 1000 bp, Homo Sapiens
aaaatacatgcacacatatttttatttaacttaggccctgattattagtatataaaacagaaaaaccaagtgccttggtaatttacatatcttctccaaatctttaaagaaccaagctctaaaaaacacacgtaaagatatttaagtcataaaacacacacacacacacacacacacacacacacacacacactcaaactttaattttttttttttttttttttccaataatatatttaataggtaagatctcattcatcaatatacaaaaaaaaaaaaaacaaaccagaaaacaaaaaactaactttgattaagacatgtgcccttagtaagggcacttacaattagaaaggtttatcggtagcactttgaggtagcatattttgtaaagtcacagggctgctctgcagtttctcctggatacaaaggtagaggccatcagcctttgcccctggaagaggaaagtgaaattatctgtactcattgccagtgtcagcctgaacacactttctaccacccacccttggccatccctcctctacactttatgcgtcgggggtttagaacaacgtaaaggcattttgctgcttctttcctcttggtacggcagcatcccaggctgtggagccagttgcctcttgccgcatgtgattcaccagcaggagacgcatgcaccctgtggaaagggaagctgggcatcacagcatgctttttaattggctttaacatttcattaagtaagagtgactcattcctgcaaggctttaaagaggttcatgttctgagtattctctccacgattctgaccctagaaagcgctcctttttttcctccctgggtgtaatcattttggggtatcattaagctttctgggattttcctggcaggagggtgaacagaaaagctttaaaaaatccacacaaaacaataacaaaaaacccaagtgcaagagcaataccaagaacagacttcctttgtgcaagttaaaatgatacaagtt

SEQ ID NO: 339469 - DNA, 1000 bp, Homo Sapiens
ttttttttttttttttttttttcatgaaaaattaaaactttcatttattcatctaaggaaagatttctcaaagaagtaaatccataaacaatattgtacatgtttttatgtaaaagataatttattaatttgttttcagctgtcaagaaccgaatgcatttgttactaaaattataaaatgtcccttaattaggttatagtaatgattgtgtatattagcaaacacctaaatgttttactgattgggtaatgtggggtaaataaaaaaacattcatttcaaatttcttcatttaaaagaacaatgtaaatcatttatctattattctgtcttgcttagaaaacacttaacagaaaggtttcattaagattctaaatttagactttgatgattttgaaatgaattcctggtttcctctattcccctgggagccagttataataatttcaaggacagtcattagcaactctaattcagttgactgctgaaggtcttttttcaagttttgtcctttccaccttttttctgaagccggtttctggttggttcggtcaataccaaaggttcttgtatgatgactgctgggtaatttttgcctaatagttcaacttccacttgctgtcccacttcacttagttgtacagggacatatgcgaaagccagactcttctggatgctgtagctatagcttccagatgtcgtgttgccaaccaccttgccattgtaccagatgctttcatttccctctggatcaacatcatccgttgccaaggtgaggcagaccagtcttcgtttcagccccttggctttaatctgtttcagtgcttgctttcctatgaagtctgctggcttatttaacttcacaaaatattccagtccagcttccaaaggatttgtatcacagttcatctctaacccccaggctctgaaggctttctccaggcgtaaggcattcatggcataggttccaaaattgtcgattccctcctcctggcctgcat

SEQ ID NO: 339470 - DNA, 1000 bp, Homo Sapiens
agaatgtcataaaatattaaggatactttctttacaaaagctgtgatgacacatatgaagtttctaaacttttaacaggactggaaaaccaatgcagaaatctgctcagtagacaacttaaaatctaaacccaaacatattttgatagatacaatatgcaaaatctaactttacaacaggaatagtactaattccttgtcattaacaccttactagtacattaatacctttacaaacagcatcatataatagcataatatttcatcttactcctccatccaggatcttttgtgagaggcactaataaagaacactagttttggcgacgctgtatcaaacatacacatagtataatggtctattttactatgttcacaaaacatcatttataaagaaatttttatgaattcaaaaataggttgttagtaacatgattacctttaaagtatggattttgattttcattcacaatattaattcattaatcttaaacagtagtttcatctacaaaatgttctacagctttttcctttttgaaaaggaataaaggcagttaagatactcataacttctagttaaacaacatcaattttgtttcacagtattaattagtagagaacattttcaattaaagtgatatacaatttacaaaaatagaatgatttatatattgcaaaacattgtcctccattatgaagaatatatatatacatgtgtgtatgtgtatatatgtgtatatataaatatttcttttaaattttacaatagcccttattcaagtactttgggattctcttgaaataatcaccttgctgtatattgtaaatacatttaaaaagtaagattaatctaagaaaaggataaaagtttcagtgtagtttgacttaaaaaaaatcaaccacttacttgagtaaaaacctgactgaattcaaaacaggttccggtgccatactaagttcaagaactttgttaaaaatatagataaatttaagtgtcaaag

SEQ ID NO: 339471 - DNA, 1000 bp, Homo Sapiens
gcctttgtgtgcggtatttatttcaaatgttttttaaaacagcactgttatttctcaggacaagagcaaaaatcaccccctgcagaagcttgggaactatgtacagaactttacagaatagaggcaatactttagcttaagcctgtctgctgaccagagaatggaattctgcgtggactcaaggaacaaaaggaaactaggcagggaaggggaagaaaagtgcccatctgaatcaaacttcagctgccatcagggcacatcttgtggtggtcacagattgtaggctgttttttggaagattcgggttcagcacaggattccatttgtctacttggctacacccctggctgaggtgccatgaggtcaatgtcactcaagttcctggccagccaaactcccgcagcaaagagtcccaaatttagtatcgagttcctccggaagtcattcctatcagtggcaaagcggtagacgccccgaagccaatctcccacgttgtccggtatttcgggagtttcattagccgagccagcagcgctcaccgggacagtgctggaagccatagtggaaagcttcgcatgggcctcggtggaggaaccgtatcggcgtcgccggtgaatgacgcacctccggtctggcacttccggctgctaccggccggcagtgggggcgctgttcgcttagtccgacatccggaagagggacggccctctgctgcgcctccacgaactctaggaggggaggagcgcggcccggttctacggtcccctgctcccggtcccacctccggctctccagccggtaactgtcacgcgtgctgtgatcatttaattggcttgggaggaggatggtggggacggggctgtcccagcctgtggaggtgggggtaggggctatctcagcaggggaagcgtagctttggggaatgggttttgccaagaaagtctccgccaaaagtcttagaacgcgcagtactgaagggggcgcactccaaacttgtcac

SEQ ID NO: 339472 - DNA, 1000 bp, Homo Sapiens; identical to SEQ ID NO: 159075

SEQ ID NO: 339473 - DNA, 1000 bp, Homo Sapiens
ttttttttttttttttttttttttttttttttttctaaaaccaaatgtttattctctagtttgaaaaggaggggtaaatggttgttctgtttagttccagagaacagaacaaggcccaataggtagaaattataggaaagcagaattcattcattataaggaaggatttctaacaattagaatttctaacaattagaatcatccagggcctcaggaggtgcggaagttcctgtcacctaagtgctcaagcagaggccaggtgtcatatgctagaaatggagaaaggaaactcaccagcaacttcccctcagctggccctccatcaccaatgcggcagtccttgccgtgacatgctgagctgtggaaggagcgaaggaggggctgcggtgttcagacaagagcctggacacagtgctgctgacagccaggggaggctctcagcgctgggaggggcgacagataaagcgagacagaccaaggagtaaatgccttgggatctgctctttgggaaggaagaggatggaagtattaacagcagacgggtctctccaagtctgggtgcctacgcagggggcaggtgggaggggaagggagaggtaagagtggcttcgcttcacctcttgctgctggcaaaggcccaagttctgtctaacaaggccagcaggttctccaagctgtatctagcccagagcattcatttacaggactctaccacgcctgcttccaaaaatgatctaagtaacttacagtaaaagacaggggcattaaggcgttaataccagaggatggagggcttcctttccactggtggctcctctagccagagggctgtaaggggcggatgtattgctgcttttccagggcacagggcagtcaggacggagccttagcacacaccagctggaggccggcgtccctgcgcttggaagtgggttccctggccaccggggttgacctctctcgctagcagggcccacccagctcactccccgcatcttcc

SEQ ID NO: 339474 - DNA, 1000 bp, Homo Sapiens
ttttttttttttttttttttttaccaacaaagcctgcctttattaaatagagatcgcgttacattccatccaaagaaggaaatccggacgtggtgagggatgcgtccaggtgggagctccgaacgctggtcctgagtgggctctgatgggtgggagggcccaggtcctgcctgcccacccaggccccacatgccagggcgcgtgtctgcatggccacccacagctgaaaacaggcgtgggtgatctgaagccctgtctgtgttctactgtggcagaaagtgccccagtccttccagcggttttgggagcagggcctccaggagcacagggctgagacggggtgggagggaaggtgacaagggaggcctttatgaagggggagggaggaagggggaaaggaagggaggaagcgggggaggggtcttgactcatcttaacaaggctttggggcaattctgtgctatggaggccctgccagcccctcctagtagtccaatagggaggccaccgggaacaaggcacaggatggccacaagggggtgctgctggcccagggcttggcagctggggtggagggtaccctggagatccagccacccagaacagtccctttctgaagacaagccagcaacaaggcacctgcaggcagttctggggactggggagggggcgctggctgcctcaggtgtcccctcccaagggctgaggccccccgagtatggatccgagctccctggtctttggtgctttcttgaaatcctcctggtggtggcagaacccagtggggaagagaggggggtcttgccgtgaagtccaggcccgtctgtcccaggatggacgtgtggtgctggctcagtgctgcctccatggcctgtctgtccatccattctgcctctggctcagggctggctccaggcccccgtctccctgtgtgtcggcttgttctggggtgggtgtttgctctgtctcagagctccccttcaggcctgggccgcgccct

SEQ ID NO: 339475 - DNA, 1000 bp, Homo Sapiens; identical to SEQ ID NO: 159077

SEQ ID NO: 339476 - DNA, 1000 bp, Homo Sapiens
ttttttttttttttttttttttttttttttttttactccaaagggtttattgagacaagttttcacatacaagatggggacagaggggttggggcttataaacaggaacctggaaggggaccgagggtgcagggtagaaccaaacaagagagtgaaataaatagagggaaagagtggagacagggaggagactgactgagaccatcacacagtgataatgcgggtggggcggcgccatgaaaatcccgttatttatacagatatacagggagttcagggggacccgaggcccactccaccctccatgccccagggaggggcacaagaaagccgtctctacccatgggcgaccccatggggcgctgggagggctgccctaggagtgttgggcaatccctggcctggaagccttggttagtgtctggaaagcagtggagagggccggaggggaggggcagccaggccggggctcagctctgaggctcccggctgccaccctttctcccagcacagctcctgcccaggtctgggaggatgggggatgggggagcaggagctcaaggggagaacctggcaccttctggagtcttggaaaaactgatccctaaagacacccggccctggctgtgctgccctctggaaagcagctctgataccaggagcggctgtcagggcacagggggaaaccccgaggccatcctcgggggtgattcctgaaaggggcccatccccaggctggatgcttggggaaggcagccgttggggagggattcctggggaaagggccgttagcaccaccaggctccatggcaaacagacagaggccaggcctctgcacctccagcgaggctgggagtcccctcagccccacctgcccggccctacaccccagccagcgtggcggccagggcagggccaggtgggcatcatacgaagaccttggccagggcatcagcgccagcactggcaatgagggccttgctggggtggcaggcaacag

SEQ ID NO: 339477 - DNA, 1000 bp, Homo Sapiens
acgtgtctgcagggggcatgttcccgtttactgagcgcgagttctcttggggtggaacggggaccacccgtgcctgctcctggccaggcggggatccccagcagggctggggccagcaagggagtggggccctcaggccagggtggaggctaggagcagtgccaggacggtgagaacaggtccaggtcctaggaggcagggcgtccccgagagggcctcttgcatgctgaggtctaggaccaggtagccgttggggatgccgccctgtagccccagccccagcgtgtccaggtcgtcctgccgctgccgtaggatccagtcccgcaccgggcggtgccgctcctccgccttcaggccctccacgtggggtcccagaagtttctgcacctcagccacagtcaacggcagcaccgcatccgtccgcagcttcatgaacgtggccaagtccatgctcacattctgctgactgagcgccttcaaatcctccgtgggggccccacccaggaaggactggatcttcacgaagtattcggacccgttcatgttctggaaagcaaggcgggccttgggatagaggacgtccagctgccttgggtcacacgtgtccaggtcctggggcctgaccgcccagatgctgctggggggcacggagctcagctcctcggggctgagggagcacaggtacccagggtagaaggcggtcagggtgtctagggtgtctttgtctagctggccccttcccttcacaaagcggtcgatcagggtggccacctgtgggaggggccgccgaggagcctgaggactcatttcgtgccctttgttgacttcaagcaaagccttcagggtctccagggacgtcacattccacttgcgaatgtcctcagggctcatcttgaggaagaggtagcccaggtgctggatcacagactcggggtaaccttgtgggtagagctcatccagtttatgctttaggacgtccagctgctcgtaggtgaagggg

SEQ ID NO: 339478 - DNA, 1000 bp, Homo Sapiens
tttttttttttttttttttttgcacaaaggctatgtgaacactgaacacttatagagagtttaccactctagaatagaagatataggaaagctgtagtcctggtcttcatcttcctcctcttcctcggtgtcttccgaaatggagttgcaagatccggagtgctttacttccagtagcacacctgaggagcaggcagcttccttcatggcacactcgctggcataagtggcattgtcactggcacagacaggctcatccgacttactgtcagggcacagctcatcacagagggaacaccggcctctcccaaccttgaaatcccataaacattttttcccaccagtgcactggatatcttcacaggactttgctttgatacactttccctcataggctaatccaatagatctgcccagcaggcaggtagcctttctcaggtggcaggcactggagtaggtgactccatcattcccacagagatattgctcagaggaagcaggctctgggcaaatccgattacaggtcacacagtaggcattattggtctggtccaccacacatgtggagctgcctggacagaaaacatcccgacaagtctttttacatctgccttggtactggacttccagttctggctgctctttacatcttgcctttaggagtgcacattcattgcggtaggttttcccatccagcccgcagactggacccttccaggtgatgttggaacaatccggggcgcagacgcagcggggtttgttcttcttgttcattcggcattttttcccaggtccacagtccacgttctcacacgtttctttacaggggatgcagttgggggcgcccccgttgaaaatcatccacttgaagagtgtgttgtcattcacgtcctcctcggtccacgaggtgctcagccggccggtgctgcagcactcctccttgctcagttcggtcttgtacaggacctggcagcggccgttcttcgcttgacggagccag

SEQ ID NO: 339479 - DNA, 1000 bp, Homo Sapiens
tctagactatggacaagtgtccattcaacagttatccagcctggcaggaagcagatatctttctgtgtatatctggatccaactaacatttatccaatgtctgttgcatgccaggtactgagcaaaaaccttcttcctataaatttcatttaatgccattaaggccaagaaggtggcataaccaacttcctttttcagctgaggaaacaggagcacagtgaataactaactggctgggatttgtcctaggtcccctgaactccaagcacagtgctatctccactagaccaagctgccttgtctctgggctcaagagaagcctgcataggagctgaaggtcaagaggttgcaggcttatctcatatgcacatacttggacctccctaccacacagctgccagcgacaagaaagggcttcttttccttccagccaggtccagaattcaatgtcatttttctagcttagattatctaaaaaaaatgccacaacaggggatacaaattttaacatattttattgatttaggggccaaacaaggcagcatttggtcagttaagaaaggcacctcattgaaaataatacatcacagtgctgttgagtgatcccagtcacaggatttgagaatggaaaggacaatctttggatgacatagcttaggacacttgctcatttatttaaaagagtcccttcacacagtgcagataaaagaaggcaagagcataggattgtggcatgtgctgggtagctgtgagaggttactcatgaaagtaggtagcctagtaaattagtggtaagtcaggggaagggaatcagcctccctttccatttcattcccttccccctccccttgattccagtttgcttgatttgttgagccaccatccctatgaatacaccttacatctctttcaaatgtggagatggttttttgatcttacagtgtgtggaaccggagtcagtaatcaaagctccctgttccaagctatagacagacaggac

SEQ ID NO: 339480 - DNA, 1000 bp, Homo Sapiens; identical to SEQ ID NO: 159078

SEQ ID NO: 339481 - DNA, 1000 bp, Homo Sapiens; identical to SEQ ID NO: 336364

SEQ ID NO: 339482 - DNA, 1000 bp, Homo Sapiens
ttttttttttttttttttgagtggggagacaggccagggaggccacctggagcctggcacagtggcctcatttattgtgctgctctgctgctcacaggggaagccggtcccccagagtccccttcctggtcctggtgagtatcttgtccctggattgcttgtcagccttgtcctcctggagcactcagtagccggcaggctccccgcctttcctggagtccgaggcagctgcccagccaccagccgtgcggacgatggcttgcaccacagcgatgaaggtggacgcgatctgggtgtgatggtgccgggtctccagggctgcagtcactgcctggtcaatgtttctctccactgtcgtgacgttgggcagaagctggttgtgcagccggggctcctccacggcccgcttcacgtcatagccgaaccagaggttgtagatgatggccagtgcagtggccgtggtgatctgtgtgcccccagcagctcccaccaccatccggacctggccgtcctggcccaccatgatcgtcgggcacatggacgagagcggctgcttccctggctggatgaaattggcaggtgaggggggtaccccaaactcgttggtgatgctgggagagctgaagtcgtccatttcattattgaacaggatcccgctgaccggggagcggaccttggagccaaagtagaggttgatggtgctggtggcggacacagcactgccgtcctctgcgacgacagacaggtgagcagtgcccccgtcatccggcgtgtagaactcgggcttgtagtaggagatcgggtgagtggtgtcgtcagagatctgggcccggagctgggcagcgaagaactcggaggtcatgttgcggaccacctcagtcacatccacaaacttggggtccccaagcagggtcctcttggcgtaggcaaaccggaaagcctctacgatgcggtggtacgtcaggcccttctgctcggggctctccacgctctcccggga

SEQ ID NO: 339483 - DNA, 1000 bp, Homo Sapiens; identical to SEQ ID NO: 159079

SEQ ID NO: 339484 - DNA, 1000 bp, Homo Sapiens
tttttttttttttttcctttgtcaagtttattttattaaaatatacaggactgaatattagtggatgctgagaacaggaaccaccctcccaggccgtggccaagggagacgcttctgccatgcagacatgcggccggtctgtgtcccagcgtgggaggcagacccctcctggttgggctgtgcagccagtctggccccaaggccaaggccggcaggggtgtggtggtgatgctctcctgaggccttggccttagaggcagagtgacaccagctgggagggctgggcagcgggtgaggggagggagaagatccctgagccagggaaagctgatgccctcctggaggcagaggcccccagtcagcctggagcctggagccaggcgtccatgcagctccgcaggggaggccaggctgtgtgtgaatgccgaggggcccccatggcctccgccatactgcctttcctctgagggccctgctcaccctggggctagcctcttggggcacacggggactccccgggccagccctgagtggagctgggctggctgtgatggaatgtattatgtgggaatgttcctggaggggccatgcggcctgggaccgggttccttctgggtgaggccccaatcaggcgggagcagcatctctctcctcctgggggtttctgctgaccacccagccacagccctctcagccctcaccattggctccagctttgggctggcattctccatccccagatggaggggacagccaagcagagtccccagggtttgtgcttttgaatgttggtcagccgggctgggctttggggccccactgatcccaggcacagagcagacccccaaggcctcttccccagggccaccatattggggctactgggcccaagcctcagccagcaggagggcctggcctccgagaagcagtgtgctgggctcccactagggctgcgcctgagctgctaaggaatgcttgtgctttttgtgcaaggcagagg

SEQ ID NO: 339485 - DNA, 1000 bp, Homo Sapiens; identical to SEQ ID NO: 159080

SEQ ID NO: 339486 - DNA, 1000 bp, Homo Sapiens
ttttttttttttttttttcggagcgtaggtgtgtttattcctgtacaaatcattacaaaaccaagtctggggcagtcaccgcccccacccatcaccccagtgtgcaatggctagctgctggcctcctccatctggtccctccagcctcacagcctcctcctgaagccctttccttccaggctccagaagagcaggagacaaacacaccccactgaggcccagctttaataaagtgcctgatacagagccaggggacagaacccaggtgatacagctcccgacagccatcccaggacgacagagggtcgagggagaccctcggaagcccccagtgactccagacaaaggggcagccccaaaggcgcctccaacagttggaaaacctccctgctagagggcagaaaaggaggcctggccctttaagagccaagctaatggcagctggctgaggggctaagaaaacagcttaaggttttgtcccgtttccttcagagtcccccaaccctgaaggagtttgcgcaaaaataccctaaagttttccaggaggtggggaggtcaccccagaccccccaaagagctgagccttccagcaagggatagtggctgggagggtccagacggggaggacagacccgagggcacttgtaggggaggtggaaagggtctcagactccgcactggaaactggtgtgggcagaagggtgcccagagagggggaagggtttgtccaaggtctcagggcagagccaagacctggatgccagcctcccacctctgggacctccccaccgcccccacaacctccacaaccccacaaattctctggccgggcctccagacagcttctacccccacacaatctctctttctggtgctggaaattgagggggcaacaccaagttcccagctccttgggacaggaccccattatcccagcagagtggggagtgattggggggtccattcctggggctctgaaccaaggcctcatgggaaagga

SEQ ID NO: 339487 - DNA, 1000 bp, Homo Sapiens
ttttttttttttttttttcattttttaattttttattttttttagtcatttttaatgcatttttctctgtgcacaagagaaataactgatgaagtcaaaagacacactttcctttatacatagcagttaaaagtaatgcaaacatcacatgacactttcagtgaaagttacatttccaattacaaatcaaaatgcatattagggtctctttatgggagaagctgagaaggaagtcttaggtaaaaagcactttcctggcattactacactgatccttcaggctgcacaaagattaaggtcatatacagtcaatctgcaaatgttgacacaatgttacactgtaaattttctgtacaattaaatgtatacttagagataccaggataaacatttctactatattttaactgaacttgcctagccaacattttcactgagaagtttatcaaagatgctgtaagattctacaaaattgtgagacataactagctccagaaacatttcttgtattctttctcattttggttacacatattacactcagattctactgtaatatttttagatgtacagtgccaattgtgcttactgtactgtatacaaatatagcaaaaaagatcaatggtataaatcttacagcattttgctagcaaaaatacatgccaaagtcacaataagcaatatcgtaccacaaattagagagcttcaaataatttgcttctgtttttaatatcttcattctacattaaattactatcataggctaatgtttaaaaatgcaaataaattggacatctgtaggacaacacttgttcacccaactgtgaaggttgatacctgtttccaaaaatcacaataaatgcagaataaagagaagtgtttgcatgcaacacttttgagtgaaacagcattgattcccaccactcaaaacggctaaggaaggaaactaaaggaaataaggaaggaaggaaacaaagagggagggagtggggagacaaga

SEQ ID NO: 339488 - DNA, 1000 bp, Homo Sapiens
ttttttttttttttttttatgttggtagaagtattttatttccaaaaagaatatgtccattttccttgggaggcccctggaaatttaggaggaagacccttggaaaccatgtgtgcagttaccatcacctctggaggtcacaatcatgctttggttctgctctgagccccatcaccgtagcaaccaacactccctcatgtctgatggcatgttggtattggccgttgatgtcagccattctccagctaggccaataatatccaatccagtggagagctggttgaaaaatcgaggatgacctgtgcgaaccccatacttcaaggtgtctctgcagtcaaccaggatctgctccagggactcggggtggtcagagagctccaagttgaagccctccatgccttccagcaactggtgtgggtgatgaaagtccagcaccttggtggagcgatcaaatgtcttgcggacatagttgaggagtatgtccaccacttccaggaggaattgcacggtttgctcctcaccgttcttagccggaagcagatctctagcaaacagattagagaagtcagtctctgtgcgccggaagcgggcatcccggtcgctgttttcacaggaaagcaggttcttggaggattgcctctccttgaaggcactcacaaggcgactcttctcttccaggctgttggtcctttgcaagaagccgcagatcttgagccccagttttctggtgcatccatgggccacgccgcaccaggtatcgtacgttgtggggcgcaggttagtggtattggggtccgctcccgcgttcgaggaggttgcggacgaagatggggtcgaagacgccatcagctcggtcgtcccggggcctctactgtccagagtcctcgactggtccggcgcagaaacaggccacctcggctctgcgacagcgagccgggcactcccgcctttcctctgcacagcgcccagcgatccgctcggctcggccctgacaggcgta

SEQ ID NO: 339489 - DNA, 1000 bp, Homo Sapiens
ttttttttttttttttttttttttttttttttttttttttttttttttttttaattgttttatttgggaaaagtgcttcttacaaaagggcagctgcaaaatacagagacctctgcaacaattatttgttttttcttaaagtgaaagaatgggtgggatccaaggaatcaaagcagtagatggacaaaccaggagcatccccgagttattttcaggaaacagagcaacaaaacacaaaggtacaatttccaatcaaggaattcttccaacaacttaactttagctaatctcagggattcccaagccctccctttcggtggaaaagtatgacttatcactgcaaacccattactccactacaataaacaccttagaacagagttttgaatcacgtctgtctacctgaaagctcaggggtggaatgaggcaaatacccacaaaaacaaacacaaaaacccgacaacaaaatgcctcaagtgaggacaaaggtttctcagaaagtgcctgtactggaaaggctagatcgtaaaacattaaatacaactgtgtatccaagacccagtttgtgttattatatgggataaccaggtagttttaacctctatggctaaccccatttctctatttatatagacagagctagcactgctatattgacaactaccaatatactgctttgccctttaagatctatctgccacacaaggcttaaaccactaaaccaggtttttctactaaggctaagaatactgcatctatgcagggatgagaagcttatcacacacccacacactcacaccatgtcagcccttgggagccaacttccaactctgcattgatgttatgcctctctatcttttatacgtattctttctcaattttcctatcatgcaaaacagtaaaaaatctcaacacattcacacctgattctggttacccagtagtattacttgtgtgcaattaaacaagagaccaaaaccacagaacaagtgcacgtggt

SEQ ID NO: 339490 - DNA, 1000 bp, Homo Sapiens; identical to SEQ ID NO: 159081

SEQ ID NO: 339491 - DNA, 1000 bp, Homo Sapiens; identical to SEQ ID NO: 159082

SEQ ID NO: 339492 - DNA, 1000 bp, Homo Sapiens
tgtgggcatggttttttaaaatgtctttattagtcacagattatactaaatacatatgtggaatatgtacatacataacttacacaacataatagttatacaacatctggaatttgccctaaaattttccatgaaaactaacaaacaaggagctgtagctaattaaaataagattagcaaaatgttgatgttgaagctggatggtggctacatggagtacatgggggttcactgtgctcttctcttttatgtatgtttgaaatgttctacaagaaaagaagtttaaaagaaaaggaattcagctttagatttttaaaaacacatatccttagatcttgcaatttaggtgctaaaagtttattacaggaaaatccagatgtaaacaatgtacagtaaaagaatagaatacaactaaaaattcccaaaatagaataacaaatcatgtttagccatacgatgaagcccagaagaataaagaaatagatgcttgttaatagaaaaagttgttcgtgacacagtgttcagtggaaaaccagattacaaactccatgatccaacttgtatgtataaatataaatacacatagaaagaaatttttaaatgtcatacaacaataatataaaaaacaatatttctaggtttattttggtattgctgtattatttttaaatatttatgacatatttaataaagaactaatcaaagtttaaataattttgattatttgacatggatggaattggaggctactatccttcgcaaactaacacaggaacagaaaatcaaataccgtatgtcttcactcataagtgggagctaaattatgaaaacatatggatacatagaggggaacaacacactgaatcctacttgagggtggaggttgggaggagggagaagatcaggaaaaatgattaatgagtactaggcttaatacctgggtgatgaaataatctgtacagtaaacccccatgacacaagtttacctatgtaacaaacc

SEQ ID NO: 339493 - DNA, 951 bp, Homo Sapiens
ttaggagcttagagggcagaaccttctgcaaaagtttttatttatggcattcttcagctccttgttccttagactgaaaatgattgggctgaggaagggggtgaagacagtataggtggtggccatcaaggcatcactgtacatagaatggaggcccttgggtttgaggtagataagggaggcaaaactatagtgcatgaccaccacagtgaggtgggatacacaagtggagaaagtcttgtgccggccctcagcagaaggaatcctcaagatggcagccacaatgaagacaaaggagaggatgatgaggaacaaacagcctatcagggctgtgacacacaccagcatcacacccatgatgacagatgatgtcttgctcccacaggccaacttcaagagggaaagcacatgacagagaaaatggtggatcacattagacccacagaaagtgaggtgaaaaaccatcattgtcaccatcatccccatgaccgagccaccagcccaggtccaggccacaagatgggcacagccacggggactcattagcatgttgtaatgcagtgggtggcagatggtcacgtagtgatcatagcccatgaccatgagaaggaaggagtgagtgaagccaaacatgaaggagaagaacatctgaatggcacaagccacaaaggtgatggaacgatgggtgaagagcagatcagccagcatgcgaggggtgatggcaacagtgaacagaatctcagagatggagagggcacacaagaagaggtacatgggtgtgtggagtctgcgttcaatccaaactgtggccatgataagaaggttgccaagcaatgtgaacaggaacatcaggaggtacagcaggaacaagacaggcaggagctgctgggggaaggctgagaagccagagaggataaattcagatatggttctgtagttctgaccaggcat

SEQ ID NO: 339494 - DNA, 1000 bp, Homo Sapiens
ttttttttttttttttttttttttttttgatagtgaaaatatactttattttttaatacaatagctgccagcaatatactggtgctgatgttccaaagataaaagaaaatacatgcattctataataagctttcatttgcctgttcaagaaattataaagaaaatactccaattctgttcaacattacggcttgaggagttgaaatttttccatgataaaaatatactttgtgtggcccaaaccttgactatttataaaggatggagtttttaaaagcccacatgtaccaataatggatgctcccctctctttgaattaaatgcttaaattcaaattaatgcaagaaattggtgaatcattaaatgatgaaatttgtatcaaaatgttcatgaaaaaatacatttctatttcctctacatttttactttgtagttattttctaaatgggtttaagggcacagaaataaatgctatctacatgcaactctggagagattcaaaacacaacagaagttaacatgcctaaatcctagagttgatccatttagtgtaagaataaatgtcagaaatctcttaattgtatacagattgctcaaggatttaaagataaattgtgaaagccaaaattacaaagaaataaaatcttatttgaattttatcacaaaagtttacagtcctagtaaaagacaacagaactgtatagaatatctgcatctacatcaaaaaagggaagttttatcaactagaatagagagctttccaactgctgaatacaaaaatttctcagaatctcttggaaaacagatccattcagactccaatctcctcactgaagtaaaacacaaaaggtgtttaaatgaaggggaatggatgttagttgtaaaaataaaatcagattatttccattatgtcaattcatatactgcatgaactgtctaccatgaaaactttatgtcccaaatttctcaagatgttaaactatgctctttccacaaacat

SEQ ID NO: 339495 - DNA, 1000 bp, Homo Sapiens
tttttttttttttttggttaatgaagaaaaacatctgaactccttttattatgtttatttgtgacaaataacacattctgaatcaaaattaacttaccatcatttcaagtgcatatcggttacagcttagcaacacccttttcaggatgtggtcattgtataaagaagatggactgttcagtagaatgatttttattttatcaataaaagtgagactttgaaatgcctttattatcatatttcactgcttgatattgactatcaatttgtatcacatcattcaatatcaattccagaaacatccggagcctcacacacctattagtatctcagagccaactagtcgcgaacagaggaagtaatacaattgcttttgttaatgttctcatgcgacaggcagaggcagtcaatattagatctggtaagacacatctagctctaggtggaatctgaggggagatgcagcaacaagaaagcagcaccaactgagcatgctcctattcaggcagagacagaaagggagtggacgtactgtagaagctggccattacgtagttttggcagcgatcaccagtaaactcatttgggcacttgcacaagtatctcgaggggtttgaaaggtctttcaccatgaagcactcccctccattcacacagaaagttttctccttctccgcacattttacaagatggcttgtcccagtggtggatgtagatgtagatgaagaagtatttgctccttctgtggatactgatattctaatgggagactctgaagacacatatgctccttcagttgaggctggcataccagtgatgatctcgtttgattccacgatggtgatattggcagaggcactgtcatttcctaatttgctgatcactttgcacatatactctccagaatcagccagtgatgctttgttaatgcgaagttctgacttccctggctttttttgtatcttgatattttgtggtttgttttttcgattcaattcat

SEQ ID NO: 339496 - DNA, 1000 bp, Homo Sapiens
ccacgcgtccgcggacgcgtgggcgcgtggggttgtggtggaaggagctgaactgctgagggtgatggtcaaacttcttctcccgcagccttggtggtgtcacgagaagtagaggtctctcttcttccatgaaggggctgaccgccatggaaggcatggacaccgtcatgctggacacgggtggagacatttccgaagggggcgatttgggggagcttggcgtgtggaaatctacaggtgacatacgagccggggtggtcatggctgacacataccttcctaaaggccaaggggtcttagagaatgaagcccaaatggggaatggaagaagatctaagatgagttgctgatagctggatctgcatgcatttggatctgtgtgccttgtttctccttagctcagctataaggttatgtctttcactatgaggagagtctcggtaggaatcaggggtttctctggcatgcctgaggaagctgttacattcacgagggcctcctgtgccattaagacgtcctcttgggcccccagttgggctgctgtgcctactgttttctacggatgacatcacgattacagagtggctttcggaaaggatgctttcagtgtgtccgttgctccagctgtggctaggagtctgggtgacagtagtggagtgatgggctgtggaagtatagtgactggtggaaaaggatgtctctgcttctctctcaacaatatgctcactggagatgacgtttttagatacgtattgattcaccagctggacattctcggggggtgggttaggatggtgaggcccattggcaatgttcatcatattgtttcgttcagaccgaaggctctgccgaagacggtcatgcagctttttccgctgtttcttggttttgcagtaggccaccacacacatgatgccgaccacaaggagggcgatgcagatgccggttatggtcagcactctcttctggtacagctcctccgccttttcttggttttgga

SEQ ID NO: 339497 - DNA, 1000 bp, Homo Sapiens
ttttttttttttttttcatttttacatacatatatttaatttataaaagtttttttcctgttttctatttgcagaactgctaaaataaaataaattgtttaatttaaggtggaatactttattatataaaataaagttttacaggtgaatctatgtgtttatttaggttttatacagcaatagggtcttggttagcaattacactagacagcctggcctggatttcttcctgtgtcgagaagcggcctgctgggttagtcctgctgtcagccaggcggaaggcaggtgttgcctcaagactggctgccagggggttctgtatgcccaggaaaggcgtatcttcacctactctttcatcttctgtttcactctctgagttactgctctgggagcttgtgttgctgtccacttccaatctgttagcaatgtggccattgggcttggttcttttggcccgccggctattggcgagtttcttaacaggctcttgggctggctcgtactcttgggtcgtttcatactcctcatcctccactatcctcaaggggctagcagggaggctgttactgtcatgcgcggggttgtggtggaaggagctgaactgctgagggtgatggtcaaacttcttctcccgcagccttggtggtgtcacgagaagtagaggtctctcttcttccatgaaggggctgaccgccatggaaggcatggacaccgtcatgctggacacgggtggagacatttccgaagggggcgatttgggggagcttggcgtgtggaaatctacaggtgacatacgagccggggtggtcatggctgacacatacctttcactatgaggagagtctcggtaggaatcaggggtttctctggcatgcctgaggaagctgttacattcacgagggcctcctgtgccattaagacgtcctcttgggcccccagttgggctgctgtgcctactgttttctacggatgacatcacgattacagagtggctttcgga

SEQ ID NO: 339498 - DNA, 1000 bp, Homo Sapiens
tttttttttttttttttttttaaaaggtcaattctattttattggttctgagagggaggattcacccagtggatccttttccctacactctcccctcccccaatattgaggctctctcccaactactgcctattcagcattctctatctaaccctccttccccttctacttcctatactatcctacccctggccagcagtaccccaaggccaggccctcagctgtgggggcgtgtgctgagcaccaagcagagggagctgagcccggcgccagccttctccagttctgagcaggacacaggtaccagggtgacatcagagagcttctgcagtgcctcctggctgttgggcagatccccacctccacggtgcaggaggaaagggggcacaccaggcaacccaggacgaagaaagaggcagtcagcagctgcgtcatctgggagggtcagggaggcatatgggtgatctgtcagcactgccattgcccggacagccttttgggcagcgtcgctgctgcctgccacaacagtgcgaggtccccccatgccgcagagaccgcgcaggtgggagggacccgagactggcacagtggagacggcgaagtcccggaacgtgtccgccacgatctcagctcctcggtgattggtccatttggagaggcctacgaaaaactcccggccggtgaagagaacgtcagtgccatccagcgtcgcgttctcgtctcctatttccacaattcggagccccaggtcttgcagggctttgcggactccatcgacctctggcctacgagcggggctccagggccgcgtgattagggccgtgtccccttggatcacggccgtgtcgccaagcagcggtcccagcggcaatgactcctcaggtggcagttctagcagctgtagccccagtcgttgcctcagtttacctcccagcaccccgtgctccctttgagctttggccagatccagagcgggaaggccagcccccgcaccttcccc

SEQ ID NO: 339499 - DNA, 1000 bp, Homo Sapiens
ttttttttttttttttttgaagagcaatggtttattgagtcatgtggtaatggcaggttgtctttaaaaaaagaaagaagcatcaaggagagaagccccacagggcaaagagagacatttcactcagaggccaaagtctgggggttagaaagaaggaagcttgacccaaacaaagtttcatttacagtatatacagtcaggccttgggggcaggagctgctggggagcagagagggaccctctatcgctggcttcagggggtgccttgggtcccttcagtagctggtgggcgtgagctgcaggaagcacatttggcttggcaggagctgtcaggaaggggaagcgggtttcctgcgattctgccttgttctgccctgggtgaagccgcacaccacacctcacctcccaggggcccaggccctgtggaatgtctgttttaagctccctggggctggcctggctgacggcagctgccaaggggatgccgcactgcaggaggacctggggtggtgctataccttcacagcagcaggcaaaagaggtcagctgacagcctggtggaatttctgagggactcgctccagccctcagcccatgcccaagagggaggtgtagaaagagccaagcaaatggagtggagaaagaggacagccagagcctccgtgtggggcaggcgggaggctgagggaggtgactccctgggtggctggtgaggagagcctcggcaccaggctgtgacttgtgggctggagggaagtgcttatggtccataattgctagagttgtgttaataatggagccatggaggtgccctgtgcaccccttgggcccgggcaggaaccattcgccatccccccaagttcctcggctattgcttcttctctcctttggtgggtaccggctgggggctacatttcttcttcaattttgtctttttcagcatggcatggttctctttccctgggactcctgcccctcattaaggagtcttggaggacag

SEQ ID NO: 339500 - DNA, 1000 bp, Homo Sapiens; identical to SEQ ID NO: 159085

SEQ ID NO: 339501 - DNA, 1000 bp, Homo Sapiens
tttttttttttttttttcaagatattttttcttttatttaaaatgttagctatcacaacacatcatacaatgaaatgaagacattagaatcacattgaaacttttaaaaacatctctatatagtcacaaaacatgaaacatgcttcagagatacaaatacagtgtaataccaaaatctcagtacattttcaccatgaaaacaaataggaaaagcacaagactgtcaggagtttccttccttttccgcagtagctgacacaactgcttcaaagcaatgattttttttctttagggactgtatcattgacaggttttacaatttcatttaacactgtgctttgttgagaaataaccacttatttctattttaagggagtcatcatattggaattaaaacacatgtttacaatacatattggcacaatatgaaaaataaacactttttgaattttcaaccccaaacaattgttattaaataaataattattcctcatagtgcatgtcttaatttacctgtcattgcccattgacacaaatgaagctgaataaataatgttaggtagtttattaacgtcttctttcataattctgcattgcactcctttcataagccattttgtgagagatctggccatgtccagcatcccgtttgcccattaatccaaagaactgctgaggcttgggtctccgggcgattctctgcagaagatgctcaaagggctccggcagttcctccttgatctggtcgctgtcgtaccagtcggaccagtaattcagatcatcattggctcctatttcttctgcaaacagctgagtggagacaagaaaaaagactgccaaggccacgaggattttcatgttggattttgcgacggacagtcccgcggggtgctgagtttctctggttcctccgagcgcacgctggtcgctccgcactctcggtagctgccgccgggaaggaggtccgagcgcgctctttcgcctgctcagtgccttgcgg

SEQ ID NO: 339502 - DNA, 1000 bp, Homo Sapiens
tttttttttttttttttttttttttttttttttttttttttttttttttttttttttttttttttttttttttttttttttttttttttttttttttttttttttttttttttttttttttttttttttttttttttttttttttttttttttttttttttttatacaaatgcattttattgttttaaacagaacaaaagaagaggcagaaaatatttgcatataacaaatcctagcttataaatgtagttttttagcggtgatgtctctaatcatcattcagggattttttttttttttttttttaatttgcttcactgtgtctcgagcactgatattggagaaaagcacatccggcataaagtgtaaaccagtgtctcaaaccactggaagaaccgggagagcaaacatgatttttcttatttcctctaagtaatctttctttagtaaaacaacaagtgatctttggcatagattcatactttaaaggcattaatattgcatttatatcaggcaagcaactatacaaatatgctgagggccttgaaaataatcatcctcattataaaggaaatagtgaaagcctgagtgtaaaggaccaacttaagttgtacacattcgatgttgggaactaacacacagcgatgggtgggaaggaaggatgttcaggcaaggttcttactcctttactcatctggttctggctttgggaaaaaataaggtttcatgtgctgggaaatacttagcagtaataagtaccaaaaaggaaacactgccctctcattttgcctagtaggaacttactgtggtgataagaaatatgaaacccattactctcttgaaccccatacttgggagtagatgcagagagcttggttgtagttggttgcagggaggtaggaattacaggagtagtatttcccattgattcatcttcagcagcactagaattctagtctgcaaataccactctcccttaggcaggaagtgtccttcagac

SEQ ID NO: 339503 - DNA, 1000 bp, Homo Sapiens
aacagaagcaaaggccacatttattccacttcttgaaggtgcaggccttggacctgcccagactcacagtcctggctgcatgtcccaggaccagctggagcctcagagagtgagggagagccaaaggggccccaagacactggcactggccttggccacccattttctcaactttaggctcagtcagaccaagcatagaaagaacaggaggctctctatgttgcctgaggctggcagtggtgaccctcagaaatcacaagggagcggagagagctgtgttcaacatgaaacgcttgaagaggaaggaagactgtgatgaggtcgtttgacctactgccctggggaaaccccaggaggcctcctctcctgttggctagggagtgaagtcctataaaccagagggagtgggaaggcgtatgagagcttcttctccccacggcccagccatgggcatggaggagcagtacctgagcctagagaagatagaaaggtcagccaggcagttgctgccacactctttcctgtgggtcccaacagaggtggcctggtgcccagtctcagctgtgctgcttcccagggagaaaggcagtggaaggtaatgctggcgacatcctggccagcagccaggagggaggtaggctgatgtgatgggatgggatcttgccctgggttggtctcatggtgcagaagagcagtgttggaatcattctaatgcttcaggatgcctcatgtgccccatggagctcagacatcaggaggtgctgggactctatttagccgttcgatgatgcggttgttgtccaggaggtcagatgccagcagcttcatcccctcgcagagctcttgcatgtggagaagcaggtcctttcgtgtagggctggggtaaggagctatgggaggcggcgaggcctgagccccctttgctcggtcctgaaggagctggtgagatagctcttccaggagcttgctgagactctcctggaccccctgggcttctgtg

SEQ ID NO: 339504 - DNA, 1000 bp, Homo Sapiens
tttttttttttttttttcatgttttacaaataataaatttatttccaaatcctgaattataaccaaattacaattccctttaggtcttttttgctgctttacacaaggattaaaaaagacagccacagccaagtcacgcatacaccaagtgtcctgggccagttttagatgcgatgggtccagccacctcccgctgccccggcagcacctcggatactctgcagccccgctcccgccatgccgtgctcctgcatggaagaactccacctcctctgccagagagtctggtccagcaggaactgccctggggggccgtgatatgcacagatgaaagtcctcagatgaaagggctttgtccgcagcctcagggctcccgccagaaggctgaggacccaatacctgctgccatcctctctggggacagcctcagctcacagaccaaagcgggctggcgtgcggcgaggggtcatgggctccccttgctctttccggcctggagtgtagatcttcgtagacctgacactgcccagggggctgcgcttctcctgctcctgccgccgggctcgcagctgctcctcggccagcgccatctcctcctccatggcagaggcttcctctttggcccgacgacggttctcctgccgtgacttgcccgcctgtttcacgctatagaacatggggcccagctccgccagccactccccgtccacagcggtcacacactgcatatactccttggtggtcatgaccaactcgtgatacactatgtaatctggggtgtagcccattccaaaaagggagctggtggggtgcaagtggcagggcatccctgtgcggatgttcacgtactccccgattcccttgagcttggctgcttggtggaaataggcagcacagatgcacttcctgacgatgtcccagtcagtgccacacgaggccaggctcatccgctgctgcaccatgatgtccttgagttgagctcgcacctcccggaccttcc

SEQ ID NO: 339505 - DNA, 1000 bp, Homo Sapiens
ttttttttttttttttttttttttttttttttttttttggtcggcgtagctttgtggacttttaagtttaagcagctttatctataatgtgggagcatggttctgtagactaccttgctaaacttaggactccttttacaaacacattccagtgctcataaagaactggtagtattagctcagtgtaccctctaaagagtatctcccccaccttgaaagagtgtattctcaagattcttcttgggcagttttgtcccccttaagtataaccactcatagaatcctgcctatctgccctctcactctggttggtggagtgtcaccttagcactctatgaactactcaagttcacagggaactctcagccacaacttgtggctccttctcactaagtgtggtcatggaccactctctttgtaaagcaccataatctaagacagagcaggggctgtggcagcccgtggtaccgtggtcagtcacagcagcttggtgtctaccagccacagagaagaccccactgtatggaggctacaattaaccaaacaggatttgggaaagcaaaccaatgagaaatacctatctctggcaccctagagaattacaattagataaaattgtccaaactcaatgttagaactaaaatacaaaacactgccttatcaagagtctgaaacaccttgtgacagtagtggcatcttacagaaactgacaagggcactatgtcagccttgtaccgtaaattatctgtttcatatttagaaagtcactctcttagcatctccatagttttagttaaaatatcctttagaaagactaaaaccagacaacagagctctgttaaccaatttctcatcctaggaatcacattatttctagcttttatataagtagcacttccttcagtgaaatagctaccaaaacaaatccacattacctaagtatctatagcaagagcaaaataaaatttcagcatgaccttgtaataatgagtgatccaaa

SEQ ID NO: 339506 - DNA, 1000 bp, Homo Sapiens
gtgagggacaggattgtgacattttgtgtgtctgtgtgacttttccagccctgaagtaatctgtgcgagcagctgaggcaggctctgtgtggctggttgtgaaggctctgtttggctgcagggctcgactggggggtgtgtctggggcggaggtgggggctggggccaggaccggggcccctctgagcagccttggggcaaaggatatgatgggggagggggtggctgccagcgggggaacaggggccctggcaggcaagacagtggaaacctcacttcttggtccctgtgggcacatccagggcctatcatccctgcccccaccacctctgcctcccaccagtttggcccctgttcgtccatcctcctttccttgatcttgaggtcaggggccaggtgtagggttggaacacctgctgggcctctggctccgtttcttgcggaactccagctcatccacggtccacacagcccccttctcgctctccacccgcacaaagcacttgtgcagactcaggttgtggcggatggcgttcttccaggtggcaggatggtttctgaagaaggcaaacatgcgtgtgaaccagtggtagatctcattgagtgtccgctgcttctctggagcctccaggatggcccagcggatgagcgtggcgtaggtgaaagggggtcgcatgttgtggaacttgaagtagtccatgttgtggaggaactctgggaatgtgctgtttccatggctaccccacaggtgcctccggacagcaaacaggctgtcaggggcctcccgggggccagaccaggctgggacgacagggccttggctgccagcagctacgatgcagcaggagcccttgtcggatgatgccacagatgaagccttggtcagtgccattttcccagccaggtgggcctgcatggcactcagcttctccttctccagcaccagctgctgctccagagactgtaccatctctctctggaggagacattgtgccctgcc

SEQ ID NO: 339507 - DNA, 1000 bp, Homo Sapiens; identical to SEQ ID NO: 159087

SEQ ID NO: 339508 - DNA, 1000 bp, Homo Sapiens
tttttttttttttttttttttttttttttttagaaaagaatatgacattttattttcacttatggacatacagtacatgaatttagaaataaaatcgtcgcaggattctgaaatactgataccttaagatctaacacactgatattagtccattccctacaaagcagccacattagcagttcagatttggtctttgttgtagctgttgacattaagttctttaagtgaaatgcccagcagcatttaaataatattttacagcagacatgaactaagtttcaatattccatctttggaacaaattatgcttatttacatgttaacaggtggctatatttacttaccctattgtgagtttaatgactgattttaaactacagagggttttccagctattatttcctttagtttctaaaagtaacgacttatattaatgttttataaaagatagtgatgaaaaaaaggtaatgctgaaataaaggcgcttttagaaatatttaaggacaacataaggtattaatattggaaaaaaactgtacatattttcaagcacaacactgaaatattgcagcagtgtttaactgaattgttttaaaatagtggtaattatactaccttacataccgttctaatatttaaatctcttaattacaatttgaatatacaatctgacttacaattagaactatgcacagtttccgaagcatatttttcaggtttgtttttgcacaaaaattaacgtttaagttggtccttgatttggagtactataactacctggaagcactaagttttagacacattcattgatagccaacaaaatccttgacagagtgaaaaacatcaagagtaccatgcgtgaaaaagcagctgttaccctccaagtgcaatatgaaatctagaacaagaccctctcagaggcctgcgtgtctcaatgagtgaccctcaaagaaaccaaaatgtataggaggaagtagctgaccagtcatgggcatcttcc

SEQ ID NO: 339509 - DNA, 1000 bp, Homo Sapiens
tttttttttttttttttttttttttttgcttttctggattgtttattatgtttaatcagcattgtggaaaatgcaacaatatctgttcatggacttgagaaccccagagtgggaacagcaggtgcggatgtggggagaagaaaggaggagggtctggagagcggccataggggaggcaagtgtgaggagccaggagtgggggccctgggctgccctagacagggacatgcgggcaccccgtggggtctttggcggctcacaggacaatggcagtggaggtctgctccctagagggcgaagggggcactgaattctcccccagtagcctcttctctgatccttcctcattcaggggctgggagctctggccacacaagtttcgaagacctactcccaaggaaaccaaggacacaatgaccttcaagacacagacagccaggaacagggcacggattgctgtgaacaacttcctcagcatctgcatgtaagctctacactcctccttctgccattggttctcttgacttcgccgcatccatctgtacccagtggtagggaagacagggtctgagcgatcacacacagtgtcgatgtataaaaagggttcagtttgccagatgaagctattcacgcagaggacaacagcagccatagctgtagcaaagcctgtcagggtgagcaggctggatatatagccagcaagtttgcccgggtgcttctcatggacaatggccccagctcctgctgcgatcaccacagaccccgcccagaaggcacagcctgaggcacgcagcacagtccagggccccaagctgagacacactccaagaacacaactcacaacccccagcaatatctgagtcacccctagagccagctgctcataaccaatcctggctgtggaaggcacagtgtccccagggtgaaaaagaaacttcttcagagaacctccagctttcagcagttgtgtcaaagctgactcctggtggatgtggacgtt

SEQ ID NO: 339510 - DNA, 1000 bp, Homo Sapiens
ttttttttttttttttttttttttttttttcatataaatcaaataatttaatcaatatccacccactctaatttacatccagcttgaaaaacactgtatttagaaaaaggattagagtgagcaatttcattatccttatctgcatggaccaagtctttgggaatgctttttctactagataataatacacgctcttgaggagagaaaatcctacactgctttgcaggtcaacattttgattgtagaaaacaaaatctagcaaacaatcatctgttacatagtacttcacaaaggaaataatgctaagacttataaatggaagcctagccacgttactgttaaaaaacaaatgtggcctggagcagacccatcagtccatgttttatgaacagactgaatgtgtccgtagcatccaccattgtttattacaatgtaggtttaatagttggccttccactcagctcagattcctaatagcaggcagcgtgcttatctgtcttcatatcaccaaggattggaaagcagtagtaagccttgacatacagcaggtacttaataaatgcttaccaaaagactgaaaaaggacaaaaatagggaaaagtatatttactagacttccataatccatacttactttaaattcaatctagaaataacatgactcatattaggcaatatactttgaagatctgtacaacatagtaatcacagcagggtcttgctaactcacaaatttagcatacatgctgcaaaaacatctctcctggagtcccaagggctttcaaatgttccaccaggggcagtcaagactagattcacggtgctctcttcatcatgcgcacaaaatgtgttttcccataacaccatattatcacaagtctatgaacaattctggttagctaaggtaggcagtatagaactctttacaaataacagtatttcaattatgccatgtaagtaaacaatttgctgtgaactgtcctgtgtatctaatcattta

SEQ ID NO: 339511 - DNA, 1000 bp, Homo Sapiens
cgagtgaccagtattatatttgttcaatttctagctcatcgtgatgtttatatagtcattcacaatgtttcaccaaagcaaaacatgaaaaactataaaaataataagactcccaataacacaaagcttttataatagtaattatggaacatggacattttaatgaatttcatattgcaatgaagacagtcaacacttagagacaattatatcgatacaataaaaactgattccatggaacacttataaatgcatacattttcctccaaagaaatatgtttttcacagacttaagtaacaaatgatttacataggattcttcagattccaaaatatgtacagagtttttgtctctacagaaactgatgagcagtggttgaaaaagagttgctttgcccaacagcatggctcttatgaaattctgtatcatatacagttttcagtaaccacacattttccgtctatcattaaatgaaattctggacacatcagcatacaggacaaaactgttcccacttccaaacactgtttcagacgagatcacgtgtggttgacagtatgacttaatttagccacacacacgtgcacacacacacacacacacacacacacaccatccccgatcttgtctgtgactcctgatcaccacgctgcagcagcagtggatgagctcacattagaagacgacacagcagcgaacagcaaggtgccccggctcctgagagctctgcctgagcaccacagggctgcgcccccaaggacatgcaggagtccagtttctgaggtccctccagtttgccagacaaggtgagcagctgtggcagtaaagggcaccagtgtgcctggaactcagtggccactaggaatattgacttttaaaagcttcaaaaatgtttaatctggcagagatctggttcttaagtttgatttggctatttgcagccatttttcaatgttcctaaccatcatcctaagacacccagactttcaaattaaactc

SEQ ID NO: 339512 - DNA, 1000 bp, Homo Sapiens
ttttttttttttttttttttttttttttttgagcccgctagtttattcaatactaggaataagccggtataaaatacatttttagaaaattcacttggagataaaaaatcttgtccccactcctcccccaatcccacacatctgtgctcttctgcctgagttaattcagctttgctgagcctcctgcaagagcttgagcagggggtcgtcagccctgagggcgaaggtgagcgtgcgctgctggtagtgcctagggtcacactccaagttctcgatcacctcagccagcaggtgggcccgctccacgcctgagccgggggcctcgaagcccagggcggtgaagtgcacatgcaggtggtagtaggagggcaggtagtgcaggtatactcgcagatggtctcccttcatccggtagcgctgcaggatggcctcctgcccctggtggaggatgttcctgagcagcggcaagtgctccggagtaaggtcgcgtagggatctgatgccccggcgatggcagatggcgatcaagtacaagtcatcgagctgctgttggttccacttgaggtcagggatgaggacaaaaccatcagagggatctgggttctcgaaaacaatccggtccgcttcagccttcttgtcgagaatgttatacacccactggatgctgaggctctgggactccaggtggggtaaagtaatattcctgtagtcatctcccgtctctcggatcaggcggaggtcctggcgcaggtacttctgcaggtgtttctctgtggcagggtaaaccacggtcgtctttacatcattcagttgtcttggagggaacaagtgataggtgctgtagatatcattggagaactgcaattggagctcagggctgcccgtcaggagctgagccacctgttccacctgaaatggcgtcttctccaggatcacaacggcatcctctccatccccatccccagaggcctcattcaccttcccgtgtaggaaaatgatt

SEQ ID NO: 339513 - DNA, 1000 bp, Homo Sapiens
ttatcttttaaaagccctctttaattccaaggagataaagaaagttatttgtcattaaacatgttacatgtatgactaatatttattatagctaatataatagtttagaacaaggaaatttagtagagttgtaacattttggtgctacatgtataattcagcataagccaaagcctttttaaaataaccaatactatcattttatgaaatctttacaagataagcacagtagtacaatatttaagcatctcaagtctccatttaagagttgactatcaaagaatgactgttataaataaagagctctatgatgttccacttatttagtcttaataaggtagggaaataagtgacatactttttagaagaatccatgcagtggacagaaagtcagattaggtagtccctagggatccatccagctctgggaatctatcatcagatggcctctaaggtttcttctagctcagaaaatagaggtacttggaacataattttttaaattttaaatggttatataggttaatagtattttttgcttttcaaaattcattgctggtgatgtctattacttatttgatgtcatgtctttggccaggaatgcaatcctaattagcattgttccaggaaaacatttcattttatagggagcatatcccagaaacattagaaaatactagtcccaatataagtaacatttaccaactagactctgggctacactttaaaatatctgatgttcagccaggtgtggtgcttatgcttgtaatcccagcactttgggaggctaaggcaggaggatctcttgaactcaggagttcaagaccagcttgggcaacatagtgagacactgtctctacaaaaaaaaaaaaaaaaaaaattaattataaaaaaaaaagaaaaaatatatctgatgttatttctatctctcaagttcaacaataaataatccaaagtacatttttatttgcagcaaaatttaagacagacagtactttct

SEQ ID NO: 339514 - DNA, 1000 bp, Homo Sapiens
tttttttttttttttttttttttttttttttttcatggtcacttctttatttttgatacaaatgtacatgacacgtcttgacagcccacccaccaccacacaggtagggcctggcccccagggaagaagcgggatggggagagagctggtgggtcccaccgtctgcctctccagccttcccaggctgcagccaggttcccaggcctccagagggtgggaccacagcaggtgcaggtagtgatggtgggtgctggccttgcagaggttacggggaggggactcagctccacagccaccagctgagtcggggaccccggggagccagccccaggctcaggtgctcagtcctccaccctagccagcacacattccccctccacgcaggagcaggaggagatggagggaagtggtttttgatttaagttcatagagaaggggcgagagtggggagggatcagggaggcagctggcaggaccaaaactggctacccggacagtccctggctccaggtggggaagggaagctgatccccatgctggtcccactgctctggtcccctcacccctcaaaactccagatggaccaggcctccggaacggcactgccgcccacacactcaacacgcaggcacgcgggggcactcagttaccacaaagttaaaattaaggggtggggaagaagaaagaaaaaaaaaaaacagactttccagtgtttgctgctggggaccccagcacacaggttggggcctgtgccctaggcaggggccatatggcattaaagggagagcagcaaggggctggtggctacagggcagggacatccatggagactatgtacaaaggaggggatgcccccgctcagcccccagtagggctgaactggctcatgggggtggggcgcatgtacggagagctgccccacttggagtgtccccacctgcccctttgctgagggtgccctagaaggcgaggggctgggagtgatgccttgcaggcccct

SEQ ID NO: 339515 - DNA, 1000 bp, Homo Sapiens
ctgttcctaacacaaatgtgaatttattggttgatttgatatttaaaatagtacttttacaaaatcatctcagaaaatatactacatttattaaaattcctacaaaccattgcagaaaatattaaaccctctaaccaacctaacactcgctttcagaggcacttgtgatgattttcacagcttccatagttgcaaagaacaaagaaatcatcttccaacaggggtggaattagataagaataatccaaaaaatatttatttctttacagactcacagattgcttgatgtttaggggctcttacctaggatacctaattattcaaggttttcctaatttagtagactttttcattgcctacaatctacaatattcagcaaagtattaaggaaaatgaacccaagaaccttaaccacctcaaatagttttatggatatactaaactgtcaagtacaatctttatcttaagacttgagaactggaatgcaggaaaacaaactttggtggaatactggaataaagacataaagctgggcagaactaggtgtggcaaccttgtatgttaattctgaaagccagaccagtgacgctaagaataacaaatagattcagatttgtttttcagaaacttgagctatttcggccaggtgcactgtctcacacctgtaatcccaacaatttaggaggtcaaggtgggagaatcacttgagcccaggagttcaagaccggcctaggcaacacagtgagaccccgtctccctgtctctacttcttttttttttttttttttttttgagacggagtcttgctcttgtcacccaggctagagtacaatggcatgatctcggctcaccgcaaccttcgccttctgggttcaagagattctcctgcctcagccttccaagtacctgggactacaggcacccaccaccacgcccggctaatttttttttttttttgtatctttagtagggttttgccatgttggccaggctgaccaac

SEQ ID NO: 339516 - DNA, 1000 bp, Homo Sapiens
ttttttttttggaaagtaatgcttttattttcattttaatattttaacatttttcttttaattgcaattagacaaatgagattttctttatatagttttaacagtcagaagtattttacttttaaaatctatgaactagttaatggacaatattttaataatctggtatattaaattcaaagtttaacatctggcaaaactttgcttcacaaattcacttttttagaatgataggaaatatatacaactcagaatccatgtttagacaaatgcccttttcctttcctcaacataaaagctttaaaaagtgcagtataaaagttttagatatgaaggcactgcataacctgcatcatatggctgtcttgcttagctgcaagaataatgaaagtattctacctcaattttatggagcataagaaaattttttgaggaaggacttaactctcaaagaaaaagaaaccttttaccccatttagttaatgaattcctttccaagattgcttttcaaagatttgttggaaaagctatctagagtatgtcaaccacaaatatgcctgatctcattctgcatgagtgtcagaggaaatggggaagagtactacaggtgtgaaaatatatatatttccaaaatagtaacgtatctattataataaagctaaatatacctttctaaatccatggtttttatataaatactgccaataacatgatctattaaaagaatttttaaaggtcatggtatttttagaaatcaaatgaaccaatttgagccattataatcccctattcttaaacacagggagtttgtattttctcccgatattgtattcggtcttgaattcactggacaataatgatgtatgattcaagaaatgctctgatattctaaactctgttataagaacaaaaaccatagccaggggaccttattaacaattagccatatttgttcttctcttaccaaacaaaccaaatgctgtccaacatctcatgaact

SEQ ID NO: 339517 - DNA, 1000 bp, Homo Sapiens; identical to SEQ ID NO: 159091

SEQ ID NO: 339518 - DNA, 1000 bp, Homo Sapiens
acagaagaccctttagacaaagaacttgcactatgaggtttaattggaaacattaaaatggttaactcataatgaattataaaactttgatagttacattgtactatcatttatgaggcatttatttttcattatttacacctgaaagaaacttcatacttgtgtgttctgttccccatctcagagcaagattatgaagagaaggtctaaactacttatataaatcaaaacccaactgggctagaaatgaagtataaagagaactaaatctatacacagctgtgccataagagcattaggtggttttagctcttatctggggtatgaaagcaatttagctcatctcacagaaacaaaagcaggtgctgaatcatgaaaacctcaattatttttagcatgcctcttaatttttctttcccctggtttcttgtcgtctgtgcttgattcttgaacaggtaaccacttgagaggatgccggcgatagatgggccatggaggaagtgtcagcaaacatgaaaaagcaaatccggccataactatatagacagtccacccgaactgttcagccacgtacccgtagataaatccaactattgcagaaaaaagaataattccctgaaacatctgttcagctagcttctggcccttgtaatccatctgcgtgggcagcgagctcagatgctccagcatggctggctgaggaggcgggcagctgagcgcgggtggcaggctgcgaggcgagggcgaccgagacttaaggaccgtgaggggtaaggtctggcactgcgcgtcagtagccgggccttctaagcccgggagagcgatggcggcggccccggaagcggaagtctccgacgggccggtacagcccgtgtccccgccccgcgccatcgctaggcgacgtgcgcttttgccgcgccgtgctgcccgcgagggcagctgaggtggtggtggcggccgccttgtcgaggcatcgcgcgcccgtgaagtgttcgccgtc

SEQ ID NO: 339519 - DNA, 1000 bp, Homo Sapiens; identical to SEQ ID NO: 159092

SEQ ID NO: 339520 - DNA, 1000 bp, Homo Sapiens
ttttttttttttttttagtttaaaaaatatttattatagaaatgtacatttaattagttttaaggaatgtacctgaccacagtgttaatatatatttcttcaaatttgcaaactttacacctttaagatatctacaaagatgatagtttatttacaagttttacaagaaatgatcacttcacaatactgttgacacagttacgattgaatcttcttctcactttttatttcactctgtacttatagaaagaacagagagtatgggtgaagttccatcccagtgccagggaaagcccgtagagcagaatcagaggtgcaaatggatacagaagaattactgtatttttcaaaaatggcaatgcactgtatcccaggaaagttacatagatataatagccaactgcaaccaaccataaggtatttccaactaaatatccaataaatgtgtctgtcaggataacatggttgatgaaaaaaagctggataaaatgcaaaatgaccaggagtggataaaaagcattgagatgcacatcaaaagcatagccccattccacatcatagtctctgctctgtcgtttcactaaatacttgttagagatgaaccacattaaagttgctatcagaagaccaacgcctacacaatctatgagtacaacccaaaggagaagctttattgtctcaaagaatcccatgtccagcacaaagccaaatcctatagtggacacacagagccagatacttaacaggaccaagaaagcagggtcatctctggcccactggtccttcgtctgttttcgataatgaaaatttctgtaaactctctgtggggatgtgaacaggtagagcatctgccaggcagcaaattcaaagtccatttgccgaaagcggaaaagccttctcagatatttgtagcgtttcgctccggctgtgtgtcttgccgcatccctggaattcaagactccgttcccctgcactaaggaattcactgaagtactcggta

SEQ ID NO: 339521 - DNA, 1000 bp, Homo Sapiens; identical to SEQ ID NO: 159094

SEQ ID NO: 339522 - DNA, 1000 bp, Homo Sapiens; identical to SEQ ID NO: 159095

SEQ ID NO: 339523 - DNA, 1000 bp, Homo Sapiens
ttttttttttttttttttttttttttttttttttttttttttttttttttttaaatatttctgatttatcaagttcaatcaaacttgtttttttaatctttccaaatgaaatttatattaatggaaaaagtaaaccacttaacagagggtcaccattattaattatttcctttactctctattcctcacacttcactggccacttgaaacttctagagttcctttattaaaataactagatcaaacaatagactttgagaaattatttttcatatcaattttacaaatactgtatcacaaacattctacagtacaaatttaaataaagcaactttctaccttattaaaagattcttcacctcctaaatagaaactgaaggggaagcaatgctattaaggatcatacataagctaatagaggcagcagaattatctattaacattttcctaacactattctagtgaccttaacattttaatcacagagctgcagctgtttgcatgtgttctaaagctagcataatctttaagacagtcaggaaaaaaaaccttcaaaacaaattacataatattctatctagaaaaatttccaggaaagcacattcttgggtgaaagaaaaccacccctttgtcattgtgatgcactaaaaaaaagctttggagcctgatagtttggctcctggctctcccacttgtttgggtaaggttcgagtcactgtaaaatgtaattatactcccttttcaaaggattattttgagaatttaataagaattgatggaaggggcctagcagatagtaaaacctgattaaaatatcactaatttaattatttcctagaagccaactgaaacatcataacatttattttcttggtagaccttatgagtttattctcaaaggcaattaaaaaatctccttcaggaaagccatgcacatttttattaatcatatttatactactaacaatgcttggctgatgattaaaaatacttaaatcac

SEQ ID NO: 339524 - DNA, 1000 bp, Homo Sapiens
tttttttttttttacattttttaaatagatatgaaatacgtaccaagtttatttgcctttaaatgatacaaacagaaaagacatgttagtcaaaatattaaattttcttgcattttacagaagaaaaataaactgaagtaaaactgtaggaactgctgaacgtcagataaatgtttcttcagaacaagagatattagttcctaaaagattcttctaaagtttttttaaaagagattaagaaaaacagtaagccactgggttattacattctaaaaaaaaactacatgtttcttaatggacatatgtttacatttacagatagtaaacttagtttcctgtctcataaaactcagaagacgccagtgatgtctaaactatggaaaagaataaaagcctctttttcatatgaaaaaacattcaaactaaatctaccttaacattattttctatgaaaacttaataaagaatggctcttctgaaaacaaaatgctatacaaatcagtttcaaaaaagaaatacattatgagattaggcttatagctagtggtatcaagtaaaaccccaaacgatgacacaagaattcacagtattagccggtcctccccaccctcctgaattacctgaccaatggaagtttggctttgttgtttcagaaagcactgtttcttacattccattaattgttccaaatcacgccacatttttgcttgtttcatatttggaccatgactttctcgtataactttttgtttttcccgaagtttctttccaaggttttcttgttcagcagtatttttggtatactgttccctaattgcctttcttttttcttgttgatcagaagagatatatgccttcatctcatcagtagcacgacgaagttgaacttctaggttcttaatcatacaatttgtataatggtatctactttcttcttgaagacattcttcacggagtcttctaacttcctgttctaatttggaccgattgctttcgaggc

SEQ ID NO: 339525 - DNA, 1000 bp, Homo Sapiens
ttttttttttttttactattcgttaggcttttatttttctctatgttctgcagtaactaaggaaaatcatggtaaatgtcaatcttcacacaacagcagacacaaagggtttcagaaacgtcagatatgaagaaatcctccatccttcttcaacattttactgggtatttcaacttcaaaagaacagcttatttctataagtgctgtacaagatcatagattatgatggaacgacttcattttagaacgttagcaaaactgttatactaaatgtcaatgacaggaaacaaagaaaaaaatttgttcaattatatttttaaacatattgttattctcaacaaacggaattttaaaacgaatacaattttccattatcaaaagcaaacactctatttcgcagttgaacaatgatcactgatcacaaatatcaaatacagtgtcccccgcccccaatcgacatcattttcaacttaggaccctggcatctactccttggggtacctgtgactctcttttacacccccaagggtctgcctcagatctacttaaggggcggaataacccctagcacctgaattgaggatagcctcaacctctgcatcatcgtccgaatcccagtcataattacaaggccagtctttagagcatcggttacgaacccttgccacaaaatgcatgactttcagtttgctcgattccacgtgtgctcggggcccccagaagaactcatactccaccggactgctacggggcaccggtttataaatcaggtaccctctgcgcacaaactcttctgtgacgatcttcttcggatctccaaagatgctgtgctgacgtccaggctgcattcctaacttccccagcactttccagaccagagcttccttggcgctgttgcccatgatgaagatgagcgctaatatagacatcaggagacttttcttggtgccctgaaaattgctccggggcactgaaggcttttgtgcttgggcagtgctcg

SEQ ID NO: 339526 - DNA, 1000 bp, Homo Sapiens; identical to SEQ ID NO: 159096

SEQ ID NO: 339527 - DNA, 1000 bp, Homo Sapiens
cttaaatcaggttgtatttattaaaaacaaaatacaaaataacttggaattcagattattgtgatgtttatcccctaacaggtcagtcctaaagaaaaagctaattgtttcaagggtggtaacggaagaattttaagtaaggattatattaaatacatctagtttgatgcaaactgagttttattcaatgttggaggcctcactatgttcctctaagttttcaaccattaacaacccaaaccggttgtttccctcataccaacacttggtgtgtgcagtggttctccctctgttcttagaacagctggtattctgtttcttctgcctttttttttttgaatttgatctaccttttggtaggaatatttcagcgggggcatatgaccttgtggcattgaatagatattcataaagttgcttagcctcaggacatatgctcaggagactttctacagaggtcgatgctagcagttgctggcatagtccgtgcaccaggcttccactgtacagtcgagttaggtctggctctgggagaggagtggacagcagctggttgagatacatccccatctggagacaggactgccactgacagaagatgtgagctgtgtctaagtccagtcttgtgcccagccgtgtctgcgccttcactctttggaactctgcatacaacatcttagcaccatcttcctgcagctcttccttaccagggctgttgattatggcaatcaagggccccactagcattgtgagcagtaaggattgtagatgatgtagctttgctttggtctcggtgtgctgcaaccagtagcaactgacagcaatgggcaacttcagtgaagtagggattggctccagaatggtctgtttcaccttcagggtttctaacagaagcatctgccgcctcctcaaggagagctcagtcaatctgcttaagtcagaatgatccttggccagttctactgcatcaatgattgaggttctgatatttttattaatc

SEQ ID NO: 339528 - DNA, 1000 bp, Homo Sapiens
tttttttttttttttttttttttttttttttacaagaacactcacagaatttttatttataatcattcaaaattagaaacaacccaaacgtccatcaacagaagaataaacaaactgtggtacatctctacaatagaatactactcagcaatgaaaaggaacaaactgctgatacacacaacagcatggatgaattacaaaggcattatggtgagtaaaagaggccagtctcaaaagagtatatttagtaggaccaaaactggatttggtagaaatcacatcagtggttgcttctaggagctaggggagacgaagtggaagggggtacaaggggagtttctggggtgatggaaatgttgaaacattctatgtcttgacctgggtggtggtaaaacatgtacatgattatttattatacctcgatgtaaaatattttacagctcagctttttaggaaagagcccgatgaaaaaggaaaagaaaagttaaagagctgagtatggaggggatgtttcagcctggctcttgcgtaaggtgaccagctgtcccaatctgcctgggactgatggggtttcctggggcaagagactttcagtgctaaaacagggagagtcctgggcaaactaggacagctggtcacccaactcttgtggaagaggggaattgagatcgagtactgaatatctggcagagaggctggaatccttcagccccagagcccagggaccactccagtagatgcagagaggggcctgcccaggggtcagggcagtgggtatcactggtgacatcaagaatatcagggctggggaggcatctttgtttcctggtgccctcctcaaagttgctgacactttggggacgggaaggggtagaagtagggctgctccttttggagctggagggaatagacctggagacagagttgaggcagtcgggctgtccaggttctaagcatcacagcttctgcactgggctctgaggagattctcagccagagg

SEQ ID NO: 339529 - DNA, 1000 bp, Homo Sapiens
ttttttttttttttttgtaacttggaactttatttttaaagtattctgaaaattttccaagaattttaaccaccacctacttcccttaaacacacacacatttttatcttacaattataacccctattgcagtacaaaacaagaaacaataattctaagttagccagccaatcaaactacttcagtaaatgatcatactacagcctggaatcactcaaacaaaaaattcttctagttctctttaaagatatttatcgtttattttttcatgaaaccaaagtaattgattcaacaatactaacagttctagcatgcaacaaaccatctactatctaatgtttaatcttcttaacatgtatattttcattcctataaagtttccataagaagcttgcaatgacaataaaggtaaataagtacagttgtcccttggtatccatggggtattggttcctggaccgtccccccaacccacagataccaaaaatccaagtatactcaagtcccttacataaaatgacatatttgtatataaccaacgcacatccgcctgtatactttatccctagactaatacctaatgcaatgtaaatgctatttaaataactgttatactgtatttttatttgtattatttttattttttctaatatttttgatctgcaattggtttaatccacagatgcagagtacatggatacagagggccaactgttttgttacaggtacttcaaatagcactacagtacatctttgacaaaatttttacaatattccacctttcaatatgaaacagcttaaaaaggcatgggtcaaaaataaagtatagtagtatcacttacgcaaataaagtctcagaatcatacaagcacaacactgttaggactctccctgtttaggctgggaaaaacattatacaaaacattttcttcaaataaaattacataaattgcttagaaaaatgccaaaatcaataatttcaaacatattaaggagaaaa

SEQ ID NO: 339530 - DNA, 1000 bp, Homo Sapiens
ttttttttttttttttttttaaatatttaaaatctttattaacccaaattagaattataaaaatgtttgtctcaaaaacaatgactgtgatactcaagtacagaattgtggtgcagccagaagtggttcaagagccctcccgcaaatcatgacttgcactctggcttttaagtgaagacaagggaatctcaaggcagatgggaggagggcatttgaagaaaacaaagatgacaaaaaagatgggaaggacacaatggttaagtaagtttcttgtcagatacaataaactatttttaggaaggataaaattaaaagtgcttaatacaaacaaaatttaacgctgctaattattcttaagtgccataaaacattagttaccaaaataactttattaagagttggccaaacttcaactattattactattactacagggtcttgttctagcaaagttccaatatttatcagttatcttacacatgacatttatcttaatatgtacataaatatcaggaaagtttaaatacttttattttactattttaatcttttccttaaagatgcagggtttcatactacatcaattaggcggacatgacaaaaatgacttaaataggaactgaatataaagaatactcgataccatgacatcatcatctggaacaactgaagttttctacctcttgctccattttctgaataagtgatgttttatcatggtccttgcgatgccgataaatacattggctgattactgcatacaaattttccaactgaaatatgttgtagttttgactttttttaacaacagtcttcaaaagattttttaatcgctcatgatccacaacaagtgagggtgtaggctgagaaagaattgccaaagccttttcaacagtgatgagctgctgctgttctacctgggaacgtctagctcgagtcattcgcagaacacacatttcttttccttcattttcatcagaaatatgtattatctgagagc

SEQ ID NO: 339531 - DNA, 1000 bp, Homo Sapiens
tgtgtaactggtggtaaaactttattattcaagtttagatgtaacagacatctttgctgcctgaagattgtttgcataagaaatacaccaagaacatgtttgtgagtagaaatgaacatgcactatgaaaacaaaataaaataaaacgaaaaaatttcatgtgttgtaagaacagaactattatagccaacattctagtattcaaatcaggactacaaattgaattctttttcttagcaacatgaaatcattccatatgaaagacattttctgctggtgaatattgctgtaagttaaattttacattggcattttgagatgttcccccctcatgcctcccccaaagttttccatgtggttgtcaaatagtccgccctaaggaatttggcgtttattattgtgatatttgccttattggtagccattaagaaactatgattttatcagcctagtaatagttttgcatcttcatagtcaacactattggctgcctagttgatatttacagctcgtctttaagaaaaatgaccccaacctttcctggcctttgggaactgacagtttaaataacccccttggccacataataatacttggcactcctatggtgcctttcaaccaaggatctcaaagtgctttacaaacaagtactacattaccattattattattaataatattattaatacatatatttttcaattttacaggtgaggaacctgaggcacaaaaagaaaaagtgatatgctgcagttcatatgttgggaaaaaaaaaaaaaaaaaaaacaggggaaaaccagaattgagttttgggactctatgctctagaaggacaattttctctgataaaagctaaacattatttccacggtaaagttattcctgcttttctccggtgtaggacagagtgaagcttacagctctccctttcctttcaagagaacacatgaatgtacattgtctagtttctcacgtgtggattactcttgaatttcacatt

SEQ ID NO: 339532 - DNA, 1000 bp, Homo Sapiens
ttttttttttttttttttttttttttttttttttttttttttttttttttttttttttttttttttttttttttttttttttttttttttccattcctacatatatttatttggtattgatgatgaggaaccccgtcaaaaattcctgtaagggagactactactcgactgttaggggtattgcaacatttacatacatgtagcttatcacatacgtaaacatttacacaaatagtacagcggtgaaccaccaagttctcattccacattcctttcccacactgcgtttacctgcccattcttgaaactggatctcagggcagcacattgcatttcaacaggcctagtgctgcttctcagaggcagtcaactcaatggtgcaaaagcacaggacagcgacaaggcattcacactacacagacatgtgatctctttactgacagcaggaagggaagagagatggagatcccggggtgggaaagcgacaacatgcatcacaggagccatgtgagatgcggtgaggaccgctggtacgcagcatcccttgccaaggaatgcctcacagccatccgagaatgacaggcacgaaacatgaggaccttcctcgggtcagtcaagcatcatgctgggaggactcccacgtgtcccggtacacaggtcctggcactcatccgaccacagcttgctgtttggtccccaaaatgggcccacacccaggcgctgccaacacggcggctccgtctgagtcccttcgggtctccatcccatgggggtgcacgtctcagttttcctctaaccactgcttgagcagcctctgaaacattattttgctctcctgctgcctctctcgctggcgcttctcctctgtctcctgtggctggagtgccgcttcaggcagaggcccgggctggttggtgcctaggctgagagtcaagccactgaggccctgcaccagcgtctcccaggaggagggatgtggggccctgttactctccccagg

SEQ ID NO: 339533 - DNA, 1000 bp, Homo Sapiens
tttttttttttttttttttttttttttatggaacacaaacagaaagctttattgaatttatatatatatatatatctgagatggtagcttgtgaaagggtagtaattgacaagtcaagattgtgcctctaggttttaaacaaacccaaaataattaatgttggtaaaaaatgtctgcaataagctattcatttattggcaagtcttgaattttcatttagcatgcaaaagagctacatgtgataaaccacatacttgcatcaggaaaatatcaaacaaaaatgatgtatctagaaacatagaaaatacaacttaaaattttaatgtgttttttgtttcttattcttttttgtttagatataatttgaaccatgtttcttttcttttcttttttgaaacagagtctcactctgtcaccaggctggagtgcagtgacacgatcttggctcactgcaacctccgtctcccaggtttaagcgattctcctgcctcagcctcccaagtagctgggactacaggcgcacgcaaccatgcccagctaatttttgtattttagtagagacggagtttcatcatggttggccaggatggtctcgatctcttgacctcgtgatccacctgccttggcctctcaaagtgctgggattccaggcatgagccactgcgcccggcttgaactattccaatcctaaaattggaatgtccttttacagtccttcctggtgtcttcttccttattaaaatagtaccgctggttgtcaagtagccttatcttatatctctgtaagtatcatttaaaatgaaattgaaatatcatttatttagccagaaaagaaaatggaatggctaatttggtgaatccactccctgttgatacactaagctgctgacccctggagctcagaggctgagggcaaggctgtgaagctatgaggtaggcgtggaggtgagggctcagtcacagtggaccttgcccttggccaccccaaagctagacaagt

SEQ ID NO: 339534 - DNA, 1000 bp, Homo Sapiens
tttttttttttttttttttttctgttctgtgcttttattttacgaaaaagctaatggcaaatctacattaaactaagttgaatacaaagtcttagtgaagaaggcctggtggtctcgtttacaaaaatggccagtgtcatatttgggcttaaaatttcaagaagggcacttcaaatggctttgcatttgcatgtttcagtgctagagcgtaggaatagaccctggcgtccactgtgagatgttcttcagctaccagagcatcaagtctctgcagcaggtcattcttgggtaaagaaatgacttccacaaactctccatcccctggctttggcttcggccttgcgttttcggcatcatctccgttaatggtgactgtcacgatgtgtatagtacagtttgacaagcctgggtccatacagaccgctggagaacattcggcaatgtcccctttgtagccagtttcttcttcaagctcccggagagcagctgcttctggggtttcaccatcatctatgagacctgcagggaactctatgcagtagccccccattggtggtcggaactgtttcaccagaacgatacactcatagtgaagtgttctctgcagcacggggatgaccgcgacaccatccgcagtctgctctttcctggttgtacgtttcactgattcccaagttctagttttaccagtaggatccatgtacgttgttttttcaagcttgacccattttccttctgaaattaactcctctgaaatgatatactgtttgccattctgagaagattccgttggttcttggctctccattttcaaacgagtctttacagccctcaggtgagaagttcacctccaaggtgtaggggtgaagaacggaagaggacgaaataactagctggaggcagcagtgtcagccgatgccggtgccacggctcgaaacaccggcgcctctcgcggtgctaaaaggatgggcgcgcaccctccttccggcatccgtagaac

SEQ ID NO: 339535 - DNA, 918 bp, Homo Sapiens
ggagatggtggggggggggtctccctatgttgcccaggctggtattgaactcctggcctccagcagtcctccagcctcagcctcccaaagtgcacttggtggatgtgggcagcaagccacccaggtgccgaggcaagagaccgagggcacgagctgttccagtataataaaatatataaaataagaatagttatactagatatagatcttagatatgattatatatgaatcattaatcattagtttgtagtaattattctttattccaatattataataatcctcgctctacaatcataacctaggaaacaccaggccatacagagataggaggctgaaggggacagtgaggagtgaccagaagacaagagtgcgagctttctgttatgcccggacggggccaccagagggctccttggtctagcggtaacgccagcatctgggaagacacctgttgccaagcccaccgtggtctagctgtagcgttagtgtcaaggaaaacacccgctacttagcagaccaggaaagggagtgtacagtgagatcaggatgagggtggtgaggtggtgatcagggggacccatgcttctgctcagggggttggcagaagccagcaaggcttggggtttccctgtttggagctctccaagttgagagtgcagaggagtgtgagatgcgtgtgaaaatgcaaacttggctctccctggctggaggctggcattgggtgagtctctggtaggaccaggccatgtatactttttaagcttttttattcttgaaaagttcaaagatatacaaagatagactatgcaggataatgagcccccacatactccgcatctcttgtctgtaattatcagctcgtggctacctctacctctcccctctacctcttgtctcatctctacctctcccccc

SEQ ID NO: 339536 - DNA, 1000 bp, Homo Sapiens; identical to SEQ ID NO: 159099

SEQ ID NO: 339537 - DNA, 1000 bp, Homo Sapiens
tttttttttttttttgaaaggcatctatatataaaatctttattacaggcagtattggtccatacactaacacaataccaacagtacaggtttaatctttcaaaatcatcatttaaacagcaaaagaccaagaaataaaatttgagtcaattatttttcaaaatattctcaatgcacattatccttaattcccttattatagtgaaacatacaaatacagaaaaataccccatttaacaaatactagtgttaaatggttatttggcttaaaatctgagttaagaaaatcctttttagcaacctacatacagataagtagcaaactttattatattaaacaaattcattctgctaaaacatgtaaagaatttcatccatcatgtattctgatcccagtacaagtgtttattctcttaccgtcacgattcttatatgaaggaccaactcaaagagttgtcctagatataaccttatcctcttccccaacacacttcatccaaaagtctgttcaacagatggcaaccgggtagcagtcacttcaccatctgatgccagtggttccgtgagagcgtggccaggcctgtgaaacagcccattttcctacctactgtgggttgctgctcaggaggaacgatatacgccaatacaagcaggaaatctgcagctcctctgctatgtgcctcagaacactttcaatttttctggtcaatgctctgattaggtatcatacataaaagccagcatattagtttaaatctttaaacaaaaaactatattttccaaagtcattatcatttgggccaattaagtgatcttttcgtgctttgttgagcttcatctttagggcatctcttctttcttcccattcatgaagttcggcatttccatgtgcaaatttacagctgtttccttctgggcaggtgccattcatatacctatcacaaatactgaaatagcctgttgggaagcggtgctgccagcagtactggtcgtcctcggt

SEQ ID NO: 339538 - DNA, 1000 bp, Homo Sapiens
ttttttttttttttttctttttttttttttttttttattccataaagcataagatattttaatgagaaaacgaaaacaaaatcaaaccttagtctcatgtttctatctaaagacactcaaaactagtttttccctgcccatccctttcctaactgcaactttatgtgtgaccatgtaataaaggccagtttaaagattttttttttaaaaaaagtttaaaccttttttaaaaagattaaacaatcaggctagcaaaaaggtactcaatacatattttccttatatcaaacaagctaatttcagtacaatataactatacagaatatatacaatacacatgttcacaaagcaaacactataggctcagaacagatttgaaaaaacatgatattcacattgattacaataaccctaaaaatgattgtaacgttgaaacggcacttagtttacaaaaaaggtcacaaaaatatatatatatatgtagtcaccaagaactatggttcctgtaaaatactaatagccagatactagtatataaaatgtgaagttctgatattgtatacattttttggaaataaaacaaaatccaaaaccatttttgttattgtcaaaagtcaaacatgccaagttaacttagctatggccagtgtcaccaagtaaagccatacttgaatgagatgacgactggatacaaagctggtgaactggggactggcacagttaagagttgtactaattctaggaaaggggtagaagacataaaaacacccatctatgtaatttaattcacattttctcccctgcatcaccttcccttgagagtttcacaaaatgccagtgcccagaaagaatcacaatgctataactggcagggtaaaaaagtccccccgccccgacttccttgctgccgggctataggcaaatattaaagcatgcatcagctacccaaagccatcagtcacccatctggaagaccatggtgtacagtttccgcctaggc

SEQ ID NO: 339539 - DNA, 1000 bp, Homo Sapiens; identical to SEQ ID NO: 159100

SEQ ID NO: 339540 - DNA, 1000 bp, Homo Sapiens; identical to SEQ ID NO: 159101

SEQ ID NO: 339541 - DNA, 1000 bp, Homo Sapiens
ttttttttttttccttatttttaaaaaatttatttcatataaatctcatatggtacaaaagtattacatgcttgggcctgtcttgcaaaataagaggttctttcagttcttcaggccaaccttccttcagaggcaaataaataagaaacatgtagaacatatttagaaaattttttaccataataaaaatatgtgaacatcttatatttagcatagtttagcaatccagtttatgtcgacaaatttagttcactgctgggaggcacatgtcacagaagaacctaataggcagcagatattttaacctgtaggaacaaaatgtttaacatttttcttgtattttttgaagaaggtactccatttgtacattcaagtttggttggccctttttagtctttttgttcagtattttaaacacttccattttcttctttttgtactgcctttgggcttcttctctctcctgttttctcctctcgaattcttgtttcttagcagcacgtttggcttgtatctgttcatattcttcttgtgctttttgatttgatgttttctttttatttttctttgaaattgtaaaggagtttactgttttaatacattgttcttctggctgaggctggtcaaagctacactgatcttcaaataaaggctcgtcaatgctacactgttcttcaagcaacggctggtgaacttgttctgacaaaggatggtcgacttttcttgcttgcttcctatgtctttcctcttcagctaaatagagatgtttcagattatctgggtatcgatctgtgaattgagattccagtgacgtttgagccttcttttccttccgtagcaatttcttgtaactttgctgtattttcagttttcttcgaaaagcaaagccttgtccctcgcgaacgctccccacgaaggcttgcgggtggttaggccgccatgtcttctgtctcacattcttattcctgtacccgacagtggaaaccccttcaccacgcgc

SEQ ID NO: 339542 - DNA, 963 bp, Homo Sapiens
ttttttttttttttttttttttttttttttctatgaaactactttatttatttattattattattattttttgagatggagtttcgctcttgctgccccggcggaagaaactactttaaaatagcattttggtttctagtctttttcttgtatagctataaggtggtgtgagtcatttctggtctgttgttgcttttaagaaactttttgatcactttgtatatttttatagaaatctctagaagaaaagattggatgcttgctgaaattttcgggtgatttagatgatcagactgatttctttttgtgaaacttgtatgatgctggcaggtcatatcgaagttctgctataatatctatcttgattttccattctgcagctttctttgaacatgttctctagttgaggatttgtgtaaggaatatactgctgttcttgccatttccaaagcagtctttagaaagccatatctgtccctttattatttttggtcccaaagggaggattcataatactgtatcgaatgacttggacattctgttagataataagcacacagcacattgaaccatgtcaatatttgtaactcaaactcttctgcattcctattaaatatttccaatgcgtcttcatctatgtcaaatccaacacacaactctgctcctaacattgcagttccgatgctaagtactccacaaccacatcctagatctgcaacgactttattttcaatgtcatcataagtgttatggattgtatagagcatacatgctgcaatgtgcggcctggtaggatactgttccagaagtagcttgggcttttcaaatccatccacttgttgcaggcgactctctagttccttaagccttactttcttcattttgttttaaagtatggactcgtagggtttgaaggcacaggatctctggaggcgacccgcacctcggccggtgccggaagcc

SEQ ID NO: 339543 - DNA, 1000 bp, Homo Sapiens
ttttttttttttttttttttttctctatgcagtccttgtttcctgccatttaattttagatgaaaatgagacatatgagtacactgaaaagtaacatcaccatctggaaaattatacataaggaaaatgcaataagggaatatagatccttcagcccctattccagtactctttaacaactctgcttccttggacgggaattcatgaggtataatacttaaggagattttcatctgtaggttttaggattttcttatcggccatattcaccacccatcctggagcaagaccaaagaaaatctgccttggatccttcctagtacagagcattttgaagagttcatctttagtgatatcaggtaagatataaccatacttcctggcgagttcaagtcgtgcttcaggaaatttggcaggatccgccaggtacccacggttctttgcatcagtgtaatatggtaccagttcttctggtggaagcattctttttggaatgggttgtccacgaagaaagaatggaacaggtttgcatacaatgtccagacttcttggatcatagaaggctgtagtaacaacaccaccatttttttcaatggcagcaatagctagttctgaagccaactgtacttcaatattaacttttgccgtaaaggtgtcagcaccctcctcaaccagctggacaccataatcccttttaagtggctggatggtcacacctctcccattgacaagctgggttaagtcaataggttgactaggatcaacacgacccaaatcaataagatactgcagtctattgagactcaaaggcttatactggcgtctgaaactatgtccttcgttaaacccgtattttgggattcggatgtaaaatggagtctggcctccctcaaagcccaagcggggccgggttcctctttgcctttctcctttatggcctctgccacattttctacctcttctccgacctcttggtcttctctccggtttcttggagccg

SEQ ID NO: 339544 - DNA, 1000 bp, Homo Sapiens
ttttttttttttttttatttgttagttttaattttattctgcagacattatgcagttctataatataaaatgaatacaatactaaaatctatttcctttatttacatggtgtaacatttccaataacaaacatttctaatcacgaaagatggtgttaaagcagaaatattgtcatgattgagtcaatgggagaacataaaatatgctgtatttcataatttttccgtaagaaaatgtctagtttgtttaaatgcaacaaatactgtattagattcactttataagccatacactccttcttgtctttcttttgaacacattctggaaggcagctgtgaagaacggagtagcgagtccacgccattcaacatccatcagaaacctgcttgcttgattattaatcatcttgggatcgattatcttcaatgataatagttcttctaggataagattcaatttctacaaatatatatcgaaaatcatattcaccacttcctgggttctctttcacttgcgcatacaccgttccttgcttccctggctcagagccctcaatgtagaatttcacacacgtgtgtttcagcccatcttttacatattcagtgaacctgacatgctgccggcgaccccgccttgtcacctccccatagcctttaacagactcaccaaagacaccgatcacctcaggatgtgatctgcatttttctaaggctctcccatatatcttgctaggactggatgaagaaaaaagttctttgaaaatcgtgtaaaacaagccacctgtaatgctgattccaaaaagcaccactattaaataggtaaaatctcttccggcttctttcactttttgtgatgttgggacggcggttccccctctctgactcctgtgcacagacacttgtttgctgccatcctcctttgcttttcgggggctcggtccctgcgtccagatggttttctgggtgactccaagaatacatctaggtcgcagcgttttctt

SEQ ID NO: 339545 - DNA, 1000 bp, Homo Sapiens
tttttttttttttttgaacgctggtgatggttcatgcaaaagattactatgcaaggagcaaaatctaagactgctgtttttcccaataaattcaattgttttccacaatgtagaattttaatcttcaaattaagtgtagctaggacagtgagtgaaactaatcactgcttgacttttattttcatctaggaaaaataacatctgatgtcaccacattaaaatgccttcctgcttaatatcagagaaaaaaatacatgttgccagtttagactcagcgcagtttatcatttggtccaaatttcatattcaaactacaaaaaatattttttaataaagaaaacatattcaaaacatacatatacacacatacacacagtgggaggaggcaaaaacccaaaatgaagccgatgctattgtagcatttattagcaagatcattagggaaatgtaaaaatgcaacaccctttctttcacattaacatctgaaaagaaaaaacaaaaaccactctaagtgtccaaatattggaaaaaaagaagcaagcggaggtcccgaattcttgtaaaaactgctgaacaaactcttcagtttctcttaagaagagtcaccaggataggcagtttctcaacatttgtgcttcatggcaagcttgtgcgcagtttctgcaaactgctgggcgctgttcttcaggtcttctgtcttctcctctgctcggcctaatcgctctccacgctcattcaaggcctggcttgccttctgcactgcgctggtcacgctgtcagcagctgaatggaggatgctgtttcctcccataattttggattggcagttaataaactctggcttcctgtccgtgaggtacctctggcaggtatggtggaggatctggaagaaggtgcatttttctgacgctgtgctggctacccactggtcaaaagcattttcaaacaacaaatcaaactctgccgaatccccattaggatcgataccattaacctggcg

SEQ ID NO: 339546 - DNA, 652 bp, Homo Sapiens; identical to SEQ ID NO: 159106

SEQ ID NO: 339547 - DNA, 1000 bp, Homo Sapiens; identical to SEQ ID NO: 159109

SEQ ID NO: 339548 - DNA, 1000 bp, Homo Sapiens; identical to SEQ ID NO: 159110

SEQ ID NO: 339549 - DNA, 1000 bp, Homo Sapiens
ttctgtgtgaagtattaaagaatattttaattgttcttttatgtttagatttacacttttaacaaaatattttcagaacatgaatattaacaggcatgtaccaaaggtcatgcattcagagtctgtctctgcaggagttaggtcttggttctgaatccaactgtttgatttgattcccccagttgtttttgtttacatacgtcttatgtttatttctcccctttctttactttcttggaaatctttttttcctatcccattaccaaacttttcacaaaaggaatcttatgggtttttcttttgttctaatcatcactggttgagtggttactgtcactgccttcactgtcactgtcactgtcacttccattgttgttaccgttaccagacttgctctggctgtcactctcatcattgctgtcagatgtgctgtcactgctatcactgctgtcgctgctgtcactgctgttgctgctgtcactgctatcgctgctgtcactgctgtcgctgctttcattgctgtcactgctgtcgctgctgtcactgctgtcgctgctgtcactgctgtcgctgctgtcactgctgtcactgctatcactactatcactgctgtcgctgctatcgctgctgtcgctgctgtcactgctatcactgctgtcgctgctatcactgctattgctgctgtcactgctatcgctgctgtcgctgctgtcgctgctatcgctgctgtcactgctgtcgctgctgtcactgctgtcgctgctatcgctgctgtcgctgctttcactgctgtcactgctgtcactgctgtcgctgctgtcactgctatcgctgctatcactgctgtcactgctatcactgctgtcgctgctgccactgctgtcactgctatcactgctgtcgctgctgtcactgctgtcactgctattgctgctgtcactgctgtcactgctatcgctgctgtcactgctatcgctgctgtcactgctgttgctgctgt

SEQ ID NO: 339550 - DNA, 1000 bp, Homo Sapiens
tttttttttttttttttttttttttttttttttttttttttttttttgaacagaatgaaatttatctttatttgccaccaaaaaaatttcacagcaatccctctgggaagggagcagggtggggagtgcacatgtacacacgcactcacgcagaggagtagagatgcgtgatttgaatctcactgggggcgtccccccctttccctccaggtggaaagaaacgcttgggaaatttatttacaaaaatccaggccccagcacgggggaggtgcccaatcccatctccctactgcctccaccaccccaatcttcaattttcttaaaaaaaaaaaaaaaaaagaggtaacgactgcatagactatagctataaatccatgaagtggggcactgcttggaaaaagatgtggaaacctcaatgcaccgattaagaaatttcaaaggaaggttctacacattcagggggagaacaactaggctcgggcggggccttggcgaagacggaggtaggacacggactttgcacacctaacaccaggttgaaggtacagaaatttcacagcaaggcaggatcacatttagctgccccctaaagtagtggggcaaggtggggcggggtagaggggggagctcgagaagtttccgctggcagacatgctgtcttagcggatcttttcacatgggcaagggaaggcttttagttcgaggattgttcggctcaggcgctcactactgtcgcccctcccccacctaatccgagcagcaagacattgtcgccgaggtgtgttttcttttaaatcaaagtcttggcctcggcgccaacggtgttcactcgccgtgcatcagacacttcccttcaccccctttccaggcccggtccctgtcccacagcgagagtcagatagagggtccaggaggttccggaatggagtgccggccacagcggtgggggccagccctggccacagtccagttttccaccggcggaaagaagacgagttag

SEQ ID NO: 339551 - DNA, 1000 bp, Homo Sapiens
tttttctcttaaacaggtttattttagcagctcagtatattacattctacatatttgtcttttaatgtgtttatatttctgcctgttctgcatagatggcatattcattaacttttgtagctgactttttcatttgctatttgctgctacctggcctgaagagtcaggaggataaaaaaaattcatttggtggaaacatggagcagcacttcagaagaactttactttgatgcagacttccgtgttaggttttcttcctcttctttttcaaatcctgaacagacgacagatcttcccttgggatactgagcacaacacttacgcagttcttggatgacagcctgacactttgattccatgtagctgttggcttgtaaacatttctgtatctcacaggcttgcttctggcacggatccttctgcggcatatccagaaaaaggatgggagaaggaaaggcaggtgaattgctgcagggcaaataagcgacaaatagatgttgatgctgctaggagctgctctcttctctctaaatcagtaccaagtccttggtgatcagggcatctgttctgtagaaggtgctgacttttgtgggattcatcagatcccaggtccagccgatgatgtccattaagggttctatggcaatttccaaaggagtcaatttcaagttacggatcctgactaagtgcttttgttgacttgctttctgcctacgtaacctctctctgcagtttcacttgcagtattcttcatgacccttgctaaacttctgtttcttgagcagtttttcaacccactccctccccccaggcccaagggtgggtgcactgcagtagtggatgaagtgattgccaaatactgaacagaacaaaggagcatatcttcgtagaatcccagcaccaggttagtcatcaggcaaaagcttaagcaacagctcctgtactcccctgaccattaaatgatgctgtatctgccacaagcgagagttgttatccatgt

SEQ ID NO: 339552 - DNA, 859 bp, Homo Sapiens
ttttttttttttttttttcctttaaaaattttaatggacaggaaatggtatagaataactgccaagtcacataagttaacttttttgttaatgtttgtgatcccggaaagaacacactatcagtcgatgcaaaccgcatgggcgttttcatcagtcgttgtctgagcacatgaccgagtgtgggccacggacccatctttacttggtccagaaataaaagcggctgccatgtgtggcaggctgcagatctccctcgatctcagggctgggatccggtcttggtcttgagtgatagggattctccggtaaaggtcgatctgttttcactttggtgacctttgacagttctcccaggtcaggccgcacccagcccagtttgtccagcacacactcgtcaaactttgcctgctgtttgcgacagtgacgaaataactgctggccagtataatcaatgcaagtccaatattctgtaaaaggctctgcacagtgacgttttatctgcctaaagaagtccaaagcacacttgttgaccagtttgccttcctctaaacaccgcctcggatctttctcttcccagcggcagagcataaactccttgttgggcttatcacattgagctccatagtgatgggccgcagctttaagcacagcagaactaattttcacctcatctactttcagctcctctagagtgggcagctccactatccccggcatgacggctgcagccccgaccccgacgagaagccctcagccgcgtcgcccccgtctccttgaactcccctttcgaccgccgagtgccacacggcgcctgcgcatgcgcatccggcaacacgcaggcgtattgccctgcccaacc

SEQ ID NO: 339553 - DNA, 1000 bp, Homo Sapiens; identical to SEQ ID NO: 159114

SEQ ID NO: 339554 - DNA, 1000 bp, Homo Sapiens
tttttttttttttttttttttaacgacagcttattctttaataaaagtcaggggtgtcagcagcgtcactggtaagacatgatggcgctccacgactgaccagcagcgctgggaagggacacgcagaacccaccttccaaccacgcccaacacatcacagaaatgcctgctcgtttgttttgattcatatacaaagttacaaagtatttcctgccccaaattcttaacgaaaatgaaagaaaaccctagaatgcggtggttttacaagtatattagcccagaacatcctaggcagctgcgcgggccgcgggtgcggcagggcgcagggcagcacccagagccccggccagcgcgaaacggacgcaggcgcatccccagccctccgtggcgtctcagcagcagatcacccaggcctggcccggtcgggcttggtgttgcctccgaagtcgagacgacggtgctgctcagttatcttccgcctttccgcactatggtgggcaggcgacactgctgcggggcaggcttaaggtccttctgcggatctgtcttcttgctcgcagggatgcacttcaagggtctcagcaccggcactcttccatttgttccagatccaagcacggactgcagcgtggggctggagtaagacgacagtctgaccactcccgaaagctttagtttgggcagttccatgacataggccggtcctcgtctcttgggacggtcctcctcttgctttagggactgtttctgctttctgccctccttggaaatctggcagctgttactgagtggttccggtgccacagggtgctccggaaagccagcttttctgtggctgcccagagcccgcttctctgttttcctctgttcttggaagtaggggtgctgcagggcctggtgggcggcgattctctcatcgggatcataggccaccattgcgtgcaggagggagaggcattgtggggacaaattggttgttagtagaggtattcctgatccc

SEQ ID NO: 339555 - DNA, 1000 bp, Homo Sapiens
tttttttttttaagaattattcattattctaatggctcagatagagttcaggcatagtagccgtgaataaagaccaccacagccaggaggaggatggcgttgatgttcactattgtcctccacgagggcctctcagacgtgtctgtgagcttcttgctcaaggcttcctcctcctccttggttagcttgggtcccttctgcaaaccgcagaacaagtcataagctttcttgaggcatccacgtgatttctcaggataatcttcttcaacaccatcatctgtttcttcctgacttttctcttctgcatctatatcgattcgctcctctgtactgttccgaagaacccagcacaggcggtacagatgtacatcaggaatgggttttgttaagagggaaattcccagggtgaccagcatggacccaaaaaagagaacgatggaaaagtacagatagtgcactccacagataatcttgggacagttactgggagccaagcaactccctgttccataagcaaactctgttatcatacgaatgaggcccattgcaagtccaaccattagaccccagaatgctccctgttcattgactcttttacagaagatggcaagcacaaagacagctgcaattggaggcccaaggtagctagaaattgattctgtgtaatggattagttgtccattttgagaaacttgtaccagtgggacccacacaatgctcacaacagttaatagaagaacaaatatccgtccagctatcaggagctctttctccgacgcttgcttccgcatcttggtgtagaggtcaatggtgaagagggtgctggcgctgttgaagatggaggtcagggagctcatgagagaggccagcatgaccgaaagcatcaggcctcgcagtccttggggcatcagttccagcaccatcgtggggtatgcgtagttggtgcagccaacatcaacgccacagtgtttcacgcattcagaaggtaccacacatgcta

SEQ ID NO: 339556 - DNA, 1000 bp, Homo Sapiens
ttttttttttttttttttaaggagcgtgacctcatttgatatttattaacaatgaaccaatagaacacaaggggttggggggacacagcgagagacaggcagagaggctggccacagggaggcctgttgcatgagggaaccctgccccacgggagaatgctgtgtgcatgagccatgctgaggcatttctgcaccccactctcctctttgagggacccacagtaccaagggctaccctctgccctctgcgtctacccccacaccgggcccgggcccatgtcctggaacaaggtgggtggcctcaggaccagccagccatgtgtatgggccacctcctagtcccatggttgccctgtcaccaacaatgaaggccagcttcccagcagctcctggaactggaagagacactgaaggccaccaggacaagggagatgggaagagaggggccctgggccctcacagtgacccttcctacctccccagcttttgcggcttggggtccagtgggtgaaggggtggtctttgtctgaagtgctggggcctcctttccccacccgcagccccagcaccctggctcaggccaccggcagctctttcccactttgcacaggcctccccgctccaccctgtcccgtccgatccgctctgcacagatctggaatgatactcctcatcatgcaaatcccctgcccaccccatcatccctggctccccctctgttagttttccttctgtcttgaaccctcctgtaacctggtaaaactagtgtctccaaccctcttggtctctgcccaggcagctcagcatcctctggcccagagctcctccccaccctgccctcttcttcctctctctgcaaaccttccccatcctccagggccctcagctcccacctccttcaggagtcctgcatacaggagcccccagggatctttctccccacctaactcattgacctttgatccccagggcctcggagcctcaagagcctctgtagccc

SEQ ID NO: 339557 - DNA, 1000 bp, Homo Sapiens; identical to SEQ ID NO: 159115

SEQ ID NO: 339558 - DNA, 1000 bp, Homo Sapiens; identical to SEQ ID NO: 159117

SEQ ID NO: 339559 - DNA, 1000 bp, Homo Sapiens
tttttcggtaggaaacgtctcgttgacagctcagagcttaaaaaaaaatatatacacatatataaaaaacacttctgccccctcccccatgaacgggtccaggcagctccttcctgcagggggcaggggagagggccaccagggcagtgcctgttttcttgaaggcaccgaccctcctcctccccatgttccctgcctccagttccaatgcaggggtccaggtggcaggcccctctgggaaggaatgggtcttccccaagcttccaccccaccttggattgggccgcaggtgtggagggcctcatcaaactctttgggaccccccacccccactctccggtccattgtccatgccggaaccgcaagtgcagaagtgggtggggtgggccaggctggtccggtgctggcttagtctgatagttgctgtccctggaggaggacccccaagggctgatgtctctgaggctgcagagtcctggcctgggctcctccagccccctacccccaccgtatttttttttttttttttaaagaaagaaagaaagtgggggaggccaggggggcaagggacagaacatgggggagaaacaaaggtggtcagttggggaggggagctcctgggctctccctggctgccctggggtggggctgagcctcagttggagtcagagtctgaggagtcccctgaggaggaggagctggagctgctgccctcggactcattatcttcatcctcatcgtcatcctcgtcgtcgtcttcgtcctcgtcatcctcttcattctcatccccatcctcgctctcgtcctcgctgctggactcagaggagtcgccgccatcttcagaggagtccccattctcatcatcttcctcttcttcatcctcgtcctcgtcatcctcatcctcttcatcatcctcctcggactccgacttggactgcagagtagtccggctggatttggggtttgggcctcgcagcttggtcatgctcttacgtttatt

SEQ ID NO: 339560 - DNA, 1000 bp, Homo Sapiens
ctcgagttttttttttttttttttcatgtttccaaaagtttattttaaaacacacacatagtgtcagatacaaacgccttttaaccactgtggtggggaagagtaaactgattgcttccaatgatcatctcttccctctgcgtccactgttctcagagtctcagggagtatgagaggatgtgtctcttcctttacttccctgtttgttgtaatgagtccttcgatgagagtaattacgtgaccgaattttccataactatttgttgattattaaagttttgcagtggctggttttcctattggtgtcttacaaccaagcatttcttctaatttggttgtggcaggttcattcacattaaatatacagttattatttatcttcttcttctccactactccgagcctcacacaggctgctaaggcgtttttctgcacatcagaagataatacatcataacattgagaggtaccttgatcgagaagctgacttgtgaattttctgactgcagccaagtactgttcctcactgaagtggtcctcttcttcactcaaaaggtacttgcaaattatctgatagctttccacaaaaggtttaaagagtcctactaaaaattctaacacagtatttcctttctctgtaactaggatgtctttcgtagtcacttgtatggcttcacttttacaaagcaggtaacagccttcttcaaagtcctttagtgtgtttcctggaaggaagatgaactcatctgcaaaaacatcacgtaggaagcgaaagcaactgtagacatcctctttcctgaaccctggtgtcatctgcaatgctactgctactaaggatgggcgcacaaaaatgttgagcagctggttcctataagctgagcacatgaggagagtgatgtgctggagcataagcccatcgaccacttccgagtctccggagtccactttcagaatcacctggtctttgacaaggctggcaatgttggaatgcagaagaatg

SEQ ID NO: 339561 - DNA, 1000 bp, Homo Sapiens
ttatttgctatggaagttctgtgcaatattaatgtcccacgtcatcgctttctgatacaacggatgaattacgattatactctgcattctctctgttacatgatttacttatttcatttcttttaaagatcacagtggtgaaaactatgaaaaacggcagaaaaatgcagaaactcagaataaaccagttgttccagtgtgtattgtagcctttttcagtataaaagtcaccagatttctgaaaatttccatcatcaatactaccccctggggaaccaaactggaatttacaatctggaggtctatgtccagggaagcattgacaattaccaaaattattacatatccctttccctttgcattttgtggtggcattacagttatatcccattaaatgaacttttctgcaggttttatttacacagtacatttctggaccacacatggtgccatcagccacataggcattgtctgttccatctgatctcatggaggaaccagtggctatagatacacatacatggtcttgaatatatgaataaactgtagattgagcgtcacttttattagcatttttatgtggctgaacacaagctaattttccacagagaacatccttccgttcacaaggtaatggttgtgaatttttaaaaccacagttttcagatctttcatgcagagaattaacttctttaaaacaggcaaatggagcaccttgagcaccttttccaaatatcttggcacactggttatcagtagtttgacattgtccgttatagcaataggcagttcccaacttgcacaaacggccattcaatgcataagtgtcaggaacacaattactagaggttccattgcagtactctgtaaaatcacactctggatcaatactctttctacatggagtgcctgctattgacaactcacactttgatgtacaacatggtccagaaccacattttactgagcccttcagtttacatgtgttataatcacagca

SEQ ID NO: 339562 - DNA, 1000 bp, Homo Sapiens; identical to SEQ ID NO: 159121

SEQ ID NO: 339563 - DNA, 1000 bp, Homo Sapiens
agaagcccatggaaacaaggcgatgacggcgcttgagggtgaccagacctcctcaatcattccatcagccacccaggactcaacagcagaacctcagaggactcagctgaaagaggttttcactcgagcactaaccacagagaaatgggaagtgccatcctgctgtcataccgcagccgatggctgggtaggactaaatgcccttctgtggtgagatgaaccaagacggcagatgggggaataacatcagtgagagagagattacgaatggatccttgtattgcagatcaaactgggttgtctcttctcaaaccacccaggcagtttctgaatgtcccaagataggggtaggagaaaagaaaaaaaagacaaaacaggagacggtgggtaagaaaacctaaaaggcacaatgaggcaaaggcctaagatggaggctggctttgggatctgaaatccggccacaatcctccttgttttacctcaagtccaagaattgtcaaaaagaaaacccagaagggctattcattctaaattttaaaatcttttcttcctggcctaccaagtccttgtgttttctttctaggcgcccataaatacaaccccattacagttctatttggctaataatttacagaacatttaaaataccgggtaggtgaacatctcttcatggcttttgtgtaagggcctgaagcgaagagaaaaacaactgattggagattcctatctggcgccttctccagggaaactgacaaccagagaaatctgttgctaggatttctaggacatctggaaattccctttttgttctttctcaacaatataaaatggtatattcgcaaacctatctgaatcacctcaatctaggccactttgaaaatttcatttaaaaatgtaatcacagatttttaaactaattacccaatttgcaaacaaatcccagctacttctggtcttgaacatggagcaaaggtgtgtcagtaaggccaacattcttagg

SEQ ID NO: 339564 - DNA, 1000 bp, Homo Sapiens
ttttttttttttttttttttttttttttttgatatttcacaaagttgtttattcttgttattaaaacttggactcaggtaatcttggttattctggaaaaagcaccttgtttgcagagatcatttaatcatccttttctacaatcacctctccatgaagcacctttcttctttgacgtaacatatgaaaatagagttgtggaaacaaaggtatatatgatgccatggttataagaagaaaataatagtagtcaaaagagacattgtatttgttaggaagtcttattgaaaacattcctgttttcttcacatgcggcaaggcagcgtatattgtaagaagttcaccagcaactccaacaggatataagatgataaaaaaattatatctggcccatttaatgaagtatggcaagtggtcaagaaggctgaatgtgtagaaggaatagcgagtgatctctgtcacagtccacgcgaccagaaaaagcaccacactctcttcattctggattggttttatactgtgagtaatgagccacaccataaagattcttgaactcacttggaccccagtcacaatcacagaagtaggtacaattccaattaaacagtgaactatctcaagcaaggcaaatgtctggaaaaatttaagtgtcttctgaatacttttatataaacctctgtgtgttcctttttccatataaaaacgtaccatggcaatagctagaaccaaccaccccgcggtcatggcgatgtcgtagaaggtgagccaggcggtggccaagaaccccaggcgcctccgcttgccgggagcctcccggtcctcgccggcctccgaggcgccgccgttggtgccgtcctcgtcgctggacgccatggtggccgcgcacctgggggacgtgggagacagcggcaggagcgtgggaggggaccctgcccagcctgcagcccgagagccgctgcccgctgccgccgcttccgtcaggcgccccatgtgcagcgcg

SEQ ID NO: 339565 - DNA, 1000 bp, Homo Sapiens
gctatgcaaatggaattttatttataaaatatcccataagatagttctaacatatccttattcttcctttcagcttcatgttatacatccagaacacgtgcattatgtagatgaaagagtacataatagcacttaaaagttaaaattatcactgttagcctaaacaacaacttaggtataaaaatccagacctctgctaatttactacaaattgtacatcttgacttattaaaaactccttttttaagattccagttgttttcacagggagacaaacaagatgtactataaaattcttggaaggatttgcttgattctactggaagaatgacattagccttctttgtagatgcatcttttttacatattatgcttcgtgtgttttgagtacgtttatgagagaaggaagaaaggcaggtggtagagcaaaagaggtgagctgatccttttcgttgataagctgtctgtcccttctgtaaaggctttttgcaatttgcacaagtgattttagctggtttagtaagttgttgttgggctgtaggctggaaattctgcttacgaagtaaggccactggtgataaagaatccacccctggctgtttctgattactgggaaatgaagctgactgggagatccaagaatcaggactatgatgagttgcaaattctccattctgaaataagtctcctgccacattcattctaccagggttaaaaggtcttactccagtcttggtctgtggagttaaagatggggtgtacgtttgtatattaacaccaaaattacttgactgaagtcctttagcgacatctcccaagttggtattctatagtgatgttttatatgtaataattatgttcacatcttgcccagcattcacagagcttatacctgtttctaaggttgtaacattagtaataatgtatttcagagtcaattctgtagtgataccactattacccattcctgcatttaccttacttcttgaaagactggaag

SEQ ID NO: 339566 - DNA, 1000 bp, Homo Sapiens
atattttgttaacatttttattggtacgtgctctcagtacaacaaacagcatcagtagtgtacactttgataaaaaggaatttttagcttagtagaaaagaaagcccaaaggtcagaagtataatgaatatgtacatctttatggaaactgtttgtgtgaccatctttatcttcccctgtggatgagatgtatgcacacacaagtaaactagagagaattttattctatgggaatttttaggaaaaaaaaaagacttaaggcttagggattgttttactatctggaatttgcctaatttgaccttcaaagttcttgcacaaagtagcagcaattctttagaggtatagagtcaatagtttaagctgttagtttacaacgattaaaatgcaaaagttcttgcacattctgtgctttgagaggttaattcatctacattttagtttgtataatatatttttagacagctcaggtactgacctcaaaatcattatgctgatatcactatctcctctcatgtacatgtaattcatgatgcacttatctctttcaaaaacttttaaaaatgtttctaattcacaatttcattgaacagctagctgagtccatacaatttaatgtttccttgaagggaaacaagtcatcaacttaatatcaactactaaaaatgcaagatgtttgcataacatcaaatttgttcagttttagcttttgagttggctgtagtagtttgcttaaaggtctctatgcacagaacaaagcatgcatctctaattatgtctctctagtttaccaaaatatgtaattgatattagtgtaaatatttagtacataaaaatactatcaagaaaaaaaatcaacttttaataaatatcttcagttctgaattctatgtacaagtactttacatctactccctggagagagcatttctggctttgctgtgagcaaggtgactactgacataaattattagcacattattgcagtcagatgcattgt

SEQ ID NO: 339567 - DNA, 521 bp, Homo Sapiens; identical to SEQ ID NO: 159124

SEQ ID NO: 339568 - DNA, 1000 bp, Homo Sapiens; identical to SEQ ID NO: 159126

SEQ ID NO: 339569 - DNA, 1000 bp, Homo Sapiens
aatgatagaccactgaaatttctttagacacagtattttcaagttatatttctgcctggagtacagatatgaaatagcacaaactgtactctgaattaagcaaacagaatgaataaaaaaaaaatattctcccaacctaagtttccgttcctcatttccacttgcctcagactctttctattgaacatatctagttaaatctctaatggacggcctgtgggaagatttactgccaacagggatgactgacttctttccggacactgagcaggggactgtgggctctgaagcagtttacttcctgtggaaagccagtcccatttctattttacttcgatccaggcctattcagataaagcaccactcagtagctactgaccatttaagtatggagagaaaagcaaagtagaaaaatggttttcacttaaagaaaaagcaaatggaagaccagccataatagctccatggcacaagagacatgacagggatctcctccccagatgtcccctgatgtttgtcagcctctcatatccctggccctctggcttctggctctgtgattacagttgccacagaggattcatggacagcaaaaagcttaaggaacctggaggttttgtacaacatgtacattctgctgacagaaacacatacatggtatggactattattaaaattgttagcctgcttgcactcagtatacaggctgcttaggaacactttattgggagataccctgctggtgttggagcagcacaaaatgatgaggctaacttaagtagtgacaagaatgatcctcttataccatatggccaaagaacagctgtccatccccaagtctatgggggatcagatgaagtgtggagtttggttggttggtcagtgaatttttggtcagtgaatacatactacatatggcatagttaagtacaattgcttttctttttttttttgagatgaagtctcgctgtgtcacccagtctggagtgcagtggcacaa

SEQ ID NO: 339570 - DNA, 1000 bp, Homo Sapiens
ttttatgttttaaaaacaggcagtctttggtgacgcaaaggcagagatatttttgttacctcctgcctatttcgctctgtctcataaagtgaatattattggcactgtcagaaagttctaaatactgctcaacagacaaaacaaaatacccatcgtaaccttgtacccgcccagtgctcaaaagctgctgcttttccccttctgtccatgccctaatcccctcttccccctcttgcagccttctttgttccttagtccaggcctgggccactgcgcgctgtctggcaatctccaacacgtgattcttttcctcttcgacagttgtcccataccggatgttgaagcacagggctccatgctggagctgaatatctgcaaaccgtctagtcctcccattcaacagagaagtcatctgggacacagtgacattgacaccattctccagaatccgcctccccccagtgttaccgatgagcaccaggtcttcctccagagacccaagcttaatgaagtagtgagtgtccctcccctctatggtaaaatgtaggttttccaggtaatgggcattattgagaatggcagcaagccgcctgctatcttcattggctactcctataatatcagctgttactatgccatccttgatggcaaattttatacctttcccaaaaacagaagggacagcagcaaaccttggttgcttccctccttcaaggcaccgtccatcattgtatcggggagtcataggtagttggtccaaggaaatgaaattcctgagctgtttctggagttcacactgaatgcccaggatagtctttccaggatcccactcttgagtttttgtctgaagccgtagaagctcgtaagttaattctaaattttctaattcaggtttgggaaatccaggtagtacattgtgtaattggaaaccaaatagctccaaccaacttctgatgtctgtggtatactttgcaacatcttgaattttgccaactgggta

SEQ ID NO: 339571 - DNA, 1000 bp, Homo Sapiens; identical to SEQ ID NO: 159127

SEQ ID NO: 339572 - DNA, 1000 bp, Homo Sapiens; identical to SEQ ID NO: 159128

SEQ ID NO: 339573 - DNA, 1000 bp, Homo Sapiens; identical to SEQ ID NO: 159129

SEQ ID NO: 339574 - DNA, 1000 bp, Homo Sapiens
ttttttttttttttttttataatgatttatatttattcaagtgacataagcatttatttcaacttcattaaaagcaaatcaaatgtatactcatttttataaattaatctagcaagatattacaatgactactagattaaaagtatttgtcaaacagcctggttatgaaataggacttctatattgaattaacatatttaggcaatgtagtagcttttttaggccatttagtgcttcctaatacattagagccatatctgaataaatgtttccaacagtgtgctgaaagtactgatctaccactcagttatacattttaaactagggacttcctcccccttgtaagtgtggctaaatttttattagttgaattctaagttattaaacatattttaattatattcatccccaaactgcattgattcaaaaacacattttatgtaataatacattttacacaataaaatttaatttattaaagaaactcattttatgagtataattaactcaaaaagtttcttaaagcttttatctccaaaattaaaaaaaaatattgtatagacagaagtcttctgggcttggactcatgttatagtggttccctctcatccattaaaagacatttttttttaatttgagggttcctataaagggtacacttgcttcggtgacatgtatatttttctctttgtaggactattcttatttcctcagttatatacagagaataataattagataaagtatggtgataaaaactagatttcacacattagcatttctttcatgagacatgaatactgacatcagttctctgcgtacattaagaagctcctcttctagcatgtccttaagaagcctgtcttgcagcactttcatatcttctttcatcaaacacatctcggatgtaaaaacagtttcttcactatcagtattacagaagacacttttagccaatgaagttttcaaaagatgaagcctctgttgttcgcttttttga

SEQ ID NO: 339575 - DNA, 1000 bp, Homo Sapiens
tttttttttttattaggaaattgtagataattttaatgaagtcaacgtcaagaatataatctggttgtaataccaatacaatgtgttctaaaataatttttctattgagttaaatattcatctgtagatcctataacagcatgttcatattcacaaaatctgaatgaaaagtaaacacaacttggcatttctgacgcagggtaacacaaagttcacttcggaggggactgagatttttgtttaattttgcttttgaaaccaagcacagttatagtcaaaatgagggacattattcagaatgaggttatgtatttatttaacaaaatactgcttctctgaagtacatttcattagggagagtgacagtaatgctaaaaaaaagaacatgaaaatgcacacagcatttctgaaaggttataataatttatttaatttttttttgagacagagtctcactctgtcacccaggctggagtgcagtggctcctgtgatcttggctcactgcaacctccacctcctgggttcaagcaattctcgtgcctcagcctctcaagtagctgggattccaggcatgcaccccacacctggctatttttttttgtatttaaatttattttaatttttttttgaggcagagtcttgctctgttgcccaggctggagtgcagtggcatgatctcagctcactgcaacctccatctcccaggctcaagcaattctcctgccttggcccccagagtagctgggattataagcacctgccaccatgcccaggtaatttttgcatgtttagtagagatggggtttcaccatgttggccaggctggtctcaaactcttgacctcaggtgatttgcccgccttggcctctgaaaagtgctgggattacaggcgtgagcaaccgcgcccagccctatttttttgtattttagtagagacagcgtttcaccacgttggccaggctggtctcgaactcctggcctcaagcaatccacccgcct

SEQ ID NO: 339576 - DNA, 1000 bp, Homo Sapiens
ttatggtctaagagcaaagtcaggtgttctattttatatccactatatttagtaagtgactcaagtttcattctgctttgttatctcagatacatggtttacattataggttaaaattctttcatagaaaggctttctgaagactttatgttaaattaaaaaaaatcactttacttgaaagtcaacaaaaaagttatttattaaacttatatgtctgaaaggagttttaatcaatgaaaattaggagtcggattagaaaacatcaaaaggatggaagacagacactgtaatttctgtttgatgtagtctggtaatttttcattttctccatacctagttgtttgaccatttggtgaggtataactgatagaagacactcctgcctgcacaaccaactgggacccatcattaaactgaacccacacagctccactagttaactgtgtagcccaaccaacatttttcacaaaaacagatttcaaaagttgtgctgatttaggaagacaatcttttagactattagaagagatgtctgttccagaagctgtagttgtaagaccaagtccttcatttgtaaccatagagggattaaggattggtgcctgtgttggagaagcatcactatgcatgaccattctgttgaaagatgctctatctctcgttgggtaatttgaatccacagaaggaggaggtgataaggccttaggtgaactagtactaccaggttttcttcctatgattattgggaaaaagggagcactcctagttttcctttcctcttctgaaattatggattccagtgctaaacaaatacgatgaccctcattagcatggtccatatacatttttatctcctctttcaagctattaacttcactttcactttttaaagtgtaagacttccctgtcttttcaatcacctgaatgaaatcttctgttttgtgtatttttaccccatcataaaaccaaacctcaaaatcagcaccaggagaattctcca

SEQ ID NO: 339577 - DNA, 524 bp, Homo Sapiens
tttttttttttttttttggtgtttcaattgttttattacaatccaaaagttggggcgggggttcctgtgccaccacacaccatccaggatgagagggtcagaagtcaaaggtccaagctgcaggagggtcagcccctgcctggcatgttgatgtagactttgccatcttcttgggcggggctgcggcgtgggcgtgcgcacaggaacaccgcccccacgatgagcagcgatgccaccgcatcagcagccacgaggcctgccaggagcggcagagagagggacccacatccggaacaagagcctgaagtgccagggtaaaaggcagggagtgatgatctctctcctggagtcgtctgagctgcagccactgggagcaaaagcaggaagaggatgtgacccagatggatcatggtggactggggtctggcaggggtctggcagaggactgtggtccagagaagtccagaggaactgtgggggagcagagaagtagcaatagcggatgtcaccctgctggtgtcaag

SEQ ID NO: 339578 - DNA, 1000 bp, Homo Sapiens
ttttttttttttttttttttttttttttttggaaagtaatactttttagtaattaatcaataaaatagcactgggataaaatgaagagaatttcttgtttcagcttcttatcagtaagcctgttcctcatttgtagataatgaggataaaggtatcacagccaaatatgggaaactgctctttatttagacctttgggacaaaattaactttggtcacatattacttaaaaaaaaatccagttttacatatttctaaatagatagaactaaatgatcagagaatttcttctgtaaaaattggccaaattttatcaaaaatctaacatacgatacaatccaaattataaaaagactacttgggatcataatattccaaatgtatgacagttataactccatcttaacaagtgtgaaaagtacttgctctcatgttgctttggtccaaaagagtagagctaactcagtaacaggaaactaagtacccaatcttttgccaaaattaatttagattgtgactggcagcagaaatatccataatgaacagctctactataacaaagaataattaaagaatacttttcgtgaacatatcacagtatcaaatacatttttataagagaaaaatatgaaggaaatgataaaatagctatcacaaacaaagagaagcatttcccccataaggtgaattagagggttgatgatgctaatatgaaaggaagttgagtactgtatttatttcttattttatacaactcttactctttacaaaaatggttatagtcatgcccataaaagtgtaacccatggcatttgaaagcaaacactctttgtaattatttaaaagggcctttttaaaaattataatacaaaggtctgtgctctataagcagtcctccactgtgcattgtaacaataaggcttacttttaatacaaagactaagcgtttgggagttatgaaccactggatttaacaaacatcattttataattgctttttg

SEQ ID NO: 339579 - DNA, 1000 bp, Homo Sapiens
cataattcggaaatttattttaagcttttcagttaagcggaaagtggggtgggcacatttgtttcttgtttttgttgcacctgctaagtcaaataacaagtgaaagtaaacctaaagttagaaaccaaggtgaaatgaatgatccaggaagggataccatctgtcaaaggaaaaaataaaaataaagaaaaaaaagaggcaaagacttggaaagagactaagaaaatgtacaaatattagttaaaaaataaggaatgcttttaattcattaatgtttcctctatttatgaattgccatggtttagctaaggtcaatgacaaggagggcccttgtgttaaagagggaaaattctttattctagaagatattgggagtcatagatttttctgtgctgttattccagtgtctacaccagactgcagaaccatgattctccctcgcaattatgctcctattaataaggtcttcacttctagccttacagcaagtgtgtggcatggtgcagagccttggagctcagggctgcacacctgaagttaccctttagtaggggtcccctagagtgaatgacagttttgtggctgaaacctacacaaagaggaagaggaatgaggcaggaagacccgtacctaaccataccctctttggactgcagaaaactgatggcaacatctcggggagtggctgcccaccaaagaggaccctgagaaagaaaagagcataacctgggaaatgggctacatgggggcaagggacatggtgagcgggcaaagttgagatggtgttttccttgagtgaatgtctttcaaaactaacaacatactgtgtagttgtctaacatgctgatggaggaacactgctgggccctgaaatcctagctttgaatccattttttccctttagtattgtgagtagagggagaaaatgaccttatgttttcccccacgacacaagtcaccgtcattatggctttcatatcaagtatctgtttccctttgt

SEQ ID NO: 339580 - DNA, 1000 bp, Homo Sapiens
ttttttttttttttttttttttttttttttaacatctgagtatattttattcgtaagaaaaaaaggaagaaataaccacaaatattgcttaagaaaataaattcagctgacttggctacaagagacggagcttgttactcagggtcttcctccggtgggaccacttccattagcatctgaaggtgcatggtaatcggctttgagattttctgagcccatccaaacttgtagtggacaaacaggaagtaaaataaaaggccgcttaatataaacagcacacagtagaggtactcccaggtgggcttgctgatgattggagccagaaccaaaaacacagagatgagtgtcatcaagacgggaatgactacgggcaccttgataggcctttccagctctttccttgtaaatctcatcacgatgagtcctagaatcgtcaggccataaaacagccatgcggcaaagctgaaataattgactaacgagtttatgtcaccagggatgatataaatcgttgctatgataccataaaagatgatggcgggggctggagtgaggcgcctgacgctgatgtaagaaagcactttgagcatgtgaccctcccggcccgccacgtaaatgagtctgcccgctgtgaagcaggtcccgttagcagcaccgatggttgaaaatgccacaaaaagtggaacgatccaagaagcaggatagagaacacggtcaccaaatgtcacagccaccgcctgggactgcaggagttcggtggcagtcatcacggtgaagtaggacacgttcatgaggatgtagcacgccgtcaccagggggatcccgatgataatggccaaaggcaggtttctgtaagggtttctaagttcttctgtgatgtaattgagttgattccatccatcataggcccagagtccattgtaaaacgccaggctgatggctcccacagacagctgggcgccctcgaaagaattatcaaaattctttgtgtttccttggg

SEQ ID NO: 339581 - DNA, 1000 bp, Homo Sapiens
ttttctttttttgttttgttttgttgtttttatatatatttatatttatatatatatgtatatatatataagggtacatcaactcatttaaaaaacggaaataacactcttccccaatttcatgcccttgatcttctcttcttagtactctgtagtggtcactgtgaagtgattagcacacctttgggtctagagtgtattctgaagagcagtgacttgaatgttaagacagttagacccgcccccacccctgcacagagtttacacatcatgccgccattagaaaggtagaggtggggaatgaggtgggacaaggaagagattcagggctctgactggtggggccctcctatgaacaagtgttcttctcatcttttttttttttttttttttttcccccgaatggcaatgctggcatttgttgcactgttctctgaaggccgacgtggcccagttgatgctaggcagaacccgagaaagaatccggtgctccttgtcccatcggatagatttgtccaagcaccccaaggaaatgttaaaagcaaagtaaaattttaaaaaaggaaataaaataaaaacccattctaaaactaaactaatgaagcaaaaaaagggttttctatctacacatcagtctcttctttaaaaaaaatgtaaatttacaaattccaacgacatataaaacaaagtcaaaaaatgtaatggtaaaagacatggtaaaacaggaggacactgatgctacaaagaaattccaaaaaacatatgtacaagaccctgtttttcctcgtgttctagagattctaatgcatgttttttaacagcagcagtcgaggatttagttccaggcactggactgcagattccactcaacctcccagggacgggatgtcccttgcttttctgtcaccatatcacactggatatactggtctcccttggcaacagcggcaggatggcactgtttgtgtgggcctcatctggattctgctccctgctcgat

SEQ ID NO: 339582 - DNA, 1000 bp, Homo Sapiens
ttttttttttttttttttggaatggtagatgctcatttatgtaaaatcataataaatgttacacaaactgttagaataaaaaaataccttttttgagggggaggaggtccccagcctgctgctgggtagtgagagggggttggcaccattagggcgcagggggcgggagctccgccacagcccgtggtgggcactgaggtctgtcggtcggtctgtgcatcctggcgcagtcagcggcgggcaacccgctgatggcctcgggagggggcgccgtggctgggcggagagcacgagcggcagcactgggtgcggatggtgggcagctggcagcggcccagtaggcgcagcgtctcgcagaacccgaaggacaggcggtcccgctcacagcggggaggctcgacgggctcacaatcctcggtgccacacggccgggagctctcaggccaggcctcgtggccacactggtcactgtcttcctcgggcagccctgtctgggtgttgacacacttgaccaggcgccgctggacaccaccaccacaggggcctgagcactggccccagggccccaccacccactgcgtgcaggggtgggtgttgcagggccgggtggtgttgggtctcagcgcctcctcgcagaggcctggctccgggcaggtcactagacgctgctgctcaccaccgccacaggcctcggagcactccctccaggaagatgtgtaccagctgaggcagggctgggccccgcagggccggtgcgcaggcggcttggcaggcccgggctgacaatggaagggccgcagtggccggaggtcccgtgtgtccacacactgcacgtcccgcactgaggaacctccgccgcagctgcgggagcacttactccagttgcctgagtgccaggtggcacagggccgcaggtggcagcggcgggcaggctggggccggccagcgggggcgcagtcctcatcccggccggagctacagcgcaccggcctccagaccg

SEQ ID NO: 339583 - DNA, 1000 bp, Homo Sapiens
ttttttttttttttttgggaaagctcttatttgttttaatatttaaattgtagcaatacaataactagaaaaaggtcagtgcctctgtagctttaaaccccatcaattttcatttgtttttcaaaataaagatgcaattaaatctatgcttctgcaacaataatgcaataaagtatcctttcctgaataaaggaattgaggtttatcccagtagaagctttaaataaggtagactgttgccaactatgtatccatcctgtatgtttgatatataaaattatccggaaagcttagattgtcttgtaaatctaattcggctaacactgcatataagcagcaatggaaatgaacagaagtgcactcaatataaaacacttttcaaaactactccaaaaaacaaatgacaaaagtggttaagaacaactgagcgtctgttgtgtgtaccagatgtaaaagatggaccccgtggttacttgcacggtttgaattaatgtgaaggtaaaattaagacttagtccacttccatctctccagaggatttagtatgctgtgagctgtcttttgttgaatctgatttagtttcagttccactctgtccatccattgggccattgtgttcactattagcttttggtttgtcttcaggaacttctgcttttggtttgggcttgtaaatgatggggttacagaaattatccagttcctttgactttgctactatttctgaaacttttaccacaggatcttgagtgagacttagtttgttctgtgcattcatcttactattcagccaactcatggcatcactgatacatttttcaaccttttccatttcagtaggatccagatgatcatatctttcatccttgtttctataagcttctatcactttcatgacaagttggatcttttttcccaagtcatttaaggcttttggtctctcttcatgctccatgtacttcatttgaataggctggccgtatttctttagttcttgaag

SEQ ID NO: 339584 - DNA, 1000 bp, Homo Sapiens
ttttttttttttttttttttttttttttttttttgggtataaaaatttattatacataaagaatattaccactaacaaatgcagacaggctaggacatggtactgggtggaggacggctagctctttggaaagtgaaaggtttgggtggcgtgggcctcatgccacactgattggtcagtagacagggggcacatgccaaacaccacagggcatcagatgctgctctgtgtgctcacaagtgttccctgtcttatctgggccttcgaagggagcacacccagaagcgagcaactgaagcgaaggggcttcctaaggtgccccttccaggcttgtctctgaagtcacagcaacactgttttaagcagtatgtttaattggatgatttccacaaactatccacgaagtttctaaccatcacaattcagtgaagtacaaaacactgagttacaggctgtgggaagagaaggcagcaccaatggtggcaccttctaatactggttgttctaggggcagggagagggaaaggtctttttttaaaccaagcccctcatttcaatgtacaaaagaattactctgatcgatattaaatcgtattgaaaacaaaatggactaaaaagcaaatactactctatgttggggtggaagtgggaggaaagaatgagtccttcgaagcaggaagggagatagcaggggaaaggttctgtgcctgtgaccttgggcggtcactcacgttgctccatttttactttcggtggtctcaggaaggtccgatttttcttctctttcttccccttcgtattggcttggaagtttcgccagctgtccacacgaccatctcgactttcctcaaagtttttctgccactctctttcccgtttggctttttcttgagcttcaatctcttcttccctttgtcgtttcctttcatgcatctctttggcttctctctctttccttttaatttccagctctgcaaagagtttcattgtctgtttatat

SEQ ID NO: 339585 - DNA, 1000 bp, Homo Sapiens
ttttttttttttttttttttttttctcacattcttcagcgagaactctggcgtctttttatcttttaactctgaatcatccacaagttaatgctccacactacttcaattataggatgaaaacagctttgctttcccagtctccatttttctttgcttattttcttcatgtttatctgagtacatggacccagaacattcactgtattatcatgaataattcagcatcttacaagtcactctccaagcaggacagattaaggcagcccggtgtggacataatcacatctatggctacaaggaacacgcaacagaaaatcagattccaaccaagcaaaaggctgcttgtttttttttttctttgaaacacagtctcgctctgtcacccaggctggagtgtggtacgcgatttcagctcactgcaacctccgcctcccaggttcaagtgattctcccacctcagcctcccaaatagctgggactacaggtgcacaccaccacacctggctaattttttgtatttttagtagagatggggtttcaccttgttggccaggctggtctcgaactattgacctcaggtgatctgcccgccttggcctccctaagtgctgggattataggcgtgagccaccgtgcctggcctgcttggttaactttattcttccaactttaccagctgcattctcagtcatttaaaggatataggaatggaggccaaaacagaccatttggaggtcagggatgccatgttttctattggggcaatttcatggggcactgtgccttgtgaatgacagtgagtggaagacaaaggattctccatattattccaggatgggagcccattcgactgtaacactgtgcactttgaaagagctgaaactattccctaataccgggactcagctggcaacccaaggaagcactgttcatctgccacccaggcttggtgttaggacaggagaaagcaggcctgtgggctggaggccgtcacaggg

SEQ ID NO: 339586 - DNA, 1000 bp, Homo Sapiens
ttttttttttttttttttttttttttttattcaacaaaagccttttattcattcaaaaattaaccattgggtttattccgcagatattaaaaaaaaaaaaaaaaagaggggggcaaggcttcccatcacagtgcccttaagttaattcacttgctatccagggatggcctagcagaggggtgtctgggaaacgctgccagaaatgtggtggcccagggcctctgaggactcacagccccctcctcgcctccccgctccagcctccctccggaccacccgtccggtggggttgcagcccccaggtgcgttggcggcttaccaccaccagggggcgcgccgcgcttccttagctcccttaaaattaaatgctgaaaccgcgctgggaacagggtgactttccgcctggcgggtgggcaatggaggctttttccagagacagcctgcctctccaggaagggatcccaggcatcccgacctccccaccaaccccctccgaaaaaacacaaagttcctgaaaccccaggtgcacttgtctaggaaacgggctgtcaaactgaaaagcatttcaggggaggagatgtcagtacagagggtgacacgtacgcttgccttgatgttattttaaacgtggcctgcttagatcatggaaaatcggaacattctcctaagtcaccatcaacacaaagtgaggagcagacgctacgaggaagaggacaggccgtggccgactggccgcctggggctggtgcctgccctggccccagtgcgaggctctgcagagggactatgggcgtgccctctgcatcagagcatctgaagcgagccgcattgggtggcaaacgccgctgtggagaggcgcacgggctgctcaggaggcacctggctcaggattctgcggcatcactgcagccagaggcctggggagaggagggggcagagatcggtccctgccaggcaaactctagtgaaaatggccagtgtccagcaccccgccagggcc

SEQ ID NO: 339587 - DNA, 1000 bp, Homo Sapiens
tttttttttttttttgagctacaacacaaatgaatgggccattttattgatttttacctcctaatagtggatacaggttgctgtggtttccagcaggatctcagatgcaaagggaagtgaagaaaacagatgaatccctagggtaccccgccatggaaccaaacaccacgtcaactggaactctccttgcaaacgaaggctgaagatcaagaatgacattctcacaccacagcacagcttaaatacttctttgacaaaaataataataaattatatttgactcagaaaataaattctgttcagcagagtgacaggagggtccattcattgcattgcacgaggggctctacggaggggtgaggatgggtgcaggatgccacagtgacaagggacatggggtgcgggcccagcagcacaggctgaagttagctgacgcatgcttttggcttttatcccacgggcgggtagtggccggacccctggctgtggcctgtcccaagtgagactgcaactgtccccttcctcctcaagtccgccttgtcttctgtttcttggcttgtctctttgcatcttctgggccgctattgtcagaggctgcctggccgagcgcgcggactccctgtagccggcttgtcaactgcagcagcaaaggaatgagcttgtcatggttgtaaccggccagcagaaccagcagcgtcaatggcagggcaatgtaggatccttgtgcgatgtcctgttcaggcagcttcctcgtgggattaaaaatcaaggtgatgtgtttatggtagcccactgcggtgaaagaaacttgaggcaagatgtagtcatactgggatctggggagtgtggagtccagaagcacaacatagttctcgccgtctctgagcagtggggggaaatggaagaacagggactggccaagggaaactgtctggattggattgtcgaggttttcgcttttgtaaagcttgacccataatgtaggaaggtattcagagga

SEQ ID NO: 339588 - DNA, 1000 bp, Homo Sapiens; identical to SEQ ID NO: 246488

SEQ ID NO: 339589 - DNA, 1000 bp, Homo Sapiens
tttttttttttttttttttttttttatattgataaacatttttattctaatattatagtaataattcaagtacaattttctttgaaaagtcaactctgttaaaacaaaacttgttaaatatctttcatcaaacataagcatattcttttcaatcccccacagcagtcagagccatgtagcagagttaagattttttttaagcctactacattttgttattgctaaaaaatctgaattagttgtcaaggtttcagaggcagtcattaattaacttttgaaagctctatcagatactctgacataaaatcatgaatccaggtatcggtgtctggcaacgatgtgtccactaagtagaccactactttccggtcccaagggttagcattttcaatgactgtctgcaccagtgccaccagaggtttcttctccacatgatttcgaaacaccatagaagcctcctcagaccactggttgcacttcactcctgcaagttgagctgtgactgcttggaagggcagctttcggaacatgtccactaggggctgtacttttcttatgttgactaattcgtgtttgccataatccagctcatacacagataccagtccattggtcaggattccttttaaaagcaccctgtgccacttattttccacttttgcagcatacacttggtctttctccactgctatgtggcgctcttcagacacgctgtaatatagaatcatctcttccatcagaacttccaacttatgtatctcctgccaaggctggatgacgaagtagcctgggtgacaggccacaggcacatacacatccatgtgttcccctggctttgataagtggacaggaggtggcagttcctctgtggagaaagcgctcgtatggtccaccatggactttttgatgacatctgtgaggttctttctgaaattctctccagtgttgcccgacatgggcatgttgccatttttgctgttgggagagtcagctccactgg

SEQ ID NO: 339590 - DNA, 1000 bp, Homo Sapiens
ttttttttttttttttttgtttttgtttttttgcaaaactaattctttcactttcctgtcataaaatcacctctgaaaacacaacttctttacaaaaaagtcacgaatgacacgaactctcaggaaaacacatttctatggtctctggaaacacctgtaactggcacccaggtggtcactcacctgggggagggggtcagggggaaatcacctccaaggacagaggagaaataccagcccttatttgggcgaaaagccaattggcacttggacggccacaaagccaacacacagggcagggtagggaggggccgaggagtatcagcccccgccccaaccctgcgagggtccccgttctacatcccggggaggggagggctagggccacgctgtgggccctggcagggagattgggaaggaaggcagcctcccattcttaggaccaaaggcgctagggttctgatcggcctcctgccaacgtgcttctgagggaggggcccatggcagcacagccaggaagccagctccagccacgcctggaacacgccacccacgcacaatggagacccgggaagtggcccagggctggccagcggggccccggtcccaattctgggaccaacaccctcattctcctggagaacacagaccctctggtctcccctttgcctgcctgccctcccagggcctggcctaaggctggggctgtggcctctgccactggcacgggtgcctcagctcccaggcagcagagggaaacagaagctgcccaggacacgggagcctcctttgcttcaggcaggctgggctgtgagaaagcctccgtggtcagaagcaaaagaggggctgggacaagccgggaggccctcgggaatggattcttcagcatcctccccaaacaccgggaggaagagggagcttggaatggggtctccctctctatctcggtccccaccatgatgtgaagtgaaggtccgacaggttgggctgaccaccctga

SEQ ID NO: 339591 - DNA, 1000 bp, Homo Sapiens
tcagagtaaacagcatgtttattttgaacattcaagtttacaaaaacaaaaaggtaacaaaaccatgacacagatcacacacacatacacacacacacacacgcacacacacgcacacatgttgcagctcatgtcaatttatgtacaaaacagggagaggagaaaggggcaaggctggggaggggttgtcagtagggtgcactaatgtcacagtgtcagacaacttgacatgctcactcacactcagcctgggcccatgtgagccccttccccacccaggggtcgggggtcagggtgggaggtgggggtctggggtggcaggcagctggaataaaggggtgaagagagtagtcccttctctgggagggagcccctttccaagtttactcaggccaagggtgctgggacacacaaaggaggggggactcagtgctggggagaggctgctgcgtcctagagagggctgaatgcagtcagaaggctgggctcaagtctcccgtgtccagctgggtggccttgagggtcgctcccctccccgggcttcagcttcctcatctgtaaaatgagggctttggcctcttctcagagcccttcctgtccaaatctgtggtcccaggtgatgcaaagtggtggcaaggggattggtccccttgggatgttggtgggggcaccacatgccacaagatgggaagatctggcagataacagctgggaagcaactggtgcagggcttggccccaagcaagagttggagaagcagcaatttccctccccttccctgcccaggactcgggagatgctcagcttccttttcttttttggctctcctgtgaactctagctgagctaaagaagggctgaagctctggcccatggtgggagggacacattccctgaagcagctgagccccctggcacggcttcaccaaggggaccctggccctggggctggcccaccccctgcctctgttccttcacttcaagccctgtgggctgggaaa

SEQ ID NO: 339592 - DNA, 1000 bp, Homo Sapiens; identical to SEQ ID NO: 159135

SEQ ID NO: 339593 - DNA, 1000 bp, Homo Sapiens
ttttttttttttttttttagtatctatactttattcagctattgggaagattaaaaagaaaaatatacacattgggtacatagtaaacactcaatggtcagtaacctgtcttttgaagctttaccttcaaggtccaagttaaagtatcaattcttcaaatacaattttttatattggtccagccaaaattaatctttcccttattcatacactggtggcatgtttttagagctctattatagaaatcagtgcctttaagttgttcatatataggtctcttctaataaatttgatggcagggattaggtttttagtttgcatcctgtacaagatctttaccacaacaggttcaaatcatgtgttcataatatagttcttatgttctggattttttctttttaaaaagtaacagaaaacttgttaaatttgtccacctaaaattaataggctaaaactgaaagcatgaagtatttaccaaagtgaaatctcattagtgtaataatctaccactactctgttaaagaacagatttttgttgaagtatatattttcatgcaaataatctgttctcatttacatgaaacacgacagatgaaatctttcaataaatctaacttaaactatgcaatatccgtaagtataaacattttatttcaatttaaggtagtagcaatacaaaataagttttgataattataaagtagagacaatgaaaaatcccaccctatttttagaattttaaaatattgagcatcattctgtcctgatgggtttttatgtaaagtgggaatttacatgacaccagtatcttggcaattcactttttttgaatgctacatatcccaatcaccatatattaaattctctattttcttcaaagtgctattgccacaagagactgaacgatacagcaatttaaaaaaagaccacacaaactaaattgtaatgtcttcaatatctcaattactgttttttaaaaataaaaactgcagtagtgaat

SEQ ID NO: 339594 - DNA, 1000 bp, Homo Sapiens
tttttttttttttttttttttttcttctttggagacagagtctcgctctatcacccaggctggagtgcagtggcaccatcagctcactgcaacctccacttcctgggttcaagcgattctcctgcctcagcctcctaagtagctgggattacaggcgcgtgccaccacacccagctaattcttctatttttggtagagatggggtttcaccatgttggccaggctggtctcaaactcctgaactcaagtgatcttcccgcctcagcctcccaaagtgctgggattacaggtgtgagccatcgtgcccggctgtcccaggtaacttctgacatttgctgacccctcactatgtgctcattatcaccgcagaaccccatgtggttgatcctttattagacccattttacagattaggaaactgagatgagcagaggtgaagtcagccctgacaggtcacaggagcagcaggtggcagagccagagttgggctcaagctagtgccaaatgtgccccattggccactgaccctaaagatgtgtgacccagagggtcctgaggagccacgttaacccatggccggtgtcatcctcttccggtttaggactagtggattttgggcactggagccacctctttggcaaacagcttgagggagaaatcaagggctggggccgcctgggtcagcatccccatggagatgacgtctatgtgcggcccgcagaactgggggaggttgtccagggtgatgcccccactggcttccacagccacactcgggaactgggccttcagcacggtggccgtggggtgcagctcctctggcttgaagttgtccagcaggacaaggtcggcaccagcctcagctgcctgcacggcctcctgcaggctgctgcattccacttccaccttcagagcgaagtcagccgcctgtctggccgcccgcaccgccttctccacgccaccggcggccaccacatggttatccttcaccatcaccagc

SEQ ID NO: 339595 - DNA, 1000 bp, Homo Sapiens; identical to SEQ ID NO: 159136

SEQ ID NO: 339596 - DNA, 1000 bp, Homo Sapiens
tttttttttttttttaaagtctttagggcaaagaacgattaaaaatataatcaaatttatttttatttttctacagcaaaataaaaacattattttaaaaagcaatattctacattaaatacattaagatattgacaatttttataatacaatcatttaaacagtaaacatgataaattgtgaaaatataaaaactttacacacttctcttaaaaagcattcaacgtaatcaattttacaaaattatcaatttaaaaagtgttagatatgcttctattttgttccattattaaggcaatgatagcatatcagatcttaaaaaagaaatggtgaattagggcctaagacatcctatattgcctaaaaacgaacatttcagagactttcttaggcactgagttcaaaaccagtgaaggttgccttctccctagcaccactacccctcatggttgtccgaatcaggagacttctcctggctacccttagggagagtcttctacacctattatttcctagtttctaggagaaagggtttcagaaagaattttgacatttaaattctatgccagtactgaaactctcccaaagattgaggcattctgcatttgaattttatacagaaagtcatgaatctaattccaaaagaaaagagtgcacttcatttggtcacttaatttcataccacttggcgaggtaggataactttcttctttgacaactgtctcggactatataaatggtgattataccggaaagggttctaatgccttttccacattcttccagttgtgaaaattctctctgtaccattcaattgttttctttattccttctttccaaggcactttaggtctccatcctaagccatgtattttttctgacttcattgggtatctcatgtcattggtgggtctatcattaacataatcaacccaattttccatttcagactctgaattggtctctttgatcagttgtattagttctttggcaagctgga

SEQ ID NO: 339597 - DNA, 1000 bp, Homo Sapiens; identical to SEQ ID NO: 159138

SEQ ID NO: 339598 - DNA, 1000 bp, Homo Sapiens
ttttttttttttttttttggtacccacagactttaattattgatattccccctcaccgccctcagggatcgggagaagtcacacgaccatagggagcttggacttggtggtcgtcacggtgctggcagacgagggtctttccaggaaccccttgctagaatcagccctcatacaagtgtgctcagagatcccaggagcgatggcatcctcccgaaggtcactacccccatatgtctccttgggcttcttccccctctctttctggaacctgaccaggcagaacgcagcaactgacagcaacagcacgcccaggagcaccccaatcagagctccggccactcggccttgggagggttcggtcacagagagggtcagctcacaggatgcactgcccatctggttggtggccacacagcggtaggtgcccgaggaggtcagggagaggttggtgagaatgagctggccagacacctcatcttgaaccatgctgccaggagaaggtgtaggaaaagttccaagacgcacccagttgtacactggcttaggagccccctcggaagagctgcatctcagtgcagtagagcctcccacagaggtttgtccactctgactgcataagggattactggggggaaccagcacagtaaggttgattagccccaacccattggtgtagaaatctggtgggttgttgacttggcagaggtaggttccagtatctgaggggtggacgtcagtcagtttcagtgtggccacccccactgtgggggggttctgaagcaggctgacccgctttgacttagaaccagttggatacagatggccattggtgaagtacaggattggatgggactcagagatgggtttcccaggctgcacaaagctccactccagggcgaagctgtctcccaccgacgtgctgtaggtgcaggtcagctcggctgtcttccccaggggcgtgctcagcggctctgtgggtaccttcacctccacggccagc

SEQ ID NO: 339599 - DNA, 1000 bp, Homo Sapiens
tttttttttttttttttttttggtttaaataatccatttgtattgggtcttagtaagaatactactactagtaactattatcaagcaactactgtgtcatgtacttttcacacattcttttaattaaaaactctccactaacccttacagttcagtattatccttgttttacagatgaagaaaagccaaagagaagttatataactggcaagtttctctggctccccgcctgcaccactgctcaccagattgcatgaagagggaggcagctgtaacacctcatcccgttgatctccagggaactcagatacttgtttccacgtccaggaaaccgcaaactaagctctttgaagcatcagcaaaccttgctaagtgacacgtgaatgccatttggatacatattctaatctttcaagtagaaaggacagtcagactgcctcatctgtaacatccaagggatctgagaacagacattcagtccaggtgttgaacatcaacatcattataggaaaatggtcaaagagaacaatggcacacgttaagagaacatattaatagggcaagatgtatagtaaactaagttttcaagaagtattttatcatttttatgctctctactaaaagctgaccactgtagagtggatacacattgctacatacagcaactctacagtggacagcttttagtagtaagcataaaaatggctttatgttctcatgttctctgtgtagccataccacacgttgctacaccaggaacatgagtacatataaccattacatatacatacctgtatgtatgtatattagttacatatacatatgtacagtatatacatgtatatatattgaacccttggaagggatcagcaaagaggaggactcaataaaaaaagactagaatagaactagaagagagagaagcccagggagagcttcaagaagagtgctcaacagggccaaatgcgcagaggtcaaatagaaggttaagaagtgccca

SEQ ID NO: 339600 - DNA, 1000 bp, Homo Sapiens
tttttttttttttttttttttttttttttttttttttttttaaaaactaataaatttttaattagaattttttcctttttttaacaggacaagtaacagattacatcaaacttcagaacttctcaaatacctagttattatacacattcccatctgtcttgcagggagggatcttggtcggcttaacagtttcaggtaaaataagctgcataatagtatatattacaataataaatgtacaatgtttacatgaaatatgttttagaagcaagaaaaagatgcatctgcatcaaaggcgaccttttaaaatgccacaactattttttacattcactcttgcaacaggttacaagatgggggtcactaagctcagataaatcactatgatgcacataaaatacaggaagactggttactttatatattatatatatttatattttcacacgttagcatctgagacataaactgagaatttaaaatttattctcttcagataacaaatcattttttattcttcataaacaaggtgcccacaaaagcacacaggtaaggcacaatagggctttctgttacagaatagtgtgcatcatgtttacttaaccagaaaacgtgcattatctgtgcaagttcatgctgcaaacccaacgcatacaataaaacaaaaaggaaactgagctttaaatacaaccaaaatttgtacaattccagctgtttcacatattcatttggactgacaattatatatcaacaggttatttttaaaaagccaattgtagattacaagtaaaatttactcagcaactatttttatctgaaatcataaacagtaataaagtaagtttactgaaacaaattaaatactgaggcacaaagcaacagtcaatcgtgcatttactatattgcaaactttcatgacccaaaattgcaagtataatttgtcaaatacacattttgctgcaacaatgtgccctgctttaaacttgacatataacagagg

SEQ ID NO: 339601 - DNA, 1000 bp, Homo Sapiens
aattttaacattttattgatactatctggaggggatatcatccaactgacacaaatccaagaaaaaaaaaagggaatatgattgtgatgcagtgaaggagggaagtgacatgaaatttccctagatcctcacagaaataaagaccacgatagttatgaccgatttatatgtttacagactactgtcctctgttacctgtgtatgtagataaaacttcaagcattaaaaaggcacattggaaataagcttaattaatagtagtactctcaatagaagacactagacacgcactttacttataggtcatgttgatgtctatgataaacagatgttttgcctctgacagcagaacttcctttcatttttctcattcgttttctttggtgggttcatttttttgaatcaaccacacttcattatttctattaagcaatttgacaggactgttgtagcctgcagtgtagtaaaccttctcatcgaaaacttttccatcttcccttaaaatgcttgctaatgtcaaaagttgttcttgattcttttgggcactagaaaatccatcgaaagaccgtacaaacacagtcatttcggctctatcttcaatgaagacatctgactctaaaggcctgggtggatcaaattgctgttcagagggaatatacagggaaatggtaatggtagactcactaaaaggacctgaaccaggctccacgtagcttgtcactggagctgtcatctttattttcatctctttctcgtttttgccttgaatgtagctgttcagtttcgtaaagcccgtctggatggctgaatcccagtccatagactccacggacgtgctgacccacttggctggtccatagtgtcggatctcataacttccgggctgggggccggcgtcctccggggccttccagcccggcgtctccacagcttgggccgccgcgtcctcggccgccccggggtctggctggagcggctcggccatgggcggcgctgacgc

SEQ ID NO: 339602 - DNA, 1000 bp, Homo Sapiens; identical to SEQ ID NO: 159142

SEQ ID NO: 339603 - DNA, 1000 bp, Homo Sapiens; identical to SEQ ID NO: 157641

SEQ ID NO: 339604 - DNA, 1000 bp, Homo Sapiens
tttttttttttttttttgtaatcaatgatttttatctctgaaaatggaagcaagtgttttgacagaacactatggccactctataagagccgacctaggagtaattcactgtcctcttctgggatgtcatggcttaaaaaaaaaaaaaaaaaaagacaaaacaggaaaataatccacaatgctttgggcgcctactctgagcttggctgggcatccattcattaaataagtcataagctacaaactaagatcagggtaactttcccttgccctcctgcttctctttgaaccacatgccctacggtgtttcaccaccatcaacaactttacttcattaattcgatatcagaaccttaaaacactactgaatcttagacaaaaggtcctcagcagattacattgataaagaaacaaatacagatttgaatataagtcattgccattattgttttctttacatctcatgatccacttcaatattaaacacatacatacacacacacaaaaccacatcaaacattcagatgccctgaaattgtggagacagcactcccagtattggctggataagaacatggtcctttttctacacggacattactccaagttcggctgtcaccacactctgccctcaccctggctccctgcatacagacgtttccagccagtcccatgcccacaccagcacgagcatgtgcaagaattcccttcgtggtcccaatggcactacacatttcacgttcaatcacagacagcccttccaaaacagaggctccttaaatcttgtttcccaagcatgcactataagaaactggaaacggggcaaagttccagctaaccgaggaatgaacaggtgaccagagctcagtctctggccccctccgagtccggggagcctctgtgctttgacgcagccttggtgagagatggagaggcagggcaggttagttgtgcggagggacatgtttgtatgcattaaagctacagcagaggtctgtgc

SEQ ID NO: 339605 - DNA, 1000 bp, Homo Sapiens; identical to SEQ ID NO: 159144

SEQ ID NO: 339606 - DNA, 1000 bp, Homo Sapiens
tttttttttttttccattttattccaaaagcatttaattgaatttctcaatgtttttcaaaaacaaaaagatccaaattagaggtaaaaaggaacatggaaaattccactcaagtggtgtcacgatctcagggtcatgctccaggcatggcagaacccaagcaggcgcaatacctgccctgggcccagctaaaccttctgactaccacacgctgtagaccacggccagtgctccctgctccctgacccccaaacaccccagagatgggggcctgagcaggtaaaggccagccgtgaccctgccccagcctaggcctgtctgctggccttcagtgccatcccacccctgggcaaggcaggcttagcagctaagggaggctgggggtcacgaggccatgcagcatgaggctgagacgccgagctgctttgccaagtgagttgtgtggctcagcctgcaggaactgaaaaagcttttggcgcacctgggccataacggagcccatgtggtcccgagtgatggggtcactgtggtccaggtgcatcacggcctcttccaggtagctgagcttgaggtcagttcgagtgccaaggtcagatgccagctgctggatgagggaaaggagcacaggctgggagagcgggcagggtggctgcccaaaaacctgggctgggtccacagtttcacacacatacagcaccaggttcaggtcagcagctgtcagcgcctgctggaaggcctgattgaggtggccctgctgcagcagctgcaggatatgggcttgctgggcctggcagtcaaggtgggcagaggggacaggtgtgccagcagctgagcgcatggcctgcatgatgctggaggtgacggcggcctgctgctccttgagcgccacactcacctcacccttaacgatgcgctgtacctgtgctaaaatggactcctgcaggctgcccacagccacatgcagctggtgctgcacctcagcacgaacactgccggccac

SEQ ID NO: 339607 - DNA, 1000 bp, Homo Sapiens; identical to SEQ ID NO: 159145

SEQ ID NO: 339608 - DNA, 1000 bp, Homo Sapiens
ttttttttttttttttggagatggagtctgactttgtcacccaggctggagtacagtggtgcaatcttggctcactgcaacctccgcctcccgggttcaagcaattctcctgcctcagcctcctcaatagctgagattaccagcatgtgccaccatgcccagctaattttgtatttttagtagagatggggtttctccatgttggtcaggctggtctagaactcccgacctcaggtgatccaccccctcagcctcccaaagtgctgggattacagatgtaagccaccatgcccggctcacagtattttctaatactggcaaaacaacatcttctgaacacaaacacttatccacagattctcatttcaattttcttcttatcagttgtctcttttgcaagttgaatgataattaaggtgtggaaattactgacaaagcctagatatagaagtggaaattttctagaaacatcagttgtaaatcttatttacagcgacatttcttttgcaatttttatgttaatatatgccttttcctaattaatctggacagtttcatctgaagagatattttaacagaagaatataaaatgtataaagaaaatgcacaaactgtcaaaattcatcatcgtgtaaaaatagccataaatttaaaaaacttcagaattactaacattgcatgtagatatgattacagatatgggactattattttgaacatcttctttgttggttatttctctcatgttgataatgtaatttgaaggcttaaaatgcatatgtttagatagactcatcaggggtaagttattagtgaaacaggtggttgttctaatgaggatttaataccaaactaactcttgctctaagatgtgttatacactttcctgatcaaactgatgtgaaaaaaaaaaatgacagataactaaaacttcctgataatgaatgaaaaaacatctgacataataaattctcaaggatttttacttaaacataactcc

SEQ ID NO: 339609 - DNA, 1000 bp, Homo Sapiens; identical to SEQ ID NO: 159146

SEQ ID NO: 339610 - DNA, 1000 bp, Homo Sapiens
tggccgggcctgagagcagcaaggccacttcagcaggagggcggggagagggacatccacttgttctcacagcaggagacactggcctcaacccagtgtgggtcccctcaagattctcacaggggcacagagacgccaggcaggcttgagatgaagcccaggtggttcacagccagagcaggtgagcagggccctgagagctcaggcagggcacggcaggaaactcaatgctgccgtccaacaccagccttcagaagcccctgaagttttgtcaaaacagaccgagaagcccaccctgcagaggcttaggctcagtaagtctggggtctgaaaacttgtcccaggtaatggcgttggtcaggggaccacactggttgtataaataggctgtccctgagaagatgacagaagtaggggtaagaaaaccagacatatacagctggatgtagtggtgcacggctgtagtcccagctacttgcgaggctgaggcaggaggattgcttgagcccaggaggtcgaggctgcagtgagccatgatcacaccactgcactggagcctgggcaacagagcaagaccctgtcttaaagaggaaaccacaatctggagacacagtccttcctcactaacctggcctgcctactagaggggaggcctgaggcaccagcctgggtgtagggcaggccttgtgcttgaaggtcccagcagtgggctctggctgggccaggtcctggaaacagggccaaggcccttggcaacaggttaagggatgggaaggctgtgggctcccaggggccaggaaaggggatgcaggcagcaggcaagcaatttattggctggcagcagagggcaggctagaaaggctggaaatggagatgtggacatgggcccccagccctgcaaccccaccaaggtccacagcggccaacctgctgctaccaggagctgaagtccccaaaaccccgactgggcttcttcttggacatggggacagtggcactg

SEQ ID NO: 339611 - DNA, 1000 bp, Homo Sapiens
ttttttttttttttttttaagtttgattttttttatttcaaaatgctttgcaattaaatgaattactgttcagaagtctcccacttttcatacaaaaatactgtgctactgatacagttgaaaaaattcaatgatgtctctcctgcaggagaaattcacagcatccccagggtcaacatgaaatctggccctgtccccgccactgggggctccccaggcctgcgttcctgataaactgggacaggttttccaggcactgaccaactatccaccaagggtcctctgcctccaagacagaccctgaatcaatagcagcaactttcccatatttcatgtagggatatgtggagggggacaggaactctcccatttccccagctgggcctactacctgcctgccctgttcactctggtgccatgaggcaggttcagtgattgattggtcttgcctgctgcagaggacctggccagctccagaagggtcactcatcaggtcctgcaaaggtctgtatcattaatcagtgtcatcagtgtcctcagaagacactagcagagtccagggtgatgcgttcagccacaagcacaaagactgctttttctaaagagcaggatgaggtgaatgtgggaacggaaagcagttgtcacgaaggctgtgtggctctgctgggggagaggcatccacagtctgtgccaaggaggcacctcaccctgtgcagcaggagcgttaaggccaaaaaacaaaaggggccaacagaaaacagctcaggtgatggggggaggagcagcaagaaaaaacgacaaccgagaccaactgaaggttcggtcaggaatgcaggctcttccgtctatacagtgtttaaaaagatccaaatgtgactgagatcattccagcctgcactttttatttgtaggcagaaggaacgggataggttgaggggcatgatgggggctctcgccacctcttgtctgcacctctggaacaggtggtagccgaatcatt

SEQ ID NO: 339612 - DNA, 1000 bp, Homo Sapiens
ttttttttttttttttttgagatagagtctcgctctgtcatccaggctgcagtgcaatggcacaatctcggctcactgcaacctctgcctcccagattcaagcaattctcctgcctcagcctcccaagtagctaggactacaggcatgtgtcaccatgcccggctaatttttctatttttagtggagatggggtttcaccatgttggccaggctggctcaaactcctgacctcagagtgatccacctgcctcggcctcccagtgtgctgggattacaggcgtgagccaccgtgcccggcccatcctgttcgtttaacgtgtcctcggcactagcggttaagttccttcatggctggggccatgccgcatgcaatttatcttggtatcccaaatgcccgccacatagtaggtgcacaataaatgctgaatgaacgaataatggagcctcaaggacgctctaccattagctcctgggagcgggctgtgtggattcccctggggatagacgataaccagaccgctgcacaaagaaaagttaggagggatgcctgggattaaaatccagacatttacattttaaagcctacatttcacacacgaacatatacacatgcagacatgtacacacagatgaatacgtgcacacacactcctctctcaaagctgggatctgggcggtccctggggagccgccctcatgcactgggcccctctgactctgaccccatcgtgtcccagcccgagttcttctgcagctggcggaaaagcagctgccgctggaggctcctcaggctctccaggtcctcgggagagagtggcagggccggcttccctgggtcctgctcctcttcctcctcttcctccatttccgtgagtccctcggggggctgcggggagctcctggagatgtagccctggtcagactgcactgactgccgctgctcctcctcgtagggcgtgtgtgggtctgtgaggaccatggcgggtctactgcagcccc

SEQ ID NO: 339613 - DNA, 1000 bp, Homo Sapiens
ttttttttatttttttttttttttttacattttcccagatcatctttacttaaagattttttgggagaaaaaggtaggcagcaaacatttttatattaaaacaaatgcagatagtaatattgaaatagtatataaaattgacattactttttgagacaaaggaagagacatcaaagacattttaagccgagctcctcatgagcttcctaaaccccaggggagggaagagacccctgcattctcgttctgtctaatattatcagtggggctgttttgacagagaagtctcagaagcagcgaattaagtgcttactcatttggcaatgtcccagtgagttatataaataagtgaaaccacaggctttctcattttagagcattttaacctgctttttagaaggcctgagtaaacagaagctttatgcttgagttgaattttattttctcccaaagtgatttttttcctcctataaatgttaacatgcttaactgagggtatggcatgtgaggtggtcagtgtcctaagacccatgtcgacttgggttggcattaccagacatggagttacaaatatactttccaaggctgtcatcagaaatgcaaaactactcaccttcggcaacaataacaaaaaggaaacaaaacaaaaaactgaagaacaaaagattatatataattagaacggtatggtgtaatttaagcactggcaaatacttggctcttaaagaagggggttactcctgcaggatctgcttttcatattttatgtgaaaacaagaacttcctttgaggaaaacaagaacttcctttgaggaaaaaagtgccattatacttcctttccaaatcttgcttattttctgtaattgtctttttctttgttgttgctgaccctttatcttatttattttttttcaggtagcctcttgaactagagtaggctcagaggctccctgtaggtgacattttattactttgcaataacagactgaaggggcagatc

SEQ ID NO: 339614 - DNA, 1000 bp, Homo Sapiens
gaacggtcacaatatgcatttattaatgaatgtatttatacacaatacaaacgtgcggggacaccgtccccttcacagcccagaacccagggtcagaagatgagggatccagcctcagaggggagatatgcgacttcccaagagcagttcttggcctggaggggccatgagagtgcaagacacggggccgtggccggggcggggctacgggagcggggcgtggccggcccctgaggttactataggggaatgggccccggccaggtcccctctccttggggcagtgggaagacagcggggcccacgggccagagctgctacacgtaggcgtttctgccgtatttgccaaagctgctgtcgccttcttggtccgaggtggcgacgggcatcacggacacgggagcctggtagggccgccgggcgctggcggctgggtcctcgtcagagccgcagcagcaggcggagcagaggcagaggccacccaggatggagatcagtgaggcgctccaccccaggtagagggcggggcccagctcgtacttggttccggggtacaaggggtcgaagaagtcccgggtgatgttgaaggcgtaccaggagatggccaccatcccgcagataccggccagaatgtggagggcccctgcggtggccgccagcttggctttcctggagagctccaggcccccaatgttggtgcagcgcaggcccgctatgcctagcaagaggccgaggaagcccaggaggatggcggtgatcatgagtgcccggcaggcctgaatatacccagagagggccagcatggacgggaactcccagcagttgtagacgcccagggagtcggtggcacagctaaaccagaggttctcgaagatggtgttggtggtgatgacgttcccgtgcacagtggacactcgccagtagctgtttggcagagtcacccccagcatcagcagccccacagttgccatgaagaagccaaaggtttccacagccatcg

SEQ ID NO: 339615 - DNA, 1000 bp, Homo Sapiens
ttttttttttttttttttttttttttttttttttctgaaattaatgcatttattccaagtaattaacacattaaaaataaagttaaacttgtccaagccaactcataaattctttaatctttttaacaaaatatacaaccccaaacatcgtactatggttgaaattaattgggaaaggaggaggttgaggaaaggatacatatgggtttgtggaacagggaatgagttcaatctaaagacaagtttcagagatcttctaccccttcacaacacaaatggctgctaaacaatttaatacaaagtgttattggatcacaatacaatgaacaaaggccatttcaaaaataaaagtgatctcaaaagcatatctgctcctggcaatgaaccatgaataagccttaccgatttgtcgtcttctaaaagtaagcctgccagatattcttccatgtttatttccaaacaggtttgtgggttagcaggacaatgcatctcaagaaaggcaacagagtaagggaagtacaggagttgacatgccaataaggggtgtaaacagtaaacaaaagagctactcacgctgcatttcaaacaatgttaaggcaggcccatccaaatggaagcctaagagatgaacaattcttccaagttttccatttcagcaagctttctggtgtttttcccagagatgcatcaactgcccaggaaattgggtaggaatacaacacagcaactggagaggtcagctgcctccatcctcccccacatttcagaaatggcagagtcaaagccaaaatacaatcaaagcacactatgtggtgagccagttagacatgtgattttaatgacaaagtgggagaaaataaattggccaaaaaaattaacaaaatacatttttacagatatatatatatatatatataagttgttatcgatttgtctggtgttttaaggggaaagggaaaaggaaaggaggtaaattttttagcttccatgaacatttact

SEQ ID NO: 339616 - DNA, 1000 bp, Homo Sapiens
ttggtgagtaggtgagtttattaggacttacacacagggcactcagcaggatggctctagagatccggcctcccccagtctctaaactgcttttcagttaattttctgtctctttgcctgctgtatatgagtaatgagactgtttttcttggtaggttctcgcatactctccaggatgtttgggtttttagagacacctggtcctcagctggggacaatggccatggctcattacctggccttcagggttcaagcaggggacatatacccctaaataacctaaaggggatccatcacactacaaccaccacctccaccgccatcatcaagaagccactggctgactgagatacacttccaggaggacaagacagagtggatgctggaaagacagggcaggggaccatcaccagggaaagacttcattcttggaaggacatcgaaccgggggcaggtcggtagtggagccgctgtttcttctgctgtatccaaaagttctaactcttcggctttctgcattttcagctctttcttttcctggccttctcattgctggttcctgcacacctcccctctattcctccccccaatatattcgttagtctaaaggaaatttcttcttcctattccccacactctccagtcccctctcctcccttattccaggctccagcattcctgccttctccttggtgcacttgccatctgcattaacccctcccctgctgtgctcagctacagaaatgccaaagtcactaacactcagctccataaactttaccttgccctctttatccccctaataaaatgcctgcattttgtcgtggcctgtgtatggctcacctcccctgctggctgcactggtctggggtcagtgggtatggcatggattcagacgctgatagatctgagtgagctccattagattctcctccagctcctgagcctgccgcctcagctcctcagcagatgcagactttgccccctcatgcaagtgctt

SEQ ID NO: 339617 - DNA, 1000 bp, Homo Sapiens; identical to SEQ ID NO: 159148

SEQ ID NO: 339618 - DNA, 1000 bp, Homo Sapiens
tttttttttttttttttttttttttttttttttttttttttttttttttttttttttttttttttttttttttttttgtcattggaaaagttgtatttattttttattacattttgataaaagcccatttttggtgagggtctgacaaatcagatgctctgaaacatgggtggaagcgatgtcaatcatgcaacttttctaaatattgacaaaactcaatatttaccaggatgcttaaagatttcaaacacttcggccgggcgcagtggctcacgcctgtaatcccagcactttgggaggccaaggcagaaggaccacctgaggtcaggagtttgagacccacctggccaacatgatgaaaccctgtctctactaaaaatacaaaaattagccgggcgtggtggtgcgcacctgtaaccccagctattcaggaggctgaggcaggagaatcgcttgaaccaggcagcagaggttgcagtgagtgagctgagatcatgccagtgcactccagccggggcaacagagggaagctacatctcaaaaacaaacaaaccaacaaaaaaagatttcaaacacttcaacctaattattccatacctggaaatctaaggaaataatcaggaatgagcaaaatttggaatacatgaatatttgttgtaacatgattagtaactatgaaccaatgatcttaaatgttcaagaacaaaagggagaaataaattgagtttattccacatttgatagaaaactatacagccactaatacaaatgcgattttgaaaaacatttattgaccttgaaaaatgtttatgccattgttaagagaaaaagcagaatgaaagcattgcagataataatgatttcatcaggaatatgtgttaaaattacctgtgtatttatatttattaaaagttctgggccgggagcggtggctcactcctgtaatcccagcactttgggaggctgaggcgggcagatcacgaggtcaggagatcgagac

SEQ ID NO: 339619 - DNA, 1000 bp, Homo Sapiens
ttttttttttttttttgatttcatatgtacattttcctttattaaaagtatggcactttatataacagcagaaataattacatgatttcacatccagaagcaataaaatgtggaggtgcaaacattccttattcccaataaaagtaaaaaaagtttcaacatgttctgtaagcccttaattgcataaagtatatttagcatcatttacagccagtacacttatataaactaattatcattaccttttacattctgcaaaagaaatatgttaaagtaaagaagcatggcgagacaaacatgaattaaatgtcagttctgatcattcatggggaaatataagccgataattataaactactagataacacaatgattttaacaatttttgatgtttttaaagttaaaaaaactccactacatgccatattgaaagaaaaggttgttttttttttaactgcagcacctttagacaacaaaagattgcatcctgttcaaccacactatataaattataacatttgtggaaaatatgtacacacaaacataaagcaagtgttctaacagttaataaatgttgtcttggcaagcagtttccagaaacaatactaacaactggtaataagaactgccaccattttgagttttccgttgctatcttcatcaaacaggaagcctgtaaacataagatgttaaaaaaaaatttaaataaagatgtaaagtgcactcagtgcactctaaaaagtactaccttcacactcttagtcaagtaataggattaaaatactctaccatttcttaaatgcactgagtacaacataaaattacaacaaattcatgatcagagccagctgatgagaaaataacgcatccaagaggatccacttaaaaaaatgacagactacaaagacttaattccccttatgtttaaaccaattatatgtccagtgtttcattagctccttcaaaaataccatgttaaaaacataaaattaacttcatc

SEQ ID NO: 339620 - DNA, 1000 bp, Homo Sapiens
tttttttttttttttttttttttttttttttttttttttttttttttttttttttaagaacgtcagctcctttattattattattattattattaattatttactgttatttacccctaaacaacagcataactcaaataataatgacacacacgtcccgcccatatacacaataccactagcctatctgtcaggctatctggcctttgcttggttcctgatggagctgtctggagacagctccctctgtaaaaatcccgacttaaacacaggggacagaagaaaggggggacctaggtcagatcataaactgacaggctcccagcgtccttagggagtgctaatgtggaaactttgagaacgtgctggacacatctgggcagagggcagaaggcactgtttgtttttatgtggttgatggataaattccatatggggatataagacctgtatatcacccattttaggccaggcatgtggaagcacagtggggttagctactgggtttcattaaccaaaccatgcggcatggtttgggagccatgggaatcgggagcccagagtaggaacctgggtgatgggggaggtccccagagaaaagtaacccttgcattcactgcaagtaagatacaacgtgaaatgttaagtccccttttatgtgttttgcaactatagaatgtgcaacattttcatcaagatagaaaaggtaaagaaagcaaaactagtattttggcctaacacaaccaagcatgatttgccaattgcgctatcctgtggagaaatctaccactacactatccagggaatctgtggtcagtcctcacccccgcaccctctaacattttacttgcactaaatctgagttcagctaaagtaatgtatcctggaatcagagaagccctagggttggggacaaaacaaggatgggccagtactggcatctcaggtacaggtgacttcctggctgtcctggggaagctcgttgttgaaactgctctct

SEQ ID NO: 339621 - DNA, 838 bp, Homo Sapiens; identical to SEQ ID NO: 159149

SEQ ID NO: 339622 - DNA, 1000 bp, Homo Sapiens; identical to SEQ ID NO: 159151

SEQ ID NO: 339623 - DNA, 1000 bp, Homo Sapiens; identical to SEQ ID NO: 159152

SEQ ID NO: 339624 - DNA, 1000 bp, Homo Sapiens
ttttttttttttttttcatttatgctatggagaaaccagcatggagatgtcatgggagagcatgcacaggccccgccctagggagtggtgatgtgtttggggaggtgcttgtttccaggtccatcccacacgttgtccagttggatcctatggcaggctggctgtggctttctctctcctgcttctcttcctcctccagataagggtctgcaggatcttctgcttagcaagtggtggccaaggactggtggatgggtggctggaagcagcgcacatgctccacagtggaactgtctgtctccacggacttcatgtatttgttcaggatggcaaaaacctcattgttcaagatctgatacttcctgatccggtcggccatcttcttcaggggcacattcttaatgatttcatccttcccgtcctgcctctgcacttttagcaggtggtaacagaagtcgaacaggtcaaagcgacgctgctggcccagcaggacaatgatggagcaaccagcccagttcaagccatcgccgaaacactgctcagctgtgaactcgttggttcccacagggatgcagtacacgaactgcatggcgctccacagccggtggaactccacacactcatcgacgtgcatgacgccattggtgggcggtgggccccgccagatggggtcctgcaggtagctccgaatgcgggtcaggatgacctcgaacatggacaggccacagcacagccgctccttggtcaggaggtcaccctcgcgagcaatggcgatttgctgaggggtccccagccgctcgatcagagggaccaggtggagcggggcatacttggcttccagacgtttcatccggacctccaggcgctccccctctttgatgtagactctaggcaagatgttttggaagggtgcggcatggagcaaatcgcagacctcctcctgagacagagcttgctctatgaggaggcagaagaggatggcattgcccacttccctcag

SEQ ID NO: 339625 - DNA, 891 bp, Homo Sapiens
gctttttaaattgctttattagctttaaatttttccatgcaaatgggtgaaactactgctgacagaaacttacactgagtgcaaaggcaatcttcaaatagaagctggcaacacaagacccacttgacacatggaaataacatagggttcacagcaaacggatcagtaaaggcatattaggaaaatgcaaggaaaaagaaaacagcgggaatcacagtattaatctcatgataaatggcaggagtcaaggcataaggcaaaattcatcatgatggtcatggtgattagagagctcccccataaggatacgcagacaattcctcaactgcagctccctaagttttcttctgatttctctcatctcctccatgaatatttccatatcatctccatctccacccatcccatcattgatctgcctattgggtatggcccatcgaaaattaggggcaagtcggcgagcctgtccccgtcgatttcctgcaggctggtggccttcacctcctcccaaagggcggtcttcctctccattctgcataggctgctccatctcttcgttttcctggtgaatatttgccatgatgagattttttttttctggttgtttttctttgaacacaagtaagacaaaggcaaggagagagactgaatgcttggtgctctgaccagcaggattcagagccctgatatcaaaggattttttaatttcgttttttcccaccttagaagttccgcgcgtcctctacggggcctccaattaaagcccctccctccagctttctccccttacctcccttcccccaaacccaccatttttcgtttcccgggattctttcccagagctttgcaggcaccaaaatggaggaccggtataggagtgggggatggggt

SEQ ID NO: 339626 - DNA, 1000 bp, Homo Sapiens
aagggaagtgaagaagactgaagggaaaagaggggaccagtgcagaaaccctgggggcagcctgggaaggcagactaccccttggacttgagcatcagctgaattagatacacgcaaatgtgaagcttgaaaaaaaactgtacaaaaacaaaaatcacccaccccttcaaataattttttttttttttttttttaaactgtcattaaattttatcattaaataagtagcaaaaggtagatactatatagcaaccttctgtgcccatggatgcaaatgaatgaattgtctttaggcttgaatttcatctggctactcaactaggggaatcatctgctcaagaaagactgatacagagagccctgctgtctaagctgctcagggacactgggctgattcagtcagggccgtgctggtacctgctgctgctgctctctgctcagaggcatacagtgaacatccctttgttccttttagaccagtgattctgttctcatggtggctcacagggaggcatggactgctgcaggctctgccttgtatcacactctgcttttccaaagagacgccaggcctgggccattttgcgaagtttagtgaggttgggtttaatctgtttttcctgttccaagtggtctatgtcagctaacggcagcatagaaggtctcccgtgagcacactggaatggcagctggcatgaggacagagcttcaataaggcggcaactttcctgtaagctcaggccatcattaaacttaatggccccatggcaggcttgggatgccaacaccttctggacagtcagtggcaatgtcccttggatgcctccggtggtctggagtagctccagttgttctcggataaattcctccacaatactcttggtcacagtagatcttcctctccgaagttcattggcttctctttccacaaaacatagtggtacttttcccacaaggaccagagaatcactagtgtctggaaatacaaattcaaggccca

SEQ ID NO: 339627 - DNA, 1000 bp, Homo Sapiens
tttttttttttttttaacttaagaaatcatttttatttttatagtacaaagcaaatgaatgtataggcacatttatttcaatcaagtcataatctgaacctaaaatgcaaagcaaaacattaacgtgcatttaatacgtatttcaagtctttgtaacagagaataaaaatcattacaaaattaaggtatgagacatcaagtcactaatgatagagttgattagacaatggcttccatgttccatctaacgacatggaacaatgtacatttgacaattcagccttaaagggttaagtagaataaactgcagccagctccttacactcaactgcctcagtaacaatgactcaaagaatagatattttccctatcaatgacaatatttcagtgctaacacttgcagtttaatattggataaaagctaaggagtggttcatcctgacagattataaaagataaaacttattggcttcaagaaggattaaacctgttagaattgggaccaatttttgtttatatactcaacagaaaaacaaatttctaattttaaatttctggcccacatactcaaaacaaatgacctatacctcatcaagctttcataaaaactgatggcattacacacaaaatccacctatttccctagcatgcccaatgaaacaaaaagaaggtacagaacacatgatgaaagtagaagagatatactcaggtttgtgctaaaatctaggccaaagaagcttcagatgcacacagagcaagaccagcaaagaatcttccacatatactctggttcataaaccatttgtttgggtttggggactttttattctaagtccagtagcctatacttcctaagaaatatgattaaaaacatacataacagtaaaaataataaaatagaattacttagctgaggtatttggatttatatttagaggatgacaaaatgatatttgacaaagtatatatctttacctcaaaaaggaagacatgttaatat

SEQ ID NO: 339628 - DNA, 1000 bp, Homo Sapiens
tgaagggagggcacaggaaactctttattatggtgatgagatcgacaatctcccctactgttaaccttcgctcctgcacacttcagtgtcctcactctgtagggctcgctggcctgggcttctgcgacccgcgatcgtccaggagagggcactcggcgcccttcctggggcgcttctggggcggaatttgctaggccgccgtagcagcggtgccaggtcagaagccgagccggcccgcttttcgttctttaattggactcttggctaagacgctaccgacaccccgtcaggtggtggaggaagaaggacaacagggagaggtcgagggccgagacggcctcgaggaggagtagaggaaggtggagcggatggtccatccgggcgggagttggctgggcgagtgaccgcgcatgtgcgcctgcatggaggccaggctgggacagccggccccgcacagggagcagcggtacggagcggccccgtgtgtccgcaggtgcttggtcatggccgagaagtcccgggagcgctgaggacaaaggctacaggagaagggcttctctcctgtgtggactcggtagtgcgtctccatctgatgcttgagtgaaaacctctttccacagacagagcacgcatagggccgagaccgagcaggaggggccgggggagggtgcgggcgaggtgggcagcctgccttgtcctcatgacccgcacaggttgcaagtgcgcctgtgtgcccctgatcagactcttccatctccccagggctgagctgtgcggggccctgggggagggaacctggggtagggctggaggaggccaactggttctggctccagagccctttgggggcatttagggacagtgggatcctctgttcccgccagacctcctgccaggctccagtggtgggggtgctatggtagaagggaatgccatatctgggcggcatcagcaggatgctccacagggcaggctggccccccaccaaccaaggggcctc

SEQ ID NO: 339629 - DNA, 1000 bp, Homo Sapiens
accttcaaaaccaccttttaatgcaaaagcatatatatacatacacacacattgttggttattattcatgcagaaaacaatctgggaggaaacataagacattaataatgatcaccaaatagatgtagtttgatttttgtttttcactatttcacttgtatttgtggaatgggcatgggttgcttttttaataagattaaaagaataacttttcaggaaaaaaaaaagtttaaggaagtaaggatgattggcctggagaagcaagtttcataggagacatggtagatgtattccaatagttgagccttaagtggggaaaaaaaaaatttgtaccgtacagcttcagaaacaggactgatggataaaagtttcacagtgtttctaacaatcagagatgattagaaaagccacaatgagcaccccatccttgaaggaattcaagcagaagctggaggccacctcttagggatgacctataggtaattcacggatcaagtggcagattagatcacaagacctgtaagtttctatcgaattggggattctgacttatttcctatttgacctaatttagctttgacatacactagaagagatgagaaacaggtggtcatcagccttcagagagctgaagtctgttctcttgctaattatttttctgcaacgatcactgtttctataaatcttatgagaagacacttgtgttccctcgttctatggatccagtgtggaatggacacgtcagaactgctagcagagacatgtgagtgcccactcctcacgccaccaaatggccagcatcaaccctgaagtacagtctcaatgttggtgcttgccaagaacagacgaaagaataggcagtgtctttggagttcaggagtctgtgatgccatttttgtcttctgtatcagtcaggaatggctaatagaggcctggcctaatggcttaaacaaattaggtgtttgtgtgttcacgtaacagtagtgcacaggaataccat

SEQ ID NO: 339630 - DNA, 1000 bp, Homo Sapiens
ctaggagtcaggctctgtgggaggtggtggcttctcatcatcagggggacaatcgatgaagtcggccagcatggcagctgtgtcatcctgctccttttcctggagagcttcggcctctgtctctgtctccatctcttcttctgcaggtgtctctggtgggggctgcaccttgtcactcccatcctcaggctcctcttccaacagggttgggggagcagagggctcttcttcaacaagctcctggggagggggccctgccgcagggctttccccttccctctccacctctccctgggaggggagcgcttcaggggccagggtgggagctgtgtcagccccacgctcctcctccgtccctggctcctccacttccaaaagcagcccgggttcgggttcgggttctggctgcacctttgggggagactcagggggaggcagagctggaggcagggttgggggtggaggtgcaccttcttctacctcccctcctgctgtgccaaactccaggtcttccacctcttccagttcttcttcctcctcctcatcctcctcttcttcttcttcctctaactcaccttcttcttcctcaaattcttcctcaaactcttcttcctcctcttcttcctcttcaaaatattcctcttcatcctcttcctcttcctcaaagtcttcctcctcttcctcttcttcctcttcttcttcttccccttcttcctcttcctcctcctcttcatcactgctgttgatattaataactgtcaaatcctcttccagggctgggggtcctcccccaccaggagtcccttcagggaccaactggggtggagggagcgtcacaggaccaggaacaggcggcggcggaggtgggggtggcgggagaggccctggggctgcaggaagttcttcaggctcctccttcgctggcacaggaggggaggctgttggtggcccagtgggggctatagggggtggtgtggcacctgagggtggtgggggtggc

SEQ ID NO: 339631 - DNA, 1000 bp, Homo Sapiens
tttttttgatcaataagggctgcagcagcacgtactattttattgggcctcaaaaagctttaaatacagaatgggctggccagagcgaagatgtgaacacactggcatttgagaatggacgtatcagaaaaatcacataatcaacagttggacagagagctgggacgagggcagtctgggatagaggcaggtgccagctggcggccagcctgggtgttaggattactccctccactaggacatagtctttgatgtttcttcctgatttgaggacttttttttttttaaaaaagcccacaaacctccaaataaaaccaactggcagagactgtggatagcagtgcccatcatcccagaggacaagggtctgccccagaaagccttggggtccccaccccgcagccccgatgccaccccacgagacatttccacacactgaagcaaagctggacccaatgtacaacccctctctggggtttggagttgaaaacaccctcccggcagaggaagagggactggcgtgacgggggctgggggccaaacccgatcccctccttagcggctgtagccaaattcgtctgcatcatcagctcgaaagtctccatagcgccacaggttcagcctggcgctcttggctgactcttgggcattcaggtattctgtgatcactttctggaactgtttctccttgcgcacctccaccatgaccagcccttccttcaccaagcccagccccacatcgcccttggaatctgcaaactgcagggtgacatgggggcagccggcactcaggtgttccacgttgagcaggcactgagtgttctggatatcccgaactacgctgtccacggcgtccgtgcgggcatcatcatcttggggcacctggatgaaggcgaaggcatactccgtggcttgagctggcagcacccgagtgctgaaggcaggtgatagggtacccaggcgggtggatggcaggacctctctgttgccgtagtcaatg

SEQ ID NO: 339632 - DNA, 1000 bp, Homo Sapiens
ttttttttttttttttttttgagtttgattgcctttattatgaatataaaatgtacatacaatacaatatacatttatacatttacagtttgcatttcctttcatcttttttgagcaaattcaattctgcatgtcccagtttgccgctccttccactgatttgcacttacactcatgacgttctcttcacttgggtactctgtgtactcggtaaaaaaaaaaaaaaaaaaaaaaaaaaaaaatccagcctgggggtaaaatagctggcttcactgtccttttcacagaatcactttccttccattgtttcctttcctgtccctacatgccttcccttgcttcattcaaacttctgcattaaaaattcaggagaaaagagggctgtgataatcagccctctcttaaaaactcttacatgagcgaatgacacataagtaggcacttgaactttgctctttcacctggtttaagaactacctatgggtgggaaggctctgaaagtgttatatacaaatgaagctctgctcaccagatggatgatcatgaaggtctgaatatcagtagcgtggcagtaaataaataaacaggaatacataaaaataaataagagtttcactaaaggaaatttaaacacctataaccctgtgctttctcaaaacttcattaggtacatcttcacaacacgttgataaatagaaactagattttatggctagtgtctcttctcttgggccatgccttcaaaatgccagtgaacatttactgattaagagtctgtcgtttgcctcagaatgtagctatgcgagaggtcttgtaggagttctctctgaggctgtcgaatattgctttggttccattctgccagtgtagcaccagatccatcggcgtcttcccagcacagttcttgatgttgagatccgcgccatacataatcaggagtcggatcatcttatagcggttcagtctcaccgcatcatgcaacggggtatctccttctctg

SEQ ID NO: 339633 - DNA, 1000 bp, Homo Sapiens
ttttttttttttttttttttcaatacactcatatatttttactttgtaatacaatatagctgtcacatacaatggctctagtaggcttaaatcaaattgcaatgggcaaggaaagccaaagaagggtttacacaatattcaataagcaacagtatctgttcagtgtgcaataaaataaaaaagttctaacctagaaacacagaaaaagaatttattgtttttaagtttcagaaataaaagtaacagaatagtgtataatctgtaacaagctggtcctgtaatttctaaactacagtccaattaaaacatttaagtaatagaaacaatctacatgtttttctaccaggtaaatatacctgagagggttacctataaagaaataggctttaaaacttttaaccacaaagaaccttctgctgcgacattatgaagatgggctatgcatgtggccagactaagtcatttcccggagattctgctcactgcttagctgcaggtagtggtccatcaatgacagagtattttacatcaataccagctcattcaaccaaagaagcacagtaatattttaaaatcacctgtttatattcattagtatgtaaaaatcacaatacacagatttggaaacatataacgtgtccataaaaaagagtatattatgtaagcataagctttttaaaaaggccttagcaatgcaataatgagggaagcagactctacatgttgactacagtgaagatatgttaaaattataattattgtcattgccaagagcttagaaataaaaacaaatttaaaaaattaagacattctggtagcaaaattacagctactgtaacaacagctccaagcaaaaaatcaattcagagcttgaatgcaatttgtgctttgtttctataagaatgcagtgttactctcagacatttctaaatgattagattcataaataagcagttaatttcttttcatcacaatttatttctaattcatcctacggaga

SEQ ID NO: 339634 - DNA, 1000 bp, Homo Sapiens
cccttcattaaagcctcctaaatataactcttctgtatcaaaggacttacaaatgtctcaagaaagtaatggtgtagcagtgtaagagaagtaaaagtctgctaggggaaactaatgaagcattttcctcattacacttttgggttgatatatttcattaagacagaactagttctgttttgctttgctttttagtgcttagtctgagaggcaatgcgagaaaccaaaagtcttaggagaaaaactgctttcataatttccagtgtaagccacaaagaagcttttctataaaggcttgaaagcttgaagaggtgacaagagcaagctgtattcaattagacagttcaataaatatgcaaaaataaaaaaacacttagcaattcatgagtatactgtttgtattctggaaaaagcaacatatttcatgctttgaatattttctcttgagaatagttttaaagttatttccttttgtaacattcaaaagtaaaacacacatatataattccatcaaggattctctgtatgattaacattctgtacaagtcaaacatgaccacatctatattggaaagagagcactgagaagcaacagcaggagaatgcatcacctgtgcctgtttcaggatgaacagttttgttaagttcagcagatgaatgtaacaatgaccacttgtttccaaatacccagatgtttcttactggctcctcactaatcaataacacaagtgctaagttctaagtatttaaaaaaacaaaagactgcaggtgactccttctctctggtccctttaccaaagctccaaatcacttatgacattaattacaatattctgcactccaaaaaaatatgcaaacacaggtttgctaaattttagttactcagtgaacctactaaattttaaagtagaaaaaagacttacattctcatgacacaaactttagttttcacattcaccaaaacattttaaaatcactcaaacatgagaattgaaaatgt

SEQ ID NO: 339635 - DNA, 1000 bp, Homo Sapiens
caaaatggtacatgcacagcaaaatcatgctttttaataaacaaagccaaagaatataaataaacaggttatgttttataaaaggtaaacatagtaaaacacaatattacccacccaaagaaacacatttgtttctaagaaaacaaacataaaactatacatatccgtgagtattcatttgtaacttctgttttttttgttttgttttgtttgtttgtttttttgggacggagtctgactctgtcacccaggctagagtgcagcgccgcgatcttggttcactgcaacctccacctcccgggttcaagcaattctcctgcctcagcctcctgagtagctgggattacaggcgcctgccaccatgcccagctaatttttgtatttttagtaaagacaaggtttcatcatgttggccaggctgatgttgaactcctgacctcaagtgatctgcttgtcttggcctaccaaagtcctgggattacaggcatgagccgccgctcctggccagtaacttcttactttacaaacaacacaatacattttaacttgacatttgctttatcctatataatacaaacataacaaaatacatttaaaatgttgttgaaatatacaaaaatttaatgtaatttttgcgtctgagatgtttaaataagaaacttctttaatcaggtatccctttggactgcaagagcagtttatatcatagctttgcagcataatctttttactctcaggctcttcaagcatttttatcttctttgaaacttctatctaaacaaaaatagtattaaaaaagataacagaaggggttagattctgccaatgaactgtggacatcagtatctcattcttctatttgcctccttattctagtttgaaaaagctttggaacacattattacctatcattattacatatttcttgtagctttagtgttactcccccgactggaaatagaagttgctctttaataaggcccagggtgcttagggagca

SEQ ID NO: 339636 - DNA, 1000 bp, Homo Sapiens; identical to SEQ ID NO: 159156

SEQ ID NO: 339637 - DNA, 1000 bp, Homo Sapiens; identical to SEQ ID NO: 159157

SEQ ID NO: 339638 - DNA, 388 bp, Homo Sapiens; identical to SEQ ID NO: 159158

SEQ ID NO: 339639 - DNA, 1000 bp, Homo Sapiens
aacattttaaaaatgtttttatttaattaaaaaaaagacagaacaaccaacccaaaaccagtagtaggtactggagtcacaggtgcttaactggcgaaacacacaggggtgggggcgagggggcgggtcgggaggagggagagaaggtgggcacaggccaccacatccccccgttgggtgtcaggtctgagatgcagcgggagggccaggaatgggcggcccagggcccagggtccccggagacccagctggccgcggggagaaggctgagaaggcccgggtgtctgaggtggttttgctcccggctcgtccccttcttcctactctttcttggtccctaggtgggccctgcttactctgcctgggactgggcaagaggtaggattcattggaacacagctttctccatggaatgatagaaacttctggggcagcgggaggggaggtggcggatggagaggaactagaacagcacggctgccttgcttttggaaatcacagaagaaaagtctcggggccttgctggacagcgggactggggagggcgttccctgccttcggcctggtcatggcagtggaggtggtgacagggctggcctagagcaggtgaaggccttgagctctggtgcttcagcatccgctgctgggcacacttggacatgccatcagatgatgccaaccctgatgggagcgaaggctctggagcacagcacacaggggccctggcaggcctcatttcagatccccagcacacggcgacagtcagctggggccgctaccggtggatgcgtcctttcctgggggcaaaggaagatgggatggacgatgacatcatcactaggccgaacggacctgggtctgaaccccagggggccgagtccacccatgggctgtgagcaggtagctgaggcaaggatgcgctcgttatttccaagcacaacagctaccaggactacaggcgactgttccagggtggatcaaggagtctcaaaaaataaga

SEQ ID NO: 339640 - DNA, 1000 bp, Homo Sapiens
ttttttttttttttccttcatgtttttatttaaagaaagtgaatcaagtaccaaacacggaataaaggcaaacattcatttttggggtgattgttcccttcttggcaatccctgttttattgagggtatcactagttattcaatccaaggattttttttgtttccacaggaggtgggtgtttctttgtcttcttagagtcaggattccagatctcctgatgtgtgggacttttcttggccactacgatttcatctacagtcacgagctgtagcaccacctcagccactgctcgaaatccttgggctttgactattagggtgtcccacaccccttcctgggccacatttattatcccttcagttcccacacccattaggaggttcccaccttggtgcactccactcatttctgccatcacgtctgagacagctaagcctgcattctctgccaaagttttaggaagatacttcagggcccaggcaaatgctaggaatgcaggcccactgggcccttccaatctgcttcctttatcagaaagcatttttgccaaagccatttctgtggccccagctcctggaatcagtctgggatcttgacatagctggaaataggcatcaatgccgtggtagacggcctgctctgcactccgcagcccctgggtggtggctcccctgagaaccacagtgagggcaggtgtgcctgtacattcccattcaaataccacagccaaaccatctcccagctcctgcctgtaaaccctctggcacttgcctggcctctggggagggagcagacgaggcagcagaggtgtgtccaacacctcactcaggtaaatgatctccatccaagacctagcttgaatcaccacgatgccatacttgtccgccagtgtgagggtctcctcgtcgacctcccccaacaccactgccacattaattcctgcagctgctagctggcctacttgcttttctagtaattgatcgcttcctttactaaatt

SEQ ID NO: 339641 - DNA, 1000 bp, Homo Sapiens; identical to SEQ ID NO: 159159

SEQ ID NO: 339642 - DNA, 1000 bp, Homo Sapiens; identical to SEQ ID NO: 159160

SEQ ID NO: 339643 - DNA, 1000 bp, Homo Sapiens; identical to SEQ ID NO: 159161

SEQ ID NO: 339644 - DNA, 1000 bp, Homo Sapiens
tgttccaatctgattttattgaaaaggaaacatacaaaaatcatgtacaaaaaaaattaaccaaacatgtacagaaaattcattccggtatctacagcagcgcatatacagtatcttacaggctgggccatccctccccactcccagactcctccctcttccgagatttccccccctccctgactccccgtcttccccccagcgcttggccctggggactaaggctggggcggcttcagccaaaatctcccaccccccaaatgaatgccagtggtcacacgtcgctctctctaaacctatgcaatgggattgatggggcggggggcggtcacgggcagagcacaggattcacagtctgggcccctcctggccaccccctgatgaaggtgaggcaggcatgcccaccacccgccggctggctcagggaagatggctgggcgccgggctggagcaaccggcaaacgagccccactctctggctccaggaggctagtggtcacgtttggctcatttgctcttcacgggccccctcccaggaggagggggggaagcaccaggggcctgaggccaggcccagagtgaaggagcaccgagaggagagcccccccccccccagtgtcacccctgcagctggaacgggcaccagcacaacagcctttcctgagatggtggtgggcggcagaggcgggcggctcagtccccaccccctcggtcaccgccaccttccgatgctgagtccatcagccgtccctctcctggcttcttggccagggacccaggagtccgcatctccgtcagtgcaccccaggctgggctggggctggagtggctgccccggcccgcccccgggacaggcagggctgggagtccagtatgctacatggtgcagagaaagtcccccgcgctggccagggtgtcaggaggtgggaggggcctgccccccgagtccctgacgtccaccgggcgggtgcaggcacctaattgggctccatctcggggg

SEQ ID NO: 339645 - DNA, 1000 bp, Homo Sapiens
ttttttttttttttttttttttttcagtttttagaggagaaaaatttaatagattttatcttattatacatttttcctaaattacaaagtcaatagctgcaaatatattctgctacaaagctttctgtaagaaatatctctataagaaaatacatctcattaacatttcctgtaaataaattacttcaaataataatttttaaaagggtggacataagaaaaatattgcagaaaccaaattgtaaatataataattgttatataggaaatgtttgattgaaatgttccattttcatttcaccaagcttatagcaacctgtttatacaaactttggttcttggatggactagtttataatttttgtttttgcagacctgtgcagaaaatgtaagtcttaatcatcttagtaaatatatgtgggaagttgaaatttttaatagatatacaggctcaaactcaatctctactgggagaacttaaatttgagactgcagatgggatttaagtaaaagaaaactaaaaagtgaattgtggtctacaaaagtttaaagtcacgactataagataaccttttattgttttgtgctccagacaaagtatttagaactgagttaagtttaaaaaaagtagtaaagtggtttcaaagaatttagaaactgtggtgtctatagattagcaatatgcaggttttacaagttatcctacttatattttttaaccgcaatggctgcagaaaaccgaaactagccctttggcaataaagcagatgctgcagaggtttgggaagaaaattggatgatgccattggctagtcagaagcttatagagggcaatgaaacctcactactctgtctacttcaggagtccattttgtgaaacctcctgaaattgagattatttgaggatctcagcactataaaataaataatttgaggatagtacggacacaggacctcacactgaattcatctgcatagtaaatattatgatagcaaatcc

SEQ ID NO: 339646 - DNA, 1000 bp, Homo Sapiens
tacagtgttcagtaactttaatacagaaaatctatttgatatttattaaacttagtttctccaactatggtttggcattgtacaaagcatcttaatgacacagtagagttaaaaagatctttacaaattgaaatgtgatacccttgtctccaaatattttaattgccataaatttgtttaaaaatacacattaaacgcatgtttgacactctaaactttctatactctcaataccacaaaatacatataatatactatacagatgtggaaaaatctagttagtatataatactttgctcaccattaacagctttatcgtgtgaaatgcacatactgacttagaaatcctagcttttgagccccaaagtacctctgaaattgtaatgtattgcaacaaataaaaatcacagtatataattgaaattctggttgaaaatgtcagatgcctaaatattttggataaaagaaatgtaaaacaaagatttggttcatgtacaaaacaaaggcatccttatcagtcactaacagtacctttctgcaaaatcaacaggcttttaatttatcagtgacattatctcccctccaaaaccctccccaaatatcaaacaattatataccaaataattttaatttcaaataaaaggattttcaataaatatataagcatttccatcctccatatacaaaatttcttaaaaccattcaaaacggaggctagatagaaattttcataactgtgcttaccaaccccacaactggcccttaaaggtggtgccttttcaggcaatgtcaactggccagttctgttggtgagccccctacccccaccccacccatcccagtactgttgaatgctcatgttaatgatttgccaggtgtgtgcataaagttgtaaaatggggacacttctggaacaccaacaacaaactcaacaatatggatgatcatggcattgatttgaaaggcagcatttccaaattgatattttccagagaggaac

SEQ ID NO: 339647 - DNA, 1000 bp, Homo Sapiens; identical to SEQ ID NO: 159162

SEQ ID NO: 339648 - DNA, 1000 bp, Homo Sapiens
ttagtagcacgattattttattatatgctttataaaaaaacaaacacccaaagacatacaacacaccgccctcaccccccagcggccattagggagggggcttatacttttcctaatgtagatctggccatcttataaagcagaccacattatttgtttccatatatacctgtagatatttctctcccctcaaatatttatatctcgactaaaaaaaggaggtgcaaagagtatataaagataaatgagattttcttgctgttgttatagtacaaacaccagatgactaccagtggagtaacagggcaaaacaaaaacacaaaccccaccttcagtgaggaatggaaggtctgttaccgacctcaagtagctgaatcacctgctgtaactggcacctccctgacaatcatgggtttgtagggacatgggccaggtgatggcttctacttgtttccagaaggctaatgtgtcctacaccctttcttagtaactaaagacgaactacgggagaacccagtatttggattctgcccagaggtattaaatgcacaaggaaaaattagttatgtccaagtagcaagcaataatatttttaaaccaacatggttaaatgttaagatttgtagaaatcaaaatatttattcacataattttaaactaaagttgaagctaatatatcttccgtggtaatgatttaagtgcaagtgatgcttggctttctttcacattcatttcttttcttctgagtgaaggcatatcagttattcttgaacaagtcaatacagctctgcaaaagggagacattgttcctggcatgttttatttccagttcagacatttcaattagattctttctaaatgctgccactctcttccgtttgaaatttatcagttcttcttttgcagattcggaaagttgttcaaatttctggcagcactcctgctggtgtgcctcagccaacttgacgtctttgctctttaaccgggccttatccagagc

SEQ ID NO: 339649 - DNA, 1000 bp, Homo Sapiens
tttttttttttttttttttttttttcacaaatgaatattaaatgttttactgtttttgtctaaagtttcagacatttctaaacaaaaaaaaaacacttatcaagaaaagtgtaaaaacatacttctttacgtatatgtaaatgtaaaacaacaatttttacatatgtgtaatatgtatacatattatgcttaggagatttattcttttactatgactaaataataaaattatataagctatgtctcaaagttttggggggatttgtattttctgcttgactgagtgttggctatagtggagaaagggcataatgtctttctttttcaatatcttcaagaggaggtgattctgtagtccttcacatatcgattttgaaaaaatctgcttttaaatgtttttaaggaataacaaaattacaataacaatcttttaaggaataacaaaagttaagcttgagtgacattttcatttttttcagtagctcacatgaaaattagagaactctagatattattaatatttctgaaagaaaaggaagatttagataattggattagggaatacataaattgtaaatcggtctccatttctagagtacacaattttcttatttgaaaaaaattatttcttatttcttattgttaaacagaatagactttacagtaacaacaacaaaaaagaaaaatttttaaaagaatcttccaattttcttattagcattttttaaaaggtaataccatctctgacttaattttccgaagtcttttcatttttttctaaagggagtctatgtcttgcatctatagttactttatttaaattgttctggaagagaagattatcttctttaagcaaagcttctaaataagtgtcagtctgctccaggtcaccttctggaccacccagttggagtttctgcaacaatagtgccagttttatacgaagattcttcagcttatcctcagagatttttcttttattttcacattgccccagaga

SEQ ID NO: 339650 - DNA, 1000 bp, Homo Sapiens; identical to SEQ ID NO: 159163

SEQ ID NO: 339651 - DNA, 1000 bp, Homo Sapiens
ttttttttttttttttttttttttttttttttttttttttttttttttttttttaaccacccagaggccaccatttactgcaagggtttttctgggaccaggagaggaagaggctgctctggcctgggacacccccactgctctcaaggaactggcatctcagtggcctctgagcccaccctgagccctgtgggagtgcgggggcagtgactggaatgtgctgctgggcaggctgcagcagccgaggtggccccagggcagaggagtgcagcgcagcctcatgggtgccctatgccacccctggtgctcactgggctgctgatgccgtcctgggtcactgcaccggtgaggtggagcggcccaggccaccaccttgactgggaagggggtggggggacgaagacacatctcactgtcagggtgggggagctcagggctggctgggcagaggctgcagtggggtcaggctcaaagggtgggatccagggtcaacaggagtgcggctgtgctcgggagctggctgttcccagaggaccagctggctggtccgagaggatgacggctgctggccaggagctccctcgtggatgccttcctgggctcccaggaggatggctgtcagagggggcacgggcagccgcgggcctcaggcccacgtctctgtctggaagcgccgtgtctgctggagcctggctagatacgcggctgcgtccgggctgcagagtccaccctcctcctggaagatggacatcagggcttccgagacgtccgctggcatggacttggcgttgcctgccaggtagaagtatgcaccctggcggtccagcagttcccacacaagcgaccccagctcccggagccggtgctgcacatatactttctgctcctgttcccgggagaaggcagggatgagggtcagacagtcccgcttctccagctcctgccactcagcctcccagtagaagtcttggtcccgccagcggcagccaaaaaacaagaa

SEQ ID NO: 339652 - DNA, 1000 bp, Homo Sapiens; identical to SEQ ID NO: 159164

SEQ ID NO: 339653 - DNA, 1000 bp, Homo Sapiens
tttttttttttttttttttctagaaacatcttttatttgggtaacaggtcccaaaacaggtcagttaataaaatagattctaaagaatatgtccctatgcacagccctccctccccaaaaataacgctgggggtaggcattgcccttcccccttgggctcctcgggtgtatttaaaaaaatgttttggcagctcagtgtttatcatctgggcatgggacaccatgtccatgtccccatattcctagggtacagcagcagtagatggctgcaacaaccttcctcctaccccagcccagaaaatatttctgccccaccccaggatccgggaccaaaataaagagcaagcaggcccccttcactgaggtgctgggtagggctcagtgccacattactgtgctttgagaaagaggaaggggatttgtttggcactttaaaaatagaggagtaagcaggactggagaggccagagaagataccaaaattggcagggagagaccatttggcgccagtcccctaggagatgggaggagggagataggtatgagggtaggcgctaagaagagtaggaggggtccactccaagtggcagggtgctgaaatgggctaggaccaacaggacactgactctaggtttatgacctgtccatacccgttccacagcagctgggtacccacctccagcctcccatgtgagcctgtccttatgtatagtgtccaacctctgattctagcagtcaagtgtcttccccaatcctaatgtcccctgatatgtctctagcgacttgaccatctcttgttccttgggactggggccagcctcttgtctgcccacttccctctcattagtcagatagccccaaaggctctatctttagctcccagagaactttttggtcctcagtatttcccttcccctttccttcctattccccacaactgggggagggaagggagaacaggggcacctgatcatcaatctcccctgcccctctcttgaag

SEQ ID NO: 339654 - DNA, 1000 bp, Homo Sapiens
ttttttttttttttttttttgagacggaatttcgctcttgttgcccgggctggaatgcaatggcacaatctcagctcactgcagcgtctgcttcccaggttcaagcaattctcctgtctcagcctcctgagtagctgggattacaggcacatgccaccacacctggctaatttttgtatttttagtagaatcgaggtttcatcatgttggtcaggctggtctcaaactcctgacttcaggtgatccgcccgcctcggcctcccaaagtgctgggattacaggtgtgagccaccatgcccggcctaagaaatacttttaagtatattttcattagctagaattgcccaatctgtgtaggtataaattacttggtatagggagagagaaagcctatcttacctgttgctttcttacttggtggtaacatccagcagttagtctatttataaacataattactttttcacatatgaaccataaaatatttaactttctgctctatattgtttgtttaccgctgtatctcccacagcttgaacagtaccaaggtacgtagtaggtgctcaataaatgactattgaataaatgaacatatccaacaaatgttctcaatgtaaaggatcagagatgccacatgttctccttgatgggagagacccttccacatgggaatgatgggaaggagttgtactcctggatgttcagtaactgcttctaggagaaaaggtagagtcctatcactaagccgcagatatttatttgtgtgtggctagaatgggatgttttgaatcttctgttacaaccttgggaacgtggctgttatttcaatttatgagccagaaattttcacatcccgaaactgcccagagttccaccagcctgggtatagtatttgttataatctagtcgtaacagtagttgagccaaatctgagttgatctgatgattccgaacactggagagaatcttgaacaggagtgaagactggcggctaaagccc

SEQ ID NO: 339655 - DNA, 1000 bp, Homo Sapiens
tttactgcagcaaacacgtttaataagaatacaaaattcacactagaggcacattctggggaatgtaaatgaactatcacaagtagtaattctgctggaagaataaaataaggctctctgagtacaaatatacaggaaggaatgatttaaaataggtatgatttacaatcacattacattgtattaagcactcaaaacaggcatattaattaaaaagccagctaaaaggcatttgaacatatataacaaatcttacagtccacaaagttcatgtataacggtaattttaagtacttcatttcaacacagaagaaatgaacaggtgagggatgcctctcaaaatattaatttatgtctatgacaaaaactaaaagagctttacattgaaaatggattacactactgatagaaccatgtagtggacagggcaaccacattaaaacaaaaccaacagtgccgagcaactaaaacagtactggcctttccaatcctctttcttcctggtaccaccacactgtcccaaattacctcttcattacccaaatcaaagaatctttctgttttcccaatcctcaaaaggaatgaagaaaaaccaaagagcaaactcaaaagatgatttttaccataaacctcaaatgtggcttaacaagtacaaagaaacccaacattcatacatagtgctccattccatggaaggaatagacacatcaaacattatccaacaggggtttctttatggattttgtacattggttgaacaagaattactgtatctgagaaggcacatatctgtgatttaaggcttaaacggtattgttacatatggaagtcaataaaagctgtctatgtattcacttctatcaaaatggaactgacccaaaaactagttttctaagtacagatttctactccagaaaccattaagaatttccattcccacgtccacctgtcaaaaaaaaaaattctcttaagcaggttttgttatgaaccaaaagaaatt

SEQ ID NO: 339656 - DNA, 1000 bp, Homo Sapiens
tttttttttttttttttttttttttttttaacaaacacctaatgtttattaataaattagtacacttgaaggcatttttctgatatcggtccttcaccactacccacaaaccccacccacacaaagggagtccacgccacctttgcattggaacctggcaactgagcattagaaggtacatttgtaaatgggagcatagttgcaaatatatcagacaagggttcttacagttgcagccatttttaattaaagtaattggtgaaggaatcccaccaggaccaaggccttgagagcagattggacctattgattatgtgtatataaaaaacaagacatcttttaaagcaaagctgggcaaattctctatggaaagggcgccactggcacttgattttgactttccaaagtgcagcaatgtgttccagaacagctcaaatcctaaaaggtgaagttcaagttctttggtggcccagttgtcaagccacttaaatagcaaatcctgatggcttgaggatttcatttctccagcccagagcatattagcataagaagagtacaagtaatcaagcattctacacggtgtccaggtgaaaaccatacaatcagcaatagtgtggtcaagtttcagccatgaatatgaactatacaagacatatttaaaagataactcaaagttgaattgcattacagtaactcaatggggtcttaaattttcttaatctttaagaaaatttataaaggacaaacaataataaaaatagtaataatatttgtttttaaaaagtaggtgtgaatgttaagagacataaagactgcttataggattcacaagatgccattatacttttaagaagttaagagcctcacaatccagtgtgtgggaaaagtcacactgcatttatggtaagttaagtaaatttaaagtgcacagaataatcttgaaaatacataagaaggcaaaatggagaaaatatggaacttaaaaaactttagtggtggg

SEQ ID NO: 339657 - DNA, 926 bp, Homo Sapiens; identical to SEQ ID NO: 159165

SEQ ID NO: 339658 - DNA, 1000 bp, Homo Sapiens
ttttttttttttttttttggagaaaaattcttctttatttaaaaataccagtaatactgacagacttcaaaagcaattcacgcttccagaatacaaagtacttaatacatattttcaaacctgtttgcatttcaaacaaagttagcgtttttgtaaatcaaatttgataacccgactaaaaatattttccagctttattatttaaggagctgcacagcctttaaagtggggaccaggaggcaggcagaggcagagagactgaatgcacccaggactgcgcagcagtctacagcaacatgtcccacaactttggtgctgggaacacaagtaatgcacaagacagctgccctccagtgtcaggatcctgtgaaacagcatatcaaaagatcgccagcttcttataatttacacactttcatttaggattgctttttgaagaaaatctttaagaatgccattttaatttaatatccagaaccctgaatttaaaaaactaatgaaagaaattaactgttaccatcaaaatggttgttgctgagctgtgtgagtaggaattctatgcttttttagatgcaagaaaattaacacataatgcaagtttaatttgaaatcacacaagttatgtatgtaggctcagatagtagcaatgttcacttttattactaatagcttaactgaaacagccatctattcattcctccagcaggaatagcagcaccaagatcttctaaaattctttacatataaagcttaagtcattatccaagtcccattctttgcatgctccaattcttgttatcttatttaacataaaagcaacaggatttggagagttactatttgctgtattaaaacagttacacagcatcttgtactgtcaaaaagcaaaatactgtgaatggcagcctgtcttcacagctctaaacttgaagctgccaaacagtcactgcttgtgccagcagtggttttccacagaaaaatagcagaaactaaaggaatc

SEQ ID NO: 339659 - DNA, 1000 bp, Homo Sapiens
tttttacctgaatttgacctcgcctcatagctaatgtgatcaagagtagtttttttttttttttaaatacaattaagacaaaaggactttatatcagcaggactttagggctgtggttccactgtttttatagtaaaatacactaatggtggggtagaggttggagaaggaggtggaaacatccgttacaaggcaacatgacagacagcaggaccctaactagactttaaggaattaattctattcagacggggggagccctacataattaagtttcacacttataaaattatcactctgaattcagggataagaggcatttggttgtagatacaattccatctgtagatactaactttaaatttaaagaagaaaaacattcattgcatttatattatgtgttgagtttcttacatattcctaaatccatctactaattttttgttttgatacaatttacagctatggtaagatgattaccacagccctgattcaggtgtggtctttagcttcagaaagtccatcggtcatgtagctgactgtcattgctaaatctgttgcttgcagaggcctcagtgctctggctttgccgagtagagtcctcaccatttaagctcttcctacatacaggacatgtgtcatgcagttctagccacggcacaatacaactgctgtgaaagaagtgattgcaaggtaactgccggacttcctcttcaactgtgtaatcttctttgcatactggacactctaaacccatatcaacttgttcctgagttactgtcactgttggaagagatgtgatcttttccttgtcagctgggggagggcctgtgttttccagttgtcctaaaagctgggttacaatggcatcaagccctgtctgaccccaggcatagtccccagggttggagtgcagcatcccgctccaggaaaaagggtgtggagatccaggaatggcagaatttgcaaagaatcctgcaaagatgtgttgtagtattcc

SEQ ID NO: 339660 - DNA, 1000 bp, Homo Sapiens
tttttttttttttttttttttttttttttttttttttttttttagctaaaatttttttaatggtaaatactacctttatttaaaaaagttatacatgctagaaaaaagcataaatgatatatgtaaacaattgtttactcaatactttttttccttgaaaaaggtgcaaatgatctttaaatgtaaacacaaagttgccaaacatttttgtagttggggaaagggagaaggaggttattccttttaaatgcagttagtcttattcaaagatttttcttgcaaaatatattgaaaaaaatttgtctatgaatacaatgaggaaaaaaaactttaaccattgaaattattttttccttaaaaatttttaactttttaccagaaagtgcaatttgagagaagtagtaacaatgaccttatagaatgaagataatgatacattgtttgtataaaagaaccaagatattaataaaatgcctcaattgattttacactctttaatgtgtgctattacattaactgaataattcattcccttggaggctgttattaaaggtaagcctcagcttaaccaggcctgagcatcaagaataaattgcataacagaattcactgctgggagaagacatttctccctgctggtccttggtagcaataaggaaacaggaaggacagttgctttagtcagtaacatttttgagcaaaaactgttgcagagctgcatgtgattctcttggattctcaagacagcatatgagacttatatattgtttttataagaggcactgagcagagctctagatctagcagaaactctatgagaatattatgaaaaaaagactaaataaacaagttcatatagaaagaaacaagacataaaattacactgatgaaaactgtagtgtctgagtcctggtttttattgatttagtatcccttctgaattgtactatttaaaatgagatgttgccttttcttgtttttttgttttttttttttaaga

SEQ ID NO: 339661 - DNA, 1000 bp, Homo Sapiens
ttttttttttttttttttttttttttttttttttttttttttttttttttttttttttttttttttttttttttttttcacagttgagggtttattgccagtgttaggaagaatggggggtctgggtggccaggggtcttgggaggaattccaaatgagcactgcagggcctgtgagtggggaggagagctgctgcccccctgccacccaggaggccccagggctgatgccaccatatcctgactgctagtggtgccttaaaaggtggcctccccacaggaggggagccttgggggcccccaggagtcagccctcaccaacaagccctctctcaagggggccaggggcctttattcctcatgggacaggctgggccgtgcccattttaggggagctgaccacacctcagcagctctgggctcccagattttatgtggtgggccctggggccgggggtgggatgcaggcatcccggctgatttctaccctgcggtcttggggcacctacaaggcaagggatcctcctagacagtcactgatcccctcatcctgggcatttgagcccccagttttactcacagactgagtctcataagggtcccacccctggccagccctccctcgaaccacggccccacttctccccggtcaggcgatgtgctctctagaagggagggtggtaggcagggggtgcacccagaggtggaggcagacagggccctccttcctggcctcctgggccaggccaccctcacccctgcctgggagtgaatggccacgaccccgggtgcacacacatcttggccccaaaaggactccaggtgacagcaacagccacacatcttcagggatggatgcaataagagccacacctcggccactggtctgttagggctttgggaagagagtttgacgtggaggccgcagggccagtctcccaggctgggggccctcctcgtgggtgccccggacgtgtgtccgtccctcgcggcatccacag

SEQ ID NO: 339662 - DNA, 1000 bp, Homo Sapiens
tgtttaaaattgttttattaatataccatagatatttacaggattttaataatatacttttttttttctttgcaaacaagtctgtattaagaacgcatcttgtgtcagaggctggagagcatatatacagaatgatttgctttcaaaaaactctcaaagatttatggttttattcatcagataagtggctgaatagcaaaacagtgaaaaatcacaatgacaatggaaagaaaatgggtgctaggttctaagaattgaattcctctggaactcaaacttgacatttttggaatcctaatttcctcactgctgcttccatctccaccatcactgactgttcttatttcaattaagtagtcttcttcaaatggaaccagaagctcagctgatgtattgtttgtttccaaaatatgagttttactctgtctgttttgccggtacagaatcttgtaccccaaaacttcagactcattttccatggtttttacatgctcccagttcaagcataatttagagtttgtcagcttccaggcaatgtttgctggtggttggcttggaggagactttttggtggtaacattgactggggggcttgagggccctgtcccagcagtgttgtaagctcttacggaagcaaagtagatggtattagctttcagccccgtgatgtttttggttgtgacatttccactgactctaattttacctatcatggattctttggagtcatctgtccagtataagacctcatagcccagcactcttccagtgtttctattccaggcaatagcattccatgaaacctccatttcagaagcagaaaaactctggagagaagttccccttggggccagttgaggttcatcttccccagagtagacaatggtcacagtactcagggatccttctccttcattattatacacacccactttgacttcaaagggagacagtgggatgatgctttcatttctgtagacaaaccttgatgattccacag

SEQ ID NO: 339663 - DNA, 1000 bp, Homo Sapiens
gtttttttttcactgaatttaggatttacttttctgaaagactttggagagctgggcaggggcccgggttaggaaaggaagaacttctacccccaacccactgcccaaggcctgtcctcagtccctacctagcttctagggaaactattacacagtcctaaaaggatgcctggaaacactgcaggatttgtcaaactcacccacctcagagtcctgtccctagaactgtgggaaaacatttcctccttttattaggtcccagtttcagctaactagaggagcttttcccttgactttaaccatgccctggctcaagttcactcgcatatgtccctttgctcccgacgctgggtcaactcctgattgctcagtaggtagtcatcaatgaatgtgaagatttcctcgggggtgacaggttccatgtagcggtctcggtcaataccctgcttgtcaatcaacaccatgttgaagtaggagcgagtgaggcgctgaaattgcctgagctcctcgatgatgttggctgacagctgttgctcccggatgcgccccacctcctgaggtggctgtcccaccagttcaatgatggtcacatgccgcaaatccagtccacaggtggattgctgtagcatagagatctgcattttataatatcggttggaaggatcaggagctgagatgatgaggagtcgctgtttctcatagaattgatccaagagaccagcagctgagttgacgttgacgttaatcttcataggagcacagattggtggtgaacctgaccactggcggctggactgacagacccgggagggtgtcccctggcgatcataaccgccatcacagtggtattcacaggtggcaccatagttgtcccccgctgaggtgcaggtgaggtagccgtgctgcggaggtttcagagttgggcagcgtctcacttgtactttcacaatgaacttgcagctggcccggttgtaggctcggtcataggcagtgtaacgaa

SEQ ID NO: 339664 - DNA, 1000 bp, Homo Sapiens
gaagccattacggtccccaagtcgaccactgatttattttctacttgtttcttaataaatttgttggtagtgaaaatgaatgctatcaattgaaggatttgggatttgcttgttttgtagctttgtggttggttggccaaacctttgatatagtattccactgttgttcaaaacatagatagtacttttgggagtgaggggacaggtgatcctgtagattcccaaagaaaaagcaaaaaggcaaaacatggccaacattatccatttacttttcagatttactgagtgaaaataattttctttacataaacatttgatctaaatcacttttgttgttgttgttgctggttgtttgctttttaatactggaaacaaagattcagtttgaaagataccctgaaatcttaagagtagcatacaccaatccctcccactctccacccaaaatctagttggtttaaatgagcagaatgatccgtttttccattttaggtgagcagatgtttatcaaagatcttagaactgtttgcctcatttatcaagaaaatttacaagggaagaagccattaatcgaatttctacttgtaaatgtaagaagactagtactcaggttcatatacttttaacaggagcttgttgaaagaaacgttaacaattccaaaactaaactaaacgaattttaagttttttctcccaaaagcataaaaatggagacgatcttaacaggaaattcttaaaaggtaaaaacaactcttccttgtactagtccttgggtagttaccatacaacaggttcttctttttgttagtttcgttgaaaagggatttttggtcccaagtctgttcctgcttagtatctgctccggcctcctcctctctccaagcggcctcctagacggcctccgcccctgggcaccctgcagcctgaccggctgtaagaatcacgctggggagggcagcccctttccatggacagagagagcccacgatctggtctgccc

SEQ ID NO: 339665 - DNA, 386 bp, Homo Sapiens
tttttttttttttttttttcagttgggctggatcttttatttcatgtcatatcctctccatgcccaccactgttctccagctgacacttcatggcttgaggtgctcctgtgggatcagcatttgccatctttcatgatctggatgtcctgtttggtttttatccgggccaagcagagctggcattcattcgtatatgtgagcccatcagtgccgcagaccaggttggacatctgggaacaggttggagactctaccatgtgttcacagatgggcattcttgagaaagggagctttcctgctgccactggcacttccctgtccacaacaaggagggcagccaaggccagggcgattacccactggcggacggccatgctgatcctgg

SEQ ID NO: 339666 - DNA, 1000 bp, Homo Sapiens
ttttttttttttttttatgtcataaaatgggctttaatgttccctcttacaacatggtattactgcttacactggaactggcacacagctcccaaggttggtttactctgaggaatgaagctggtatcccccctggctgcagtgcagctggagcggtcccaggcactgagctcagtataaactttggagtctaaatacccacatctcctgtagttcaccaactttggagttctggaaccggcagtgcagattctgtgtatgccaagtaaaccagacactgttctgcctctttgtactaactgctctccaaccaccccctactctgcctccagtattactctgctttgtgagatactaaggaatggtctgcctctgcagggcctaaatctcccatacttgcggtttgaatcctctgttctgttttgtatttgctttaaatatcttggaagtgtgacccacgctaacatgacttgccctgtccaggcaactcttggaattcacatctcccacgtttcttcctagctgatggctccctactacgcccaccacagtagggtgattccaaagaactgcatttaggagtgaagacaggagtctgtcttccttctatacccagtcagtccttgtctcgatcactttatctctttaacatgcacatctgcatgtacatagagctctggaaggatcatcttatctgaaggctatggaaacattttctgattcatggaattatccctttcattgagtgatgttcaaactgtagactggtctctgccttcccagatgtcttcccgttgcttggcttccaaccgctttctctctctggcttcttgcagtttcttgagctctgcttctcgttcggttttgctctgcttacttcgaaccccaagggcactgatgactaaccttctggctagggctgctgaagtctcaggacgctcctttgctggctggaggaactcagcataagctctagctttggccttggctgctcttgtgg

SEQ ID NO: 339667 - DNA, 1000 bp, Homo Sapiens
ttttttttttttttttttttaaatcctttatgtatttattatgtttgttgcatcgagtggcataattgtttgaatacaaaactaaagaaattcagggaatttctccctaacatgcactgtaatagttaaaacacatacagacaactgcagattatgttagaatacaagattgttatttgctatttaccacaattgcaaaatcaacttgtcaaggaaagacaattagagtccttcaaatatcttgatgtttatgtgtttgatggctgtaatatacatgtaaattgtggagtatgacatacaaaaaattattgctttaaatatcattattgctagccccaaaaagagttgcaaaacatagctaagtgtatgtttttttcacatagcaggcatttgcctcccattccttttcctcaataaacaataggataaaggtctaaagccttgactttagatttggagttgacaatctgcacaatccttctgcccaaagccatgaatgtcttctcgtgtaagtgcgcgtgggtgggtgcgtgcgtgcgtgccacgcctgcagagacttaagctttgggatacagagtgaccgtgtcatagccctctgggggctttgtgcgggctcttgcgtgggtttcgcagtacagctccccttctatgaagaagtagcccttttgcttgaggttgaggttgcagtcggcacacacgaagcactcagggtgccggtacttatcccgcgccttcaccacagcaccaactatgccactcccacatttgtcacagagcggcatcctctgtgccccgcctgaaccgccatggactttcgtcaccggagctctcacactccgcgttccagccggacggtcatcagagccatcgtccaccattccctggagcactctgaaggagcccgactggcgaggctgtgtgggctcattccgattgtcgtggagcatccggtacacgtccgactcggggggcaccgaggctgtgggctcgttcatcaaag

SEQ ID NO: 339668 - DNA, 1000 bp, Homo Sapiens
tctagagctgttgaaggattggccaggccggttcttttcttatctctgttgttctcgaggaaattcctctaaggtgagccaaggtcagtggctcattttaacttagagtaactctctggggactctaaccagacttccaacagtgctctgggccccttagtaagttcccagggaagcagatgaaactaattaggacatggcccaccaaaggcgacacaagcattttccccgctgtgcacagagacctccccacaactggggcaaaggccgtggaggaaatctttcaagcacagaggggtccgcggtcactgtccccaccttcagctctctgccctgacaacctcagcctgttttcaccatgtttcttctccccaaggcacaaatatttctttttaacttatttttgtgatgtacccaactaaccacaaagccaggcctgctgggatgaggataaaaatcaaataaacaatcctctcaacgtccaggaaatggctgccaggccttctgacttcatgaaacgccggggccagctgtgctcttctatgctgggtcctcttcgtccattgccacattgctgtttgtattcttcttctgctcagcctctggctctgcaggcagaatgctggtgacggtgtggagaagagcttcaatctgctcctccgtgagccgctcttcactctcttccaccatcagctggatctccacagcagtcacaggccggtggttcagcagctggagcttctcagctttggtcaacttgtggcttttcaatgctgtgagaaattctctgacaatttcaggactctggtgcctgcatggtgtttttgatatgtattttaacgtttcataggtgatagtgttcaagttctgttgcccagagctgtgtttattctttccactttctttacgctgctctttcagatcagttagtaactgaaatacctcgtagttactgagaagcgcagaattggcatccttcacttccatgacgtcccgcctc

SEQ ID NO: 339669 - DNA, 1000 bp, Homo Sapiens
tttttttttttttttgagacagtcttgctctgttgcccaggctggagtgcagtggtgtgatctcagctcactgcaagctacgcctcccatgttcgcgccattctcctgctctagcctcctgagtagctgggactacaggagcccgccaccatgcctagctaatttttttgtatttttagtagagacagggtttcaccatattagccaggatggtctcaatctcctgacctcgtgatccacccaccttggcctacctaagtgctgggattacaggtgtgaggtaccgtgcccagcccctggcctgtatttttaatagagacagttttgccatgtttgccaggctggtctcaaacttctgacttcaggtgatccacccacctcagccttccagagtgctgggattacaggcatgagccaccatgcccactcacctgtgtgattttagaaactgcagactcctggattttactgccagagatttttatttagttggctagagtgagcttggtaatacacagtttcagtgcacactccaggcaattctgatgcacatggtcatgaagccccactctgagagtcatgttttggccacctgatttctagtaaacaaggtctggcagggaaatttcccatcttggttattatttatttagagtgtctcaatctctcacaaggcagcggtgtgatggcatgatcacagctcactgcaacaaccgcctcccaagtccaagtgatcctcccacctcagcctcctgagtagctgggactacaggtatgcgccaccatgctaggctaatttttgtattttttgtagacaggattttgccatgttacccaggctggtttcaaactcctgggctcaagtgatccacctgcctcggcctcgcaaggtgctgggattacaggtgttggcaactgcacccggctccatcttggttattcatagagtttcttgcccatgagctttctcatgttgaataaggaaagtatcataactgga

SEQ ID NO: 339670 - DNA, 1000 bp, Homo Sapiens
gaataaaaaaacattaaatcaaaagagaaaaggcaaattaaagggggagaggcaaagggttgggactttgacttgaaaattccaaagcaagtcaaaccatagtatgcaatttaaacgatgtgatatgtgtgcaacataaggtggaccctgaagttaactttaagaaaacagtagcaatttataagagacactgacagactacaaaggtggtttcctttattttggtaaactttaaagatctcgggagggtgtggtggctcacgcctgtaatcccagcactctgggaagtcgaggcaggcggatcacgaggtcaggagttcgagaccagcctgacaaacatggtgaaaccccctctgtactaaaaatacaaaaattagccaggcgtggtggcgtgcgcctgtaatcccagctactcaggaggctgaggcaggagaatcgcttgaacctgggaggcggaggttgcagtgagctgagatcgcaccactacactccagcctgggcaacagagagagattccatctcaaaaaaaaaaaaaaaatctcattttgatactaattcaaaaggccaaatagaatgaccctctttctgaataattaaaacaatttacattttaaacatgtatttctgtaggatgtattctatcatctgaaatattaataagatccaagaatttcttaactgaacagtaaacagatccgaagtatataatctgtgaaaatgatttagaaagcattttgactgggggaggtggaaaataaggacatgtaaatgatctgcagtttaaaatgcaaaatcctgtcacgttacatctcacatgtccaagacatcctccgtgtgctgaaaaaaaaaatgatggttctcagaaacggtataatccattaataagtcattcatccaatacataacaatttttaaaactccttataaaaaggagtccacgtattcacagatactgtagaatccccagctcctatgtatattaccgaaaaatgcaaacaag

SEQ ID NO: 339671 - DNA, 1000 bp, Homo Sapiens
ttttttttttttttttttaagtgaaataatagatttattcaaagagaaataaaatgtcctgggtaaagcttctgtaataatactatttctgatactgtatctctgaaaaatggctaactagtcaccttatcaatacatttaaggcatcaataataggtaccactgaggacatacattgtgaagaaagagaagaataagtcaaatatcaaaacatacttatcatgacaactcaaggtgacatgaatatttaatgaaaatttagaatataacaacatatgactctcattctgtggacataaaaggaaaaatacagtaattcattttactcattacattttacaaaatcagcccaatgaagcagtattttttaataaaaacagtaatttaatttcaaacaaatatattaccatcctattcctttatcttgtatatatgtatctaattggcaaaacatactttactgaaatcagtaacaatccaatccatgatacttcaattgcttcgatcaataacatcttaaatttgaaactcatttttcttatgccataagcctgattatcagttctataaaaacgctacaccctattgcttggcccattaagtgtaactagtcttctgcacaaggctaagtggctaaggtacttttgaacaaccacacacaattcatcaagcacacacactcactcctgctcctctcacacacggccaccagagcagctcccctagttctcttgttcctcatagtgagcatagccactagcataggtccttcctaaattcaaattagtaaacaaatctgatgactcagtatctgaatcctttctgccttcatcttcttcctcttcatcatcctctgcttcatactcatcctcctcctcatcgtggtagctggtatcaccatacttatcagatgaaaggttcttccaataagcatcatacccagaagctccatctccctcttcacctccagtctgcctgccaaatttcagggagcgtgttg

SEQ ID NO: 339672 - DNA, 1000 bp, Homo Sapiens
ttttttttttttttttttgctgattcatggacttcccccatttttttatttctatataacacatttaaggacattaatgtactaaaacgtttggtctgtgaaatagcggaatcattagcaccaaaaggagttatggagcttgtatatattattaaaacaatgattgttactgttggtcatgggtaaaggtttcatttcatttttacatcccaaagttcttgaaagtgcctgtggacaagagaaataacacttttcaaaatctccatggggtcgtcaatacgcaccacagagactgtacttggccttcccagttttggtttatctggtagacaagaaaaccagggcccccagatgattaccaccgaagccctaaagaagagttcccacatgcacccactgatgtgcaggagggatccctacagtacatttccccccggactctgtttaggaatgcgcttttacttgctttttaaaaaaacaaaagcaacatgctctgcagatcatggagtgcctagtgcaattttctccttgctccaactccagactggaaaagggtgaaaccattatatgttctgctaatgctggcctgtggtcgaggcccttggcctgccatgctttgtaagctcaggagcccacaggagtcagaaggtcagagagcgggagccacagtcatcgccagatctccccagcatctcatggcccatcagggcagttgctgattccttttcttctccgtgcctcagcctttagttgaaattacaacaagtcaaatagctgatgcttttcccttctccaggtaagggtgaggatacattgttcacaagtgtgttctgtctggcttcactgatgagtcggcatgctaagtcaaggaagagtttctccacattatcagattccttggctgaggtctccagataatacatgtcctgagcttctgagaattcttcagctcgctgctgggaaacctctctcctttcagccaggtcaatcttgttgccca

SEQ ID NO: 339673 - DNA, 1000 bp, Homo Sapiens; identical to SEQ ID NO: 159169

SEQ ID NO: 339674 - DNA, 1000 bp, Homo Sapiens
tttttttttttttttttttttaaatattaaagtaactttatttgaaaggaattttagaagcttgtgtgcagagaagttgtgaggacctggtggacaccaattatatgcttaaataaacacttgaacactactgcaaacacatagtatgaatattgtggacctgtgaatggttttttaaatctcacttcccctaaaaatggggatttaatattacttaatattcaagtaatttagcagacaacgatgcctttgataagaataggaaaaaagccacacatttaatttcatcttcatccagtttggcctaggaacaccacaaatcttacaggccagttgatgttcgctttttcatgctccgtcgctgggctaagcttgaagcagctacaggctctaggactggttgaaaggtcttgtgagtcagggcagagtatgttgcaaccattgctcccttaacaacatgtgacacatcatttctctttggctgatcatttggcaactggtctctgtgagttatccatgagtgctttaatatttgttcagcagtataccgctgatgtgggtccatatgaagcatatgggaaagcaaatcctttgctccgtctgaaatattgtcccagtttccaccactcaaagagaattttccattgcctatacgcagcagtatctcttcaggagtatcattggggccattagcaaatggagtgtagccagccaacattgtgtaaaaaaggactcctaaactccagatatcacaagcagcatcatatccctgttgcataagaacctcaggtgcaacaaagtttgcagtgtagcatggagttaagagaagtccattttctcctcgaagttgttttgcaaacccaaaatcacatatcctgattgaatctgcactggctgattcatccatgtataaaatattactaggtttaagatcacgatgaacaactccttgacaatgaagatagtcaactgtcttacttattacatatagtatatcact

SEQ ID NO: 339675 - DNA, 1000 bp, Homo Sapiens; identical to SEQ ID NO: 159170

SEQ ID NO: 339676 - DNA, 1000 bp, Homo Sapiens
aaaaaattgagaatgggtgctcgcatagaaacaccacacgcaaacactcattagtttttaaccaagtcactagtccttccaaaaggtgaatatgttgatgtgtccataccttgtttgaacactgcaatacctgattaagaccaggatactgccacatgagttttaatactctctcatttttaaattcaattcctcttaaacagaacagctatgattttaaagcaatgacatttttctaattgatctgaaaagtctgaaaaacaatgtctttacaacaaaaatggatttccaattgtatgtcactttgtacatagatctcactccagagatacatagactggtgaaaattctatcagagctatacataaagacatcagaagggcagcaattagtaaacaggccattctctttaaagtctgcatggcattttgcagtactctctgttcttaaatcctgtattttatcaaaggcaaacaaagaacacctgggaactggaagccagaaaggtaacacgctgaaacatatacaaaatcaatgagctttccaacatcacataatctattaaaaaaattgggacgtgggggctcaggtttactttattgtttttcttctttttcatgtttagcttgaatataaaagaagctctagacctacgttatcaaaatatattcatataaatgtatgcgcatttctaatacaaaagttttaaaaaagtctaagttcttaatttttgtaattaaatatcctagagttcagtaggcagatttatgtttgagcagcttgaaaagaatccgttggctgagcgttgtctagaaattgggtgccgctacatttcagctcttcgatgtgatttctcagcaactgcagccccgtcttcttcctcctcttcttcctcctcgtagtgttcctctcggcctttggggcggttgtcatctcgaacttcttgctcttctccatcattatttttatcatcagtattttcatcattttcaccataggt

SEQ ID NO: 339677 - DNA, 1000 bp, Homo Sapiens; identical to SEQ ID NO: 159171

SEQ ID NO: 339678 - DNA, 890 bp, Homo Sapiens
tgcttttccaactttatttagaaaaacaaatccaggtcccagtgccccctgtaccctccccgaccccagccataatttaaataacttagagacagagttggagggaggggacaggagaggttggggtcacggtggaaggaggaagagagcccactacagccgccgcagcgcccgcagcgcccgcttcttgtccgtctttttcttggccgccagcttcttatcgcgctcgccagcatgcttcttggccatgggaccctcagcccctcccgggccccctggggccccagggtcggtggaggaagcttcagtgccactggccagggcccgaccggcttcggccctgccgctgggcccgccggcgcccccgtggatctctgtgagcagacgggcccgagccgcatactcctcgtagttctccaagagcaggcggcccgcctcctcgttgagtgcagactcggggttagggtggatcagcaggcacttgatggtcagcagtacgtgtcggatgcccagctcagccgtccagtccctcttgagcacgttgacgcagatctcgccattggcgcccacgttcgggtggaagatcttggtcaggaagtagcccttgggtggggaggcagggaagtccttccccagcaggagtttcatgcggaacagacctccagcatatggggtcccctcagggccctcgatggtgacctggaggtcggtgaggtcctcctcgttgggaaagaccttgatgccatcgggtgggtctgcggtcagtgtcgtcacctccttgtacaccaggcggatgatgtgcgggggtaggttctccacgttggagttcatggctgcggccggccgggggcgggtccccccggcccccttcctgcgttcttcggtccgcc

SEQ ID NO: 339679 - DNA, 1000 bp, Homo Sapiens
tttttttttttttttttttttttttttttactatagtgttttatttatttaaaaaatatgagcatgattacattaaactatatattatacaatctatccaaagtttaactaacttaaataataaaacctggttgagcagggtggctcacacctataatcccagcactttgggaggccgaggcaggcggatcagttgagcccaggtgttcgagaccagcctggccaacatggcgaaatcctgtttctacaaaaaatacaaaatacaaaaaatttgccgggcatagtgttgtgtgcctaggaggcacaactacttgggaggctgaggtgagaggatcacttgaacccaggttgaggctgcagtgagctgtgatgtcgtcactgcactccgccttgggtgacagagtgagaccttgtctcaaaaaaaaaacgcctccccctaccccagacaacctgctgtaatttcagactagcagaatattccagaaagttcatgcttgtatcagcacagggagacattactccaccattgctaaatctttcaggctatggcttttttgtctcttggccttatatcctggacgcaggaactctatctttctcttctttgcttcacttttatttttgtgtttcttcatttttttcttggcagcaatatcaggattagttacaaactccagggccttcctctttttccggagtgcccttttctcattagcctgtttctgtacagaggcaaaggctaatgagaagctctcaagcccaaccagctttttgagtaattctatgatttcctgggatagattcttcagcaaaggatcttgctctgaataggtgctgttgagttcccgaaacaaaggagctatgatcattgggagatacggctttaccttgtctatcccaagatccattgctacggcgccgaggaacttaaagatgcatgttctctttaaggggtttctcggcgaataagcagcttccagttttgcaatccgggacagct

SEQ ID NO: 339680 - DNA, 1000 bp, Homo Sapiens
ttttttttttggaagagggacggattgtgaaactttattgataaagaattccgttccaaaggtgtattccagtcacatttaccctacataaaataccaacatcttcttattgcaaaaacagaaactccggccgttgtattgatggtgacttaagagaaatagaagcctctatataaggcaagagtccataccagaagaattcgaccaatatgagatacctccaaaaaaatcaactcaatgacctactttatatgtaagagacccaaaaaagtcagcttttgtgggaagttgatatgcagtttattgaacaaacagagtgtacagtaactaaacgaactgtgtatttccaaaggaattaagaccgcatatctggattcacacctaaaagcacatagaaaattaaaccaaagaagggcaagttttgtactaaaatcacttgggcccaggttattctataagaagattctcactggcatttgatagtaacttatcaccttctgtgcgagcttgggaaccagctgactcagtgaactgcttcctgtcttcagtgcgtgatgacacagatgtgtcaagcttaatagatcttatatgtaaatttaagaataagaagttttatacccaccctggttttattccaaagttactgctctgcaattttgggctccatccttaggaagatactggaaaagcaagagaacctttctcagctgcctgtgtgaagtgacgttgttctagaacggtgccctggggcctcatgcacgatttcacaagtatagctgcataatctgtggatgtcactgaatggaagaagaatcatcaatggtatatttaggttatagaaggttccactgagataagaaaaggttctacaatgcaggtagctgtcaagcctcctaaatatttaactcgttttagttaacatcacactgtgcattgagtgcaagattctttggttacaccatattaaccaccaggaggataactcctggtttgtaaaaga

SEQ ID NO: 339681 - DNA, 1000 bp, Homo Sapiens
tcaaaagatactctttaatagtggaaactgagggttacacagtaaggttcagacttcagcaggaatccttgttgtcaagtaaaagtttaacctagcagaagcaaatgagacccagatgtcctcaccttttttttttttttaaaccctggtgttctaagcataaaaaaggaaatagaaaataacacagaccactctattttaatatttttaagtagcataaatcataatggtttgtatactacactgtacaaataatatactgttacttttgaaagaaaatgaacttcttatagggttttctgaaatagttactccatacagctaagatcttgaccctttagccattgctacagcagatggaatacaagctttgaggttccaagtcttccagttgtgcctgtttctgttgccactgagggatgagcctctcagagccctgtcgtggccctgtccatctcctgcgccaggaaacacaggttccgcaggtggacgcgtgccgatgagtacagcttctgtactttgctttctacaagcctccttcccctttaagagaacttgcgcttcttcatggcttccgccttgaccgccaagctcttggcacagatggtcaggaccacaatgagaacgcccaccacaaatgtcaccaggggccagaggaagcaatgcaggaggacaatctcatcatgagtgcgatgcagaagcacatcatctggtctttgatgttgattaaaatagcaagtaaatggctgggaaccaatctcatctttccagtactgttgccaattcatgacactttccaaattcttctgattttctctcttacagggagggatataggagcacttggggttggtcaggagctggtgctcgtcgctgtgcagcagcgccctagagttggactcagagttgttcacgtagacctggacgcaggggtactgcgaggtgcccctgcagtcggcgccacaggtgaaggtgcactcgaacacctcgccgatctgct

SEQ ID NO: 339682 - DNA, 1000 bp, Homo Sapiens; identical to SEQ ID NO: 159172

SEQ ID NO: 339683 - DNA, 1000 bp, Homo Sapiens
ttttttttttttttttctcatttttagggctttttatgtggccttcaaagcacgttgcaaacaaatccctttcactcctcagaggaggagccattaggaaggtagggggcgacaggcacagcctacagcctctcctcaggaggacagagggggtcatcgcatttgagccccctgcagtcatctcgggggctcctgagggtccaggtccacatgttcgagggtctgcagcacatccacggcgctgtaggacttccaggcctgcatgttacagctcttcaggatggctcccagctgcctgccagggcctacttcgaaagtttgggggaaccccctgccctttttcctttcgtatatggcatgcatcgtctgctcccacttcactggggagaccagctgctgggccagcagcttgtggatgtgcccgggatgcctgtatctatgcgcgtggacgttggagtagacagaaaccagaggcttcttaatgtcgactgcctttaaagcttgcgtcaggggctccacggctggctccatgaggcgggtgtggaatgcgccactaaccggcaacatcctggtgcgtctgaaatgaaacttagaggaattcttctggagaaaccgtagagccttcagcaaattccatggctccggcaaacactagggctgcaaactctcccacactgaatccagcagcagcaacacagttctcaatcaccgagggctgcaggtgatgtagtttctcgacagcggccagcgatgccacgaagatcgcgggctgacagtgcacggtgcggtccagggtctcctgcggcccgtgcaggctcagttccagcaggtcgtagcccagcacgcggcgggcggcggcgtagagttcgcggacgcgcgggtagttgagcagaccgcggcccatgcccaccacctggctgccctggcccgggaagagcagcacggagcactggcccggcattcgccgctccgtcgccgcccagggcgcctcctcctccgc

SEQ ID NO: 339684 - DNA, 1000 bp, Homo Sapiens; identical to SEQ ID NO: 159174

SEQ ID NO: 339685 - DNA, 1000 bp, Homo Sapiens
ttttttttttttttttcgcaaaacaatcagaaaacatttattatactgaaatgtgtacatcctactattaaaaaaacaaagtaacaaatttgctggtgccaaaatttatttagcctgtttcactgggacaaactcacgttcaatgccactcagtataatttcaagtctgataagcatctaagtatttttaccccgcttctaaaacctgatgaggaattcaaaataagcacacagcattaaatgacatttattgttccataaatcttgagacccaaaaaggaatgctaaatagacaagcaaaacttttaaaacaaacgagataaactcacttctttccccagtgactggtacagaaaacatgtggtcacacgaaagcaaagggaaaaagtcagaaaggaaaactctctgcctataggatctataggagttacagatattttcaaatcgatgatgaaaatagatcgtgcttctttgtagcaaataattaaccccctttatgaataaaacataaaatgtcaaagcttttactcactgaagtagtttgtcttctgggagagatttcaaactcaaaattactcatttcctattttttgcctgaacacaatgaggatcaaatagtacattcaaatcaggacacctgggtatatggacaaagatatcctacaattaaaatggaatagaagttaaaaaaaaattcagtcccctacaccacaggcctcaaacatgcttgctgatggattctgggaaggttttggatgaaggacggagatatgggatgaaagtgagaaaacagtggattccctttgaaaagtatgctagcagacaagcatttggttttatgaaagaggcactcttatagagaaagaagctagtatgtggtgtataaaaagcccctaaatcatcaccagaatgtctatccatgattgtactaaagctcaatatttgagaggcttaagggatttgtatggtacattttagtgtttgattgataacatctagt

SEQ ID NO: 339686 - DNA, 1000 bp, Homo Sapiens
tttttttttttttttttttttttttttttttttttttttttttttttttaaggaacttataacttttatgggatccagtcctaaagtagattagaccgatgtagaattctgtctggagacgttctccccttcaattcaatgggaaggctcttttctggcatgaactctccgatgtctaatgagctctgagcaccatccataagctttcccacattctttacatataaaaggtttctctccactgtgaattctccgatgctgacttagatatgagctttgactaaaggccttcccacactcattacactcatagggcttctctcctgagtgaatcctctgatgctgaacaagatgagcaccccatctgaaggccttcccacattcattacattcgaagggtttctctcctgtatgaattctctgatgctgaccgaggtttgagctctgtttgaaagttttcccacagtcactacacttatagggtttctctccagaatgaactctctggtggacaacaagatgtgagttataaatgaaggttttaccacattcactacattcatggtctttcttccctgtgggaatttccttatggatgacaaccatctgcctgaaactttcctcctgggcaggggaccacctcagtctctccgctttgggatttctctgctgcagttctaaggtaccctcagaggtagcttcaaatgtagaggtgtcagtagcaagtttttctgagaacacctgtgattccacttcagtaatgggtggttgtggcaatgatcctttgtccttgggctctgggccatcttctgtaacaactgacagaaaatgtaaatatacctgttcactctttgggaaaggctgggtctccttaggctggagctggatgctcagtgcttcctgggctgctcccagagattccttcttctcccatggctcttcctgtgcaggtccatgtgcagggcctgggacctgcggctctggttcaagtcctttctct

SEQ ID NO: 339687 - DNA, 1000 bp, Homo Sapiens; identical to SEQ ID NO: 159175

SEQ ID NO: 339688 - DNA, 1000 bp, Homo Sapiens
ttttttttttttttttttttttaggtttcatgtttgttttatttaaagtctggttgggtacagaaaacacacacacacttaacaggttaaaatatccaaataaaatttactgcaacttttgtagaattttatttgtgctacaagacacgttgcataggaaactatttaaagcccctgaggaaaaaatatccatggtttaaggtgcaactggttttgtttcttctttggggaaaaggtgatagatggtctctgggagaaattatggggtggagttgagaagcacaatcgaaggttatatggtgggatgattggcgaattgtgtgtcctggttcttgcagcataaaatagctaatgtttgttctttttttcagtccgttggtcttcagtatctgaataagtagctatacaacgtttcaggccagtaagggagtatacattgattatactaaggaagtaacatgtttcaagaaagcagttttagagaatgagattcgggatcccaaatggtccctgacaactgcaggcacacaggaagtgtcctggcacgttgctaaggatcacctcactctactgatttgccagtatcagtccttcctcctgctcccttccaacacgcgacatctacgacgcattgtgagattcacacagcatgtctgcaccctaaagttattaatgcaacactgtgtcaagttcctgattttatgtgagtcacattttcatttttacaaaatgctcatcttgctcagatgatctttacattgtacaaaaaatggtttcatctaaactatgacttccttccgaggagacacaggtacaccaggaaggaagaggggttaagccttagatgaaatgaaatgcagagtttggcaaatggcagctggcacctctgcacatcagcataaggcgttgcttgtgaggccaaccacagcatctgcaataagcacgagagtcagtggccaccaaggctctgattcggtcatgaagttttcttcctgtccac

SEQ ID NO: 339689 - DNA, 1000 bp, Homo Sapiens; identical to SEQ ID NO: 159176

SEQ ID NO: 339690 - DNA, 1000 bp, Homo Sapiens
ttttttttttttttctatgacaaaagtgtttaatgctccataatgtgcagcttctaagtgaaaaaggcccgttaatcatccacgggccgtacattctcatgacagagcagccgccctcctcggccccccaagagggaggcataggcagggagtgggccctgtgaggcacggtcctgagtgtgcccgccaggaacgcacacgtgttagtgcccacatgaaacaggggtggggcgtgacatttacacaggagagaaccacagacacccatgtgaggagacacgaggggcacaggtgaccatgggccagggaacaccccagtccatgcatggctgaatccacgaggagcgcgagctggatggtgggagtcacgcggtaacgggctcaggtctcctaggagcagaacaggcccaggtcctcaggagacctcgtgcccagggcagcgggacagacctgagcctgcccatgagaacttgagtgtgcaaacctgcgcacaggtgtgagaacagactccagggcgagtgtttaaggagaagacacagacacacataagacccactagtgggaatgtggagaccccaggaaaggtggggaggcccagagcagcaagtagaggggagtgggcactctgtcccgggactcccataggctcggcagggccagagacagccttgggggtgagaggccagagccaagggccctgcatctgagagtccaagggtctaggaaggctcagggtgggagggcccagcttcaccatagacaccagggtccacgctggcttggggagaaggtgcaggtatcagatgagcctcaggcctcactgctgctggggcagcctctgctgctgccgcactccacccacacgaggcgggcctgctcctgcaggatgcggccgcgcaccaccttggccagctcctctgcgtgtccccactcatgggcgggcacctgcacccaggagcagggcagcccccagagcacctgctctgagccacggcactgc

SEQ ID NO: 339691 - DNA, 1000 bp, Homo Sapiens
aggtaacagacttttattacatcttcttttggaacttagaagacaatattagcctcctacacttttgagaattaaaatttagcccaccatcatttggccttggtagtgacatcacttgggtacagtgatgacagacagcctaaggggctggacctcagaagactaaaggtctagtcctggtccttccactaatgggctatggtgaccctgagcacattattccacttctaggtgattcagtttcctcatgactcataacaggaaatcattggtctcaaccttcctccaaggactagtgtgtggagctagaacatgcaccaaggaagactggggaacatcagagagagataggactcagtaccgttgactcaggtaaagagggagacagcaagaacagagtagaaaggcagcataaaactggtggaaccaaacacagactaagtaaaaaaaaaaaaaggtaagcttcccaacgacaccatgtcccaggaaagaagatccagtaagaagcagaggcctttagcaaggatgccaagacaattccgtggagaaaggatatttttctcaataatcagcagtgggacaagtggagatccacaagcaaaagaatgaagctggacccctacatcacatcatatataaaaatatactcgaaatggatcaaagaccattgtgagaactaaaactatacaagttcttagaagaaaacacaggcattaatcttcttgaccttggattaggcaatggttttctagatatggcaccaaaagcacaagtgacaatagaaaaaaaatacgtatcttggaaatcatcaaagttaaaaagttttgtgtctcaaaggacaccaacaagaaactgaaaacaatccacagaaggggagaacatttttaccagtcatatacctgataaaagactggcgtctagaatatacaaatagctcacccaactcaataataaaaagaaggctcatccctggtagtctagtggttaggaaaacagaaaa

SEQ ID NO: 339692 - DNA, 1000 bp, Homo Sapiens; identical to SEQ ID NO: 246490

SEQ ID NO: 339693 - DNA, 1000 bp, Homo Sapiens; identical to SEQ ID NO: 159177

SEQ ID NO: 339694 - DNA, 1000 bp, Homo Sapiens
tttttttttttttttttttttttttcgttattgcacagagatttctcatcaatgttcttcagtttttatgtcttttcctaaatgtgaataagtgctatggataaaatacaaatgtagaaaataacagcagcatgatttgtcaaagttaatccctataatttagtaagaaaaaatggatataaacaaaataagtgctctttctaaactgtactaaatttttaaaaatattgttttaatgcagtgaaggtcctgaaaagcctattgaaagcgatgctgagtcctgttttcaaaagtgtcctgtttgggttttcttggtgaagagcagaatttcaagtgaagtaatcgacggactaatttaaaacaaaacagccctcggcttccctattggcctgtgagggcaccggctccgggaccctgacctgggaggcagcgagtggtgggggtgcctggcccccatctacacgtacacaggctggcagccttcagtctgatccaccagatcagagctttctaaatctgagctctcagcctgtgaagcttctgctcctgaaggctttgggcatcgaaaggggtagccattgtcatcaaagaaccttcggaaggtgaattcgtaaaatgcgtgctcaggatgcttgttattgggcgaggtgagtgtgtcccaggccttggtgctaccttcgctggcatcgttccaagggctttcttcatctacggggtcgaaattcgaggtgtccatggggtggctgatggtgggaacgtagggggctggctgcttccggatgtcactggagaagtcaatggcgctgaagaaggggtgggccttcaggtcatcggccccattccgccccaggcggtggtctgcggagcagcacagcttggtgatgaggtccctggcctcagggctcagcttcacctgggctggaatgtggagcgtgttctcccagttgatcaccttcagctgggtttctgtgggagtaggtgccaaaaagggcggctgccc

SEQ ID NO: 339695 - DNA, 1000 bp, Homo Sapiens; identical to SEQ ID NO: 159180

SEQ ID NO: 339696 - DNA, 1000 bp, Homo Sapiens; identical to SEQ ID NO: 246491

SEQ ID NO: 339697 - DNA, 1000 bp, Homo Sapiens
tttttttttttttttgatgtcgtttttcttgttacagttaccagtatgacaggtgggaaggggccgggtgtgggttctggccagagggacctaagaacattaggtcctggcaggtgcagccctgggagcagccacgagggggcatcaggctgcacaggcggctccaggatgtcggtccgggaccgggcataggggttagcgagtgattctcgggcaccgcaggacgagccctacacagagcaggtgggcccaggaaccccctttctcagtccaggactcccaggcctcagggcctggctttggtggcgcccgtctgttgcagtggagttcggcggtcacagcctagggaccgggtccagcccagccagctcagcagcaggtcagcgccctgccccttcccgcgtcgctgggacgccccgagccgctcaggtcaccacgcaaaagccctgggtaatccgccgccagaagttgcgaccgcggctgctgagggccacctcggcggcctcctggaagacggcgtggacgttgtcatggagccgagccgagcactcgaggtaggccaccgcgcccacggacctcgccatctcctggcccctgtggtaggtcacaggctccaatccgtttcttcggagcttgttcaccagtgatttgtccttgcgcaggtcagtcttgcagcccacgacgatgatgggtaccttcttgcagaaatgattcacttctgggtaccaccggttaaagatgttgtcaaagctgttcgggctggtgacatcgaagcaaagcagcaggacgctggcgtcagggtagaacaggggccgcaggcggtcatagtcatcttgccctgctgtgtcccagatgtggaggtgcacaggtttgcctttcacttgcaggttgaccatgtaccgctcaaacaccgtgggggtgtagctctcggggaaggccccatcggcgaagaccatcagcagcgacgtcttcccgcagccgccgtcgcccaccaggacca

SEQ ID NO: 339698 - DNA, 1000 bp, Homo Sapiens
tttttttttttttttttttttggaattcacaaaacttttattgatctgtttatcatgccaaaaaaagttgtttatttaaaattcaaattccacttgaaaaagaggcaacaagcgatagttgggatcccagcctgctcctggaggagctcctgtgtccacaaaaaagcacgcacattctacagctatgcgatttgctcactcggaattgcattctggaaaactcctcccagagtccccttgcagaacgccatttgtgtctttagttggttgtagctgggaaacaacaacagaaagaaaaggaactccatcctaagacttcttagaatatttttggttttgaaactactgaccctcaaggatctaccaccacccaacctagaatatatatctatatatatctcatatatatattctcactgaaaagcaaatcattgtttatttcacttgcttgctgtcacatcggacccttaggatggtctcggcacacctggctctccttctcggtgggatcctgtggattctggctgtgggtgggcagcccttcaggagcgtttggacttgctgcaagttgggcacagaagctgacccttggtgacgatgtacgcccggccgctcagcagctgctcacaaccctcacagacaaagtgctttcggtgccaggccagatcttccacacgctggtagtcctcagcgaatattatctcatcgcagccggagcaccggggccgcagactctcgcagtaatggcggccgcaccagggtgcaccatccttccagaagtagatgaggtccaccagcggctcggagcacttggcacacacaaagcaggtggggtgccactgcttgttgtagcctgccctgtccgagtagaccacggggctgtcaggaggggccgctcccttgcagagctcgcagacgtattccacttctttggacgggtcactgagactgccgttggtggtagcagcagtggtctctgccccctctggcttttcctgct

SEQ ID NO: 339699 - DNA, 1000 bp, Homo Sapiens
tgaagtcagacccatttatttttttcacctgtaaatgatacagcttcctgtgccatctttaagttttaaaccactcaactccaattgatcctcaagtttgctccacataaagctattctatccttccaaaattggttgccccaaatgcctcattattggaacaccaccagctcagatgtggatacatgtggagggggactgcaaatcctgaaatgctcctcaccttctcttccaaagcctcctcagctttctcccccaacctcagtcccttagtgcccacagacgtcaactcctagagataactgtgtgtcacaaaaacatgtccacagagaagaagtacaaatatatatcctatttgtctttgcaaccagatgtctggaaagctcccttaacagaaaagctgccacaaataatatactcatttactactcaggaaatgcactcccttcattgaaaagtgatgacatgaaattgaaccaactcccagtaccgctctgaattattcttactgtgcctgtagctcacagaagaccccacaaagaaaataaatacactaaccaacaggcttccagactcccccaaaagatagcagttttgcattctttctgaatttgcttcagtgtatgatatggctctataggaaatgttttattgatttaatctagtaaaacccaatagcctcttaatacctaaagtagataacaaggctatccaggggtttgctgcttacttgggaagtcaactgagaaagacagagttcccaaagaaagctgtctttccccagcttcaagagtggatgggacaaacagcataaggttcaggaagctgcacagttttgaaaaggacttaaaaatgcaagacctagtccctgcaggaacttcagaaatacctgttgtgatgacggcttgatctgttgttgacatccccctctgaccatggcagccactctctgatttctctgtgttctttgagggagaaactctgctccagaccagctcaa

SEQ ID NO: 339700 - DNA, 1000 bp, Homo Sapiens; identical to SEQ ID NO: 246492

SEQ ID NO: 339701 - DNA, 1000 bp, Homo Sapiens
ttttagttttccaaacgtctttaataagtaaataaaggagcaatgtaaaatgttgcagtttgcttggtaaatcttaattgcgaaatttcttcttctttcggaacttttttcctgctgcatttgctgctttttcagccatgatctctgagtacttccttcggttgtatcttctgaattcagaatcagccagcagttcttccacaatagttcttttcctttgcttcttgggaattcgtgaatggtagaaatcagctggattgtcaacaatggttccaatctggaagtacttggggaagccatctctatcatttttcttgtaaaatcttttcgggtccatgctggctctcatcttcagtgctttgagatcatttttcagttcatttgtcatttctggagctttcataccaaaccagccatcccctgctgttttttgtcgttcttttctgcgttttttctgaagttgatactttgattcactatatggtggaacacagtggtttttttcaaaatcaggtgtaatgacggctttctgcagaagctcatttttctttttctccttgatctgtgttagggttctcttgttagactgtagtttatctgcattaaaattaatatacaaaccacccaactgcttgatactcagaccagggtctatgctgctgcttgtcaacttcagaagtttagcctttgtgctatttaggaagtcttcttcatcactaaactcatcttcattttcgtcatggtctgatgaatcttcttcacttttttcatcctcttcctcttctttttcttcctcaatggcaacctcacttgccttgtcttcctcttccaagtaaaaatttttatcagcactcattccaggagttgtgtcaattacaaacaatgcattgtcacatgacagacttcctgtgtctccacttaatgactccctttggccactattttcaacaaaacataaagtatcctcttcattctcactgttttcagactgttggctttc

SEQ ID NO: 339702 - DNA, 1000 bp, Homo Sapiens; identical to SEQ ID NO: 159188

SEQ ID NO: 339703 - DNA, 1000 bp, Homo Sapiens; identical to SEQ ID NO: 159189

SEQ ID NO: 339704 - DNA, 1000 bp, Homo Sapiens
ttttttttttttttttagaatactggtgcattttttattaaagaagagaataaagcatttgtaaatatatttctctcacgtatacttcaaaggtgacgctggtctgccactacagagctggggagcagacaggctggagctcttcccccaacccttccacactcctctcccccagataacagacacacacggagggcagggagctgcctagcctcaaaggacaaaagtttcccagttgcacgtacagaaggactcagtcgccaccagctcccatcacagtgccgcccggaaagcaggtggtgtctccaggaggtcagggatgcttggtaagaaaacccctttacccattagaaataaataaggcatgaaggttcccactgggatcccggtgcagaggccagggcccccccgccttccactgactgtatggctcttctggtttctaaggtctcaggaagggcggcagaaggaaccagaagccctgaagggctgctcagggcaagctggggacctaggtgtctcttagctgaacttgactttctgacatcttgaagcaaaactcctgacgcagctgggtcctcaaaagccccccacaaaggtgggaggtgaagagcaggcattttatgggagggagggagggagcatgttcctcagccccatcccaatacaacacgatgcagcatggggcgaaaaccccagtccccagtgaaggggaggcaggggtggacattgggaccaccggctggtggtgcatgtccagaacattctgggggctgcagacatgacctgtgccagggttggcctgtggggagcgtggagtgactgagacatcatggtccctgagatgggggcaagcacagagacgggagtcagaggccaagcttggttagttggtggcggtgtgaagggatgggggctccccactgccccggcccctggaaagcttaaggcccagcaggcatttctggggttggaagccaaggagacaagctctgagcga

SEQ ID NO: 339705 - DNA, 1000 bp, Homo Sapiens
aagttaaaacaccaaatttattgcataatattgaactatatgcacacacatagaaaataaacatttcatataactgtatatatatttttaatcctgtatttataaagactgaaaaactaccaatttagcaattggaataagttttaaaaacaaaaagaaaaagcaaaaatctacaatccttcatcaagatttgatgctttatcacagttcataaatacttcattttatataaataagtcttttctctagttactaggaatttaaaattagacttacatggattctttaatcatgtagaattttcttactccatgatgaggaaggttgagcatgtcattatttttaaaatacatatatttgatttaaacacaatcccccctaaaatcccactgtaaacaaacatttcgaatgtgataaagtttcataataaagaacgtccttaaatcttagcaattagggaagaggaaaaaaaatctgagtaaaaattttgcaatttaaataaaaattgaaaaaaaggctgcatgcatccactagaaggagaggagaggaagggagcactgagtcaagtaacagagaatgggataaaataaagaagaaacgaaaggaaaatcagggaggacacagggtacgaaaaggagaaaataagggaagggaggaaggagaaaatggtagaggacataaggtgatagaaaaagggaaagtaaatttattatttctacttttcttggacaatatagagactcaaaatagttaatgcaacttgctccaaaagcgagagtgcaagaggtggtgggtctatcaattaaccttattgtcaaagggacaaggatgagcaagaaaaaattaggctcagctgcaacgaatgctaagctgctctgcacatcttttaaaaggtctaggaaataggcacagccatgggaaagttgctattccctcaagaactttttaaaagcaagatatgtttatataggctcccataaattcttaggagttctgccaa

SEQ ID NO: 339706 - DNA, 1000 bp, Homo Sapiens; identical to SEQ ID NO: 159190

SEQ ID NO: 339707 - DNA, 1000 bp, Homo Sapiens; identical to SEQ ID NO: 159191

SEQ ID NO: 339708 - DNA, 1000 bp, Homo Sapiens; identical to SEQ ID NO: 159192

SEQ ID NO: 339709 - DNA, 1000 bp, Homo Sapiens; identical to SEQ ID NO: 159193

SEQ ID NO: 339710 - DNA, 1000 bp, Homo Sapiens; identical to SEQ ID NO: 159194

SEQ ID NO: 339711 - DNA, 1000 bp, Homo Sapiens; identical to SEQ ID NO: 159195

SEQ ID NO: 339712 - DNA, 1000 bp, Homo Sapiens; identical to SEQ ID NO: 159196

SEQ ID NO: 339713 - DNA, 1000 bp, Homo Sapiens
tttttgcattttaaaataaaaatactttattgatgaagtcagacagcagctaacagtttgagaagcttgggaagaaatcactttcacatgggggatatatgcaacctagaacatatttggctaagtcataaaattaacatttttagtcatctgtaaagtgctgagacatttatttctggtgcctgcctgtgttaggatttttttcttgttatccgtccagtaagtgaaacactgaaatacacgttcagcaggatggcgctcactaagtatgcaccttgacatgatggtgtgcactcattatgcacgttctcacgcggggctggctctgcaactgcagaatagaaactgatgcgttctgcagaggaggcgtctgcacaacagacaggctggcccgaggtcacgcctcttggcctgagtcccgctcagtgacagcagccagcatggcctagcaccaggagtcattcggagcgtgcgtgctaaagcagacacagcattccacgtcaacaggggcaagaagctgcacgaaggaactaagcaagacttctctgcctatctcctctaatactaaagcacacacttttctcctgtggatagtcactctatttatacgagaagggaggaataatttggtgttgatgcttgagtccaaatgttgataggcactgagcattttggttcaaagcaaacattatttgtgaaatgctacagataatacattgactgaaacattaactgttaattttttaatagaaaaatgcaatacaaaaatattactttgttaaaatatacagtacacacattataccactttggaaaacccagctcacttctgaaagcaaatcatgctaactggactggtaggtgttacctggcttttaaaattgttaacaaattttactctgaaattcaaaaatatagaatataaataaaagtcgtgaatctgaatcaggtaaaacttttaagaattgttaataaatgcctgcactactgaatacatata

SEQ ID NO: 339714 - DNA, 1000 bp, Homo Sapiens; identical to SEQ ID NO: 159197

SEQ ID NO: 339715 - DNA, 1000 bp, Homo Sapiens
tttttttttttttttttttcggttaaaaaggcccaaaactttatttagttttcagggaaatataagatgcatgtaaacataaaatacaaaacaaaacccaaatcttacagtctagaagcatgccaagacagagcattttctgcagaccaaagagtcccgtcaaagtgataaaggacacctggaaagtggcaggccaaggggctggtcccttccccaagggcactgcatttttgtgatgagattaaaaacaaaccaactccactattaaaaatgctagaaacatggagatagtttagcaccaccattgattctggaaatatttcagcactcaaatcgactgcactgagtttaatgtcctttctccagtttctctgctgaggaggaaagaaggaaaacctggaggaagggctcctcctgaccccacagagcccactaagagctgggaggggaattccatgaggaattctccaaggttctggagctccagagacatccaccagtccccacccagccatgcagtccacatgctcacgcttcagggattactgaagtctgccttgcccgggagtcacttcctgcagacctctgagtacctggtggggaaacccatttcccatcctgtgtcttggatttaaagaaaacctgttgcagataatgagttgtaaattcaaggagggtggctgttttgctgttctttctctgcagtaaactcttatggggagtgtgccttggttataaggcaacgcaaaatggtagggtatatccatggatgaatgttcatcacacccagtctaattcataccaggtggcaggctcagcaaactgaaccaccacaggtgtcagagatacttgagaatgactggtaccaacaagacgacaaaggaggttgccttcctcccagatgtgcccaatggagtctgaactctggttctaatttgtggaggtgggtccctactgtatgacccattgtggtcactgctctttgagccatacaacttga

SEQ ID NO: 339716 - DNA, 1000 bp, Homo Sapiens
ttttttttttttttttcttttttttttttttataaagaacaatatttatttccatttacagcatcaaataccataaataaagctaaacattgtttgttttgctgtgtgcaaaatacagggttccgtgtggcactgtaaatgattaccaaaggtcacagacatgcgttgtgatgagatggggaggctagctaaagaggaggctgagaggggaggagggcactctttggttgacattctataaagggagggagactcttagagcagaagtgtgtcagccaagaagtgggtgtagcactggaaggctgaaatgaactggggggctgccttccagggtgccaatggcggccactgcgcaagaactttcggtgggagtgtctctccgaggggcttcctgctcttgccatgttgcctcctcctctctttgttgcttcaactctgcccgtctcttccgttgtttgctattggttttacagtgaatgaagtgaggcttgcagtaaaatttgccttcatcgcagtcaaaggtgtaggcggccaggcgcaaggtggtggcacagatgctgcagcggaaacactcccggtggaagaagtggccctcggcgctcagccgttccatcacgtacacacgtttcttacagaagtaacacgtgtcgctgcctcccaggttaaggggaaatgactttcgcatagattccaggtctggagaggtggcctgggccttaggtctgtgatcattcatgtacagattgaccaggacttcagctgcagcccctattccgctggacactttccctaccgtcagctgaggatgcactgttctcaaatggctgggatgaaaatggaaccctgaaggtgacttcttttcctttctggcaggagaagcagagtcaacagttgatggagaggaagaagcagctggatcaggagacggaaggcgagagggaggagatggaggatgagtatgagacaggcctttagagagtagtttattctgcgggaaatc

SEQ ID NO: 339717 - DNA, 1000 bp, Homo Sapiens
tttttttttttttttgttggtaaaagaattttattattatgtggcttaggtaggtttttgcattctactaacagaaaagcattttccacaccttattcaacctaacacattatacatttgtgattttatctacatcgctgcagtattacactattgaaaaccttcctttcaaatgtactttggtgcaattatacagtagatatctctgccttcagaaaataaaaatattctcaatctaaactcaaaatggaataaagacatcaataccaagtttgtgcaccacttggtaaaagattgcaataaaaatcagaagagtatgctgcttaacatataaagaagatgagacatctgccacagtttcagtcaaacctttgtaggaatgatttagcatctgggtttatttttactgcagttttcacatatgataggtggaattgtaccacaaagaatagtctcatttgcacgagagactcaaatattggactctagcacaggaaatgtctcttggggcttagtaatatacaaactgatagaaaagaaaattgccttaagaaaaatttcacaattgactaaacatctgaaacatttttatcacagctttcatatattaaaaaagtttcctccagagatgaagcttattgatgaaataaaacctagtcactatcatctgacccatgttctgagcctctatctgaggcctcattgttggatccctctggttccgattcatttccagagccttggccagaaccctcattatcagatcctctctccgattcgtgatctgattcggcacttggagaagctgggcgagagtcgttctcagaaactcctgagtggcttctccctgactgcacagattcattgtcagactgctcagaaccggagggccttctctttctggatggctggtcactgtctgagtcctgatctgaccgctgtcttcgtggcctccggggactgccggcctcgctgccagacttgttctggttctcatcgg

SEQ ID NO: 339718 - DNA, 1000 bp, Homo Sapiens
ttttttttttttttttttcagagttcagaacttgtggtttattgacacttctgcatggtgggtccttgggagactgcctttctggcatcttgggacttgtccctaagaatagggaagacagtcatcctgtcctggagcaaagctcccccttgcacaggaacacaactcccatgcaggagaagcccaccgagacgaacgcagataaacccttcgcaaggcctgcactgcaccggaatggcagagctccgtgcatttggcaaagctatggagccttggcagaatgcacaggactctgggggctgccccccttgagctacagaggcagaatcgaaccaaaaacactgcttcctttaacacagcccaactggcttacatttagcttgggacgaggctaggcctaagaagggccagagctgtcctcccagccctgggaacacggctgagacggcccggtgcccacgctgggctcaccataggagaggagaggagagggagggggccccatactggccctgccgtctgcaccccgtccctttccccactaaacacacccatttcctatcctgggttctgaggctgggactgcctctgggattctgagggactgccctccacccctgcaggcctgggctcagagtcagccacacctgtaaggcaggccctgcttccccagcttttgtattccatatacggtgctggcatgtggagctccattcttctccagcccacttaattttaagaatagacactaataagacttaaccaccccaacctgctggcagcaggagggcccctgtgtgctggcagcatctccccaggacacgccggctcacctgcacccacagcgttctaggaggtcgcggcctctgcagactcagtgcaacccctgggccttacaaaagggacactcagaggtgcactgcctgctcagctcacacaaggaacaagtggagagctgggctggagaaaggattacaatttacagaccagtgtccctggc

SEQ ID NO: 339719 - DNA, 1000 bp, Homo Sapiens; identical to SEQ ID NO: 159198

SEQ ID NO: 339720 - DNA, 1000 bp, Homo Sapiens
cattggaaaacacatttaatttcaaagtaaacaaagatgtttgtacattaaagtatttaattagtgaaataattattatcaatgtaacaagctgaaaaatacagcaacttgatacaagactgaggtaacaaaatacttcaccaaaaatcgaaagaaccccatggagggctgattgacgttcagtggttactgcgggtgagacgattcacaagaattagagaaagtccttacacaactgcatgcaggggtctgctggagaaaaagacagcccaggagagtgcaacagatttaacaggaaacgaattaaaatgtagaaactgattttcaacttactttgaagagtacataagaaattgaaaactactctctatgcaacattttgaatgctaagtggaaaaccatgcattttggcacgaaatttattaaagattataccatactaattaattactattacttcgttactgaatagtcacagtcgttcagcaatggataaagagattaatggttctaaaatggacagatgatctcctgtgttgctgctgtaagcggggttttgaggctgcccagggggtgtacacgcttgtgcagcatacggctgcaaggcggtctgaagtccatggtacaagttctcaacacccaagaaaatgcagttctcgctcatattgtagttgtatttaacattgaaattaaaaacagaaacctatggagcagatactgtgacagtttgaccctactctctcattccacctttggaatccttggcgtgcccaactgcagctctgtgcctggctcttctgggccaagcagcctctaggatagtgacttcatcctcattgcaactgaattttcgcagaccaagaggccattcagtctgttgagccttttgatgcctttctagaggaatctatgcacaggatttatactcaggactaggagagaggcaaagtcttgcctaaggagataggtgtggtggggactgtttgttgagtggtcaggt

SEQ ID NO: 339721 - DNA, 1000 bp, Homo Sapiens
tttttttttttttttggttttttttttttttttttttttttttttttttttttttttaaaacagttagtttgctttattttaaaacagtaacttccttatatgggggcactgtccaaaattcaatactgatacaaaaatatgtttcttttaggtcaaaatacgtttcaggtgaattttctgaattttgttaaagagaattttaaaccatataaaacaggtgaatgagaggtgaacatgaacatgtgtaacataagccacagtacaaatttaaacagaacaatcaagccatgtcatttccccaaatcatttttgttaatatttaggagaatgcatatattttcaagaacttaaaagtgaatctctactcccatctcctaatactcccagccaggaagtacaactttcttcttttactagatttaaatattccaaatattactcctggtaggatactctggtattaactatagctgagtgtatcagaaatagaaaaaccatgaagatttataaagcatttaaaaaataatcatttatagcaagtccttaaaagccccagatgaaaaaggcagttctccacttctaataacacctatggtttatgttgcgtaatattattaaacaaaacagcattctgaccaatgataatttataggaaattcatttgccaagtcaatgtttcattaaagttaatattttggcttatattaaaaaaatttttaactctattaacttagcaaagtcatctttatgatgccatttaataaactgaaaggaaacaagatggtacattctgagtttttacttcttaagaagaaatttaattcaataatttgattcatcactactggaaaactacatctttcttccctgtcagtactggatggcaatgacgtgaaagcagctttcctggttctcaacttcccttcaatgggaagcattatggaatttcagcagtgaacatcatctggttcctattcaaaccccagctccaagaaaatg

SEQ ID NO: 339722 - DNA, 1000 bp, Homo Sapiens; identical to SEQ ID NO: 159199

SEQ ID NO: 339723 - DNA, 1000 bp, Homo Sapiens; identical to SEQ ID NO: 159200

SEQ ID NO: 339724 - DNA, 1000 bp, Homo Sapiens; identical to SEQ ID NO: 159201

SEQ ID NO: 339725 - DNA, 1000 bp, Homo Sapiens
tttttttttgtgaaagaaaaactatttatttctttatacacatcttgctttaacaatcaccaaaaagactttcattttctgtcacccaccctgtccaccagttatgttggccttcaatatatggcgttagcaacatatataaatctatatcatatatttatacacacaaacacattctaccagcactgtgaagacacagactaggctttactaggcttggggcctctcccatgccacttaaaaatgagcacaggtttgctctatgcaagaatttcaacagagttggtctggccatcagtctgcaatttccccgagataagatagggtgacaaaatgggacagcaactttgaagtgaggtcagtccaatttggatatcatagaagaaaagaaataggatgtgctaggttaagcctgagatggtatctgggaagtcaccacattcatgatgtgaactcaaagaacacaggtgctacagtgcagaccaaggcccagcctgactcgacccaacagggtcaggtgtggatctgtgagtagtgctcactgagcccccgccagcagtgtccggcagggcaccgctgctcagtagtgtgcttttagaacctgccagaggagctccagcattgggaccacgtgcccctttcatcggaatcagggtcctatattcactgagttttccatctcaggacagctgatgaggcaagaaatgtgctcttgctagttcccaagctgctggggctgttgagaggcaggatcacaaaaccttctgtgcaaactacgcatctttttcttagtgctgggccaagtggaccttggctaatcgtattccatagccgtcagaaaggctttctgcctttctcccagctccaccaggatacatctctgactccctcttctggaccctcccgtggacttggaggaatgaggcccagatgctcctcagcagataggtagctgcacaaaagggggacaggcccacctttcctgctgttttaaggactt

SEQ ID NO: 339726 - DNA, 1000 bp, Homo Sapiens
ttttttttttttttttttcagtttatgttatgttcgtttattgttgtaacattttgttttgaacatcaaacactgcaccaaaatattagccattcatcttgcaacaattgctttactgtaactaagagtactgtactgatgatgtttacaattaactttggacaacttaaaacttattagtgacattgctgtctaataatcaaatacttcatcataggctgaacataattattaaaagagcaaagtttcccctccctttcttactttcaaacaaaaccaaaagagtagttttcatctggaaagagcacttacttcagggaaagactcaatttttaaccagttttattaaaccctggaagctctacaacacgggaaaacatcgaaattccccggaagtctgtttttgccaacttgtaaaaagtgaaagagctgacttccttgtttattctttaaagggttggcctgcacctgcagtgccaactgtggaagggctgtgtgcaggccccacagttgcaggggctgttccgggccagcgcttcccagtcatccaatctcctttgtccctcggttgttctgtgactttgagcagctttcattttaggacatcccatttttaagttttttctttttccagttgaaaactatgcagatgtttttagacagagcaaaacacaacacagtacccaaaaacggaggcagcctgcatgctccaggtctacacgagcacctcacagcctgacaaggggcagacagcaactcacacgggacgagcttcagcacacagacagcaaagcaaatacgagacttagactgaactgcaaagagggaaagggccatttcaccaatggagtaactgagagaataatgacttagagcccaatctgcctgccatctccctgagccgtcacccgtcactgaagatagcgcgagggtgatgcttcaactcaccatcctaagggtttgtgtacaaacacactcgagggcatctctttcacagaaa

SEQ ID NO: 339727 - DNA, 1000 bp, Homo Sapiens
tttttttttttttttagatgctcgcttgtaaagtttattgacaactgtttggtcccaacacacaaaacagcacttgaaccacaacaaaagtgttcaaacaaagtagacaactaagaaaaacatctctttcccccaaacccaatccaaaacaaacagtgcaagatgggaaagggggttttggtgataacttttgtcatttttttaaacagataaatttaatccggtatatctttccacccagaaataaagaattacattgtcttaatgctcaaacatcattttaccacatcatttaattaagcctctggataaaaaaatagatagcaattggactggccattgtggagtacattatgaacacaatgtgcttccgaagtcttctctctcattttcagacagcaattgttaagagtcacacacacgtcccagacctaagcagcaactccagtgaatggtactcagacacactcacgggacagcacagaacttgattcttctttgtctgttgcccaaagaacctgttctttgagtctgttccaggtgacttgtaatgatacctcttacggttttaaagtccaccactctttacatgctagcagaactgaagtccaagcgtgcaaactcagccttatgaaatcttagaataaggcaactgatgttctcaacaccaattattattactttgtttaaaagctcctttaaaaaaaattgcacatttgcatttcacttcctgtaacactatgtctgtagaggaaatgccttcaggaggattcggagagtgccataatacttacagggttttttccatggtgttctgtcttgactggggccatgtgttgagaactgggagtcactggcttcatttaaaagatttggggaacaaaaaatctgacttgtaaaaatctctctatagcccttattttgtggcattttatcaaaatgctatgaaatcagagtccattttctggctttctagaagttaccaaatataaacatttcc

SEQ ID NO: 339728 - DNA, 1000 bp, Homo Sapiens
tttttttttttttttttttttttttttagttgttcaattaagaaacatttattcttttctaaatgaaagtgaaattgcagttgtaagtatgaactaagaaacattggttttacaagataactagctatatgaccatgaccttaaggtgtgatatggtttggctctgtgtctccacccaaatatcttgtatctcccattattccatgttgtgggaggggcctggtgggaaataatttaatcacgggggcaggtctttcccatgctgttctcgtgatagtaagcctcatgagatctgatggttttaaaaatgggagtttccctgcacaagctctctctccttgtctgctgccatccatgtaagatgtgacttgctcctctttgccttccaccatgattgtgaggcctccttagtcatgtggaactgtaagtccattaaacctctttcttttgtaaattgcccaatctcaggtatgtctttatcagcagcatgaaaatggactaatacaaggtgctagacaaggtgattaaaggctctataaattctaaattgtgcaattctaagacattcttggcattttacatgtctagatgactgccatcttttttttaatatttttccctcacatgttccagtctattctcattacagaagaatacgtttaacatacagttacagaaacagaggttttaaataaatatttaaaagtaacttcaaaatatatttgcactgaaatatggaggcaaaattgtttctgagtcaggaaacatttattcttccccataaatttaaatggaggtgaaactgtgaatatgaagcaaagaacatttatctcacaaggtaactctgaattcttttaattctgaaaccagagacatgtacaacacttacagcattcacacaacactattttcaaaataggtttttgacccctaaaaatgaaaattcttagtgacaagctttagatatgaaacttagcccagtgggtattcactttgtcac

SEQ ID NO: 339729 - DNA, 1000 bp, Homo Sapiens; identical to SEQ ID NO: 159202

SEQ ID NO: 339730 - DNA, 1000 bp, Homo Sapiens
aggagcttgggctggtggggccaggctggggactggacagcagggtggtgttgaggctgcagggaggcactgtggctccactaggcatagaactcctcctgcttgtcaggcttctggtatgtgacgctcgcctgcttgggttcctccagcgtgtagctgccctcatcctttttcttcatacgatagatgagcagtgtgaccaagaaggcagcaaagagggcgcccaccaccccgcccacaatcacagctacgagcacctccttccgctccaggatactcttctgaggcagctgagcagctgagctgcccgagtcgatggcattgtccaggaggccagggcccgggcgggcacccttgggcagtgtcccaggtggagatgatgccttggccgcagcccctcccacagctaccacctcattggctgtgtctggttgtgtggtctcttcttctggcagctcgaagtctccactgggccccccactcaccggaacctctggctcattccggattgtggtcaggaaggtctctggagttggggtctgagccacctctgtgggtccaggggcagtggtccccaggggcagggtgctcctctcagggatgtcaggctcctgggtggtggccggcctgggaagggctcttggccgggaggtagctgtgctgaccagcctgggtgttggggcctcggtgtccaagacagccgccgtggtgggcggggagggcgcctcgggggtagtggcccgtgccgtagccactgtggtcagtgggagaggcagaagcctccgtacgccagtggtccttataacagcagtggtggccgtaaaagggggtgctgcaggggtgctgggggtggcggtggccactgtggcaggcactgtggccacagtcgggtcccctgtgcttgtggcagcagtggtagccatggtagtggagacggtggtggctctctggctgggctcttccgggacttctgtcaccaccagggggctggtggctggct

SEQ ID NO: 339731 - DNA, 1000 bp, Homo Sapiens; identical to SEQ ID NO: 159203

SEQ ID NO: 339732 - DNA, 1000 bp, Homo Sapiens
gagctagtatacctttaattttatttcattgcaatgaatttaaatagtcacatgtggctattggtaccatattgaaccatattgaacagtgtacacacacttacacacacacatacacacagtttttgccctagtggctactatagaggtttttgatccctcctttcccaacaaacactggatttaactcaaaggtccattcttccttaggtttttgctatttccccccttttcctttaagaagccattgatggacctcattgatggaaagttctgtaagtgttgccaaggaacatcagtatatttttcctgtagctggcacctttgagggagtctggtctccaaggccatctgttttgcaagcaagggtgagacagccacattcctcatcctcagacctatgactctaccatggcgaaggcggtgaccagggagggctgggacatttgtgtcacagaaagagtccctgcattgatcatttctgagtgatgtctgagtgggggtaatacctaatgttaagagagtaaccatctgactacatcaagacttttcattttcaaagtattttatttaaataaatttttcttttgtgtgtgtttgaattttacagaaaaaaatactgacaaatactatacagcttggaccctttatatttttcttggaaaggtggctgccatttttctacctttctccctccctgctccccccaagaaaaagaaacatggaatccattgagcaatggggaaaggagcaatggggaaaggcctcctctggctgccgtccggagcctggctaaagctgctcagaagtccaggcctaggggatgtctttctcgagcctgtgctggtctaggaagcctcttctttaggaatcatttttttgtcccccgtgaacttaccctccccagatgagtcaagcagtctctggtcctgaggtcccatgggttgccagtggcagttcagggacagaggctggaaggagtgaaaatggagaggaataa

SEQ ID NO: 339733 - DNA, 1000 bp, Homo Sapiens
ttttttttttttttttttacttttcatccaagaagtgtctttatttccgtttgtttcccaaagatcaggttaggtaaaacaaattagttccatctcattatttgaagacagggaggtgtatgcagatggaggggaactgacctcttgtgtgtgtgtgtgtgtggcctgtgagggagctggggctatagagatggtaggctaaggggttaaacccttagagccaccagacaatgtcacttgaaaacacaaggtatgaaatataaataatagtcagctactttccttcaatccatttctaagcagttgtgtgatcgatcaatttataaatcgattggctaactaattcaccttctctgctgccgctgccaccgcctatggccggggtggggtcagcccagcttctggctggcagtaggggagggatcggtggcctctgtggtgggggagcagggtcactgcagctccttgagcagctggagcacgttggtcgtgtaggggttctgctgcccgctggccccgtgcagctgcacagggtggaggctggggtggggaggtgtgaactgcacggggcagtaaagctcgttcaggaggaaccaggtggagtctgggtccaccttcatcaagtggaggaagacgctcctggcagcctcttgtaatttcacgggctgtttgacactgaggtaaatcaagcaggcatcagccactttattcaggtcaccctcacctaggtccagtctctcacagagggggcccaggccctgtaagacagccagctgcaacttgaaggccagcgtgtgcgagtaaactggtccagccctggcactgatgggggcctgggtgactagggagccagccagctttggcaggacatctttgcagaaccggctgcgaagaaagtcaccacacttgcttcccagggtacgtaaaaccttgaaggctctaagcactgccaggggggcgtcccgtgtgagtcggtgaacgagcgagggccaggcctgat

SEQ ID NO: 339734 - DNA, 1000 bp, Homo Sapiens
ttttccatcaccaccattctcattagtttatatttattgagcactcataatgttccagcccccgactccaatgaccgcattacccctcctacccactcccattcccatccctggatctttggaaaaagcttcataatcatatctggccctcagacacaatgatataaggacaaatttcttggggaccctgcagtgtttggtctttggccagtctgtccctggcacaactacagaaataaatatatatatatatatttattaaacctttgcttgtatctgtacaatattgatctctgctgattgcttaaaatagaacctgattatctctactactacagcatctcctaagccaaacagccccaccacagaggaggcccactttcacagactggctaagaatcctctagagcattttaagtagttgctctgaattttgcacagcagtctaatacctacttttccctagagctattgcccagaggaacaggactgaggcagaaggggcacttggggatgatatggaaggatctataaggcaagtctaaagatttagtggccatgtcagatgtttggggaagggactctattttccagacatttcagatagccatcccgggctcacctgaggagtgctggcaaagacaagagtcccctgaatgcacatatggtctaagcgtaccttgagaagtcgtgaacatttccccagaaaagtgaagaccctagagtcccctcttttgcatttgctgtcgccagatggtgtcttcagcagtgaagcggcatttcctttaacaatctgtgatttcctaggatgctcagagaaggctgggtaatgacagaccaacccaccccaaggaaatcctattcaagtctaatggctaagtgaggagccaatggcttcttcgaacctaaaactggctcctcctcaaccacagctctggcacaggtatgcttcatacaaagagaactacttccccagacaccgctggtgagagctggccag

SEQ ID NO: 339735 - DNA, 1000 bp, Homo Sapiens
agatgtccaaaaccacatttattaatcagaaaattccaaattacatgttgacaatttacatgtataagtgcaattcaatttcagcaaagagtctcttctaaatcagttcaagattgagtgatgaaatattcaacatacttctgccgttgacttaaaactggatcattaaagcttgaagatcaaattttaattctgtatacctctggaaagatacagatgttgatgaagatctttctttcagctggtaggttgtatagtcaataatctttgtacttccctccttatttcctaagttcatatttaaggttgagaaaaataaaattatactgaacacagaaagcttatattaaaacaataaggactgaatatatttgggtattactaaaaatatctagagatcaacacagatatatctttattcatgagcttaaaatctgaagtaaaaatttcatgctaataatattaatgctttcacactaggactaataagtcaaaaatagaatgtcatatgcttcacaagtctttcacttttgctgaatattataaatagaaataacatttaatatgagtctatagttgttttacaatgcagtacttcatatatgaatctatgtatgaagttgaaggaaacagaatagcagactaatggaatgcattgtctttcttgtttgttatttgtattgttcaatcacaacagggagtagcatattgtatttattaagtcccacaggcttcagtaactcttcagtaagtccaaacactgtgtatcaacatttgccaaagaagcaagagggaaagacattacttaatacgacaattctgacaagacatgtatccagtatttttcaacaatgcacacatcaaatatttctgataagtgcaaaaaaagcaaaaagaagaaaaataggaaaaaaaattccacacaggcaaatctactgccttgttagtccaagtaacaaaccaatcaattatattctatccaaacctgacaagcaaaagg

SEQ ID NO: 339736 - DNA, 1000 bp, Homo Sapiens; identical to SEQ ID NO: 159204

SEQ ID NO: 339737 - DNA, 1000 bp, Homo Sapiens
ttttttttttttttttgatgcacgtggagctctttatttgcttctgatatgtacaggtatatacagttggtgagagtctatggtacattatttcacaaaattatcttacatctgtgcacactcctgggcaagaagtggcagattctgcccctaatatcccatagatggtgaaggaaaaggatgctaccaggagccacccccttccgaggacattcatgggggccgcctgccctcttcccagacactggagccctcccacggacaatctgtgcctcccacctgctctgagcacttgctgacaggagtggtggcagcagcagcagctgcttccaaagtctttcttctagagtagaagacttgtcgtgggggccaaaaacaaacaaacaaacaaacaaacaaacaaaaaacaatggcccccactcactgatagcagcaaacggacacctgactcctagagcctgcctggaatcctccgccccgggtttgagggcagtggctcacccaccttcccccagcacaggtgcagcctggcctcacggggcactggcatgcatcttctccaggcaacttgtccagaacgtgaccagccggttgtcacggttgatgcagaagtccgtgaagtccttcagcagccgatcagcaaacttttcatcccctgtggcgctggagcgccatgttttggtgagcatggtgttgtaggcccagttgtagccgacccgctcctcgcagaacatgttctggttggtggagctggtggagttccgccgccgccgctgctgccctgagaacttgcgcttggagtagggcagctgcagaaacactgttcctgtaacgtggatatactgaggcttgttctcagcagggaagttaaaagcagaggcagaatatttatcttgtacaaacccaaacctgtgtgcaatggcttcctggaagaggtgcattcgatcccagtacgtttcgggttcaaagctatcaaacaggtgctcgctgccctccttga

SEQ ID NO: 339738 - DNA, 1000 bp, Homo Sapiens; identical to SEQ ID NO: 159205

SEQ ID NO: 339739 - DNA, 1000 bp, Homo Sapiens
gtcaaaggagaaaaccagaacgttttattagtttcttgaacctatttatagtgtcaaaagttagacgcaggtgcaggcctccattccatctattggctggctctcgactgccgagactggcctgccaacctgtgtttcaggagggcacgcgtctgcggctgaaccgcggaagggccggtgaggaaccgggcctcgggagatggccctgagggcccccgaactgctgccgctgctgctgctactactgccgctccgcgccgccggctgcccagcagcctgccgctgctacagcgccacggtggagtgtggcgccctgcggttgcgcgtcgtcccgctgggaatcccgccagggacgcaggtgggcaccgtgtggagctgcgggaggacggggtgcccccagggagaggaagacccccgcagcggggtaagcgcctcctctttccccggcctgcagacactgttcctgcaggacaacaacatcgcccgcctagagccgggagccctggcgccactcgccgctctgcgccggctctacctgcacaacaacagcctgcgcgccctggaggccggcgccttccgcgcgcagccgcgcctgctggagctggcgctcactagcaaccggctgcgcggcttgcgcagcggcgccttcgtaggcctggcccagctgcgcgtgctctacctggcgggcaaccagctggcgcggctgctggatttcaccttcttgcacctgccggtgagcgcctggggtctaaaggggcgggatactccattatggcccctcgccctgtagggctggaatagttagaaaaggcaacccagtctagcttggtaagaagagagacatgcccccaacctcggcgccctttttcctcacgatctgctgtccttacttcagcgactgcaggagcttcacctgcaagaaaacagcattgagctgctggaggaccaggctctagcggggctgtcctccctagcactgctggacctcagcaggaaccag

SEQ ID NO: 339740 - DNA, 1000 bp, Homo Sapiens; identical to SEQ ID NO: 159206

SEQ ID NO: 339741 - DNA, 1000 bp, Homo Sapiens; identical to SEQ ID NO: 159207

SEQ ID NO: 339742 - DNA, 1000 bp, Homo Sapiens
catgcattataagttttatttataagactggaacagacaagaatattagtttgagggttttttccaatttaaattaactaataaagtggggagaatgacacaaaagctgctatttacaaaagacaagtatatgattaaagaaggtcagtttttattccaaaataggaataatgagatatacaaagtaatcattttataaacattgatctaaatatttaatactcgcggactttttttcttaggaaaaaaagattgacatcaactcttcggcatcatcttttacaatcatttattcttggattgttatccattagagtgcttataaatgtctaggatagatgtgtaagaatgcattctgaggccaggcgcagtggctcatgcctgtaatcccagcacttttggaggatgaggtgggcagatcacctgaggccaggagttcacaagaccagcctggccaacctggcgaaaccccatctctactaaaaaaaaaaaatacaaaaattagctgggcatggtggtgggcgcccataatcccagctactcgggaggctgaggctggagaatcacttgaacccaggaggcagaggttgcagtgagccgagatcattgcaccattgcactccagcctgggcagcaagagtgaaactccgtctccgaaaaaaaaaagaatgcattctgatgattaaattgaactgtctttaaacttttccttcaagttatgggccacttcaaaaacagtgtggcattgagggtaggcaagtgggagaagggagacctggactgcagagtccagaagccagaactttgaactgtgcttctagctctttccagcagtgagaacttggaaaggtagactctttgcatctcaaccttctcatctttcaaaggggatgaataattccaatcacacaagaaaggactgaacaagatgaacaagatgatcactgtccaggcgccgggcaatgggtggcctctcaactgtggctttaaaaaccattct

SEQ ID NO: 339743 - DNA, 1000 bp, Homo Sapiens
ttttttttttttttttttttttttttttacaaatcaaagaaatttattggcgttgacaaaaatacataatacagaaaccaaaacaaaacacaacagaaacaaaaccagaaaccccagcctagtgggcccatgtgcctgatgtactgacagtgtgccgacccagactcccacaaagcatggcacttaattcatgaggacctccatctgcaccagcctcgcattggtgtccccagacgttcggtatggtatcattccagcaaaggtaatcagagtgcgggcttgacttcggagttgagagtcgcggtcctcgatgactcgctggggcctggatgacgaggatggacttgtccccttgagcctcttaaactgtgtgaacaagatgttcatggtggcaagaagcacttctgagaggttgtgcctgatttcatcactgaaatttctgaaggcagccactctctcttccacactttcctgattcaggggcaccagcttcaagcgctcaatgatatcaaaagctctatcaatatgaccactatgatactcgtcaaaaaaggtgatcaagtccaaaagaagatagaacgtggagtccacaaatttatttgcgcttattccttgagccctataccgttcggcaatggagagtgccatgttcttcagcctctccttgttggattgcggggcactgatctgggggacgacagggctcagcagtttgttcatcagctccagtaccttgtcagcattcttggcaaggtcatacagctttgctgcctcttcaaacagtcctttattttctgccacagaagcaactttgttgataataggctttgtgtcactagtaaacttatctatgactccaggctttctacttccgtcattctctagtttcccaagaatcatatcgaactctcggctttcaatcacaagctcactcacacagcgcagaaacatgttttctccttgactatctttctcatccctgaggaaatagaagtactgg

SEQ ID NO: 339744 - DNA, 1000 bp, Homo Sapiens
tttttttttttttttttttaagtgtaagtatggactttatttttttaaaaaaaagtcttttgagaactacaaattacaaagtaaaagcagatcactacgtagaaatctagtgaatacattttgcctgtgcatgaaaaactttatcaaagttactcattttaacaaattcaccccattcacaacaatcagttataatgttctttttaaggttactatacctttatttcaaattatattacatgttattccctcaaaatgaacttttaaatgacaaacttttggctcataagaatggcaccttcaaaaggggcgatttccactcagtctctggtggcattattccaggctagtttcaccagttaaaaaccttcaaaatgttcacttttaacacaaagtcttcccataaaaaatgtggctacattttccccccaatgactacatacatagatgggtagcagcaagaaaagatgaaaatgaaaaggcagccattaaaataaatggatcaattgtataccaagaagtatttggctcatggcaattaaaaaacggcaactagggtatgttaatagccagaggcttgagtcattactgagtatattaagagaacgaagccagtccagtatgaccgagtaggaatatataattgtcattgcacttcatttgttatagcaaatactctaagccaataggaaatctaagctatatctagattcccaattagaacatgctgacctttaacattttcaacaatttttactgggtttagtacatcagtcattttctttactcaaactccattacgagttctttcctatcaatctaagtgtattctgtgcataaaataccttaaatgttaagacttttctaaggttcatttgaaaatggttgtatgaaaagaatacccatttgttttgcctggaaagatagaaactaaatgcagaagtttctcaaggggaaaaagctcaactttcttcttcccaccacctctgccacattatga

SEQ ID NO: 339745 - DNA, 1000 bp, Homo Sapiens
gggaaaaaaaatatttaatgtaaatgtttagccattagaacatacaaataaataaataagctcagaatagctgagaaaaaaaccacaaataagtgaattgtcaatttctcctcagtctcagatatgctatttccaaaatactaataaaatatacaaattaactaataagatatagaacattcaacataaaacctaaaataaaaaagaccaaccctaattattttatttctgtatatcaagactacaaatagcatttaaacgcttattattcaaattaagaaattatacattttgttttgataatgttcattgtcttaaaagtgtcattcagctttcccactttaaaagtatattgctaattatggtcaattaactatgacagcccacagagcctccagtgacagtaaaatactagacatagaagagataaatgaggatttagatcccctccccccagcatcagcaaagggtcactctgctcccacagctgacgctttgaaacgctttctgtttgtagagactaaaatcacccagcaacaggtcaggtcctgataaagtgcctactgcaagaactaccgacactcctcttccctggatgtgcaccagggactgtcccgtcttcgagtcagagcagcaccaggaagcagagggtgccaagcatggcgagtcacccccaaatatccaggaagacaagtgggcgcagcccaggggaaaggagggcgagcggatgatgggagaccggcacggctagcatcgggacaaagatgcagccgccactttggttcaaacaactttaatgacaccacagtgtctgtcctcccccaagtaactgggtatagtgggtgacagatgttgcagtagcttggcagaccctcctcctccacctcccctgaaagctctccaggcacaaagtggagatagaaataggacaatgaatgaagtccccacctcacatccacagacagtatctccaaaccatcatgaggcaggccacggtata

SEQ ID NO: 339746 - DNA, 1000 bp, Homo Sapiens
ttttttttttttttttttttttttttttttttttttttttttttttttttttttttttttttttttttttttttttagtatcttggccagtttattacagaggacgataaatgattccatgtggatagggcataacatacagagaatgagactatgccagaaatgggaggaggcatttgaaacaacatgagtatctcagggacagatggattgattctgctattggtaggcctggaaggcaaggtcagaagtagcaaaaaatggataccaaaagcactattagtcacccaagctaagtggaatagctggcccagtaggagaaatgcaggttttgctctacactaagttctccaactcttgataagcctccaaaaacaaatgttaggggaaaaaaacgcagctggttatgaaaagatatatctcatttcattaaaaaatcaatgtcaatgctgttaatagaatccttttatcttcaggacagaggcaatgccctaaacaaacaccagctcaagagcctctgatgccaacctagagggtacccaaacacaaacttagcatagaggtaagaatctctatgtcttttggtggaggcaaagccatttggttggtacttcacaggaacatctttctaccaagtcttcatcatatggtatgtgccacgagtctccagttgtttgcaccactgtgtcatagctgagaatacgctgaaaggttagttttgatcctggaaacctatttacaattgccagctgatgtccctgctgccacttaaaaaacaggcgttgggtcttggcatcaggcagacaggccttgtggtcccgcatcaggtctcttgtgataaacctgcagtgattcccggagtgcagtgtggcatacagaaggaatggatcatcctccgagatgtcatcagcaaaaaaacagctggcttgcttttgcacctcttccatctcatcccgactccactgggaactccgtcttagcatgtgcttccggcctagga

SEQ ID NO: 339747 - DNA, 1000 bp, Homo Sapiens; identical to SEQ ID NO: 246493

SEQ ID NO: 339748 - DNA, 1000 bp, Homo Sapiens; identical to SEQ ID NO: 159208

SEQ ID NO: 339749 - DNA, 1000 bp, Homo Sapiens
aaatgatggttatacaatttaatgacctgaaattcaaacaaggagataacaggagtttttaatagctgaaatggtggttgacacatatatttatcatgtcaccagagcactgtttctcacttcccttgtgtctatgggctcacaattattaattcaatcaagctacgaacctactcattagaaaactggacacagaagcacaagtttacaatttcaggagagtcacaaataataccccaaaatcttaaggatcctaaattaaagcctgttactgtagtatcttgtatcatgaggaaatctaatattcttgggctctctttctatgtaagcatgagtgtggcaactaagtactagttttttctcttcatcaatacattgatgtcctcctatttagaaatgcattttttgagagcttgtcacaaagcctttattaacaggctgttaaggaaagttgcagtgtttcctttaaaaaggtgctttattgactttaaatttataaaaggttaacatgtcttgatctagttgaaattatgatttatatcaacatgataattatgtgtacagtttatattccactcatactgtacaccagtaaaagcaaatattcaaagggttctctaagtttcaagattaaaaaccataatgccttgactgaatatcatgattacaaaacaggtattaagaactgtgaaggtatatgctcacaacatatcccttctcccattctcactttattccaaaatctcatttatttcactgacaatttgtttatactttcaaaaatccttttataatttttatagatataactcaaaatgactgcttgggtctttaaaaaattaacagattaaaaagcaatacaagtgcacttaacactgatcaaagtctgaaatgccaaaaagcaaaataaaaatcctctgaaatatatatgtatttttaaatatagaaaaactccaccaatagtagaaacaaagtatgtttaatggttgctttggaaagg

SEQ ID NO: 339750 - DNA, 1000 bp, Homo Sapiens; identical to SEQ ID NO: 159210

SEQ ID NO: 339751 - DNA, 1000 bp, Homo Sapiens
tttttttttttttttttttcccggctcagcctgttcttttatttttttattacgggagtgagcaaccatgcccggctcggccttttatttttttattgtgagtgggtcttatggtgcagcctgtggtcccacgtgaacaccagtgctcccagcccccctgcacaactctcaaagtgacccaggtggatgggcaaattcagggtccccctacttcaaggggtaggagagactgaggatggactcaagagagagcggctgcggaggtgctaagaacctgcacctggaatctggagacatgggaggtccctgctggctctaacgcccctcctacccaggacccctcaggcagcaccctgcagcaggaagaaggaaagctagaccctggggaggactaacaaggcagctgctgctttctggatgggcaggtgcaggcctaacaacagtgtgtatcagcatgtgaggctttattcacaatccgtgctccaggccctctgcactgggacaggaccacagggctaagcccaggctgggggttcaggcaagagtcctgcccctagtcctgggctggagggcaggtcagctgcacggaggtgggcagggctcctggcccagctcacacgtgctgcttccggtggcgcagcacctctgtgggtgtaaagaggaagtccttcccgcaggcctcgcagtggtagggcctctgcaggacagatgtcttctggagggtttcgagggcagcttcctcagcccctgggggcccatcctgtggggcctgggggcaggtgttctcatgggcgatgcgctccaggggcgtgaggggcgcatgcaggccacagtgggggcaggtccagaaggttcggagacagtcgctgtacaggtctgtgtcattcgtgaggcagttgtaggtgaggaagtcagtgactgcgtagcccccctttgtggggtggggggacagggtggagctgccaaagaggccaggaagatggggggtggctgggatggt

SEQ ID NO: 339752 - DNA, 1000 bp, Homo Sapiens; identical to SEQ ID NO: 159211

SEQ ID NO: 339753 - DNA, 1000 bp, Homo Sapiens
cagggaaacataaagcatttgtttattattgctatactcaaggcaaaatctcttaattagccttgataatggaagtataaccagaaccattattcatgaatttacattttgttcttttctgctgttgagacttcactgtttcacacacaccatctaccccaagacctttaatatacaagaacaagaagaattaacttgaaagtcacaaagcatggcttgaccacttgcctagttcctgactttaggccaatcacttcccctctctgaacctgtttcatcctgtgttaaaaaagaaatgggagaggaagaggagaggatagaataaacctacaactgagataacacaggtgataactgaaagaacatgaatgaaatttcactgtgaataaaaaatattatataaaataaagtatcactaataacaaatagggttgtggaggtaaaacagtctatgttcctggaagcctgcatgacagtagccaagatctaaatcctggggcaggacaaaggatattcatggccaagtctctaaactcactaaggaagtacctggctcaacaagccacttaatatgtacccagctacaccctagaaacactttgtcagttttattttaccttaatatacatttgtacaggcaataataaaaaggctattacacaacaattcagtgagttttacctagtttcaagaataatgcatgcagttacaaatgagaggtagaaacactgtattaaagacctaaaaatacaaacgtcatataaataaatgttcaaattaactactggaatttcatacagataaataaggtaaaaattacattactttgtcaaagtaaaggacaaccatgtttgtttttatcagtacattaaaattagattaatgccaaagagctctgtgcaatttgtcaaagagttcagattattttatgtaaaaggattaaaataaaaggattaaaattggtgaatggtttattcaagtattcaagcaggtaagtaaa

SEQ ID NO: 339754 - DNA, 1000 bp, Homo Sapiens
ttttttttttttttttttattattaaatgtatatttttaataaagccaatagttattttacttataggagctttaaaagatacaaaatgtagagttccagtttggaagcattgtaactatacacacaatgtcctgctgatgccctagcaaggcacccacgcccaaccatgcaaaggacacacacgttcacacatgcacacacatgcgctttggcgagacccctctgccaagcgcagcacctggaattaccagtgttcagagcaaggcggtgccgggaacacagcacctacatggagaccacacaaacggcttcacacagtctcacagcccatggagatgcaattagaaaatgtcttccttaatagagaaaaacaaactggaaagtgacaattagtgacgtcacctgtgctggagcatcaaggattgacctctgtccaaggtgaggcctttggagaggcactattaaaacatgagtacttcagtataatggaactcgaaatacagggtactgtggacacattactgaaggaaatagaaaactatcttacaagtagaacagccatagacaactttaacagagattagtgtgcacaccgtgacagctaacacagacaagagccacgcagggttggtgcaaagcacgtgcctgaaaatgtctatatacaaaacagttctttgtaaacatggtgaggtgaatgctcagaaccacggcaaaagatcataaatacaggcagcaatgcatccccacacagcacaaaagacaacacctgaggcctgggaagagcctgacaacacagtactaaaaactcaggtggctgggctcagacaccctacgggtcctctcaaattagtgtgtgtgtttacatacatacatacatacatatatatatattcttttttttttttcttgttgagacggaatctcactctgtcacccaggctggagtgcagtggcacaatctcagctcactgtaacctccgcctcccgggttcaagcgat

SEQ ID NO: 339755 - DNA, 1000 bp, Homo Sapiens
tttttttttttttttttttttttttttaagaaaaaaggaaacagaatttaagcatttgatagtataacagaagaaacaagttccttcccaatttggacactcaagggtattcgtggttaagtccagtatattctgtcctcttctttagagaagttcactaaaaatgtgaagtatatattatatattcatagaaaatgattttaatgtaggtatgattacagacacactcagtgatcaaaacatgaaaggaatggttatttgctcttctgattgaacaaatgaaactagaattgttcatacacataatttaaaaaaatatattcaagacaccgaaatcagttaacaaatataagaactaaacattaattagtgacagtaaaatggcagaagcaaatataaaatacaaaaaacagctttactcagactttttgactgccatgtcctcctttagaaggactacagtttggctacttggtctcttctggggcagatgtggcatcctgaggtgtgttagcttctgccggtgcagatacagctcctaccacagtaggggtggtctcagataaagcagggatggcttctggagtggaagtggctcctgtctcactgggggtggtgtcagtttgaaaggctggagtttcttgacggcagctggtgtctgttggactgggtatgatgtcagcttgaacagtcatggcctcttcttctgtttccaattctgtttcttgattttgaacttcctcaccctcttctaccatagcaggtggtagttgtaataaagtctgatgataatgatgtgtagtctgtatcaaatgcatgtacatgttgtatacaaagtttgccatctggggcatattttttattatttgtacttcatgagatggtctctctccattctttctagtagttgggaaaggttctgttggaattatatgcaaatgaagggggcgagctgtgagctgactgaaagctggagtcagttcaaaacagttttggaaga

SEQ ID NO: 339756 - DNA, 1000 bp, Homo Sapiens
tttttttttttttttttttttttttttttttttttttttttttttttttttttttttttttttttgaacaaaaggtcattttttaaagaaaactcaggatctcccctctgcacagtgctaaagccctgtctcaaagttcagagcctggaaggtgcagagatgtggcccttggaaatcaagcccttaagaaaacagcccagctgtgtggggccggaagccccaggctgcagtcctgtggtctggaggcagccgatattcgggtgagacatgtgcccagctgccggtgggtccagggggcacggagcccccactgtccctggcccaggtctaggactaagtcagtgggcccaggccagctccaagggccacagctcctcactcgggggccgcgccagagcagccgcagcagctggggcgccgcagggactgcatgacagcccgcagcggccccctccggccctccacagacaggctgtcctcgctggcaggcgcccgctgcagctgctcaaactgcatctccaggtgcttctggatggccacaccgagcacctccgggtccaccgcagctccgtacacctcccatgtcatgccctcagcatcccatcgcacatcccgcacaggggacggcgcctcctccaggctggaccccagagttacctctgggaacacatgcagggctgcaggcgcttccagggacggactggtggccacagccttgcaggccgccactggggccgcctgcacaccagcatcctgggctgacagcggggatgcctctgcaggggccaagtcattggctgaggtcatggtccacacatctttggtcctagagccaggctctgggactaacccagcgggaccccaaaggtgggcacagcaatgggagtgcccagggagccccccagacaacctacagtggatcttcaccccatgctgagcctgcagcccagactcgctcactgacgccactagtttgggaaaggccaggatccctgtggca

SEQ ID NO: 339757 - DNA, 1000 bp, Homo Sapiens
gatgataaacgactttactctaaaagcggctggaactcagtgacatgagcgtgcgctgaccccacatggggccccctgtgcaagcagagctggccggcccctccttgctggcagaggcacgggaggcctgctggggatgaggccactggccagggctatgctgcaccagaccaatggcaccgcccccacccctcccagcgcaggggcagcttggagcagaggcagcactggccaccgctgcgggggcaagtcagcgtcaagagagtccctgagtgagaaggcccagataagcccaggccccccaggccagcggacaggcacaggcagggcctacagaggtgccaaggccccaggccagttgtgctaggagcctggacctgctcttccacacccccatcccgcccctactgcacaggcttgtgccttggtgccccctggaggcagcagggaggaggcttctcaggcagaagtcttaagttgcatcccattccccagaatccccaggagggagaagagggatgggctgcccctccttcctgccagagccacagctcaagggcagtgggatggccctgcacccagcccaggtaccccttcctctgtgccgaccatgctgtcctttggctccgaggaggccctgagcactgcccacccccacaccttggagggagcagacggagggggtgagtactgcacagagcctgcctggaggtgcagactcatgcactcagccctgaagaggtgagagaggctggatcttaactgtggtccaatgggcatattatgagtggtccttgtccctgcctgctatggggtaaccctgacccagctagcgtccctgacaacatgatacaaaaacacagaactctagcgggatacagagatgtgtgcacagctggcaggagcactggccacctcccaacctgttccccatagcttactcctggatgtagcctggagggactgctgggctggggagggactggccatggagcaggga

SEQ ID NO: 339758 - DNA, 1000 bp, Homo Sapiens; identical to SEQ ID NO: 159213

SEQ ID NO: 339759 - DNA, 1000 bp, Homo Sapiens
catgttataactcacactaattttgctagttttttattagagcattacaattaagacattaaattataaacttatgtggtatatttagaaattaaattataaaataatacaaatactttcaaggtgtgatgtgccaacaaaatttaaatttttctcattaggattcagatttcagattaggcaaacagtttggttgattctgtgatgtatgtaaaggttggaagggatgagggaggaggaagatgtctgtaaataaattatttcacagaatttttttaaatcaaaaaaagataaaaatttttaaatgagttgatgttctaacctgttggcccaacatacagaaaatacatgacaagggtgttttttttttttaagcaaacagcagctttacaaacagtaatacttctttatacatatattaaagtaacaatgtgttaagattgaacagtttcatgttaaagagttgaaaatgagtgtagcattcactactcatttgcacatttcaattcccacccctccctcctcccccagcttatttagaaatcagacaagtacatatttggatattaatttctcagtatttaaactatgtgaattccttttgactaattcttttccaaatactggaatcatataaaataccatctctgcaaaaacaacctccagtcaaagccagtaaaaacttctcaatgtataacacacattacttttccacatttagtcaaaagaaatatattacatcatttacaaacatatttaaaccgaaaattaagctaatatgaacatctgtcttttgagaagtaatcttcacagcaaacaaacctactgaagcagaaatctaactttggaagtgtaattcatattttagttaatatgcttacatactgaaatagaaatctattattaattattgccagtaaaaccacctctacacattaagagaaaaaatcactatgttttttatttcttgtgatgatgaaccaacccttactcttcccac

SEQ ID NO: 339760 - DNA, 1000 bp, Homo Sapiens
tgctgggattacaggcaagagccaccgcgcccaccagttctaagttccgatacatgtacttgctacttaagaaaaacatgccgaatttaaagcaaatagtactgtaataaaaaaatctgattttcctgaaaatggtttaattttatgatgtaaatgcaaatcttagaagtaaaaacttttttcaaagaagacttttatcagactcaattagcagttaaatgggtagagagaggatgtcagtgtacgagaagccatatggagttttgggtggccaggagcaggaagtcaggcaggtttggcttcagttgtactacctagagatattttggaagaagctagagtgaactgtgtacatatatgagtttagatttcataagacacttagctttactggagttcactgcagaaaatgagggaaagaaaaatgttctcgatgtatacaaatgccacagacagttgtttttacacctactttatttgatagcttctaatggctgaaggagatttcaatatcaagtagttgtttgtcacaaatgtgcctaaaaataactttaaagatctttgtagggaagcagaaactcttaagtccagatgttttctcaggataactaaacctggtaaaatcacctatatagaagtaaataatattttatggccacatctgcaaaatgaaatatgatcatcttcattgtcgatataaaaacaaatgaaagttatgggtaatttttgataaaatgaattatacaaagcatcatttatatttttatatttggctttgggacataaggcaatatggagaacttatgtgacactgacacaaacacacacacacacacacacacacaaactcaagtactcctctctgcctcatccttattcctttctgagatcagcccataatatcagtaatcctctgctgaactaaaataatatttttgctccaaaagtctgctagggaaaacatctattaatatatgtttttaaatcaaatatttccaga

SEQ ID NO: 339761 - DNA, 1000 bp, Homo Sapiens; identical to SEQ ID NO: 159214

SEQ ID NO: 339762 - DNA, 1000 bp, Homo Sapiens
ttttttttgagttctttatggggcaattatgctcatattgttttatttattacatgtggggtaatgttagacaaatagctataatacagagattgtacaatttaaaaactgtaataaatatggtccattaatagcagactccaaaattcttgtccttcttgaaaaaaaggttcagtgatttacgataatccactaagaaacatcttcagaatttcacagggagcagtgtctggaggcacaggtttcccgcagtgctttgaatattcagttatcaagactgaagcttcatctaaacttaagtcatttgccaaatagttcactagctcagtgatattgttggtattcatcgcatgcatcttcaacatttgaaagtatttggtctttgccaaaatcccaaactccttcttattgatgatattattcaaaatcagacttctaatttgatgtgaaaatcctgctagctggcccgtgttcatatgctcttccaattgctttaaaataacctgagggtcacaggaacccagaaaattcttaatttgctggtgtcttttctctgagtggggcatgagcatcagacaagctaatgcaaaagccggaagttctaactggatatactgcctggcgactccgatcaggtcaagatcacctgagactggacattcgaggacagcgatgagactctcagaacaatctgacagctgatcaggacttaaaggacaagaggctgaaagcagtggtatctgtatcacacgctgccacgctttgctgaagtagggaacctgccataaagaatggatactggagatggcttttaaaactttccttagataaggaatcatattgaagcccagaagcttttgcaagagtccattccaaagctgcaggtcatagattttgtattctaaacacagctcagtcaccaatcttactgccatggactcgtggctgtggtttttccacagacccttaatcattccttctttaggactgctgcaaaata

SEQ ID NO: 339763 - DNA, 1000 bp, Homo Sapiens; identical to SEQ ID NO: 159216

SEQ ID NO: 339764 - DNA, 1000 bp, Homo Sapiens
gccaactttaacataggactttattgaaacacaaacaacactcaaatatatatatatatacagtagaacgacaatcagaagggtggcttatttatgattgctcagttcactataagctcaaatactgaacatcacaatgtggacaagacaaatatcaacaaatgtgttttcagctctaatattcagctggcatcagaaaaatgctccagcttacagacagagttggacaaagttagtgtcagcactaaagatatatgttgcaacacagaaccaactattaaaatcaaagcattactcaaggatcataactcaggaacataaggacaatctgaggccagcaattaaccattactaattttcttggtccccttcagggtcattttgattgtctgttttgccttgcagttccttagcaaatttctcaactttgtggaatgcagaaataagcggctcaatattgaaatcatcatcagagaacactgtttcttttttgatattgttgccaatattctcaaatattgcaagaacaatttgaatattgtcatttgtctcttccctgttaaagaggcctataaattctgacactgcttcagcactgagtagttcttttgtcatgaaaagattttcagacaaattcagtagcattttcaaaacatgaaaccttgttttggcattgcctgtagctaataaggagagaaacccagacatataattggcaaccagtgtgtgatagtcagtagtagtagtgagatgtctaatcatccttattccagacagctgttccggggaatccacgctataagcaagggtttcctcacacactttacatatgtatgtctgaattatgtttagattcggataaggtggggccatgcgaatcatattttccaaaaaacttgttctaactcgggaggacggataattaagcaaggtttcaataagtgagacaacacctgaatctcgaatgaaatctcgggtaaattgagaagcacttctcata

SEQ ID NO: 339765 - DNA, 1000 bp, Homo Sapiens
ttttttttttttttttctttaagatgaaaagtttattttgctttttgcctagaagcaaaactagtgaaaataaaagtataaaaataaatacaatttacattaatgaacattccactcaaagtaaaaataagcaaaaaaagtatataaataaaaatccatcaaaagcacaaacagtgtctggcacctgtatgagaagaagctatgaacaccaaaaaagaatgtgtaaaacacaggcttttatctttaaattaaaaacactcaagtttctcatccttactctaaagctagttttaactttctccaaaactatttgttttaactaatttgcattacacacacaaaaagtgcacaaaacttttagcatctttcttactggagagacccacaatgctatgaataagctgtatcctgagttttcagaatgataaagcacagtttatcatattaagaagacaatttgatactttgcctataaattttaaaaaattggtaacttggactttttttgaccatcttctaattttctggttcactcattcaatacatgatacatctcaataaagaaaatcaagtttacacccagggtggcttattatttctgtctatagctggatgtcaaagttaaatttaaaatggcacagaaaattggagaaaacaatcttcatctccatattcttaaaaggatattaagaatatatataggttgcattttcaaaataccagtatctctttaaaatttaaattagattaaatatacactgtctcaattttatgtgaaaagcacaaagccctttttggaaatggtatgataaattaatagtgacattctccctcatgaagtcacgttatcttggtaacatttgttggttgatacttttttttttttttttttttttgagacagtgtcttgctctgttaacccgactggagtgcaatggcacagtctcagctcactgcaacctctgcctcccaggttcaagcaattcgcctgtctcagcct

SEQ ID NO: 339766 - DNA, 1000 bp, Homo Sapiens
gtacaataaagtttaatcacaattataaaaatgtggcgtcgggtttgcgctattaacatatgtacagtccagcccagcaaaagggacccaccccgccatcctggcctggctgagccggggagtgacaccagggtggaagggtgaccctcagggtctggcaggaacagatgaggcagggttccaggcacggagtccccaggactgggggtgcagagcccccccagggggagaacatggccactgccccagagacccctaaactggggaggggtacacgcagggcgtaaggggaagtccccattaacacaaagcgagaggactgtgtagccccccaggacagaatctgtacaggccggcaccccaggtttccacaggaaacagctgctggctgctacaaaacatttacagcttcttctccgcaaagaaaaacaatcagggggtggtgggcaggggcgacaggagaggcagaagctgcctccagggactgaggctccctcgctgggcttggggcccccaaccccacgcttggagatgggggcatgtgggccctgctgagcccactaaggctgggggggtgctgggagctcagggcaccagggggaataaataggggtgtgggcacccatcctgccccacctcagtttagggagccccggcagctctctgtgccacacagacacgggatcttgttgtcttccagtgggaacttgtagtcgtaggtgatctcctcgtccacgccaatgggctgcttggagtagatcacgatcttcttctgggactcgatggtgatgaccttggcgtagcagttaggcgtgcagcagtggttgatgaatctggccaggttgccacacttggtggcatcgatgatggtgtcgtggtccacccggaacaggtagctgctgccaatgccctcctgcacgtagcgcttctcccgcatgtcggccaccatctgacggatgttctgacccacgtattcgatgaccatctcgtcagcagcaat

SEQ ID NO: 339767 - DNA, 1000 bp, Homo Sapiens
ttttttttttttttttcagaaaataaactgctttattggaattacaggagtgttggtggccggtgggcagagcctagcagggggtgcagccgccaaggcccgggtgtcccagctgttgctcaggagccgtgggccctgcaggagtatggggaggatatgatgtgtggggagcaggggggcaggtgccccagccctccagctgcagcttcctgaggttctagaagtttctcaggctttacaatgtgtagttgggagaatacgatggaagggtgaacccgactcccttcaaaggaatgaatccaaaaatctagtggagctgccgggcacccagaggcaggtgggacagagcaaggtgcagacgggtcacaccctccgccggcccgggccgctgcgttctcgcccagctctgtcgcgtattccaacacagacatgttttttcccagcaaaaatgctggctttgccacagctgacaaaaaaattccagaagatgcctttctgcagcagcacgctggtcctggggcccaggcccctcaggggtcgtcatctgcctcttccaccacctcctcgtccagctccctggcgtcctccatgctgttgtggcggacctgctcggggacggtgcgtggcagtgggagacccagcccccggtgcacggcgtccacggcctgcgggctcacgtagtaggacatgttggccaagggaagccgccgccgcatctcctccaggaatctgtaggccgtctggtattcctccttccgcacgtagtgctccaccaggaagccatagacgtccccgatgcggatggtgctgtccaggtctggttcctccaggagcagctcacactgcttgatggactccttggggtcctctgtgtacgtcctgcgggcctggatgaacctcttcaccagtgccatcctgctctgcagctgcgccagcctggtctcctggtccagggggctcttggccttggccttggccaggcacttgtaggcctcggtca

SEQ ID NO: 339768 - DNA, 1000 bp, Homo Sapiens
aatgaaagaaagttgataatttaggaaaaccaatggtatgacatgttttactagaattacaattcaccaaatcttattgaggggtggggtaagaagaaaacctgaaggcaggcaatgcattaaaagcatcaatagagatttctggtgctaataaagttcactgacaataagaactttactttcttccacctaaagaagtttccttaagtactaacttttaaaagtccattctgtcatgatatgagcctgttcactgaaccgtgaggaacaaggatgaaaaataagaatagaaagagtatggttcagcctgagtctaagtggtctggtgttttatgatgactctaccaaatgtttaatttaaagtcttaatttcttatttttaattataatgttgccaactgtctgactgaccttgaaggatcagggatttttccacgactctaactgaacacaagatccttctcagacggggagaatgaagtgacaacagtgtgtcgatctgcgcaagttgtgcagctactgaaggagaagcaggaacacaacagggaatgcagacgcctaccaggaaatcgatgtgaactgctctcaattatgcagcaaatactaagaagaaaggacaatgctgaattcaaattcagttaaaggcagtcctcaggctctttcaagctagccctagatggcaagtgtgtcctgagacaggtttctctactgggtttcagcacggggctttaccatccttcagatcttttctaaagacaaaaatgacaaagtctatagatggaagagggggtaatgaagcagggaaggggaaaaagatgctgatttgtttacttttattatcattttttaaatgtggtcaggggttttatagtattttttgtttaatctttttggttattgaaaaaaatagaacagtccactgtccagcagaggctgcttcaactctattgctcgcagggctcattctgcatggatctgtgtttcaggatgctgcaaggac

SEQ ID NO: 339769 - DNA, 1000 bp, Homo Sapiens; identical to SEQ ID NO: 159217

SEQ ID NO: 339770 - DNA, 1000 bp, Homo Sapiens
cagggcagaattccccctctgcgtggggagaggtgtaggccttagtagcggtgtgggggggtctcgatgatgcgtctctcgtcgctgctgggggaatcggccacctccgagtcactgctgtcctcatcctcctgctggcccccaacagcccccgtcacacaggactgccgattctggtaggactccatggggttcacaatgatggtgagagctgagtcatcccagaagaggtctgggtccttggggtcactggaggcccctggaggcccgccggcccctgagacgcggcggtgaagggaatggatgcgcaccaggcccaggacgaccatgagcaccaggaagcccacgcacaccacaatgatgagggttgcggcgctgggtatcatggagtttctgtgggagctggctaggctgtgtccagccatctcaggcgggggctggtgaccacggtgcaggaactgctgggagctgagcacgtggctggggtgggcaacccggttcatgctgtgcaggacattgacctccacgatgaattcattgctggagtaacggccattcatttccgagcaggaaagccggaacttcctggtgtagagggcagctccgtgtcgcagccgataacgagcctgcctcaggatctcttcatacacagtgatgctctccaccccagcaatagtgaggtaggcagatgtgttggtgagctccagcccccgctgctgcagagaggttgtgtccaggagcaggctttcccgctcgggatccaggtcatcccccaccagagaaatttcacagccatccaggttgtgcacaatctcatccgacatgcgtgtgtctgtcactgtgccctgccaactctcatcctttttggcctccacctggtgagaaatggagcaggtgatttgaagatcagggaacaaagggacgccgttggttccctcaaagtccacagctgggcgggcaaaatgagcagtgccactcagcaggatctggggggcgtcag

SEQ ID NO: 339771 - DNA, 1000 bp, Homo Sapiens; identical to SEQ ID NO: 159218

SEQ ID NO: 339772 - DNA, 1000 bp, Homo Sapiens
tttttttttttttttttttttttaacattatactgtcatttttatcataacaatataaacaatttttatcatcatcctgaatattactttataaagatatatattttaaaaggctttcaaaacatttttcaacccagcatttgagaataaagcattaagagttttgtatacagtaacacattcatgtgataagtgtatgaatttacaaccatacataatatgtatatatgtatatatatttatataaaaaacaaacttggccagaagttaaggctacctacgaagttgtccaagtaaattatgcttgtcaaaacaattataaaattcaaatcacacatgcatttttaaatcatctaaatcactgacaaacaaggttcagcatccaaagttttcaaattaactgcaagaaagtgctacagacatttacattttctaaatatgaatcagtgttcccacaaagttacatttaaatttttcaccagcctcaaaagtaatataactgaaaacaaactttcacaatttggtacctagcactcttaagagagaataggttgaaaatggcaggcagcaagcatcattcacaaatgtgctgtctcagacagcaaagtacagtttataatactgtctgacctgacacgtggttgaaattctaagcctcataagggactaggagtgaacatttcattaataattacacacaccagcaaccacatgataaaggcttcaggcttttcccactcaaatcaaagtgaatgatttaaacatggaacaaaataaaaccaagacataagtagcctcatttcaaaataaggaaaagtaatttctgacgtgcctaaatatttaatttaaacttttaaaaaagtattctgaactaatgcctcttttaagattaatttctgaagatatatttataaatataactcacagcctgcaggcctctgacagagttttaaacagaattagctaagatggagagaaatcatttaaccagctcaggtat

SEQ ID NO: 339773 - DNA, 1000 bp, Homo Sapiens
acttttaaacttgtctctaacttagaaaattttttctaaatgtatcgattagtgtaaagaaaaagtatgagtagttaataaatctgacctattatacaagaaatgcaattttgaaataccagattttcattttttgtactaagtgtatctcattgtaggcaataaaaaattgcatcacaggcatcaaaagtgggaaaaaattgttccttttatcaaccaaatagaaactttcaataacatactttgagtgataaaatggtgatgtcttacatttaccattatagagaggtcttgtggttagaaatttaaaaagtgtttaaagatgattaagcatagacaattaaaagaaacattatatctcttggtatttttctcaagacactaaaataataaaataaaaatataattaaggaaaagcatgactttgggaaaaaaaaaatcacaagttaatttttatggctggattgaaacactgtaaaatagacaaaacctcagccagagacagacacctgggcatgcagaaaaattttttcaaagcaaaaaatttgtcttatcctattagtgaaatgacaacagactctaggtgtgttttattaatgcacagagtctaacaagaggtgcagtaatgctggttacttttcctaattctaacatggtcctggctttttatagtaggccaactggcattaacattttttatttttaaataaaatgatccgatttcaagtggttctttaaaataccaatgaatggcaggatctacatttattcaccgggttaaatgcttacttttcggttgaaatagaaaatgacagtcttgaaccagaaacatcttagaaaattgtagtccaaactctgagaataaaataaactctatttgggtcttgttttgttattcatttcatgtgtttttaattaaaggggcacaaagcacttgtgaagaacaatgaaatgcaaggtggtatttacatatggtcatatgtatttgggagcagaagtc

SEQ ID NO: 339774 - DNA, 1000 bp, Homo Sapiens
ttttttttttttttttttttttttttttttttttgctgtgttttcatgctttaattcagagttgtctgctgcaggtacaactctgtctgaacaaaaggacaaaggagacaagagtcaagatccctccccgcctccccacttcccacatcccctgaattcttcgtgaaggggatggcctaatatgggaatgcactgtgacctgtttgcattgtcccctaggtcagagagggggttgtgagttctctgggcagaggcccctgggtaggccttggccccagaaccttgcagtttgtcccacccctccccaaagtgctgtaagatacccctgcgcttgtggcaattgggaagggtgtgtcagtgagaagctaagtgatccccttgggagaaatctacaataaactccactcaagcccagctctctgtgcagagcccgggccccagcgtccgattcctgcctgagcctggactggccgggcagtagtgccactctggcccgagccctagaactcaggagaagccacgtctggccgctaggctccagaaggtggttcctggggacactgttcctcaggacctcatcagctcttgccagacgctggggaaaggggaggccccaaagatttctgtttcagaggctgagggcaggaggaaaagtcacagcccaacgggaggaggtattaggcaggaaggaaaagggtcactgtggagggtgagctctctcagggggaggccccgccccatctttgccctcccagccccatgtgtaccctgcctcttcagggcatggcacctgagcagcagctgccgcacctccaccgcctggagcctcacaggcagcctgcacctttgcatagatgcgggatctgagcacacacacatgcactccagagctgggccagggccaccggccaccacagtcccagggcctgtcccagggctgagtggggagctgctccctccactgacaagaagaaaagcccatcgaaggccccaggagagc

SEQ ID NO: 339775 - DNA, 1000 bp, Homo Sapiens; identical to SEQ ID NO: 159219

SEQ ID NO: 339776 - DNA, 1000 bp, Homo Sapiens
tttttttttttttttttttttttttttttttttttttttttttgcatctctggtaatgctttattgatttgagggatcctgctgcacctggctccctacctctccattctcatctgaagtgcccctcaggccttccagacacttgcccccaccagagattataatacactcatgagaattgatatatgtgtgtgtctgtgcaaatgcgtgtgtgtatatatatgtatgtgtatatatatacacacatatatatgtgtgtgtatctctataaacacatatacacacacacacacacacacacatatatatatatatatatatattagctgtacagtatttacaggtacaaataaaataggcttgaaaattacagtggtggttgggacccatctcatttcagtttactcagcagatagaaaaataaagcaccagtggcctttgaatggcatttgaatttccatgtgagcaaagatggctggccagtgggacagaacaggtttggcttaagctccagctggctaagataggcccttccatctggctggcccaggggccaggtctctgcttgagaaaggggctgttatgttagcccactaccataagcaaaagggatgatgacatagacccttgtctcttaaccacactctgcttttgcttggcctgggcagtgtcagtgcgtggccaaaggctacacaggaccccatggggtggtcgataaagtgtgaaacccaagtcagggaatactggtttcactggcatctcgagacttgagaaaggaaggtactccactctcacatccctatctatgccaaatcgtcatgtcacatattaggggcccgtcagtgcccactcttaactcagcctcataaaattcagcatcgtatttacacaaatgaaacagctcgtggtgactggggctgccctgcgctccacccctgtgcccattcactccagtccaattcctctgaaaaagacacttcagagccagcgttggccccaa

SEQ ID NO: 339777 - DNA, 1000 bp, Homo Sapiens
gaacaggtaagttttatttggactttcaacttgttcagagagcacaggggcccctgcctcccctctccaggcccccttccccatttccactccctggggacgctcagggtacaatgacgtgtccttggccccttccccgcctgacataccccttcactcccctgctctatagaggggaggggtgcagggaggtggggcctggaagagttggataagagcgggacatgcgctgtcggtagcggccactgctccccacccagagctgagacctgggagaggcgcgcagtggagcagggtggattcattgtggggtggcaggctttcgccgtagaaggctccccacctcagccctggggaccccctggcctcctgcttacccgtccttctgagggtacaactctgaggtagatttcacagaggaaatgtaggtgggtgggtggagtgtgggaaggggttagctcttttgaagttgatctccacagcaccctgggcccgttctcaggttctggcctgggaggcaggggctgatgacacccacccagctaacagaggctgagtcacacaagggctccagggcacctgtggtgtcaggggctccagtggaagaagggttgagggggtacctgccttgacgatctgtgcctcagtgccaggggcaccaggagggcatgggcctgggaggctggcagacagtcccctggccgtaggggcatgctgtagggccctggccctcagagaagcctctttaggctagatcttcccagtcctccaggatcctccctctcctctcctctcctcccctccctattccccagagtgggcagaacagggaaaggaggacaggactggcctgcagggaaccacaagaaacaagatgcctccctcccccagtgggggcccatgccatgagccctaggctggccacaggatggaggaactggggtcagtgcacagagcaggctctgggaccccaaaggcagcctgtgggtgctccccagac

SEQ ID NO: 339778 - DNA, 1000 bp, Homo Sapiens
tccaaacattgacagactttattgtgggggggttcccacctgggaccccacctcttaaataaaaaagtgcatagaaaagaagggatttagaaacctttgtacaatatctacatcctgggcccccagggcagaaagggggcgattgctggatgggctggaggggtggaggcagggcccttgtcacctgcatgcccacatccaccctgaacatgagggtgggggtgagatgctctgggaggggctagggagcccccaggctaggggcaagatggcagcgacggcagcaggaggtgtgaggggtcgtggtgggcagccacggcctcagttaaggaaccgacggcagcgcttggcgccacagttgcagggcagcttgttgctggcatcctcgatggggaacttgtagtcgtaggtgagctcctcaccacgcaggatgcggcgcagggcgaagataacaatgtgtttctggccctccacgtggatgacccgagagaagcagttgggctcacaggagtggttgatgaagcgggcggcattgccatgcatcgtggcgtccactacatcaaagtcatccatgcggaacatatagcacccgatgcccttcccatcgtagaacttctcccgcttgtcagtcaacaccgagcggatgacaatgccagagtactcgatgaccatctcccccgcgtcgatgttgcgcttacagaacaggcctcgcccgtggatggctgatctgtagacacccacagcttctttggacgtcttcttaaggtgacgaaaacgcatggccatgggcagctccaggctggtggcacgtctggttgacctgagctgcacctcatcctcttcctcatcacaggtggccccctcagggagcacccggtgctgggaggccaggaagttgaacatgtcaaaggtgcacttccggagatagacctctgcccgagcagccccatggggattcaggggcggctcctcctggccctctccctgctggtggtaacgg

SEQ ID NO: 339779 - DNA, 1000 bp, Homo Sapiens
cacgcataataacagttttattgatgatgtgttttcttttatttacatttgtttttactgtatttggtattgaatttcaacactctctaccctggtcgcacagctgctctagaaaagctgtaaacaacacggcactgtgctttcctgcacaaaccgcctgtcaaagtcaaagctgctcattctcctcccagtaattaccttctcagtttagacttaatgcaagtgaaatttttactttatcataatataataaataaaagacattagttaattagtagtgctggtatatttctaaaatactaaacagacaaacaataaactgtgaacttaatcacatgagttcttatacagtttcaagacaggaaaattagagctctcagctacagtcattttaataatcacatggatctgcattatttattagttattacatgctcaagtgattcaaggttgtacaatgcctaaaatcattccaaagcaagcataccttttgtctgtttaattctgagtggattacacaatgcatatatttgtatttagttaaactgctaaatttatttcacatattccaagaaagagacatcagccattctcttggtttccaaccagactaactttcttgatatgatcccctaaaaaggagtaaatctgctagctttttctttttttaatgtgaaagctatgcaagccctcaggcagattctcaagcacttttggttccctagcaaatctctggtaccttaagaatcctcttggaagacccaggaattctggaatgagtagtagcttgtagaggcacaaaagacagcaagaatctcaatttctatcaacagctttcaaatttggatggctttcccttttcttttgctatctggttactcacctttcatttttagatgcttccctttcacttcttccagcccctagttcaattcttaaatgctttctggattttgtgaaaagcatgcagcttgaggaagtttggtttgacttttacttt

SEQ ID NO: 339780 - DNA, 1000 bp, Homo Sapiens
ttttttttttttttttttcagagtgtcactgcaaattgtttattaaaacacaaagcaatggacagtgaaaaacatcctgattttgtactttttggtgggagtggggtgggacatggaaggggtagggtcagatggagacagcccagaaggaaagccagctctatccacccctacagcttccccggccaaccaggttcaaagcccatcagttatatctcactgtgccgctgtcaatgcatgttgtggctgctggcaaagagttggtttggcctccacagagagaggatgggaaactagggtagaagctacaagggctaagaacttgatgctttttctccagtacttggtacagaatagagcagccaggcccaatgtggaagggtgggcttggtttcctgacaagccaggttagaccaataatggttgaagaggctgccctgggctcagaatgggcagctggtccttgcctgggagaactttgtggaaggaaaaggtaagattccttaagtccaaggagagaaccaatccagggtcaaatttcttttcattccctggatcacaacacaccagggaagagaggagtcaagaatgtctctccctgccagtgctcccctcctacctcgcaactcggctctcccttcccgacagttgtcctttgaaaggacggaaagcgcacttcagtttgttgttgtttttcctcatactgaaataaagcactgaagctcaaaatagaggtgagaatggagttctgctttccccagtgctatgtgcccccatctcacaagactgcctggatgcaagaggtgccaaggccctctctgccaactcaaacaggcactactgtttccttggctgccagcacaatcctggctccttgtgtttatactcctgggggaacctgtcccaagagatccatcctgctcttttcctgccaacccagctagtccccaaatcacctgctcttatcaagataatctggccccccatagcaggctagaca

SEQ ID NO: 339781 - DNA, 1000 bp, Homo Sapiens
gaggctttttccgttttatttctttgggaaaggaaaacaaaaagtctttccatcacatatggtagagatatatatttatatatatttatatataatttcttttgtggttggacgtcccaaagctgagtctgttcatatttttttctatttttttcttactaatgccttctcttctccctgcccctgtggcctaggcccaggttctagggcaggtacagtgaggggtgaatggaatgggcagtggtcgccaggatggcctcccacccagctcagagacctggtgaggaccacccagaagggctgtgcagagggttagaggccacacagaggggcactcatgtttttgtgggggatgcacagctcattaaacagtcaccagtcatgggaggaggctggtcaggggctaggggacttgctcacagtagttgccagctctctccaccttgccccccaaaactcagtcttgggggtgggaggaagagagtgaaaaagagagagatataagggctgagggccaagcctcctccaatttttattgctggtgaattagaaatttgcttttcccttcctgtcttggggagatagactctgagagggccccaagagaagcagctgacattggctgacctaacccctcatgccaggcctaccctgggcaggtgctgagccacctcagggcgccaggaacctctcaggtcagccttgttcttcaagggcaatcacatccaactctccccccgcccccaaaacaagggcctccggctcagacttgggccagtggagctgggaagtgggcagtgcaccaaaggtcaagcggaattttctattggaagaaaaggtgagactttggggaagagactgcctaggaagatgatgtgctgagcatgaaagcagaaagaggctgggggaatagagtgcgggaagacatcgcagacactcgtctgacctcagaaactgggcgaggagagtgcctgagaggcaggtagcacttaatagctgt

SEQ ID NO: 339782 - DNA, 1000 bp, Homo Sapiens; identical to SEQ ID NO: 246494

SEQ ID NO: 339783 - DNA, 1000 bp, Homo Sapiens; identical to SEQ ID NO: 159220

SEQ ID NO: 339784 - DNA, 1000 bp, Homo Sapiens
tttttttttttttttgccttcataagaacttttttttaattatttagaaatgcagttatatacatagaacaattaaaattaaattaaactttgtacaaatattaaaatactatcttcacacccactgcaatgtacaggataccaaaaaatatatatataaaataaaataaagcaaacccaaactgattgagtgacatcctgcacagagtcaattatgaatgtgttgttttaaaccattatatgagtaccattctgcaaaggattccatagtggtgcgataacctgaagaagccagggcagggtgtggggactgccacacagcccacgtacatctctcctccttgcttggcaactgagtgctttgcccctgcatccccttctactagctctgctgcttggcagaggggctcaaccttgaggttttcattcacaattctactagggtttcaactggaaattaagagccatttcccagcaaagctgggcctgccaccttttcctctctagggaaccagcaactacaccattcagaccaaacatatgccaagcaaaatattctccaagtcccaccttggggcaccagtaaggactgtccctattccgagagctgacagacccagcaggcccaagagaagctcccagcctcactcgctgtccttggcattaagctgtgaagcctgcatgctgcttccctgctaggccttttttttttctttgggggtgaggagtaaggatgcagaaatgattgcagcatatttcattctctacgcaaggatgttcctcggaaatggaggcgacattgttatgtgggaagcaagtggtctgagggctcagctgggactgggagggaaagggctaagggctatctattcccgtgccaccacccatgaagcaggaagagtatacctttgtctgaattgccatctggcttctccactgaactttaaagctggcgggaggagggggagggcaagatgaatgggaaagaaaatattagctt

SEQ ID NO: 339785 - DNA, 1000 bp, Homo Sapiens
agcagttttcataatttaatgaaaaagtattggtaaaaaggggacatttgaaaaaggactgagcttatcttggaaaactggactatataagacaaaatgaaaaaaattaacaaagaaggttaagaggtaatacttcaaacaacaaaatgtagcaaatacattttggggtaattgaaatttacaactgaaggctccttcatttacctaggaatatcctgtaaaaatattacaactatatttccctgacgaatgatattttagtcaatactctcccaatggcattacatatggaatttggctgaagcactgttttgatgtttgcttttcctcccactcagaattgaaaggcatgaagggacaaaggctaccgcactggcctctgacataaggaatttataacacagctccatcataatttcattaccatgaaggtatcaaattaatatctactccagagaactcaaagaaaaagcacagaaacctagtgcataaataggggaaattctcttcctcattttgatagtttttttcccaaacaaaatacaggacacctaccacacatgctatggcatgtttacacatgtacataggcacaaaagaaatattttgaagatgtagccaaaagagaggcaaaacacatacattttcagaaaaggagaaagcaaaaagcaaaggaacccattaacaacgttacaagaacacaactgggggagaggaaaactgctgagttttccatattgacggagagagggcccctgccttgactgactggcacctactacaactgggctgtttcaccagtaagaagctttaaaaatggaaaatggcctcttttgtctgaatattcccactacactttccaaaactagaagaaagagaatattaatttaaggctaagaagaaaagagagctgagaattatagtctgcttcacatttaaaaaacggcatcatttctctcttatttaaatgagaagcagacatgtttttatccaccccccc

SEQ ID NO: 339786 - DNA, 1000 bp, Homo Sapiens; identical to SEQ ID NO: 159222

SEQ ID NO: 339787 - DNA, 1000 bp, Homo Sapiens
tttttttttttttttttttgtaggacaatggtatatttatttacaatccgaccaaaaaaaggcatacaggcatttttttaattaaaaataataatgataatgatttaaaaagtcagaaaaattgatgatctttgaaccctttatgaggtgtccgtttcccattccccctaaaaagagaatctcttagggaaaaaaaaaatccaagatttgaatgaacaaaagactccaatatcgctctctactgcttgggttcccttttctccaacttgatgcttggtggatgccgcttggcgctgcagtcactgtgaggcaagattgagaaattcactggtttgatgggtgaggctggtagagccactgggagaatgtggggcagtgaggggagggacatcttcctagcatcaccagcatcctgagctttgtcttgtgttgggagtcccacaagggctggtgcaagggttagcagctgctacttgaaccctaatccctgggtggatgtggtctcttgtaacttaagagcaaatgtttgtgatgacatgcacgggtgggcagaggttgaaaagaacaggggtctacggaggagccaggccagccacgtgagacccttctttctaagttggcttcttgtccattcctggggattggggaaagaacgacagaacttaccttccatcttccttctcacaagcagtgttttgggtgtccccaaaaggaggaggcaagaactcaggtgtggggtggaggggatggggctggctaaagaagtgagtatgaccccagaggccagagagggcagggagagaatgcctggccacttacaggaggggatctgtaatctctgggcctccctgttctgcctgaagttgggcagggcccactgctagcacaccttggagagcggtacctcctgaggaaagggctggggagtgatcctgaggggtaaggaccctagcggccttggccatcccttcccagacacagacaagtggatgcttggctt

SEQ ID NO: 339788 - DNA, 1000 bp, Homo Sapiens
aaagtttatatttttttatttttcttttaattccattttccatgaacttttaaaagtcccctcatacatgtttacagatgtccatagaaacgttattcagatactgaataaacaaccaaaaaaacattgttttatcaatgaggaacctgttaaatctacataatacagctataaaaataattatgtagttctataattaccgacatgaagacatctgagtaaaaacctatttctgatgttatagaagaacaagtatagtacactcttgaatgtaaatttctctgtgtatgcattcatatatactgtacattcagaatcctggaaaggggcttgcacagatgttaccagtgtatgtctcagagtgacagaaggacatatgagttttccttttcccttatacttctttaaaaacacactgattttttttgcacaatgaatatcaatcatattaacatataaagatttaattttttccccagaagaaaacaaaaagattgagctttgtgtaccatccacggacaaaaatgctatgtgttttgcagactcaggtagtagtccctgcgtgtgctgggggtgagatggggaggagccgctgatttctcagcaggccacaccactttcttccctagcaaagctgcacaatgttttcagcagtgtctgcaatgagagctaaatgacctccatctagaacaaatgtaacctgggcacttgctcttccacggatgctcatgagtaaaaggaagctggagttctttacaaaagaagctttgctatgagaaataaaaacaacaaactgttttttacaatttttatttggtgttaactccacaagaaaacaaacaaaaaaaaatcagttactctggtgtacgtgaaatcagaacaatacaaccacgggaaaaacaatctcagcccaggaatggaaactggtacttcagtgctatggaaatgcaatgcgcttcataccacagtgcgtttcagcgtttgccaactttttaaaaat

SEQ ID NO: 339789 - DNA, 1000 bp, Homo Sapiens
aaaaggagcacatattctttaatagcactgtaactaataaaattgcaaataatactcaactatgaagaatttaaaaaaacacttaaaaaacataaggcagtaatacaattgtctgagtatgagcctgtgggaatttgaggctggtactacccatgacccactgtccttgtatgtctctctcctccaaggaggcggtgagcttgctgggggccacagaagcacaggatggagaggaccgagaggacctgcctctagtgtgcagcagggctgggagttttcagtgactattaaacacccagccaactgcagggagccagcggagagccttattggcatggtgggtgcctagtgactcttgcagggcgagtgaccctcagctatcatgactctagctctagggcaaaggaaatactagaggtcagcaggtgacactggccctgctgcccagggatggccaggtctgtggtcctttccagtctgtcccagagccctggtgggaacagctctacacctcttaccttagaactgaaaacactgacaccttcccaaggtgagaaagtgaccaatggcaaccctgcacagttgcaaggtcactcgctgtatgggggccccgcggcttttacaaagtgttgtcatagggatatgtgcttggcagcagcttactcagaggtgctgagaggaacactcagagccagaagccagggagctactgtgtgcatctgccaggcaattgcccagtggttgaaggtcagacaacctgctgtctggcaaaaccagagttattattcaccttacatgctgatgtggtaagaggagagttccctgctagagtttaagagcaaattgcagaaccaattagaaccctctctacagtagctgacttgagagtgagtcaccattttcttggagggcaggtgggaaatcatgtcattatcacatttgtctatagagatatataaggttagcagtgggagggacgtaaacagtgtctgttcctcta

SEQ ID NO: 339790 - DNA, 1000 bp, Homo Sapiens
ccatttgtataaataaaacattttttaattaaaaaaaaaactctacagtacacgtgggggacggcagcgccacgcaggccgtggggacgcagtgtccttctctgacagcagcatcagggctcaggcaggccgggaggatgcatcacagctggcggccttggacggggcagtggctcccccggcctgaggagtgccgccccttgtggccacgctgcccagcaggccggctccttccctctcgggcgccagcagcagctcctactccttctcacgagtccacttgatcatggtctccggtgagcggtagaggaagatgagcttggcgtacaactcctcctccagctccagctcccgagtctcccgcaccaggaagatgtcctggcagagcttgaggatgcggtccacgcacggcagctcctcgaacataatggagtgcgagatctcgctgaagaatccgcgcacgaacttgccgatgaccagcacgatggacacgtacagccccatgatgccgtagccagccaggaagccgaggctcggtgggctgaccttgtcactgaaaatgaccatgggcagcaggttgcagtcggtccggcactcctgcagctcgatgacccaccattcgaggaagccggtggcccccgcaccctgctccctccgcagctggatacgcacgccgaggtagtcggcctcctcattgggctgcagctgcttcacagggttggcttcgggcccgttgggggcacggatgtacttggggaagagattggggatgaccacagactggtccgaggtgccctcgagcaggctggccagctgccgccgtgcagtgctgttgggggccagggccagcatgtgcttctcgttggcatactccacagtgcctcccttcgccaggtccctctggaagttccaggtgaagcgcagggtgatgtcggccgtgccgttgtagagctcccgcttcatctgggcacggctggggggactgatgcgccacagcgcc

SEQ ID NO: 339791 - DNA, 1000 bp, Homo Sapiens; identical to SEQ ID NO: 159224

SEQ ID NO: 339792 - DNA, 1000 bp, Homo Sapiens
ccattttcaaactgactttaatcatgttttgctgcccaaatactgtacatgcagaagccatgtgaagaattttctcctcaagggaattggcaagaatgttgtacgaaacagccggcagtccctcccagctgtgcacctgccacccgggaaccacaacaagttaggaaagatgctgcacatagaaaatgtatagagcacagatataaaaggctaattgcttcttatctaaacagtgtgcttgtcagtccctatcagctatctctctctttgcaggatgcatttggaaagtctaaaaaaaggggttcttgccttctgtgagtttacatgctaaaggagttggttgagctatcaggcccactcttcctaaggaagcagctgccccaccttctgaaatgatgtctggttaaagacattctggagggaggagtggtcttaagaagcaaactactttgaagggaaataagttccctctctcctcccatcagagaacatttcctttagaattctcagatcttcaactctcccactgatgtcatcccagaagcagaaatgaggaaagacccagcctcatctgctgttggggacactgacttactcaggatgtagcggaggttgtgacatcacatcagcaccttgaaaattgtccattgtagatgacccttaattatgtctcatcattacacaagaataaaagagggaggacaaaccacgaagagaggaaagcagagtctgttaggattcccagagttcttgtctgaggcagcatctgggcatggaccagatgagagcctgcacccagcctgggcatcaggggctgaaggaaaccagcccacggagacaggaaccaggtgcaccaggctcgcaaccctcatgtgctccagatcagagacttttaattaaaactgggagggaatcatggggagagcagctaatgctctgattttgcagatgaggaagttgaggcccagaaaagtgaggagccttacccaaggtcacagtt

SEQ ID NO: 339793 - DNA, 1000 bp, Homo Sapiens
aggcagcagtcaggctgagtttaatgatggggaactgggccagaccaaacacagacctctgcccatccccttggcctttggcccatggctccaagaggccagaagcggcccagagggagatatggttcctccccaaggcaggcagccatggtcccttagactttgtgcaaaatactaaatgctaatttggcatcgagggccagctctgaaaagagaaggggcaatcctctgtgcagccagcccaggggacaaggaaaggtaggatacgaggcccctggccaagagaaaaggggtaggtaggaaagaagaaggaaaagacccctccgcccctagcatgggggacacaggcacagggcaagtttctgtaaattcctctggggtagagggcagacatccaagcagtggagattacagatcctcatctccaatgccctcgaaggcgaaattgccgtggacatcactggcactggcatctgtgctgggactgccaattccccgcaagctcacggcactcagcttacttgagagtttgaccatagactcccgggtggcatcaggtgactcaagcagtggtggggacttcactgcttgctggctgtctgagcgtctcagagtaccccccacccgccggcgcagcatcttcctgatactgccgccagatttcttcaccatcagttcatcaaccatggactgcaagcagatgctcatcatgatagcctgggggctagtgatggtgacccactgtagccggtccttgctcatgaggtattcaaaagccagttccaggcgcacctcaccccggccccggcctgggctgctcgtgcttccactgggcaatggtacagaggaggtgacccgccagcatcgcatgcgggtgacccggaaggagccttctcggagttgctggccaggcaggcggagctgcaggctgagctcactgttgcccgcgctcaccaccacaggacagtccttttctgggaagtcagccacacaggcatca

SEQ ID NO: 339794 - DNA, 1000 bp, Homo Sapiens
ttttttttttttttttttttttttttttttataatgacttatacttattttatttaaaaactttaaatacccaaattatgctttttgttttattttaaaatattggaatttttttttcagaatatgctcaaaaaccaaacagtctgagagagggttttaagccaaggtaaaatgactttaaaaccagtggcataaacactgtgctggctgtctcttcccgttcagaaggtatctgcccccgaagactccatgtcctcctgcattgtgctgagactcagagactgagagcagtcctcgaggttcactgacggcagcatcactgacatcttggcagggggcatctgtgaagcggagagtggcactgctttcccacctgaaaatacacatgtgaggtacggattaagctcaatttgtgtccgatccatatcacctggtgaaacttgttgctgtgaaggtgcaatatcagatttatttctaacacgtaggtaactttgtgatggtttgtgttcaacttgcttaacatcctgattttgctttagttggtactgggaaaaatcttcagcggctactggtaaattaacatcattttcttgtgctgtcagaagtgttgtgggaagaaccagcttagaatttggctccaactccaattctcccaaactcattggaccatgactagcacatgaatcttcataaatactacctgaaactgtgtcaaattgccgagataatggtttaggatcacattgttgatccaaagactgtgtattagtgacaggtggctgcatatagagagaatgtcccattaagatgttctctgctgccgctgttagctggggtctttgtccttcactaagttcacccacactgttttccaagtcctctgaatgatagactgcttgctgggaaactgctgactcctggttttgtttagcaaaagaaagaattgcatctgcatgaaattttttatgggacatcctaatcacttgcccttcactaggag

SEQ ID NO: 339795 - DNA, 1000 bp, Homo Sapiens; identical to SEQ ID NO: 159225

SEQ ID NO: 339796 - DNA, 1000 bp, Homo Sapiens
aatctagtggttctttatttataacgtaggctgaagcaattgttacaatgtaggagggagacacattacacaattgttatttatacaagtttagaacaaaaaactgcacagggagaggtcaactctcagtacaaactagcaactaaagcacaataatttactgttagaaacgatttctttctttttagctgtgacactgcttttacaatatgcaaaaacacaagcagaactacccaaggtgtgttgtcacattctttctacattgaatttggcaacattttatttattcagattatactaacgtttaaaaactaaacaagtgaaaagctgtaccaaggtacagttacatccatttatttcaaaggtttaaaataccacttttatctattgtgattaccttgcagcgatttctgcttttgcaaaaaccatctcaagcatcatatgcacaatgcatcagctacttttagtcatcaagattggtgggctaaaccacaggcactactgttgtttatattctgtaaaagaagcttgtttttcaaagaaaaaagcttaaatagtttctaataatcatgcctttgctttaaagccgtaacataaaatgtccttgagcaatcgcagcagtgttcaatgttaatatatagaacaatgaccatacggtacgttactctcacatccaatgcagttatgtgttaaagcataagattaggtaattgagggttagagccaacaggaatctgcagggtgtatgaaacccaccaaactcctcctctgccttgagagggttcggtcagaaatgtgccctgttatgacctgactgctaagggacttgcttgctttcttaaacactattgtcttcaaatgtgatccctttaaatctacaaatctctgttggctttaggggatgggcagtataacaaatttaacttccacttagaaaagacaaatcttttccaaaaaacattacccagaatacaaaaaaaggacagtatagtggtcagat

SEQ ID NO: 339797 - DNA, 1000 bp, Homo Sapiens
ttttttttttttttttttaacaaaaaaatattttaatgatatttctgtaggacaaaataattaaactgaggcaggcagaggaaagtaagagaatccacataaccacagcttacatcactttaaatctcgacagccccaagtcatgagaatgaacccagtcccagcagcccaggcttctctgttcctcctcctgcaggcacagtttgagtagagacatctcttgagctctttcccactgacgtgtcattcacaggcattcaaactgtgatgtttgaaactgtctacctccgcagatccagggacagtccctccagtccaaaggctcactgcaattggccctcagcccccttcaaactggacttctggtttcttctttccttctgcccctgaattctgaagagcttcttcctgaggtccttctgccgcttcagcttctcctcctcctccttctgcttggctctgaagtgctctttattgtgcaggtgccgctgctccttggccttcttcatcttctgactatgcaccgtactcagagcatccagcagtgcaaggatctttctttcatgaggctcgcgtatgacggccggtctccgcctgtcctttggcaccttgcctgcctttgcttgggtcttgggcttgttcttaaatggcagggccttctgcaaggcttttggaatgtgcagtgaattaaaatgtttcttttgcctcaggattggcttatacagagagtccttgttcgcctttagtctgatgccatgggcgagcctgagttggcccgtggtccgcattcctgaccaggtgtctttctcacccactggtttcaacaaagatgttactgggttatagaacgctgggatggaaacaggataccaagttcgcatgaagacaatatcgctcatcagcagcttatcctcaaagctggccctgaaagctccttctggagctcggagtgctttcttgatctgcccccttatcccactgactgttcgaatcacagcac

SEQ ID NO: 339798 - DNA, 1000 bp, Homo Sapiens
catcttttaactgtttattgtataatataaaactacaaaagtaagactgctcatttccatgtacatttaatctgtccaattgtttagattacagcccaaacctacatgtgaatacagccatctgggttccgatgtaacgtctgtaatattgcatagaaaaggcacagctctcaggtctgtgggggaaaggttatacctcctttttgacaaaagccctcctcaaaaaccatgcaccaaacatgtcactatgtacatcttttttcaaaatctcggtcatgcgcacatatggcctgcatttctcttccaaaacttgttatccccaaaagaagtccaactttttattggctttgtctgcaatagcatttgatcctggctaattttcaagaaccattcagactcattcttagaaacactgaaaacaattgtacataagcaggatgcacacaactccatgcctccaggtgcggggcagttacaggaaggtaaccatttacagccagaaaaggttaaatatactcttttcattgttttcagaaaatgtataaaggtccaatttgtaacagcaaggttttcaaattaagacaattcgtatagagtagcaattgctgcacgaagtagagtcttttttttttttttttacatttgtcatttaagaaggctgccctgcggtattcataattcattgtttaccacaaaggtggttcataaatttaagctttaaaaacgatctgtaagttgatactttggctctttggagcttatttcattaagaaattttccttgattgacctcagggcagctggggcactccaaggggctatggcgataaaaagctcaattggtaaagacactcgagaggtgcagaggaggctctggccactgctcaccctttggtatgaacaagggtgcccatgtggttgccccttctgtcatccagagaaagtgctactaaaaaaactttaaaaaatatcaaccctttgatgcttttcttaaaaatttg

SEQ ID NO: 339799 - DNA, 1000 bp, Homo Sapiens; identical to SEQ ID NO: 335802

SEQ ID NO: 339800 - DNA, 1000 bp, Homo Sapiens
tttttttttttttttttttttttttttccatactagcaaaatactttatttttataatgataaaacaaggaaagtaaagatttctttttggtgtataccagagttaagggcagtagaagaatatggggattaataggacttttatgaacttttgatgacaataaaaagttaacaataccaaccgtttgccataaaacttatcatagctcccccaaaacacacatataaaggatcatagttttaaaatctataaaagtaaaaaatatacagttggaagctctagcgcttattccatctttcatataaaattgtaaacatttatttacacaaagcaaatgtgtataacaaaagtctgagcacccttttcttctgagttgtggctcctggaagacggggctgtgcacagaagcaaagtcatctcctcccctgactcccgaaaaccaggttcataaataaagccatgggcagctccctggggggaccccaagaatcacattttattgctatgacactgcagcaagtgaggagcccccactgtgtcgccggccccaggactaaggcggagtgcagggccagcgagccccggggacaggggtgggagacggggcagcagccagatggggtcaggagaggaacaaggatccacaaccagccttcagccgatttttgggagaaaagccgctgaggtcaccctcttccccttcagattggggaactccctcagagggtgaaattttcactggctttatgattcaccccttctttgagagctaaactgagtacatgggaaaggtagggaaggtgttttaaggagaaatggccgacataccacttggggtggcaaatggctattagaaaagaagatctgagggtccaagtacccccagtgagaaaggcactgctggtgcaaaataactaccaatgtgtgtacaacctctcgtcccctcaccgcgactcaggctggttgcatgagtattttccttggctcaattctcacata

SEQ ID NO: 339801 - DNA, 1000 bp, Homo Sapiens; identical to SEQ ID NO: 159227

SEQ ID NO: 339802 - DNA, 1000 bp, Homo Sapiens; identical to SEQ ID NO: 159228

SEQ ID NO: 339803 - DNA, 1000 bp, Homo Sapiens
ttttttttttttttttttttttttttttcaggatctttaactttattagcagctactgagctacagaatacaaaccaactgaaaacattaaagaaaggctgcctgaaacaagtatgtacaggtatactacacagaagcaaaagctgtatcatccaatcccaaagccacccctgtggggaaggatgaccttagctatgggccaaaggagtaacagaagttatgacataagagtcccatccatccaggaaagcagtgaacaactacagctgcatgggcaccaaaaatttttctgagattagttttaaaggttccatgaatcaaagttttcaaatgaaaacaggtacccctcttttcctgtaggctttccagctcactacccaaaagacttgagtacttctattaaggcagctggaagcccaccctaggacttgaatggcaccttgtcctttctctgccagtaatgcaatccaacacaatatgctacagggaaaacagaatttccacggtgccgccctctggtacaagggaaacagcacgcaaagcaaaaggccacagagggctccctgagaatccagtacaactaagcgaggccttcaactgtcaagacaaactttgcaactggatcccggtgggacagtgccctgcagcgaggagtactgtatatgccaatgagagggcccagcttccaggaaccgttacaatggcgtcccgagtcattttccctctcccacttgcattcgagagtgagaaaacacacaaggtggccttgattctcactcaccacaatccccctgtacagaggggtctgtttctaagtctggaacctcaacacgaggctgggatgcttcacaacgtgctctctcccactgtccagccatctttggtggtcttcccacagtgcttcccccatcctctcacactcctgtggagggaccatgggacgggccaggaggaaacctgggatcactctgacaggaaacggacaagcacagctgccagg

SEQ ID NO: 339804 - DNA, 1000 bp, Homo Sapiens; identical to SEQ ID NO: 159229

SEQ ID NO: 339805 - DNA, 1000 bp, Homo Sapiens
ttttttttttttttttgatttcagttttttttattgtatgcttgatgcatttagagacaattccaagggcaagcactggatagggatattatctgctttgtagatatttgtacaaaagactgttaagactacatggccagttcccactgcaggaaacagaatgattttcttttttttttattattattccctgccaatagcattttccatctaacacatttaaattctcacagcataattgcaaacatgtacatattggttcccacgagaaatctgcaggtgacatttcgggatgtttggagtcaatcagataaagcacattatgacagaaaccataagaggggagctgggacctgggactgtgcagaatgaaaagccacggctacgggaagcataagcttgtgctgcaacggcatgtgcacatgacctgctgctcctggccctctacgaagcatgcccagcaagggaacctcctccgtccctcctccacgtgcttccttactaaggctgagagctcaactgaagaccttccccaataaatgacagatggctcttcagtcaggaatgcagttagtggtttcatgacagacacactggtcccacctggcttccctgctgaaccacccagtactgaataacacctgtaccaatgtgggatgacatcagctaggaagcaaagtaatttgcctggttgatgattattttttatacctaatgattcacccaatagtaaaggaaccccacagctaagatctaacaggcatatacctgctctgttagtttataagaaagactcgttctaataacaacaggtcttatattattgagcactaaggaacctccataatttcgattatattctacctaaaatttcaaagcacctctaagaatgaaagggtactatttctgctttgctaatttactcctgccagagcttctgtccttgaatatgatggctatcttcacctatagtaaatcccatctattagacaagactagc

SEQ ID NO: 339806 - DNA, 1000 bp, Homo Sapiens; identical to SEQ ID NO: 159231

SEQ ID NO: 339807 - DNA, 1000 bp, Homo Sapiens; identical to SEQ ID NO: 159232

SEQ ID NO: 339808 - DNA, 1000 bp, Homo Sapiens
gtttttggtggtggtgtttattttttttaaacccacttgtagtttgggttcagctggaaagcaggacataccgacggagggagggtggtcgcactagcggggttccgcggcagctttggcgggaagccccaggcccttgctctggggaggtaggtcctgtcgtccactcccagccggctcagggaggcggccagcccttccgtgtgagtgttccgcgcagaggaaagttgtctttctttcttctgatctgtgtcctcaaaggcccagccaatggtttcccaacacagtgccctgcagctgagggacacgactccccaggcaggcctgagagtctgtctgtctgacaaggaacacgggccggtgtctgatgccagaaaacagactgggacttggcttcttggaggcccgcgtctggggcaccccatggggctgctctggtggcggcctggctgtctgggcccccgcccctacagctgccccggcctgatctgtggtacccttcccacaccccccaccctcatccctcggagaaaataatagaataaaataaaaatcaatcagaataaataccgactcggccaacatttacatttacatggatggacaggacgatccccaaacagtgaaggtttacagactggtcaaggaaggacgaacagagagaatggggtctgagggtgcacatcccgtggagggtggcggggctcctggcctcgtctgggtgaggttgggggcctcgctggggctgcggtcccagagcttcggcaaagccaccaggccttggggagcagggctgtggcaagcaggccgcctcggagaaaaacaatgactaactcatcctgacaggcagtggggagactgagacaggatcaacatcagatggctggaccgcctcttccatgcgccaagaaccgcgggcgaggggaaagcaatgcaagccttagaaatgcaatatccagctctgcctctcatcacatacattcagaggtcaactcggacg

SEQ ID NO: 339809 - DNA, 1000 bp, Homo Sapiens; identical to SEQ ID NO: 159233

SEQ ID NO: 339810 - DNA, 1000 bp, Homo Sapiens; identical to SEQ ID NO: 159234

SEQ ID NO: 339811 - DNA, 1000 bp, Homo Sapiens
aactttaaaaaaatgcatttatgatccaatttagctactatatatatttatatgcacatctatatacatacacatagtaaagggactacaacaagatactccaaggtgacaaccgaggttatctgggtaactgagactatgaatgagttttttaaattatccttttatttttcttttctgaggttgctataataaaaatatattgcttaggtaataagaaaaaacaattaggattatttcttaaactgcataggaaaaaaaaattcctaaatgaacttcacagagctaacacaggaggagcaggcaggagccctggcacctgtgctaaacgtcaccgacctgcctgaggtgcccactatcgccacccagagcagacacctcaggccacagactctaactttccctgacttcttcagaaagcatacttagagggaaggcagaaaatgtgacatttcaagaatacttcccatgttacttgaagaatttgaaaggcaagtatatttaaacagggctgaattatacgcccatgtacccaaagtaaaaagccaagttttatgtagtttccagtgcagacgagggaacaccaaaccactgagccaagacgagaaccaaacacagaaaggtcccaagagtcagcaatttttctattgaattaatctcatcccagggtcaattttcaggattctattgcaatacttactgcataaaactatgtattaaaaaatagtaagaaaaacacgatgtaaaatacatcaaaatatactacataaaccccaaaggattttctatgtataccaatactacgaattagaacatcttaagtctttcattctccagctctttcagaccatgcagccaaagcctctggacagtgtcactggcggcacttctgtcccatagccttaggccgtatatcttttctctccttcatgtttggccttgtggtacttgagatagtcattatagagctccttaaagatgtctctcattcccggctgca

SEQ ID NO: 339812 - DNA, 1000 bp, Homo Sapiens
ttttttttttttttttttacaactagtgtattgtacactagctcagctccaccaaactacctgttcgttctcttttatttgacattgttcacagactagtacatattacaataagagtgctggataaaaacatgaggtacgaaagtggttcaaagattataggtcatgcagatcatgctagacagtaaagaaaattgtgactgagaaaacactaaataaaaatacataaagaatgtgcattataaaaaaaaaaaaagacaaaaaaaaaaaaacaacaaaaaaaaaccaaactccattacacagctttgcttctttggttacaaagtaggttgaacaatttcacagctttttattcccacccgaaaaaaaagtcatacgaaatgttgaaaagcagaggaatcgtggcaatttctcttagaaagtagaaacaaatgaacaaagttttcttcatcaaaatagcccaattatttatcatatcacaataactggtgactacctgtacagttgcactatgttcttcatacttacactatacaaaatttacattcaagctgggtctttactactgaaaataaataccataagtaaattgccattagtgttagaaatatgccaggattcttttgttcaattattgcctaaacgttttatctattaaatgcaatcctgtctttcacttcctttactgatacttataattattcaaaaaaattaaaaaagttctgtgacattgttcatgtacattatgaaaatagcagccctgtaataaataaaacacaaataaatgaaaacttatgtaggcaaatgttactgaatcagaaagaaaagtggctctttagatgaactgttatttataatgtgataggaaggctcagggtaaatccatgggtaataggaaacatgggagagccaccaaaactcttaaagaccccactcatgcgcaccaggtaaaatgcagactttgctcgctttaataaaccccatctattattctccttgt

SEQ ID NO: 339813 - DNA, 1000 bp, Homo Sapiens
ttttgaaatcatttgttcatttattcattaacttgtcaaattcagttttctatacactatgatgtttattccattttgtactattagatatacatatttaaaaaaatatttaacttatttttatgaagaaattaaatattttctgaaaaagaattattttattattgttctctagcaacaaacctcaaacaattctcatccaactcaactaactcatttaaataactttgctcaatggcaacttctctaaagatctagtttacacaattctattctacataacactgtttaccctgttacatagtatatagttaaagaacatttttgtaataaacatgtttctctttgatatgatacataacaatattttcacacttcccagcaatcactcaaatatattaaaaatgtatccttctttaaaaggcacacacatttacaggttcaaatctttattgttttaaaattgtacagttcttttacaatacaatattttgttatttaaatgacctctaaatggttaatgtgcaatgaatatcttttgttctgaaactcaaccatgaattacgatttcatcaatatgattattctagagtcataaagatgttgggaaggtttgagtctgcatttgaaatggttagtagcacagactcttccctttagaacccagatgaccaatccactgaaagtgcttttgaagattgctgattacttatggctgatcttaaaatcagtcaatcaaattacagttcctttttttttttgaaacatcaaagggcatttaaaaaaactgaaacaatttgctttagtatctactgaggcaaactcaaaatgattatcagcatgcaataacactcctctttattttaaatagttctgaataatttatacattttataaagaatgtgttaaagagtgcaagtattctgatactgatttcacaaaaggacaaatgctggtaataataacatttaacatctaagttcaagctagtgtatattta

SEQ ID NO: 339814 - DNA, 1000 bp, Homo Sapiens; identical to SEQ ID NO: 159235

SEQ ID NO: 339815 - DNA, 1000 bp, Homo Sapiens
ggtagtttttaaaacagacatgtttcattattgattcatctctcagaaaagccagttcaggtagtatgtacagttaaacccctaggacttcttactgaattagtcttcaaattcaacatttcatccttcccttgatggatataaaaagacgttaatgcatttttaaaatttaaaaattgtttaaagcagacaacatatatctgactatatgaatattttgtctctacttacaattagaaatgccataaacatctacaaacctatttgatatcaaataaacaaagtagaacctagccaagcaaacatctgatgatttgaaattcctcgtacatacttatgctgtaagtctggttgctccgagtggcatgaatgctgctctaatctgctccaacatctaaacatgacattctaacaaccaatctgaaaaactacctttagtggttgattctgtctgcttattccttcctctacaacctagagaatatgttctattgttcataatactctttcctcaaagatgtgtaatttgtaataatttaaaatataaatttagacagatttacttgacaatttggtgcatgttctaaatggcactttgaatttcatgagagccttagtcaagtcattttccagagagttatctttaatgtctatgctaaataaataacatttacacacaggacaaaatcatcataggtttttatccaagtaaaaaaggtaaagaggtgcatctactatttcaaattccaaaatcgagcatctacatataagaaatcaccttggttaatttttttcaagattatccctctttaaataattgccaaatctatattggacagaacagacacaaacgtgtttgtgcaaattatctttaaaaacatagtatggcttaaaagttatcaattatttccacatcataatatatgaacatattttagtcattattctgccttaaccattgttcttagttcgagtgaacacaaggtacacctactggcac

SEQ ID NO: 339816 - DNA, 1000 bp, Homo Sapiens
ttttttttttttttttttttttgcagtcatctggtgtttctatttattgactctttaaacttcatcatccaaagagagttaatacatgactgtttggtagcaagagaaacataatctaagaccgcaatgacccacccaccccaaacaaaaccaaaaccaaacagaacaaaacaaaccccatctgaaaccaaacctttggagttttagctgaagaagcgagggggctgagggtcagagtggctctctgtggtccagggggtcaggtagaggctgctctcaagtgggagccttctctgttgaaaaggctacattcagcccctcagctttggggggtccttcctgaaggggcttcccttggcagaaggggtgtggagacggattcagtggtcagaggggctcctaggtctgccctccaaggtgaccatatgtgccagtgcatgagacacagggaagcagggccaaggactgggggcgactgtgaggagatcatgggcccatttctcctacctgagagaaagccctgtccaaggccccatcagtgttcccaaattagggaaccactaaaggcaccaccaacaaactgggaaatgacaaagcctgacaggtccccagatggcaatcactgccccctaatagtcagcatcttgatctagaggactgagggcagccccatcaggctggggccctggaaagtttatgtcaacgggcaatgtttagggccttggacatgcagtgtgcgtacgtgtgtgtctgtatgaatggaatggggctcaggggcgcatgggtccctccaggaaggcttggttagagtcccagggtggtccccagggcaggaataggtttcttttcctcatgtcatttcctcaaatcacccccaccccaggtgaccaggtcactgcataaataagtgcttgggaaggtacacatctaaaaagaaacataaatactgtacatggggaattccccagccttcctgctgccctccagaaaaccctccaaa

SEQ ID NO: 339817 - DNA, 1000 bp, Homo Sapiens
aaactgataaaattagatgctacatttattttagccaaaaggccaaaaagcaattggaattcaacttttttgctcattccctacacagactgtgtttcattcacggcattaggattcaacttgaacattcttccacatgtagatagtacagtgacaggtcaaatgcttttgaattacagcatttgtttccaaagaactaaaatatctgagactttgtttctatgataaagtcccagacttccaggttcaatccttttgcctcaacatacagattcgtttttttgaaaatcctttgatttttttggctaggagaccaggatttctatgctaattctttttgaaacatatatcatgtagcataatcaaaatcatgtgtgcgtgcatgtgtgtgtgtgtgtgtgtgtgtgtgtgtgtgtgtgttggggcaggagtgattacgtataaatccagaaatcctgtcagattacattttggtgcatgctttttgtattctctcctcataactttccttaaaagtaaatcatgtcagaaggtggcattcaagctcctcattgtattcctacaagtacccaaataacttagatttatacaaatatttttgaaccttttaatatacattacaaatattttagaccaatcacattttgttgtaacatatttacaaaacaaaaaatatattacaataaatatgatgaaacagtgaatctgatcaacaacaagctttgtcacaaccagttatttaaaaggaatgcaaagacctgttggtctgcatatattaagagttttgagataaataggggtccagaattataatgtatccggaaaagagatgtgggggaaaatctccaaatttaagtaagattctttctcattgtaattacataatgtttaatgatgttttaaactgtgaacattgatgaattatccaaacatgatacaaagctaatgtagttctatcatttcaaaatacgtgacatccacagaatatccttttaattgt

SEQ ID NO: 339818 - DNA, 1000 bp, Homo Sapiens
aaattggaaaagtaaaatactttattcacagatgacatgattatctacatagaaaatgctaaagaatctagaaaaaagctactagaataagttaactgatctaagttgcttgatacaagatcaatgtacaagtctaatgcatttctatatactagcaataactagaaaacagctttttgaaaaccttaccacttgcaatagcatgcagaaatattaaatacatgaatttaacaaaatgtgagagctgcaaactgagagaaattaacagatctaaataaatggggcagtacaccatgttcaacaattggaaaactcagaattgttaaaatgtcatttctccctaaattgatctataaatcccagaagactttctttttgcagacattgataaaagttgttttttgagacagtttcactcttggttgcccaggctagagtgcaatgccacgatcccagctcactgaaacctccacctcccaggctcaagcaattctcctgcctcagcctcccgagcagctgggattctacaggcgcctgccaccacgcctggctaactcttccgcatttttagtagagatggggtttcaccaccccggccaggctggtcttgaactcctgacctcaagcgatccgcccgcctcggcctcccaaagtgctgggattatacaggcatgagccacgggcctggcctgaagttgatagaagttgacttcaaattttatacgaaaatgcaaaggatctagaagtcaaaaaaaaaaaatgggaaaagaacaaaacggaagcccttccaatacctgagttcaactacagttggccaggagtggtggcttaataaaaaatattcaaaagacaccattaagaaaatgaacaggcaaaccaaacatgaaaatattcacaatatttgtcacaaatggagacaaagaattctatatattacatgtatgtttttcatgcagaatatggaaagaacttgagtcaacaataagcatcccaacttaaa

SEQ ID NO: 339819 - DNA, 1000 bp, Homo Sapiens
tttttttttttttttttttttttttttttttttttttttttttttttttttttttttttttttatattcacaaatggttttatttcagaaagaaattacacattacaaagagacatagttaagagcttacattcacatatggaagtgaatctaagaaagtcaacaattattaatatacaaaaccacatgattaaaaaagacagtaacataatgacagatgggcttgatttagattcatacacaaaataatatcttttgtttaaaaacaaagagatattggtcttaagatagctctttagaaacaagttggtagttccaatgaactttaaaatcaaagcgatcataacagtctttatgtaggctgtatcacacccacactcatccggcaggatggaagaatccatcaattataccttgcagctagataggatgtcttccactaatcttttgtaaacccaggcatcgcccttaagccgctgcctcctgatacccaccacatcgggtttttgaagctggcacacttctaattcaaattgcattgtcactttcccaaaatctgactgtgtttgacacttcagtgtataacccttttgtacaaagtcaacatgcttctttggaagaatagacattatttcattcaacagttgatctggattcactaatctagttgtagtcacattatagtgaagctttagtcttctgggcccgtctctggcagaacccttccttttgctcctggtgagcacagtgataaccttatccaaccccctttcaaggctcccaaacactttggctccctttctttttggagtctcctccatatgtgcttggttgagatccaattccactgagcggcaccgcctctcagggctaatgacacctgtcattaacttgtctgttcctgttgaatttactggtattttaattggagtttctttcaggcactggtttctagcttttgagggtgtagtgtaacgatttggcgtagtgagtatttctc

SEQ ID NO: 339820 - DNA, 1000 bp, Homo Sapiens
tttttttttttttttttacacaaattagcctacaaatttaatgtaaagcaaatagactgttgtaggtaccaattctcaatgtcacagtgttacatggaaagtaaaatacacaagaacagcccaaaagatggaaacaatggacgtggtcaaatgacatcagtacaacatccatatggtcctaagtagccatctttaaaatgggttagaaatgccttcaatcattcacacagacacatgcattgaacaaactctaagaagtgttcttacacgggaaaagcaagttacagatgcatgggcatgatatggatgtagatgtgtgtatgtgcatcccactcatacacaaaatacccagcatcgcccacatgcctgctgtgtgcgtaagtgtgagcgagtgcacagacaacagcgtgcagaaattcaaaccaagctgtgggtacttgttaccactgggaagggagtcggtcacagagggaaagagaaacaggacatcagcctttgacttcagaactgttcctgccttttcacatcctgtgctgttttcagcatcatcggagcccttaacacacatcacgggagtaagagtgtgttagagggagcattcggtgggacagatattgccatggcttgtggatagagttcacagtccttaataatccccgagatggcagccaagagctacgttctcaatcacgcagcttcaccccagaaactgacagaaacccaacaaccaaaaggtgtccattctgacagcctcagcctgtgctggctcagatgagcaaaaatgtacagatattaataatgatgttgatttgaagagcacagaggggggtatgcatgataagggtccaaatttttaccttaaaaaagaatacatttacttctcaatcacctacataacgatcattttttaaaaaactgatcaaatttggtgttacaagggcacgttgcaaattcttctggctacttttctctgactattctaattacgttaccgtgtttt

SEQ ID NO: 339821 - DNA, 1000 bp, Homo Sapiens
tttttttttttttttttttttttttagtttggctacatttttattcgagcatggtcattttcaaaagaaattacaaattgaaaattcaataatacttttacaaagacaattcaggaaagatttttgtcatggtatcatacattgtatttaacagtccctctttttagctaaaaaacaagatgaagaaagtggaattttcagtcgaaaatacagtgttttcacaagatcgtatcaaaagttcccaaatttggaatttccagtaattggaaaaaaacaaaaataaaataataaaattgaaaaatcccatctcacaattaatgttccaaaacacaataaatgctcttctctttacgtaaaatttgcccaaatgatcaacgtcatgttccttttttactaaaatatatctatatattgaagaactataatactgtacactacagtatgaaataaataaaattaggaaatataaaatgagccacataaataaaatgttatttgacctaaaattaaatgaatgcaaaaaaaatttttttgttgcaaaaacagtttggtgtaatactgacaaaattaatgaacaaaaaagtacagaaaataattgcacaaacatatgtaaactaaggaactgctgcctattcttctaatactgacatgggtgcttcaaagaacagggtgagcttaacactgaagctggtgcaaaggtaacccatgttaccctcttaacactgtacaaggatggcacttgcagaaacacagattaaaaggtttgcatataaggcttttaaaaccaccttacaaaggctttctttatttctcatcttactttttccttcacgtccaggtcactttaagacttcggtatcttaaattcacacatgcatcacttcaagttccttcacagaaaaaaaaaaaaattgaggcctaaaattgtgtggttacttaagctgaaaaaaaaaatgggaaattgatgaatagcgaaaggaaagtacagaggaatcataat

SEQ ID NO: 339822 - DNA, 1000 bp, Homo Sapiens
attgttacattcccatttatgaaaacctagataagcatctataatgagaatcctaggtaagcatttataatgagaatcttttttcattcctcagcatcatttaatctgttgctcacaacatttataacacaagaaccaactgtagaaaatacagagtagaggtgagtttcaagaagcactgggcaagcacttgaataactgattttgatggtaagagctccaatcatctcaaggcagaccctcttctgggagaaaaccaaagattcaccttcaaaacgaggtgtttcaggagccccaaagcataacattctatttcctaagaaacacactctatatttctgttaaaacaatttaaaaaatggtacacatttagtagaaaatgaattgtgaaacactgcactagcaacatcatttctcaaggacacatgagaagtactttcatgttcacgacatttcttttgggtactcaagtcatttaacttttttttttgagacggagtctcgctctgtcgccaggcttgagtgcaatggcgtgatctcagctcactgcagcctccgcctcctgggctcaagtgattctcctgtctcagcctcccgagtagctgggattacaggggtacaccaccacgcccagctaatttttgtatttttagtagagatggggtttcactatgttggtcaggctgccctcgaactcctgacctcgtgatccgcccaccttggcctcccaaagtgctgggattacaggcatgagcctccacgcccggcgtcattgaacttttttattcaaaggggtagaatgtatatgtgggacaaagaaagaggctagattaacaaagctatcatttccttgtttctctttgacagctggtcaaataattcaggcatagctaggactgatgctcaagttagaaacaggtggcccatgctgtccaatatagcagccactagccacatgtgcttatcaagcatttgcactgtgtcccatgcaacaaggaac

SEQ ID NO: 339823 - DNA, 1000 bp, Homo Sapiens
tttttttttttttttgatgagaaagatcaggtctttactgcaaaatcattcaaaactcacacggcagcaattccttcaatacattgcaaagactcctcagggccagagccctgctcactaggaacagtgtattgcataaaataacattttaaaaatagtgtgggcactacctttctgagggaggggaggcgggaagagtcaatgcatctgaaagcactggcagcttctggggaacgggccccccagggcctcaaacctgctgcctccgagggcaccttcggggagaatcctcacaggcccaagccctccccaggccaggctcctgcccactcagggatggggcaatgagggctctgactaggctgggcttgtggtggagcgttaatgtgggccatggcggtgcataacccagctcctggcttaggaggcattggcgtctgggcacaggtgtgtgccatgaccgggagaagctgtgcgcagcctccacctgcctgccaccgttgcctctgttctgctgcacaggcatccagctccaaggctgggtgggtgactcagcagctaatcgcccccagggaagggtgggggtgggctcatctctgacagtgacatgcggctctccacctgaggcctgactccaagctgagcgcaggtaagacagctaggactgagggcctgctaggtccaggagaggtgggggaaggcgacagagagaccagcaaacccacatttccccgaagcctggagggtctgaccatcactttgaaaacaattccagactcccaccccagccccaaggccccttcaaaggcagtcctgctccggggaacttcttcagtctccagtgtcccggctgggcaagttcagtgatgctttgggaattcatggctttgtgaggtggtggctgcatccacagggcagttcccccgcacgccctgcacagcttaggaccaggtcacttctccacagtgcagggcgtggctgcctgccctctctggggtcc

SEQ ID NO: 339824 - DNA, 1000 bp, Homo Sapiens
tttttttttttttttttttttttttttttttttcatcacaatccattttattccacagcatgtttaagggaatgttattttcaggaagatgtttgggattaaaataattaaaaaaaaactggaaattcacacatttatgtatctcttcttttcattaaatatatatctgtttggcaaaaaatgttagactcttttgtccaaaaacaaagcaaaaaaaaaaaaaaaactaacccaaaactcttgcaaattgtaaataccagtaataattacaatgatgtaaacttggatgtctgacagcttgaccatcctgtggaacttgagttgcagcaggacctcccaggagaaggtaacaccaaacgcttggatagcaacagtccgtcctagaggcatttaggtttagtctattagagatggagcgagactactgatttcaccatttgtgctttcagctaagaggctgggagcgtgggtggaaatgaagaaggcagttctggcctggggcagggagaggaaaccccagactagctggtgaggagggaagatttgtcacgatcacagtgcagacgcaaagtgggcatgggacctgtggactgtttgggaaatttatgctagggaggatcacgaggaggctgcggctgctgctcttgggaccaaagaggaacagagcaaggcaaaagcagggagagaggtgggaggagatttgagcgcagatcttaattcaagtgtaactggtggtgcgagatgattctagagagaggggaaaggaggatgtggggtttggtcttctcatcaaatagctaggccatttcctccagacaggggccttggggcactgcccttggtctggtgggcaagtttttgggcagtctggggctgctggctttcctgcccaagggaaggaagggcatgcctgcagagggctaggatggaagggccctttggccttcttactggcagtgggctttgctcttgtcccaccagtggactgcagccatgggaa

SEQ ID NO: 339825 - DNA, 1000 bp, Homo Sapiens; identical to SEQ ID NO: 159236

SEQ ID NO: 339826 - DNA, 1000 bp, Homo Sapiens
tttttttttttttttttttttttttatttttatacactttttatttaaaaaataaaattataaacaaaatacagaaaaatattgacacctgtgataacaaggaaatgactcttaagggcagtttgttgtcctgggggaaaaaatcataagtgttataaagaaatattattgtgcaaaggaggaatgtaatatttaaggttcatttacaacgggcatttggcgtcgacagaaaaagtctttctatgtatacattcaacattttgcagcatatttacattcaagttacatttccaaattctatgccaaatacagtctaactcaccatcaacaatccctcagatattactaaaatcctgtttatttggtaggagtgcaatattatcttattaggaaataattttatgttcctactaagtcaactgcatttttactactttaacaaaattcactgacatttttatcccagttgaagtcaagcctcttttagacaaagtcaatactaactcaaatgttgccagttataaaattatataataatcttttcctccctccttagagacagtattacaactttcaatgaaaggacaccagctatgataaattattttcttttacaagagttaggatgtattacagatacaagttccagaattttaacttgttttcaaaagatggctgaagcacttttccctttcagttgttaccgaattcctcagcaaaatacaacacattcagaaatctacatagcagttttctgaaaacttttctccattgtccccacacatttctcaaatcagagtgcttactcactagcaactggagaatctcttgcttagtttttctaaattatactagagtagctatcctaatttcctgacaatcttcccatttcattttttaaattatgattttattaaaatcaacataaattacaaaggttccatctttgctacggttcttttaaaaatttatcttaacttactgaagggtcaagacccca

SEQ ID NO: 339827 - DNA, 1000 bp, Homo Sapiens; identical to SEQ ID NO: 246495

SEQ ID NO: 339828 - DNA, 1000 bp, Homo Sapiens
aaaatattgggtttattttaaaaactcagcacagtacaaactgccacacaaattactttatactagcaacaaccggtgctcctattaattcaagtgtacacatttaactccccaggttaaacaccctgtaatttaccttgaagctctttacattctgaagttatataaaattaagcaggaaaacattaacattaaatgaaaatcaattttgcacaaataagtgtgatcaagcagcttaaatcacctgaaattcttgtacttcagagaaaaatcccagatgacggcactggacaggttataaagagttcccttattccctgggggcgtctcaggcattctttctgcatgtttccttcactgagcctcaggctacgaattgagagaaagtctttccaggcagtggcctgattcttacgcacattccgtttctttttctgaattcagagtttctgaaaacacaggcttttctcttggaaaacatgatctgtaagatgttggaggaccaggctatgatggttcttaagtttcttcctttctctggggagacacagaggtcttcgcgccatccatctgttccctactcccacttgggttcctttgtggtatgaaatagagacacttctgacctcatcggagacacagcgaggtctgtaccttcacccaggcacaggagaaggcctggtcctctcctgattcctcaaacttcctctgaatccagagaaagttttttataccagattgtgtcaacacacagcaataaaatatgctgaggaactaaaaatgtgaaaatcacctaggaatggaacgttgaagaaatgtgtgtctattattgtgcactgacagccagggggctcctgtttggaataaactgcagcagaggagaggtttggcagcacagccagactgtgctctccctgagtctacagcctagtagggccagaggtcctgacaggaaatcgccaaagatgcaaaacaggggccccgtgatgggaccagctag

SEQ ID NO: 339829 - DNA, 1000 bp, Homo Sapiens
ttgtcttcatttttcaattagtaatatgtggataaaagttacccaatggacagtctaaggcagaatgactgtgaaggtcaaataagactgtgaaagagcttcaaaaattgtaaaacactacacaaatattcgtttgtccaaacatttattgaaatgccaggcattgtgctaagcactagagatataacagtgaacaaggcttatatggtccctgcccttacaaagcttacagtctagcagtgatcaataagcagtaacaataaagtgtgccaagtgtatgtctgggaaagaacagggtgtatagggaatggatagtaagggcacctaatctagagggcatcaatgaaggtttcctagatgaagtggcatactgagaccttaaagatgaagataaatttgtattgtaccctaagagcaatggtgaaagcaatgcagtgacatgatcagtaagtcttttggagcaatttggttgtagtgtagaaaggaataaaaataaaaaacagggagactaataaggaggctgttgctataatttaggtaggttgatggcctgaattaaaatggcagcattggagaattggtaaaaaggacaaatgaatggttggtagtggtaatgccatttagtcaaagaggaaacatgagaggaggagcaggattgggggcaagatcaatgacatgtagtgcctgagacagcaaagagcatttgttagcaattagatacatcaattagggaagatctagaaaggagatatgaatctgacagtcatttgcatataaatggtaaggaaaccatggaaggaaatgagatcagctagcgagctgacacagaacaaggcagtctaaaacaaatttttttaaaaatacgaagaacagatattgaagggaagaggtgcctgcaaagactaagaaagcacacctggagatggtatctcctcaaagctaaagtcatcaagtgttcaagtgtttcaaggagggtaagactattaacaaggacttagca

SEQ ID NO: 339830 - DNA, 1000 bp, Homo Sapiens
ggaggctgagcaccttttttattaataggtataataaataaataaataaatacataaacagacgcctgggctcctcctccctcttctgatgaccaggcactggccacagcctatttacagctggggggcttagggatctggccccaatactgttacccatcctcatctccacctggcctagggaaccctgtagatggctttctgggccacccgcctccagggggacttgcttgtcttcacccatggaagggttggcccagacgggccaggggaatcctggcagcccagtgctgtgtcccatccctctcctgggtggaggtctggacaaggtcactgggacagttaagggggcgtaattaatactgagcacagggagcaggtgccagcacagggatacgtggccccagctctcagtctactctgcagccaagccaatggcttgggaagggctctcgggctctgagtctgggggttatgagggtccctgaggccaccagcatgcacagggcctcagttttggctgcttccaggggttggacttggagttggggtcaatgtcacgtaggccaggggcaccaggccagagtcggggccacggctgcagcgcagccagtctcctccagctcgccccagcactcgtaggatgtctcctttgtggaagctcagctgtccagggccggtggccaggtggtggcacagtgcctgcacctcacacggaggactggagggcagggctggggagtgtggctcctgcaggctctccttgggctctggctcccggcgggaacccactgtctgcgccactagttggaacatggacttgtccaggctcagccagtccgaggggagcctatttgtgggccgggcctcccgctgggcttttcgggagccaaagaggtgtccccacttgatgcctccaggtgaaggctctgaggccccttcctcattttctgctggcgaggcagcgggcccttccctctcccgactgcgcctcagctcg

SEQ ID NO: 339831 - DNA, 1000 bp, Homo Sapiens; identical to SEQ ID NO: 159237

SEQ ID NO: 339832 - DNA, 1000 bp, Homo Sapiens; identical to SEQ ID NO: 159238

SEQ ID NO: 339833 - DNA, 1000 bp, Homo Sapiens
ggatatgttccaataaaactttatttatgaacacaaatctgaatgtcatatagttcacatgtttcaaatttttttatttatttttaaccatttgaaaacataagacccacttttcggctcatggggcgtgcacacacaggctgtaggccacagtttgctgacctatactcaagggaaatccctctaccctgaagcataaagaaaacaaatttccccctaaaaataagcattacagaaaatacagacacctttatttagattagtgcatatatttaatagtgtgatattagaaataccttgtcaacacatagggaaaaataatatattttaagcaataaaaccaagattaaaatagtccatgatagctttgtcacacaaaaaacaatggtagtcactctcctccccgcgcacaaaaggtggcatcactggcttgttgagtggtacattttcttaccttgctgcatgtttttcagatagttccttagtcatacacatgcttagccttgtaatgccatgggtatgaatcctccttcattgaatgtaaaccagcaactaaagtgcttgttagcctgtgagccctacaaacacccactcccatattctagggcctgtttttctctgtccagagctcttagcgtgctttatctcccaaagatcctcaatgataagcagtccaccatgaagaatgctggttggtcattccatctcgtgctttgttctgatgagaaatggggtgacaagacaggactcactttctgatcactactgtgatgtttgatttcccagagattcaagatccttctgtgatggaaggatcagagaggccaggctgagatggccaaggacagaaaaggaggaggggcagaagaagtccactgtaaacctagagggaggggtggcccgggtgtgatccacaggagactatgcaggccatctctccctctgaccttggctctctggatccattaaaagaaattcctcttagtcctgggaatagaac

SEQ ID NO: 339834 - DNA, 1000 bp, Homo Sapiens
ctggagtcataatttcagaaagagtaaagataaactttcttattaaaaactggttttaggtccaaataatgaagatgtagaaaaacaacctacagtcccattataacattttgaaattcatttataaaaaatttacagcagctgtaaagtttcagtatcgtaaggacaacgtgatcctacaaacagccaaaggatgtagacaagatgtttttctgtcttccaaataacacaaactgaaaagaaaaggctttgcttttccttggccacataaaactagtatttccacactactggttaataaccccaagaaacctttgcttctcttagtcaatttgctcattatggctacaagactacagctcaacatcacaagcccagaagaaatgctggtaagacatcaatctgagcatttcccgagacccaatcacaacatttcagtgctttccttatttgtcaagagctatcataccagtcattgtgcaaaatgcaaatattccaatgattatttcagtacatttcttaaacgacaagatgaaacccaagaggaatgggagtgtgcatagtgaaatatttaagatgcaaaggcaagtttggagggaagatgcagaaataaacgaacgtgcacacttaaagattataccatctttggggtttttctaatatactttgaagctataacattccaggatatttgtaaatatgaatccagtagatgtcttgtatcatgcttctaaccaggaccttcaatattaaggcatttacattcacgcctaagagtatccacattcttctagattacttgaagagggacaggactgatgaacggaaaccagtcaagaaggcagggtactgaggtcccaggagagcatctcttatgctctaatgtagcagctggagtctatagattttttttcagatgcaggtaatagttgtgagaagcaatgctgcaagagaggcagagttaaattgtacagtgtttttaaatcattttatcccactg

SEQ ID NO: 339835 - DNA, 1000 bp, Homo Sapiens; identical to SEQ ID NO: 159239

SEQ ID NO: 339836 - DNA, 1000 bp, Homo Sapiens
aaagttccagaaacactttatttaaaaatggagttgtaaatgcataacaaaataacataagtaataaatgtaacaaaaataaataaggaggataatgtattcatacaaaataaaaataacatagtaaaaggccaaatgtttataattgaaccaaactgtgtaaacacttaaacaagaatgtaagcagagtagattctagtattttcctaaactccttaccttctacttccatgtggatataatcagtacccaaatattaaataaaagagggagcaatgctgattattttgtccaactttttcttcaaatggattgaccctgttttaacatttcgtttattccttcaaagcatttgtatctttccatttatgttctttaaaaccttttttcagtcttcctttattagacagaatggggaatttagctttacaaggagaatagttcatttacctttttttttttgtatttaaagaaaaataggagatccattatagttttgtttttacatctctataaagtttttttgcatctttattaattgatccaacaatacaggatttaaaaaatcctgtaaagtcttgaagtgtatagagttactttgtttcttaaaacaaatatagcacaggattattgtggaaatattaaagaccatttcataaaagttgcagtttaacctttatagactgatggggtcaagggggaaaatccaggtctactaataatatttaactgaattaagatacaccccaattatagtgttctggaaacacaaaggtaattacttttctttttaaaattatccaaatgtgaacttactggaaagagaaaaaacaagtttaaagaagaaatttttcataggcttcttgtttagtagcacaggccaaaggcctttgtcgtcgtcttgcagggtccttataaatgtgtaagacagacagcatttactattgagtcctacagggaaacacacagaagcaattcattgcttgggagtgaaactatc

SEQ ID NO: 339837 - DNA, 1000 bp, Homo Sapiens
atttataaatgcacatatatttacaatgacatccctgggcaatagggacaaaaaaaaaaattcacaagaatacaaaaatctttgacctggtaccagttggtcaagcctgggattcttgccaaagaccttgaatatcaaagccccagtctcaactatctgcctgaaaccactgaagaatcccaggcacacttcccagaaggctccaaagttatttttgctccttggaaagcaaagtagaacatcgaagtagtgatgttttctcaggaccattctgaagactagggcaatccagcatgttaagcagcaatgtgactcttcctgacaagcagatgcacaccagagcacatccccatggaagcatcaggaagcacatttgccccgtatcttccctctgccggtgctgcacatttttgatgagctgtacccatttctgtcagctgttgccatttcttcatcaggtataagaccaaacaacgcatggcccaccttggtgcggtcagatgcaatcataaagaaagagtaaagcaaatgctgacttcggagtttcttctgagctctgaggtagtaaatgcaaaattaattaataagtctctgcccagatttcatcctgaagtgagtttcatgtgccctcactaccatcttgaatgttccgagtcctactaaaatcaaaagcatgatcctgtaacctgtggcaggacatggaagaagcagaacagtctggctctctccctgccaggccctcattttgatgaagttgtggtgactcatggactggctgctgggaaaaaggaggatgaggcaggcctagttctctgtttatgttccacacgggccgctgcaatgtttcaccgctcatctgtgtggagggaagtttcttctcacttatcctctcatggttggtgggaaaggcagatggctctctgttggctgacggtatcaggctctctagggcagtagtatcctggggaggatgtactaaatatgtctctttaggcatttg

SEQ ID NO: 339838 - DNA, 1000 bp, Homo Sapiens
ttttttttttttttttttttttttttttttttttttcacaaagggagccacgaggagctttatttatacatgaacgaaggtagatttccctcacatattacaaaatacacacaaacacacacacacacacacacacacacacatacacactttgcatctaaaaagttcctcagaggtaagactactcctgggctggggcgggcgcacacaggggtgaccactgggcttgtggtccaggctgctcactctcctcaggggccagcagatggagaggaaattttgaaaaaaaaaaccgggagacatcctggaggtcaggagtcaggagcggggaactggaagccgctagaggctcttgcaccatgtggagcggatgtgaggcacgatgcctcatctttcctcactgcttcccttggaggcgcctggggctgcgccagtccccagcccccactgcggccatgccaagcccctcagagtgcagcaatggctttagcagccacctggcggcccaggggcaggctgaggtccgtgatggccagaaccaccttggggctagacatggctgacaccttcaccagttccgacacggtggtgaagggcatgaactgcaggacgctgccacggccaccctgctccaggcagtccacacactcctccatgaaccactgcacgaactgggtgtgggggccagcggtgcgagaccccaggatggaggagatgagcaggaacaggttggccaggactcggttcagagggtcccgcatgttgaccgtgtggagctgagaggctgagagggagctgctcatggatcggtctgtggggctcgaaaggatgttggcatcgtcctcattagagctcagcagtcgcatcaacttcgaaggctgcacatcgtccagggggaagaggctgatataatcctcaatgtcttcgcggtgtctcttcttctggcgggtggacgcctgtcccttgtgggaggagtaggaactgagggcacaccacacgg

SEQ ID NO: 339839 - DNA, 1000 bp, Homo Sapiens; identical to SEQ ID NO: 159241

SEQ ID NO: 339840 - DNA, 1000 bp, Homo Sapiens
ttttttttttttttttagaatagggcctggcacagagtaagcatgtattagatgttggctgctattattattattattacaagagttctgagattactcccttaggccccagtattttcctctggggtgttttttgtcactttctgtcacttaaaatggattgagattttagggcaaacactggagaagcttctcaattcctcctaatgggcctgctgagggtgccgtggctgactgtgggcaccggcttgctgctcctctcctggccgcctccagttccaggctgcttttgctgctctgcctcactggtctgttcggagtatccacagctgctagctcttccgtccttacaggatcatgcaaaggaggaagtctcttctgacttggtgtcttcttcatgaatgtttgggccaggtgtcttgagtactcattctctctggcctgcctggacacggcaaggtgaaaaacagagtcaccaccccctgggaatttccacaccagtcatcgactctagcattctcaactgcccccagacccatacagcctcctgctacagaaactaccagggccctaagtcacagtcagcatggtaacacacatactatatataggaaaacttttttcccaagaactcttaagttattagtcgattttcttaattggttaatagcatcattttgcaggtcaggaaactgatactgaaagaaggttgtcttgcccaaagttgaaccacgggagttaaaaataaaaatatgaacatttggctgggccccatggctcatgcttgtgatcccagcactttgggaggtgggtggatcacttgagcccaggagttcaagatcagcctgggaaacatgccaaaaccccaccttttcaaaaaaaaagagaaagagagacagtgtctcgctctgtcacccaggctagagcacagtgacacaggcatagctcactgcagcctcgaactcctgggttcaagtgaccctcctgccttgcagtgttc

SEQ ID NO: 339841 - DNA, 1000 bp, Homo Sapiens; identical to SEQ ID NO: 337466

SEQ ID NO: 339842 - DNA, 1000 bp, Homo Sapiens; identical to SEQ ID NO: 159243

SEQ ID NO: 339843 - DNA, 1000 bp, Homo Sapiens
aagcttgtatttaaactgttttatgagattctacaaatattcattagaaactcaacaggttctaggacccaaaagcactgctccctagggtttctactctcttcacaacccaaggatcttcctcagccattctgtgatgtattgaatctgccccctggtggttacgaagttatctatttaatctgtcaataattacatctttcaccccttaacagagcttaaaacacatgctgctagcattttgcttatccaaagaatactccctggtagcaactctgtgaagcaggcctggctaagcattagttactaaccctcagataatacagatccagtctattttaacaccagaatctatgccaattctgaactagtaattctaccatatactattctaatgttaagctctttttagaattggcatatttgatatgatgataggcagtcttcatttggtatgcattttttaacaatattaaaccctctaattccaggatttctggtttgcccctccttttacactgtttcaggatcacccttggaaaccaactggatgggatccacctactagacccagatgtggttgcacggttcaagcaaaggtacccagatggtatcatctctaaacctaagaatttatagaagcacttccttacagagctaagaatccatagccatggctctgtaagctaaacctgaagagtgatatttgtacaatagctttcttctttatttaaataaacatttgtattgtagttgggattctgaagtccattctggctctgctacttaacagtgtataatcttgtgcaactcatctctcagtattatatgtgaaatgggagtattacctcattgggttgctgtgaaggttcaaactaaatgagtgcatgggaaacattaaaatgatcattataggctaggcacagtggctcacacctgtaatccgagcactttgggaagccgaggtaggagggtaactgtagcccaggagttcaagact

SEQ ID NO: 339844 - DNA, 1000 bp, Homo Sapiens
catttcaaatttctttttttattctaaataaaaaccacactttgtgctgaacaatggaatataaaagaatcagatgtacaatgattttagacatctactatttggggaaaaaagtttacaaaatatacaaaactttacagcaatagatagtaaacacttaaatattaggaggtcagtacttattaatttaatggaaggagttagacgtcaacaactcttctctgtttcataagagactttagctattcaaggtgggggcggcgagtggattggacaggggaagggttttaaagaaacatcaaaatcgagtttcattttcattctgatgttaagcttatgatgcataaccacattgaaactaatgctgtgcaccctgcctcctgactcatttggtgcaggatttagggaaaagagtcccagatgggtgcagaccaccccatagagcccactcccataccaataaatacagtgtctatctagaatttgctttggaagttaagcagtcttgggcttggggaaaggggcacagaaggaggccagaggaagaagaaaattcaacactagcaaaaacctgtctaggaaaaagatatttaagcccaaaggtttggcctggagacaaacaggtactcacagatcagaaaagcagaatataaaaaaaaacttttacccatctcctggttcttaggggtcacctgggcctgacccttatcccacctcctttcttcctaactagccatggactacgggaactccatggagtcataaaatttaggaccaaatactaaggttcagcagagcttcctagcgggtgctgtggcatcagtgagtcacccagtgggtcactggagtgccaggatactaatctctgcctctggccacatggagcctctgctgtttaaccccgggtgccacacaagtattaccattttcccctcggaaaacaagttgggaatggcctcatatttggtttaatgctctatgaccaccaccttgaaatttt

SEQ ID NO: 339845 - DNA, 1000 bp, Homo Sapiens
agaagttacattaactttattaataagattttattgtcttttaagaaactgtatggattcaagggcacactgagctataacaagtcattatatacacactgggtaacagtgcggagggggtttcagatgtttgtcatctgttcatcaaagctttctgaaacccctagagctttactattctactctataatacattttcactgtgtataacaaactccctttgaagaaaattaccccagataatccatctgtgaaaatacaagtactgcaaaaagcagtgaggataaatactttttggaaaggcaaaaatgctgcatcaactttcagaggcactatcatagaatcatctctgaaaaagagaactgcaaatgtactttgaaaattactttccttgcctatacccagcatgcgtgaatgtcatctaatgagctatttgtaggctgaggaagtgaagagttgaaatgcagaattgcaggttttagttgagctggtaacactggtaccactttcttttttcccttccaatggatttcaacagtttgttcctaaacatttcacagttctcaaaacttttcacataaaaggggaagattattaaagcttattagattctgtcaattggtcaaaagaaaaaatgtatttcaacacagcttgtcatctttggaaaaaatcaatcataattacgtttccttatactgaatttaaggtagagagacctaaattacaagcactcacaatttggtgggaaagtggcaaatccttgtcatttggtgactgtggcaccaaataaagaggaattcattcacaactgaatgagttattcaaataaaaaaagcagaaagctaatctagacattttaggtcctaaattaaatttttcaggtgtgatatttttagtttgagtaataatgctggtctagtttgctaaaaaattagcaacattctcctttaccttgagctgggtagactcagccacaatgtcctactgtctctttatgtat

SEQ ID NO: 339846 - DNA, 1000 bp, Homo Sapiens
tttttttttttttttcgtttagtaactgttgttgtttattctatgtatttttgcaggaggcctgaggtgggctgtgttctcctcctatggcagggcttcactctcctccccctccgttggggcttcgctgtccccagggtccctgttgaggatcttgtcctcattagatgacttcttgtgcagcttccatgcatgattatttattcttgtggcactgagaggtttgtacagatctttaaaccagagcggctgtccaaatgaggaaagtccatcctgactctcccttcgcgaagagcatcccctccatggcagaaatctgaaaatgccccttgagaatccttcttcatcttcttgtaatgaccttcggtgacaacatatcacaatgaggcagaaaagtataatcaaaatcgttagtattccagtaacaattaatgccaagatgagtttgtcagtatagccatatcctggaacttcttttttgagctcaagcgacttctctttctgttcactctgggcttctgtgctctcattaatgtagttctcaatcttccattggtccgtatcccattctatcttggatgcctttacttcctgctgcccactgagaagcttcatcaggtggcctgtcctggagatgagcttggcacaggtcacttgcacatgggccccagagcagtccatcttcaaggtccggataacatgagcaatgagccttctcacattgttgttggggataagggactgtagctgctgggttagctgaatttcaaactgatcacctggggacgagagcaatgggtaattgaagcttttgggctcgggggacaggtcagtgcccacgttgttgtattcccattttgtctcagtttgtttaacagttggccctaagttgaatgcagtcccagcggaatctgcctcaggaggatgattgtagtttgtgttttcagagatggttccttctggcatgttagtgttttccataaaatcattttcttcaaag

SEQ ID NO: 339847 - DNA, 1000 bp, Homo Sapiens
ttttttttttttttttttttgatgaagaaatctaatctttatttctatgattttagcacaatatactcacacaatagcttttatctgtacttaacaaaatacatttatagcactttacaaactttatcagtttggaaaacattgcataacatttttttaaacacagtactttatatatactatatatattttcataattttatttactttaaaaagataattaactctctttattcaatacttggttttatcagtaaagcacagcctaacaaaggaagaagtgctcccattagcaaataagataaatagaacactaagaagagataccaccttttagtctgatttattttaaattaaggtaccagtggaatgtaaacaaatttttttgtaatttttgttttacaaaagacatgttatcaaatatacatgcagaggtctgagttctagtgtctatcattatatgtccttaacaatgtggtacaatttgttaagtcattaaaaactgtagcctttggcactttgagtagaaaaagaatatatcaatatttatgtaaagaaaaaaaaacttcaatgactagagaagtactttaaaatcttttgttaagaaataggaaagattaggaaatatcatactgcacctgaaatgctgcagcaggggtttttgtttgcttgtttttgtccttcagagtactaaaaccagcccaccttttcctctacaaacaggcaaaagccagtatgagcgtcatgatggcggtggtggtgagaagtggggaaggcaacattttattcccactcccctctctgagaaggaaattgccagaagggatatggttgagtccatgttttattgccagagttttcaattctgctggtttcagctaaattcctaatgccttagaggttggtttttctagaaagctccacctttttcatgtggaaattgataatgatgtgatactattcatctgtaaacaactccttctgttattggaaagtgagc

SEQ ID NO: 339848 - DNA, 1000 bp, Homo Sapiens
cagttcattgcaatttatttaatttaaaaataaaaacagaaacaaaaaccaaaatgaaacaaaaatcagtttccaacgaaaatacaaacactttgggtggttatccagcttgtttttcccctgtaggctgttctgggctcaaaccaatcaaatgagtgaaaaccaattttgacaggagccataaagcatgttgcaccaattaaattacaccaatatattattataatacctttgaaatgcctttcagaccaataaataaaaaagacaaattcaaataaaaaagtcaactttttattaccaaaaaaaatagaaattaaataaaagtcacaatgtggatttttttttttttttaatgtgcagtcaagtttctctctttttttcttctaggaatgataccatgccagtaaatccctacagaacatttccagtttggcaacaagcagtcagtcgatcattcacatttgtactcaagacagcaggcctgggcaaaactcgcctgaatttcaccctgaaaagtgctccccatcatctgaagaagcagcacctggtaacaggcatggccattcagagggtacttagcattttcatttcacctggggtcttgaagcacttcctgaaaactgattgtgccttgacatttacctgtaaaaagaagtgtaattctacccctttggcagatgtgtaaactaagacggtgcaaggcccacagaagtaaggagaggaccaggaaagctgacagtgaatctcctgctttgtccatcaggtcctaaaagtgtctctcacttgtaattccacagaagtgaataaagcataacttctttgactgggattggctggtagggatgacaggacttaatgatgaagcagggagctgctttaatggcttttccctctattgcaagtttttccttgaaaggacagtcaacaccacacctagaatcagaggatgttggcagagtgtcagagctaagcggggcttcaggtaccagctaattcatcc

SEQ ID NO: 339849 - DNA, 1000 bp, Homo Sapiens
ctttgttcaaggtgtttattgcatctcagagggcgtacatgcactgggtttttaaactgaaatacaaagaaagccattttgaaattggttttaggtaatttttccccattacagtgtatgttatccccacagtaaattcagatacaaccacttttaaatggtaccatacatctattaaataatttgaaaaataggcaaacacctttccaacccaatatgcttttatgaagagctgccaagctactagcaacactgatcaacagtgacctcatttatgcatcaaaatcttaagccaagccatcagcacagacagtatgacaacaaattaaaacttaaagaatacagtatgtacagtaaaagatacaattctctgaattagtttaaatcctaatcacaatgttacaacaaaacctactttgagctcagttgaaggatggaagaacactagtctacaaaacacacaaagaaacactaaattaacagatgtactaaaaacccacagtaaagtaaagatatttgcagtaatctttaaattacagatataccttggggtgccttcagaatcacttgaatagcacctctctaaccgcattttcatgaacatgacacaaacagaccctttacttttcagtgcatttaatcaagaatgaataaataggtcaatttagatgcaaaacctgtcaaatataattaaaatatatatattttaatatagcagtgataaataggggattcttcccatacgatttttcgttcttgataaggtagcttcaaagagaagtatttattatggacgttaacctttatattttttaaaataaaatttcttaacatatacagtgccacaaaaataaacatttctcacaacagttgaagttcctgtgattggaaaaatgtactccacactgaaaaagttttgtatatttatgagtgttttccttattatctggtattatcacactacgcttgtaacagagatacagaagaaaagataatttat

SEQ ID NO: 339850 - DNA, 1000 bp, Homo Sapiens
gaatttttaaaatgtaaatctgctttatttttggaataaataatacatttacatggctggaaattcaaaggatacaaaaaggcatatactccaggcaaccactatgaccagctgctgatcacaagtagagaacttgtttcttttcacccctcttgctcctccccggagttatgaaaaatttcaaacctgccaaaagtttgaagtttacaacaaataccctccaacgtttgggttgtctccctcccccttctctccctttctccctctgatttcttacagaaccacgctttcatgaccatgcccgggaacttcacgctggcgcggtgaggtcctgcgcctccgcttcctgcacacacgtgcttcttaatagctgcaggctatttcatgagaggaatttgctcacgttaacatggctgttcccaaatgccaggctgttttaagtgtttcctaattataaacaggctgtgctgtttcccttgacctaggacttgttcttgaggacagaagtggaggtggcgagatgcaaggcctacgtacggaccggcttccccagtagggcggcgccaatggggggctcccaagctgctcccatctcacctctgcttccggggtgctgggggtttgggccagtgttccttctgcttttgtgaagggcccttacactcgactcgaagtgctcctcctattggtttttaataaatatatttatggaaagctttatgaatttgcgagtcatccttgtgcaggggccatgctaatctctgtatcgttgcaatttttgtatacatgctgctgaagggcgcactcctcttattgttgtataggtttttaaggtaaatattcaacatcaattcccatttgttgcaattatttcccttctttgaggtttttaatttgcagcatttttacatttatttccttctatttatttatttttgagaaacaaggtcttgctctgtcgccgaggctggagtgcagtggtgtgatcatagttcattgc

SEQ ID NO: 339851 - DNA, 1000 bp, Homo Sapiens
ttttttttttttttttttttttttttttgcaaattatctagtcatctttattagctataatttggaatttgcaagtgacagaaaaggagaaaggcttcagacgcaaaggacttttaataagttaccttttgaagatgagacaagacaggttctaagctaatcagacgtgtccaccaggtggacctgcgctcttttcacaggtagcggttcctgatgtactctcggtacatggaggagtcctcttttcctaggggctgcatgataccttggctggcctggatgtgggcttggaagatctctgtagattttctgtctactcttgggggctgaacttcatagatgttatcttgcgagaaagccgagatgggtgttagttttataactccatctgagcacctagaacagggctgctggctattcttgtcttgtttatgttgactctgccccagctgaacaaatcttgaataaatggagaaatcttcttctgagaggccatctgagaggttaattccatatagctccttcatgggttggaccacattctcggtcactttggcactgtctcctgcatcagtcatcttcacgggagtggagcgctgagacacagagccctcttcttcccgatcagtcccagagtcatcctcagagctgctggacacagcctcctcgctggggggcggcggggcgctggctgccgttttccgctgtaatacagcttcttctctattgcttttgtttcccaatactgattttccagtttcatctggtttacgcacagtaaatggacttggatcaattccaacggtcttaggcataaagtcacgtgctgagcttgtcatagccaagcaaaaggtatcatcaaagctgctcaactcatatggccgaaagaactcattgtggatatcaatctcttcttcatatttgtggaatttcttcactatcaacttctttaagttcacagcacagataacttcatcatagggcaatggtaaatgcttta

SEQ ID NO: 339852 - DNA, 1000 bp, Homo Sapiens; identical to SEQ ID NO: 159246

SEQ ID NO: 339853 - DNA, 1000 bp, Homo Sapiens
ttttttttttttttttttgaaggtagaggttttctttttatatatacaagacacattaatccattaaatttgaggacacagtacaaaaaaaaaaaaaaaaacaaaaaaaaaaccacttcaactaattcatctgacaatgctgttcatattcatgacgccatttttttgtttgttgttgttgttgttttcctaataataaagaaggagacttagggctgttgggctgatatatgtttgggggtcccacctccccgcctcatccgtacaccaccagggtgaacaggaggaagcaaaggaagtgcagggcccatagcaaagtttcataatcttgaatgcaagaggggagaaggaatggaagggggaaaaaaaaggagaaaatacaaatcctataatacatacaacagggtggggatggtataggaatgggacagacatgaagctgaggcatggggtgggccgctgggggtggggggcagcggaaaccccccacattcctttctctttgatgctgtttccatagtttccaggctgagaagccctctcagaagatgggaccgggagaagagggtcagggcctcagttggccccccagctgtagctgttgtaggcagacttgttggtctggggcttctgcgggatggagctggtctggctacgttgcccgctgcccgtctggccatcctgctgcaggtgatggtgaaggatctgagaatgcggctgctgatggggggtcagaatgtgcataaagggggcaggtgggtaggcagcagctgtggccggattgatggggcccccacttcctagggctgaaggcaagttgaaggaagcagcaggagtaccggaatgaaaaccttgtttctcaaaggactgctgggttttggagtacacagaacccgagatatctggcacgcccgtgttactggaggtgactgaaacaccagtgttgtatccatgagacccatatccactcggctgttggaaaggggtggccgatgcattc

SEQ ID NO: 339854 - DNA, 1000 bp, Homo Sapiens; identical to SEQ ID NO: 159247

SEQ ID NO: 339855 - DNA, 1000 bp, Homo Sapiens
gagaaaagttaagctgttttatttcacaggatagctccacgtcaaaccagcaggcaccatcagaatacgcgacagaggatccaatcagacactctataggacgggcgtttggtcgtaaggtagagaaacgatatccagaagagggcaacatttatcatcacgtggggacaggcaaccagcaatttcctagggtggttttggtctgtttttcctgtcacaatttggggaggaaggaaaccaaaggaaacaaaatagaccagccactctgaagcaatcagaatcaaacctattgccaaaccatgtaaacagtcacactgccgggaacaagggcctgggcagaaaccctagccaggatctacttccgtctaaggaaggaaaagtgcactctggttgttctggttcaaggaacagctttgttattggccggggacaactcacacagaaaggaggtgtcaacaaggggcagcgatggccatgtggccagtcccagagggacagcaggacactggcagatcaatctcagggaggtcaggagggcttggacctgacagcaaagtcccttctctcggctcccctgggcagctttggatatgtggggaatgttctatgtggctgctcagaggagaggagaccccagagaaccggggaagttgacatgaaatgtcagcattagctctgcacagcagaaaatcagctaggcaacacctcggctcacccctttctgcctttcctcctggccgccaccccgactcccagcccagcaggggctaaccccatggttgtgagccagccactcttctttctgggtttctcaggagagtgaggcatttgcactagtgtggaaccatctggatgtgtgaaaagttaggaatagaaagactgagaggaagaaccattacccgagtcctcgtgtttttccattagctgtggacatgcactgaatgccacatcacgaccaggtcacgagaagtcctccacattcgtgcctcctgaatgacag

SEQ ID NO: 339856 - DNA, 1000 bp, Homo Sapiens
ttttttttttttttttgttgacaaatgttgtttatttgtctgttacacagaagagtatagtttctgaggcaaaaatcatacacactctgctcctcacaaaaccacggagtcactaaggcaggcacacaatggccacacgtgcttggtggaggccaaggactcacggacaacaaggatggacaatggggtggtctggcccccagacaggctgtgcagtgcccgggggcagggctgggctgggcaggctgtgctgggtgcagaagggctgcggggccctttgtcatgtttctcaaatgcagaaagtctgccagactttggtggctgctggactaggccccagccccgggcagggcctccacgttccagggcaaggcctagcctgcatgtgttggggtagaggaggaagtggggatggccgagcaagcagcatgcctaggcctgggggcaggagctatgcccttcctggcacccccgcatacacagctcctccaagggggtttctgggttcctaggcctcttggcatcctgagaagcatgtggaaggcagagctagccttgcttctcaccacggacagatggggacacccatgcatcccctgcctcccgcagtctcaggtacatggcagatgtctgcgacagataatgggctgccctcgaactgaggcctgtctctgaggggaggctgtgaccggattcttccccgacagagtcaccctgggattcctcagagcaagtgctccggtcgcattccagatcatccactggcaaaagcatcacttcttacacgtggttttcagggaagtacctaatgcagaacgcaagggtggggtggcaggagcgaggctgtacagatacacagaggtacactgtacaaggccggggaggcctgggggtcacctcaggtggccaaaggcagtggcagtgctgctgaagtgggctgctcccacccagggcccacatcttccgactgccccagaatctcgtgggagcggcctgaagg

SEQ ID NO: 339857 - DNA, 1000 bp, Homo Sapiens
ccatatttaacatttattttactttgctgagcaagaatcatagacagctactaccacggctgcttcgtttggacaaaaataacgaggaggcatccacgggattagttacacggtatcaacttaccaccacagcagaatcaacagtgactcgctaattaacagaaccgtttgctagaaagcactaatctagttatataaatactgaaataggtcacatgcaaaacactataaacgttttgtgtgatgtacttttagttctccatagttttgtttggtataaaggaaatataatttggctgtgacgtagactgttgatgtaattttcaagttttcctgtatggggaaagttgccctgactgtggcccttttcaaggtggagcctccaacaccacgttggcagattcagactccgtgaacagtctaaatgagcaagtcagctgaatgccactttcagatggaagggaaatgagatggaaaacaacaaaaaaggactgccaggcggaacagtttccaaccgagttttcgttgagtgaggatccagcagccatcaaactcaaacataggggcccgcagggaaactggaggaaatacttcagagacagcaaagctgaaggtttctgtgctctgagggatccgagagtggatgtcccactcctgtatcctcagccagacacagaactagccagattcattagggaagctcggatgctctcattctataaagtaaggcccccagcagggcacgtacatacattgggaaagaagaaaccccttagtaccatgttggtcaaaggcaagagagagaattctatttccatctggaatgtcattcttgtttacttcttccaacagtgaaatacttccaggccttcgaaaggccatcctttggacacatgtaaaaagctgtcttgttggcccgttattcccactgacccgtctgagtgatcacccaggagcgcggcggcagcaagcagagctcaccggatttgggacaaggatt

SEQ ID NO: 339858 - DNA, 1000 bp, Homo Sapiens
gagcacatgtggccttttttttttttttttttcaatatacctttgtgatttttatttttccttccaagtgagttggtatttttaacattttctacagacagaggcaagtttgaaacatccttgtgtcagtcttggaacagttcacctgctaaaagtctttgtggatatgacatgcacagctaaaacagtactttgccatttttcctttttgtttcatttttgaaagtagaaagccactttctttttcccctctctttctctcagcttcttatgaagattcccagtataaatgcaacagctggagttacctacaaatatacaaacttgtatctatccattgggtcttcctgttgcagctgactctctcgcattgtctgatattctttctcatatttcttcagcttcttggttggtactttaatattgcaagcctgctccatcagtcttcttgcattttcctctgccctgtatctctttggaagctgaactctaaagaactttaaagcaccttcaaaatcagcctgcagaaggtcttcctttgaggtctttaggagagccaaagctacatgaaagattatgttcaaaccctcacaaagcagtaagtcaatgatgtggaacaccatgcagagtgggaacttggcagtaaaaagagtgagaaaccactgggatgcatacatatgagcttccaggttcagatcagaaaaatggctatgcaggtccggtagctgttcctgcattagtctctccaactggtagaatttgcaatgaagatcttcgaagttgtttctgtagaggtctctcaaaccatagtcgtacatgattttcaccaaaacacagaatgcttgttcctctggcatatgcagcagtaatacagcagcaagaaaagactgcccttgacagtacccaatgtcttcatcatacacagagtaggccttgcagatcttatagagcgattcttgaccatctcctccagtatctttaaagtaatcatgtgcgggaa

SEQ ID NO: 339859 - DNA, 1000 bp, Homo Sapiens
ggtttgaaaatttagaggatatttatttctcaggaaggtgcacaacagctggcaggcactgctttccctgctctaggggattcctctctccttttccaagaaatcccctctcttcttagaagtgcccatgggaggctgggatgtgaaaagaaaccatacacaacactccagagccttaaaaaaataaagcaacaacctcctccacacgaatacacttacaaaataaatagacggataaaagagaggccacgtgcctcccatcccggctgtagggctgcttggggatagtggggctgggtggctcggtcccacttctcccagccaggatgatccaaaggctaaatggaatggaagggccctggcttcagagagaggatggggcaggacctctcctggtactcagcagggaagacactgggggcacgggtagggaacaaaggaacaaataaataaataaatagaacccaacagcactctcagaggcctaagggcttagggtgaggctcaggggggccctggggcctgtttccctgaaaataacagatccagtacaggcagaaagaacagaagggaaaacacaggccacacccacctggcctgcagagcccagccccagaaggaggcctcaaatcagctctacagggaggaggggtggggtggggatgctgagctccacactagctgctctgagcctgctctctggccctggaggtgcccgaaggctagggaccctcccatccctgtgttctctgcggccagcagagcctcctccctcactctccagccttcatcctcaccatctccaccagaggaaaccgtagctatctccgaggtgggctctttcctaggaaagttgaggcagagccctctcctcctattcttaatggtcttcctgacttggggcatcctgagggtcagctgggagaagtccttgtgtaactataaataatcaaaacaatccaaccccatgtccacctctgctccacttggccacaggtgc

SEQ ID NO: 339860 - DNA, 1000 bp, Homo Sapiens
cagggataataaatctattttaataacgttacttttgacaacgatttgtacatgtatttaaagataacaactttcaacccccacccttaccccagactcccattacaaattgaggcatgacctgcccttgccaggaagtgagcaaagctgcaacatcaaaactctgcacatcccactctcagaggagggtgactttacactgtgttgggaaaaataactaagcatttaaatttttcattgtacacctgtacattggtttagattgaatggctcaaattaaacaaatatagagagatttcatatatacaaatattatatcatgtataggtatattatatcatctatttgaaaaggataaaattttaaactttgactttgcatgcatggcccaaatcttttctcactcccctaatccccaagtgtgaaaaggctacccggtgccctcccggccctcgtccccatgaccagatgggacttcatgagaaggaaatgagcggctgacgctggtgagcaaagcaggccacaccgcaggccgagccgtgggccagcgtctccgtggctggtttcacttttcctccacatgctttgggtaacgtaattattgctattcagtttgaacctccagaaagaagagacaggctccaggaccccacagactagtgaactgggtgcctttaggtacgtagaggggtaaaattactctcatatagccaatatatttggggacagggaggccacctttggctcctccagacactttcaggcttgtttgttttgttttatagattcagaaatataaaatgatataggagctttcagtcacacagtggaaaaaggaaaactgttaggaagtgaaacatttttgttttcagccatttactttggagcccactgatgggggcggcctgaaaggttttccagtggcaagccctcccccaggtagctggcaaaggtcagtgccccaggactgctagaatcctggacctggtccagttgtggg

SEQ ID NO: 339861 - DNA, 1000 bp, Homo Sapiens
cattggtgacttggataaagactttttaattttaactttgttctaagactgcttgtcatgatttcaaattagaaaattatataattgcaaacagcttcacttctcctgttcaacagaggcttaaggccagatgtccaaacttgtctcaataaggaggtgatattttactaaagtttcccacgtgcacatactgactaaatacagagctaggcccagtttgtattgtactctgaacttaatgcaaagtctccttggtgattttcgcaaagtccgtggatttgggtcagaggcacatttcatacataacagcccttataaacgtttgccctgcctccacattttacagtatcttaaaacagtacatttctttcaaagaattttatctctatgagtcagtactccaacttagtggttctcacattgtggaccaggagcatcagcatcatctggggaattgttcaacttacctcttataacctatgaactcagaaaccctgggggtgggctgagcagtctgttttagaaagccctccatgtgattctgatgcatagtagcctatgacataattccagaccaggtgaatctcaagatactaatcctcacatcatttgccttctcatatttccctcgtcttgaccatctggtgcctgttatgcagtttaacattctgcagcaataaaagtgttttattataaagtattaattttaatgttctatacttagtgggaaccactggtctcaaaatttgaagctattctttaagaggagaacattcgcaaaactcaagcatacttggtttttctctgtagtacttttgaatgctttatcttccttacagaataacttgtcttccttatgcttcaagctccaaaagggtaaggaagaagtcttaatcatttttgtattccttgcacaggacctagcaaataattggtactcaatgtttgctggatgaatgaactaaattcccatacggccactttatggaaactaactgcc

SEQ ID NO: 339862 - DNA, 1000 bp, Homo Sapiens; identical to SEQ ID NO: 159249

SEQ ID NO: 339863 - DNA, 1000 bp, Homo Sapiens; identical to SEQ ID NO: 159251

SEQ ID NO: 339864 - DNA, 1000 bp, Homo Sapiens
tttttttttttttttagtagagatggggtttctccatgttggtcaggctggtctcgaactccctacctcaggttatccacccgccttggtatcgcaaagtgctgggattacaggcgtgagccacagtgcccggccttttttttttttttttaaaaaaagagacagacaaatattttacaagggaaacagaattcgaattccaggtcaccctacaggataccctgcacagggaggacaggaacagacttcctaggatctgtgcctgcgagccgatgctctgagaatgggagttgttttcttgggtgtctcgtcttctgtcatctctgctgaaagatcttcctcactggactcatcacttgagaagacaactttgggtttctttttggaagctcgctgctgggtgtttggatgccgacgggtagtacggcggggctctggtgtgacaaagtcattgtctgaggctgtagaagccagaggctggtacctagaaccactggatggtttcttggctgatggcgctctctggctacctgcttggccaatctcaagctccttgattccatccaaacctctggtatgacaggcccgaagcttctgctcaaattcatctattatagccttgccctcaggcttggccccacgtcgcagcttgcccacaactgacaaaaaagcactgaagatggactcatctgacagtttgtctccaaaacagtcaaaattgtcaagcatcttacggaggcctcgctctgtgaggggcagctgtgacacacagtaggccaggtctcgctgctgccgctcagttcgggatgtgcggaaccgctgacacagcttttccaccaggctctctgtctgcttgtccttggtgatgtaggagaggagctgtttcatgatggtgtggaaaggctcttcctccacccccagctcggggtctgacaggcggctgatgatatctggaaggagattatagattgcgttgcccttgtgggagagctcattgaag

SEQ ID NO: 339865 - DNA, 1000 bp, Homo Sapiens
gactggcactttctgcgtgatttatttcatctcggcatgaactgacaaacatacgaggctctgcactatttatgcccaggattttaaaagtcaagcattaataaatacattaactacacagatcacaacagctgccctgaacttggccttcaacaggtgtagtttacctttaataaatggtaacatttgagaatcgcttagagcttgaacaggctttggaggagctttgatctcacatgagaacccgtctcctgtttcatatgcgttcaatccaaatccatccacttggcgtgtctgaagctcctgccagcacagtgtctgtgccgggtgcccgaaggctgcacagtccaggcttcctcccggatgtggaaaacgtggaaatgatgtggccactgaaagaaattcaagacaactgaaacaactgcagatttccattttcagctcgtgttttcttatgaacaataacattgcagaaggggaaatatcagaaagttgattgatttttaacccaaaaatagaactttttgtaagctaggaaagcatctaaaattaacaagaatacaaaaatgcacttttgtttacatttgctctatttagatcttacaagagattatgtcttgaatctatcctgacttcagcaaaagacaaaagaacgttgaaaacatcctatttccaaatcgtttacaggaagttacctaagagactgacagattcaacggctgctaccagaattactgaagtgacaccagaaattagcagaaacagagcagatgattaatttcttacttatttgtagccaaacttatacagtcacgagttttagttaagtagccaaagaatttccacaacattcattttcttacaggagaagtcggtgcctccacagactcagaaaccaaatcccgaagttccaaatccagctctacaaagctgcaggaagcagtgcggagtggagggatgttcccaagaggaagaataaaaccggaaggaaaaggaggaa

SEQ ID NO: 339866 - DNA, 1000 bp, Homo Sapiens
gcacagcatattaggatgaactttatttttacattgttgtacaattcattggtaaacttaaaaaaatacaaatacatgatttgattgttgtcccagaaaagacttttgtcacattgccagctgtttccctcagcgtctcctgctcctgtcagcaattctgtatgtaactgcaataatttgtgtgacttgagaaaggtgtgccaagggcgtcctcacagtgagaagggaccaggcagacatcctggggccctcggcctcctcctgcctcccctcccaggggatgtgatgacaggaccccgaagctgtggctctgacaggtgggatctctaaaggggacagtcccatgaaagacacacggggacaccagctcactgggagcttttgctttcccaaacaagatgtgggcagcatgactccagcctctggaacccaacaatgtatcttccacaaacttttgataagcttgcaaataaaacagaatgaaacctcactagcctgaaggaacacactgagtgcggcgggaaaccccgggaagggctcagtgggttccagcagttccttacgcgaggccctgctgcccagcacagctccaggacacaccgaggacagtgccacaggctggcagcccgaggctgtggagcttgcaggatggcgatggagagggagagtttcctgaaagcccctcctggggttttctgtctgttcctattcattactgctacccttcagaaagagcaattctgtgccaaacggcctgaatcttttctggaacaacctaaaggttacagttagactctcctcccagcacagaagagggtgagaaaagctgacatactcaatatgtaatcgctttacttcaacgatgtgtttacagtcacgccaatacattttgcaaacgcacaacacgcagagcgcagcctcacagctgacgccagatgacatgcagcagtttaacgcttccaggtcggaacaacctcctcaaaattgcgagacagagtgc

SEQ ID NO: 339867 - DNA, 1000 bp, Homo Sapiens
caaaatttacagccctctttattccgaagagttttttttgttgttgtttgttttttctttttaaatcacttccctataagccctcagcaattatttctagttttgttttggaagaaattttaatgacattcactgcaactcccaagccccatcccacagcttgtgaggggctggattctcatccactggacttggcaccaatgccctgtaagcatgtgccactctacgatctttcagtgggttttctctgctgccaaggggatattcagtgccattttgccacctgcagatcaagagctctcccagactgacagttcccaggacggaaaagccttaatacaggcacagccttggtagaaacagtgagcccttcacatggagatgaagtcttaaaggtttgagcaccatcttctggtcagtttttggcttctgaggccgactctgctttagaaacttcatttatttcagaatggcagaaccctaattgacaagctcaagtgatctgcgtatcaaaatgtggacaggaccagaagcaggtgtagtcggctgggatgagctgtcccaggctggccggagctggcgctcgctgtggaaaccgtcggggctgcctgcacaaagccggcagatgccagtcagtgggcgtgctggtcagtaaggctgtgccttctgcgcttcaagcagggtgagacctgaccatgtgggagcaataaaagcttccatggtgaccaaacgtgactcctgcctctgtacatggcaatgtgagatgtgcctggaaggaaggggtggccccatctctgccagtgtgggatccaaccaggcactcccctccacagggggtcaagccacacaaggtggcagacagccctgcctggtgtgtaaacaccgcaccagcagactccaacctttggcatggaaggaaaagaagataaatgctagtcattctctccaaacggcaggaacctacatctatctaattgcacttcataatggattccacaaa

SEQ ID NO: 339868 - DNA, 1000 bp, Homo Sapiens; identical to SEQ ID NO: 159253

SEQ ID NO: 339869 - DNA, 1000 bp, Homo Sapiens; identical to SEQ ID NO: 246496

SEQ ID NO: 339870 - DNA, 1000 bp, Homo Sapiens
gaaaaaaatcaactttattttttctaggtttaaaaaaaatagaaccagctattaatttttgttgagaaaatgcttcttttggtgttcacatctaaatttctgaaaaggtgatctggttaccaaaatcatcccaaatgcattcataaaccagatccacgtgtgaccagccctttacaaaaattaattacagttgccacagcctttacattcattcttatcacacgttacaacatgcagataacacaaagaaaggtcaacaagctgaagtaaacattacagcatcaggaaaatgaaaacccatctgtataaaataaatacaattttataataactgtaaagaaaatgaaagcacttaataaaaataatggcagttgaaagtataactgtctcatcacccgatcataaaataagttactgtaaaatgcatagactccttacacgtaaagaatttgtgcatcacagtcatgtgttcaacagttttacacaataaaaataaagccattcaagatatgtgtgcatactttgcaactagaatacacttaaaaaacgtttgctctttaaactgtcttaaaaaaatattaaatgtaaaaaccctcagatggaaattttgcagaaaaacccatattttatcttccatgtggctacagtcacccttccccaacagttcagcaccctcagcttattcccagggtccagttcctaattgttggggattggcgcaaaatgattacaataaagcaccaaccaatgactgctccagagaatgcccagcccctctgtgatctggaaatctctaacttagatggttttggtcccaaacatattagtctctacccttcctgctatccactgctgcttttgactttgtccttcatattaacagatataaggctcatagcactgcagagcaaaaaaacataacaaaccatttttatccatcctctgtggaccagagctgaacacactcataatggtaactctggagtgaagtcctgtgtaa

SEQ ID NO: 339871 - DNA, 1000 bp, Homo Sapiens; identical to SEQ ID NO: 159254

SEQ ID NO: 339872 - DNA, 1000 bp, Homo Sapiens
aaatgaattattctttaggaactgctcaatatcacccaagcatagttacaaagtatctcttcaaattatacatactcttgaggtcaaaaacgtcaaactatttccataatgtaagatcccacaagtagaatattatctttattacttgatcataaataaaggtttttttttaaagctgtggaaaataagggtctttaatcttcatcaaatcatatacaaattatttcattatacctttaacaaaacaagcattatcaagagaaggtccagcctctgatctcctaatctcatccaacagtttagtataattctggcaacattttattagttttaaataatattcatacagcccccattatgaaacacagataacagggtaaactactgtgccagcaagccatattattaatatataattatactatatttaggtagctacttataatttggaaagaaacaggaagctacacccttgaacatactattcaaaatggcaaccagttaaccctttgagaaaagaatttttgattaacaatgcaagttaagttgtcttagttaaacttgtacaggccatttcaccataaacatcccagctgtctgaggagagagaaggcataggcacaaaggtaactgattgttcaggtttccactcatgagaaaataaccctttataaacgactaatgaaccaactacagacagtataccaatgttaaacactttaaagataaaagatattttatttatttatttatttacttatttatttatttattttgactaagtctcgttctgttgctcagactggagtaaagtggcatgatcttggctcactgcaacctctgcctctcaggttcaagcgatcctcctgcctcagcccccctagtagctgggattacaggcacgcgccaccatgcccagcaaatttttgtatttttagtagagacggggtttcaccatgttggccaggccggtctcaaactcctgaccttgtgatctgcc

SEQ ID NO: 339873 - DNA, 1000 bp, Homo Sapiens
tttttttttttttttttggagttttccatttttaatatttggttaaacaaaatacatcttttgtaaacaaacgcagcacaaggccaacaacaaaaaggaataaaagcaagaaaaacaaaaagcctagggttgcccgttattgggcatcagggtcaggcctgttcacttccttaaaggaagtggggctttttgcccttgggcatcagcatgggtccctgttcctaagcaccagaattggatatgaacagagaaaccagccctgaaatgtttaagcgtctttgcatatcccattggctcatggactccaagtgcatggggactctttcaagtgccatttgcacaggcccaagtggatttgtggagaggagtttcctcctctacccaagaaatggcttactatctgacagtgccagtggccccaaggtcctgcttgtgacaatcagcaaggttggctgtaatgtctggctggtggtggttggaatgtcattgtgcagggcaggaaaagagctccctgtggtgccaagcaggtctggtgtagaaaatggtgcagaagagactgcggccagttgctgagaagatataacgcagtagccgcttggtggcctgttactcagcattaaaaaaacggccttgttggattgaagatacatgtgcagaaaaagtgctggtgtcaacatgcactccagtcacaggggggagaaagcccagcttcaccccgttaagcttgctcaggatcaacatgcaagccccaggctggctttgctgctggagagaagtctggccagtgggacagctctcagacctgccacgaccattgatctgagggccagcaggtcacccctgcctgccacctgccttgaggcaaccacatccactttggagacacgcatatggtatgatacttatttctcctcttttgttttccaaagttacaagagaaaagtggcctacaactatctgaagaggtaggggcgggttgaacttccattgatacagagag

SEQ ID NO: 339874 - DNA, 1000 bp, Homo Sapiens
tatagttgcacaattaacctcttggctgctagcttgatgcaaacatatgtaacaatacacaaatttaaaaatttttttattctacataaaagctgtcaaagttttgacacatcaaaaatgcaaaataatggaatatactttaaaaaaattagttgcaagtctagcagcaaagcaattaagtgagaacatatttaatattaaaacaaagggaactgtgcatctatagatgaagtccaactaccttaattctactgatacaaacagaaattaaaacattctcccttgagggaaaaaaaaagtgattatttaaaatatgagtaaaagccattgctgccagatgagctccctaggctcagttcctggaagagagacagagggtcgctactcttcttggcctgctcaggagggggcctgggctttggaggggcccgcagagcgctggcataggacatggcgggcttgccccccgcagagctctgggggctactgctattggccgactccgcgatctgcttgttaggcataaggggtggaaactggccaagatgctgcagcacactgtagttgaaggaactggacacctcgaggttctccgacttcagttgatcctcagggggtttgacagtcttgggtggcgctatcaactctctgggctgagctgtcctgctggatccattgcacggaatgttctgataaggagtagatgaggtggtgtttacccaggactccggggatgaaaagttgaaagaagattggttactgtggtcctgaagctctttacactgagccagactgtcttgaggagtgcttacttcttcagaacaaggttgaactgagctagatgagattcttctttggtacaagggccgaccaggtcctctgggctcatactcttctaagctagggagcgaagaagaagatactgttcgagatgacaatgggtgaaatggctcttgaccaatagcatgttgatgattctgtatttgtacaaaagggttct

SEQ ID NO: 339875 - DNA, 1000 bp, Homo Sapiens
ttttttttttttttttcggtattaaaacatttctttattagtatatagacagtaaagcatgaaatagatacaaacattacttataaaaatgttttgaaagaacatttgaaaaatagatgaatgtcttctagccagttaatagcagagaaagaatttagttttggtagctcataagtcagtaaccgtatgccatgtctccagaagtaaaatccgtctgttttccagaaaaatgtgatgtgtgaattttcattttatgtgttattttgcactcattaatgtaaattttagatttaaaaaaatcaagtttatttgctttctaagaaaatggtctcctttcccattcgccagtagattaatatatgttctacggtgtgggtgtgtctttttcccagtcatcttatttttcccatactattgaacaggggaagttgctgataacgtatgccaatatttagtttctctcagtaaagcctacttaaaaatattctaacaccagaaccccaggctcattaaatgacgtaagtctttgtagaaaacatatttagcatgtatctaatatcctcaaagtgctatcagaaaaaaaaaattttcttgctaagtatacaattaatattcctcttcctttgcagtgccatgaaatacatcaataaggggtttcttaagtgattgtctgggtgtcagcttttcctgcttcttcaaatcaggaaaaaaacctgactttttattgcaaacagctctctagcccttcatcaaactgtgcctgctttcaagttagtctttaaggacagtgttgaaaacaattacatactagattctggtatttagagaaagaagatgcctgagtgagttgtctttgattatgttgtgttttatttactatttaaatttctacattaactgaccagactagtggttataaactttaacttattttaatataatagaattgaataattgtatgtattaattttttattaatagagaatagaaaggtcagtat

SEQ ID NO: 339876 - DNA, 1000 bp, Homo Sapiens
ctgcttaacccataaaactttatttaaaaaatttaactagatggtacaaaacattcattggtatgcacataattctgtatagttttgttattaaatgctaaatgacagtgataacaatggcttaagctttacagtattcttgtagttccctagtaccacttagtatttaaatattgtcatattagcttcagattatcatgtaaatgacggtagaggaataagagaaaaggctttcattggttatcagttttaaattctgaacaaaagagaccatacactgctcactacaagaatgcaattttctaagaaaatgtagtttaaaatgttattctgaatatctgccaaagaattatattgttattactagctagaaccaagatgttgaagaaagcagtttctacattctggatgtagtaaacaagcctgcctgtgtaatccaattatctcttcactaatgagtagataaggtgcctgttatagatgttctggtatataaagaaaaaatgtaggccaagtgtggtggctcacgcatgtaatcccagcactttgggagaccaaggtgggtggatcacttgaggtcaggagtttgagaccagcccagtcaatatggcgaaaccccgtctctaccaaaaatacaaaaagttagctgggtgtggtgacagatgtctgtggtcccagctactaaggaggctgaggcaggagaattgcttgaaaacctgcaaggcggagattggagagagccaagatcgagccactgcactgtagcctgggcagcacagtgagactccgtcatatatatatatatatagcacttcattaccagaggcctcttggcctgttgaaaaatgaaaccaaatattgaaaattaaatcagagtttaaagcagctattttggaagagctgccattaggtagaaagtatcaaaatgtacaaaagaaagttgtatgggagttgagtggaaggtaggatttaagagcagcactgcccaataaaacttcct

SEQ ID NO: 339877 - DNA, 941 bp, Homo Sapiens
gtttttttttttttttttttgtaaaatatgtgagctttattacatgttaaagaaaataaagataatatgaccccaaatttatttgtcaaagttacaataaaatatttttaaacatatacaaaattagatataacggatgccttgttcaataaaggtacatgatatattatttgaatacaggataaaacaaagatacgtttaatgattttcgtctcattttaaagtcaccttattgaacgatacatcatgaaatctatagttgtacatctaggaaatttaccaatggagctctcttctactggtgtgtatattttaatttgtctcatatgggtgtctcttccattcaggtgattggctagaacagcaatctgtatcatgaatgaacgagttggcttcttatgattgtcagttaagggaacatgaatccagccacttggttccaccaactcaagttgccgaatttcttgtaggttgtgaaaattatttcctactctgactgagatcttgcttggagtatagctttcatcagatttgtagtctgcataaatacataatgtcttcactgttgtttttcttctgaattggatgttcactaaatgaggctgggaaccatctgattgccaataagtttctagattgtcatctcgtaactgatccactccaaatcctggtttgcaagatgagagtgaccaaacagcttgtgacccaatttcccgtactgttccagtcctttccaactgcttggggtcagcaccaggaggtgtcttgtttggtgtagtcatttttaaaatattctgcaagttaggtgagatctagggcgagactattcaacctgcaaccatcattactaactgaatgtcctgttacagtttccagacctggctgcttgccgaaactcagattctcggcacctccagcagctggcttcgccaacggccccc

SEQ ID NO: 339878 - DNA, 1000 bp, Homo Sapiens; identical to SEQ ID NO: 159256

SEQ ID NO: 339879 - DNA, 1000 bp, Homo Sapiens
taggtagatagcttatttttactgcttgccaacaaaattgatcctgaagcccaacggccttatgccaaatggttccctccccactgctgtccatcctgggctgccactcccaaaactgccagtaccaggtgtcactgattgactagtcaaattcctggacaaaggggctacacactccaggctggttgtggaacttttgttttgagatggagttttgctcgtcacccaggctggagtgcagttgtgcgttctcagctcactgccacctctgccttcctgggatcaagcgattctcctgcctcagcctcccaagtagctgggattacaggcatacaccaccaagcctggttaatttttgtatttttagtagagacggagtttctccatgttggccaggctggtcttgaactcctgacctcagatgatccacccacctcacctcccaaagtgctgggattacaggcatgagccaccatgcccggcctggttgtggaacttcacgggaatttattttgtcattacaatgttggcaagatatttttttcgtgtgctgtaaactgaggttctgtcttggagtttatgtcatgtcaccaggtcctgtgctgaagggcatttgcacatcttttgtggcttctctcaggaaaatgtgggccttggcgacatccaatgctagtgctattccccttctcccctagagttacagaattataaccaccaggggacacctacaggccaggccaggccaggatcctggtgctgcttcagcctactgtggcctggaagggtccctgcctgctgaggcctaagatcctgacttggctaaaggaggggagggggcaggctgtggtatctagggtccatccccgcatcctgctcggtgccacctgacagatgtcatgccccaggtaggtatgtgccctgaaccttgccgggtgcacgtgcctgaacgtggcaccgtacccagctgggtaaaaacggctcgagcacggaagccaaagga

SEQ ID NO: 339880 - DNA, 1000 bp, Homo Sapiens
ttttttttttttttttatcaaacaaataagttttattggcatctaaaaacaaaattcacccaacattgaaacgtactttaatatttatgttgttgttttcttgtttcttttttactcactgcagtatgaggaacaaatcacaaacacttactttggagaaacagagaccgtagtgtagattttacaaaatcactttttaaaatctctgtattgtgctcctcaaatacctagagccagtctttgcataaaatatcacagctttatctataaccttaaaattctgcagcagcctaaagatatggataagatataccaccacttgctattctgaaatatatctattaccatatccaacctaatgatagtatctaaaaaattctttcttccataggaagtctctgacaagctgttattcatttccttgacgttaaaagaatctggggccaacatttgtattttatcagaaaaaaataaaaaaaaagtttacctaccatgttcatattaagaacaatgtctatacaagtcagttgtacaattattttaagagaaaggtgaacatgaacatcagattaacttaattctggcagacaaaagtgaacaactatggtccagtcagccattatctattacagagagatgacaactttacaaaaggtatcttttacctactgagtgatgattatgtcccctcagtttctgtgctttctaccactggttcactttctatatcagcaactgtgtcactcttctccttgtttatttcatttgaagatgtcagtttttcataaagttcaggatcattctgtactggtataggtggtggctgagcatgtctctctgtattttcaccattaacctgaggcacattatcaccttttcgttgagaagtggccccttcaaaataatcaaaaacccgagcatgaggagggggaacccaagtgttttgaattctgtctcgtccaagacgatttccattcatttctctgcagaaatcaaaatc

SEQ ID NO: 339881 - DNA, 1000 bp, Homo Sapiens
tgtttttttttttttttttttaagatgtactaaatcacttttaatcataatcccctgtaaaagctaaagctattcatttaacaggaactcttcttttccttaagatgtcacaagactgtcatgttgtggcacatattgctagcaggagacaattggaaatatgaacagatacttgaattcatattatagacagacaaaaccagcatggatgccacacatcagttcctttgcagtttcatggagagcctatttgtggttgctcaggtggggtcatacattgcttgcagaaattgcctgattatagatctatgaaaaatgaattgggaatgaaatctttccaagacacctctgtgtagcaaagaaatgttgcttcatgtgtgctaagttcagatcataatatttcacatatttatatatagagaattgctttcaaatttaacccaacataagcaacaggatttggaagtgattttatgtatttctaaaaacagttttcttttttctagaggtcactcccaaacactgatatatcactatagtttgagtgtatggattcagtaatcaaagttgttattgcaaaagagtcaggtagctggacaatttttatggggaatccccactttagtagaggcatttaacattggatttctagaataacccacaatgcagctaagggacatgatcttcaaacatctttggctactgtttcttggtaatgcagtaatctttgaaagacaaaatatagagcaaccattgctactgtgtttccttctgccttgtaatactacaaactttcctgaaaatgagtaataagaaaaccacaagctgttggagagacaaatctctgatccccaagtaaccaatttaaaatgggtgaataaattccattcagtgtcttgtcagtgaagatatcctaatttccccaaaaacctatgcaaagcagttttaatattctatcctttttcccccattcttcttaatatttattatttggtgatca

SEQ ID NO: 339882 - DNA, 1000 bp, Homo Sapiens; identical to SEQ ID NO: 246498

SEQ ID NO: 339883 - DNA, 1000 bp, Homo Sapiens; identical to SEQ ID NO: 159257

SEQ ID NO: 339884 - DNA, 1000 bp, Homo Sapiens
ccaagtctactttttattgtttatgccagcgctgacaatagaaatacgtgagctacatatataaattttcctataacaattttaaaaacaaaaaagtgttattcattttaatgtattttatttgaaccaatatatctaaaatattatttcaatatgtactcaatatgaaaaattgagatacttaacttttttaaaataactaagtcttcagaatcttgtgttttacaaaaaaacaccatttgaatttggactagccacatttcagtgctcaataactcaatttcaagtgctcaacaggttgctagtgactaccatatattagtacaggtctagtccattatttcccacatttagcagtagtaattgctttcttttactcattctttaaacatatgaagtgagagccgggcatggtggctcacgcctgcaatcccagcaccttgggaggccgaggcaggtggatcacctgaggtcaggagttgagaccagcctggccaacatggtgaaaccccatctccactaaaaatacaaaaatcaacctggtgtggtggcgggcgcctgtaatcccagccactcggaagtctgagggaggagaatggcttgaacccgggaggcagagcttgcagtgagccgagactgtgccactgcacgccagcctgggcgaaagagcgagactccgtctcaaaaaaaaaaaaaaaaaaaggtgcataccatgggtactataatatagagatagagaggtcaactaaataaaatgtggacctacattttaacttcctgaatacattatcgtcattatagtgtaattaatattccaatcccaatgtgtagagctttggcaacatccacaagttttaatatgtagaaattttctttttttctttgagatagagttttgctcttgttgcccaggctggagtgcaatggcgtgatctcggctcactgcaacctctgcctcccgggcccaagtgattctcctgtctcagctgcccgagtagct

SEQ ID NO: 339885 - DNA, 1000 bp, Homo Sapiens
ttttttttttttttttgtgatggagtttcgctcttgtcacccaggctggagtgcagtggtgcgatctcggctcactgcaacttccacctcccaggttcaagcgattttcctgcctcagcttcctgagtagctgggattacaggtgtgcgccaccacatctggctaattttgtatttttagtagagacggggtttcactgttttggccaggctggtttcgaactcatgacctcaagttatccacttgcctcagcctcccaaaatgctgggattacaggcctgagccaccatgcctgacctaatgttttactttggcagtgttggtatacatacaagggctaacggtatggggtcccaatattatactataaaaccatttaatcaaatttttgaaaagtcggaaaaactgtgtgtattctaaagtcactggaaattaaaagaaaaatatattccagtagtgacttacagatgaaaatgatgctgacaatagacagtaatctgtttttccatgtctaggtttgtgagtttctgatataattatttctctatacatgtgatatgaaagaaagaaactatcagtctgtcctctatcccagtccattttccctctatgtaacaagtctttgacttacatcctttctttgaacttactgtgtaatattagagcacaagattcatgctactctttatcaaataatcttgcagtccttgaaaagaattcaaagaatttaagccactgacgtcctaatcttggtaaataacactaaaaacaaattcttgagccaacttcggtagcaaattctctacagagcatctttctctgtgaacatctttatacatgtgtattaaagttaggctggttagtcactcttaccaacctcctggtcttacagaatgatcaagaaagtatttgttcatctatgatagagcaagaactgtgactgttttaaagctaagacaacacaacacatttctcccttgccagccaaggtggcagtgga

SEQ ID NO: 339886 - DNA, 1000 bp, Homo Sapiens; identical to SEQ ID NO: 159258

SEQ ID NO: 339887 - DNA, 1000 bp, Homo Sapiens
ttttttttttttttttgtcaataaataattccactttaatggcaaagtaataatttagacagatacagggtgcacatttgcaaaaaaatatatgcaagctggtttacaagctagaggaacaataaaccaatagaaaatacatcatccagttaagtccattgacaccaagtacttattgttggggctttacaaagactacaaaacttttcagatgatttatttcactgtttctgcctatttacatgatatgttacatcaaaatgtacaaaatataaaatgtatacagacaaatgtttcacaaactagtttaagttgtaaactaggtggacctactgggatgtattgcaggaaattctgtttatgctcatgtttggactgtgtttctcaaaatggcagggaaagattagcaattttcttagatcacatattatacaagggaaactagtcactcatccagctacatatattgatgtttcacaacagatttgatccatgtttgaggcttcaaagtcagggtgacaattctatgtgcataaattcagttcggatttcccttagggcaatagcaccgtgtaaggacctattgactttgtgacactctgaaaactgcacagatgtttcgtggtgttgttgttctatagcaactgacccattggtggtcacagagagtagcaccaaatacacgtcctaaaagtaacacattttcacacactcatagaagaagtctataccatggcctagcccttgggtttcataaacttaaaacctgtcctttgtgtgtggtggtaacttctccaatgactgatcagttttcatgcactctctttaaagcctgccatgacagatgtactttcagacagttttacttatccaaaaatatattggcttcatgtacagttttgaagcatgctcactctagcactgatagctcctgcatagtcaaaaacaactgtaaatacaggacaaacacaccagataatacagctttgagggtttgcat

SEQ ID NO: 339888 - DNA, 1000 bp, Homo Sapiens; identical to SEQ ID NO: 159259

SEQ ID NO: 339889 - DNA, 1000 bp, Homo Sapiens; identical to SEQ ID NO: 159260

SEQ ID NO: 339890 - DNA, 1000 bp, Homo Sapiens
tttttaaattgccaggttttattaagataattggcaaaatttcaacatacaccttacctgaatgaacacttttaataaaatatgaaggatcactcatgactacaactgaactcaaaagtgagatgtagagcagatttgtaaattgataaatttatttggtaagaaattattcacttcattcgcttcactccatagagaattctttgcagagaaatgttatgaacaagagaacaaagcctgtctctcaccaaagagcacctagagtaagagtttacaatgatgtatctggattatctaattcatcaaagtttatttccttttcaaaaacaactgctgtgtcagtctggagttccctatttcatgttttctaattattacaataaatagtcttcaaaatagaagataaaatgctgctttaagaagtaacagttatttttcaacaccataccatttgtctggaaaatcattgtgttgtaatactggtggtatcttactttgttttgcaagagacatttaagctatttgcagatcagaatagaagagtgggcatttgtcctttaacatcacgtgattttcaaaggtgaaaaaaatttcttttgctaacttacgattcaaagaaaaatggtctcaaattaaagtgtggacaaaactgtagtattcccttttatagccttgcttaggtaagaatgttcactgagtgaataaattaggtttaaaaattaaaacaataatttagatcattttcccacaaagccttatcaaggatttgatggggaaggaagcacttgaaccacagcagttttatctgtaaacactgaacttggccatgcatcattttcatctgcccactggatgttgcacttctcactggcacagtgtttcaacagtggagtgtggttgtcatgaaaatgcagtattgacactataccactataaatgtggtcaaaattagactcagtgttgacattgacattgttgccattgtccttggaaaaggtgt

SEQ ID NO: 339891 - DNA, 1000 bp, Homo Sapiens
ttttttttttttttttttttttttttttttttttttttttttttttttttttttttttttttttaggagagctttgctttttattttaaatctgaatcaactgaaaaatcaaatctgcttttcacaccttggctcttcatgcccaagtagctgtctgctgtggggactgttcaccctccccatgtctgtttcctccgtcactgctgctgcactgtaacagctaggccatcagcaatatcaggaggtagagaggcagaaggagattgtctatctgtgtagtgtatgcttccaggagggacacagtgctgatggaccccaaaatccaagcataactgtagtttaggtccactccactgtcaaagattaagatcagagctacagaaatgatctgcgcaaatatagatgtcatggtcccctcaaaagtctttttggttccaggccagcggatctcccccatggtgctaccgaagatggaggccacagtatcacccacacccacagccaggacaccggcataggggacgagggccctggctcctcccaggctacccttctgtgtgcagggtctggggatcagccagatgggaagagacatgcccaggagcaggtagatgtgtgtcagaatgagtggtccactgtctcgttcatccagaaaaagggacaggaagctccgtagagtgtgacccaaaggcttgatgcggaagtagcgcacatactccaggaagatgaagaccgccaggcatacagtggcggctacatagagcagtggccggtcaaagatgatacctgggatgtaggtggctaccacaatgaggtggaaatactttcgggcgatggtgggggcctggtgcttcttggactcggaagatgaccgcttggcattctggtacagcaccaccaggcaggccaaggtggccagcagagaccaataggctaggaggtagatgcgggtgtctgtctggaagagaaactgaagaagccagagcaggggattcctgcg

SEQ ID NO: 339892 - DNA, 1000 bp, Homo Sapiens
tgtttttttttttttttttgattttaatattttatttaaaccaaaatatcatttcaacatgtaatcaatataaaaaactgttaatacatttccattctttttgtactaagtctttgcaactgctatgtattttacacttagatattatagtggctgccacactggaccatacgttctagagcttccatgctcggattctttaatttggaggttagtgacacagtttcagattgggtttttcaaagacaggggatatgattatgttgtccctgggaagcatgggacgaaatatttggccttggtcactttcaactgaggtgacccaggattctagggcacaaatggataaccagacccacgatacagtcagatgatgttagcttcgtcaatgcaacaaatatgtcaatagctgtctgtatagacgacagagtgatcaaggtgtgaacatatcactgtagtttttggccttcactaaggaatgctaattccttcgtcaatagcagaactagtctttagcactttgactatatcagaattgaaagcatataagcgtgtcacatttggaagagaaactgaactgggtagcaaggaaaaaagcttcaaaattagacttaatttttaaaatgatttaaaaagctaaatgcttattcagtttatcttcgtgtaacagtctaatgctagtcagcaacagattaacaagttatcaagagtcatcataaccttcatttaactcttgggaagcttttaattatttacaactttctaagcaataaagtcatcatttccaggaaaagaatgaacacaacctgtggttaatagaacttgaagccaagttttttttaacaaaaaatttattaccaaaatacaatattaaagtcaatacatgacaaactcctgtaaagcaaaataaattattctaacattgtacagtatttccaaaggtagttaaagaagcactacagaccttgcctcactgttctgaacagatgaactgctctcc

SEQ ID NO: 339893 - DNA, 1000 bp, Homo Sapiens
caggcaacaagagtgaaactctgtctcaaacaaaaaaaaaaaaaagaagaatctgctaaatttcattaagttcagtaaaggtagtctagttagaaaccaattttttaaagttcttctaactaaatgtgaaactttccacattcctcctcattcataagagatccactctagaaatctccagatatcaagaaaggcaaaaaatagacgttgtacccccgaaaagcaaggaaaacacttcatttggagtgatacaagtgagattaaatagccttggcttctggggtggcagggctattccccagggattggttaactaggtacttgtcattcttgaaacaggcacacatatcatgcatgactgaagaaacagagatgatgactttaccaattacagcatcagaagtgctaccaaaaggatctgtcataggcaagaggtcagggagcagaagagaagtgtcaggagatttgagtccctcaattagtttttctggtgcatcaggtacttgaagaggaatgaaaggatcagacacgcttagaagcgggaggccagagtccacagtctgcccacccttccttttttcagcagttccagcagaaaatgaggtcgtagcaaaagcatcaccttgggttgattgaaagcctgggatcaaactctcagctgagcctccaagcttctcgggatgtttgccttccccaagcttggcaaagtccttgtttagcagttcttcagctgtgagtttggagaaattatcgtcatcaaagggattccacgtagacccttctgaaggattataaacgttttgttgagaggtccgaggagagcctgatggagtggtggttgcagacttggacttattgagactggcctcagctgcagctgcctggagcagctgggttgatttgctggcagggaccccaaagactgcactgtgggttacgtcactgagaatacgcctgtgcccagcacgttgggttttgggggatgagggtggagtgagag

SEQ ID NO: 339894 - DNA, 1000 bp, Homo Sapiens
ctgctcattctgtcattttattacccaattatccattacatttccaatcactttacataaccaagcattttcatcgttgtcacactattgtaaaccacatcagcaagttaatacataaagctttgcatttcaaaaaactagacactttagtaacaatattacaaaggttttagcttcaaaaataactgaaaatgaaaaaaataaacttttaaagaattagcatcataaaattaatttattccaataaaaatacaaaataatattatgacattgaccagatatgaaagtccctcccagaaacaactctattaatgattgagaaagcactccttaaagaaaatacgaaataaaatgaaaaatatgtaaatatgtttaatttttttcttagcaaaaaatctttctaaaaataacaatgaaaatttgtctcagtacaaaggctacattactattgaaaaaataccagcatgaagaaaaggtacatatttgacagtagaaaaatgatttcagtgaatcacaatgtctaaagtttgcaatgaaaataaatctgcaataaagatttatgccttttttcttttcttttttttttctattttttatacaaacagtacaaacagtattgcacataacaacaaatagtcgaggttaggttatagccttcaaaaaatcgactagttcaagtgtcacaccaaggaaaggccacagcaggacctgtgttacccaggggcttcccagtcaagttgcaggtcagaacacctctgtgttttaaaaaataatttttttgaaggaccctctcttttaatataacattaacaacttgggggcacatttatttacaaaacaaaagggaacatgttataatttaataaactaaaaaagttctctttaaaaaaatacaaacagaagaactctttcacaatcctggtcagtcgcgcacaatcaacacttgattagaaatatacaaattaagggaaagtagtttccaccatctattcacaacttt

SEQ ID NO: 339895 - DNA, 1000 bp, Homo Sapiens
ttttttttttttttttgcagcggtgtaacaaattttaattcaaaatagacactctgaaaacaataggtaaaaaaaaaaaatgttcaacaagctctctttgaatttacaacagagtacaccaacaatcataaaccggtttcacaactgcctcaaatatgaacattatagcaattacatgcaagtattatattttttaaaatccacatagtaacattatgtttctcagaggctgtcacatcctccaaatatttctacctaaagatagagtgaaggggttcctctgctgtgtaccaccagaaatatgacttaccatctaaactggctggtctccatgactggttctggtgctttaagttttaatatcgtgtggggaaaaaaacgaggtttaacatccacaggacagtgacgacaatggagattctttaacaatatgccatcccatcgacccggacacagcttccagcctaaaccagctagagaaaagcccgtttctccactaaacatgaccttcagaaaatgtggtcaaagacttactgtaccaaccatggagactgagatctcagtctgtaaacttcgccatgtcccctgaaaccctatgctgaaatttaagttagttttcacactcaggggcaataattttattcctgagtatcatagaccttccctttcactagtttatgagtagttaagttaggagaagagttttggggtgtattctttcaatgtttattctaaaggcactaaaaatttattgttttacctctgaacggagaaatgacttagcatatcaaaagggaaaatctacactgaaaaatatttctgcatctacagaataaatttatttgtaaaataactcttgatgtatgagctacataccagcataccagatgtcaaattcagtctacttttaacaaataaaaacatttgattttctatgagttatggttaaaaaaaaaaaacagctattaggataaacctaaaaaaatacagatctaaatta

SEQ ID NO: 339896 - DNA, 1000 bp, Homo Sapiens; identical to SEQ ID NO: 159262

SEQ ID NO: 339897 - DNA, 1000 bp, Homo Sapiens
ttttttttttttttttttttttttttttttttttttttttttttttttttttttttttttttttttttcgtgtttaagttttttactctccaaatgtaatacaattcttcagctaaaacaggaataatgagacaaaatggttcgaaaagtacaatagaaaaatattgttcactggtttatttttccaaatgagcatcaggctatttacaaatacgcagccctccaatgacgtgtattaaaatggcaagtctatcactgtttgaaatctaaatgaaaacaaatttattaaggcacatttgatctgagaatttaactttctggtataatgacagattcatttcacttttgtccccaaaacacatgagcaccaaaattgtcaaagaacacttaatatttagtaaaacagtaaggaatataaaaattaaggaggggaaaaagcgtttccaaaaggaaatctttggagatcggtttactgcaaataaaacagactaaacacactcccgatacacataaataatactaactaacaggtactcaagaaatggcagagctctgaacaacagatattaaataaattaaaggtatttcagatacaaaggataaaacaaaacagtaatgaaagaatgaaaaccatctccacccacataacacagacaggatgaaaggaacaaaaccaaatacatttttccccaacgttttgattagggtgtatgtgtgtgtgtttcagtctgtgtacatcagatttattgtaataattcatctttgtcattctaaacattaatattttaccctttaaagagaagggtcaagaagagaaaatgccaaatccttcttgaaatttaatgccaggtctatttaggccgaatgaactaccacgagaacagccacatacctcactgtgccttcttcacgccccttgctttaaaacctacgtggccagctgggcttgcatggtgaaaccccgtctctactaaaaatacaaaaaaactagctgggcgtg

SEQ ID NO: 339898 - DNA, 1000 bp, Homo Sapiens
tttttttttttggagtaggtaacttcttattcctttattttcattttttcttttttgtatttttttaattcttaaatttaagtaaaaaatttttaatttataggggttttctggtaaaaactggaaagcctgctagacaaattctaaaagagctgtgatactcctttattttctgaataaacttccttccactttactctgttggcttgctcttgtagatcttcctgtacaaagccaagaatccacgtggcctcccacgctgaaccccaattttggggctcaccctgtgacacagccagaggcaaatggttccatgtccctcctattcctctttgcgcctggatgggatccggagggctctaggcttggctgctgtggccaccagatgaggctctatgaggtctgcaggggtcttgccagctccagatggacattccctgagatgctgttaggccacctggactggggccccctgtggcatccctggcatggacacataatgcccagcaaaggcatcatcaaagttccattactttagtgctggaaggcaaaccagatggcaacttgtttgcagagaaagaaactgagacccaaagaagggtcagccaaagccaggactcaagggtcaagggctggtgttgatacttcagctgctgagtggcaggagtccctttttgctgcccttctcccagagttccataatgaggtgaggatgggtctccttcagggcttggtagagtccatctttgcacttccggtcccaggactggctcaagctgaacagcttccgcatctggctgggcctcgtgttctcagccagcaccctctcgtactgctcctggctcagcacctgtccatgcagtttgtccaagacaacctccaccgatgtcactcgggctatcagctgctctcgatactggtccacaaagtgcagcaactgcggggcatccagaggtgaaggtacggctatgcgggctggagggatcagagtagttgcagg

SEQ ID NO: 339899 - DNA, 1000 bp, Homo Sapiens
ttttttttttttttttttttttttttttttttttttttttttttttttttttttttttttttttttttttttttttttttttttttttttttttttttttttttttttttttttttttttttttttttttttttttttttttttttttttttttttttttcaaaaagaatgatacaacttttattttccatggattttacagatacttttgctacatagtttatgtatttttatgagatttttttcatttgtatgaagttcattcagccttatacaattttaaggtgatatgtttggtagtgtatctataatctttaaaaagtttagagtttttggaatgtacagtatatgaggtaaaatcaagattacattaaaaattgttttctcctctgcactaattttgcagtgaggctcaaatggcaagtatactattaaatgacatttactatcaaaaataggaagttcatttgaattactatgaaaaacataagccactgtaacttgacacagtggcacattttaccattttagacattcaactatatataaatctctgggctattacactcagactcatttgtactgccaaatgtggcactttaaagaagtttctagaaaacaatcgcaatcactgttgtttctggggaaggttatcaccctatacataagagattaaatttaaataaaatgtaaacatacagtatattatagtgacaggtcattcttaccacttagaaaggccaagtttatccatttcttttttgaacaagggttaatgtttttctacagcacagatcatttgacataaaactgttacaatacatgcccattctattataaaagaaattcttcagagatcttcaaagcacaaaaaatacgttcttttttcaaagactgacagaagtgcttaataatcactaaaatgccaacctcagcaactaaaaattagtgattcgctatcctaaaattcaaataataaattaaaaaagctagttacagg

SEQ ID NO: 339900 - DNA, 1000 bp, Homo Sapiens
actgttaaaagatttattgcagtaatacaataaaagtttagaaaacatttgtatgactcaaactggtttggaagttgcagagcaatggggaattcctgcaacatgatactgtgaggagattctcggacactagtcctctaacagcatgccactgaatgctcttccccaaattgagtccttacatgagtcccgtccactctacccaatggtgatatactgtttttcccccttacagatgtgcaaaacttttcttatattccataaccaaaaaatgtctttaacagaccattttaagcagcctgtttggtgcctgtgggtttttattagtattactttgtttcagtaaatcattttaaaatggaaaacatgaccaagttctatggctttttgtttaaacaaaataccagcttcaattttttaaaaagctgtttacatatggttctggcacctacatgaaagattttaatgagcagcaaaaagagtagaaaaaacagtggttgaaatgtatacttaagagtatttacagggtggatccagtgcaaaataatgaaacccaaaatatttcagcagtgtaagccagtatgttggtgttcaaaaccacaaaagggttcgatcacttaaccctatgtaaagtgcctctagttgatattaacaacaacaaacaaaatatatcctatccataaagttcccacatctttgtaaattttgtggaagtactctagatgagtttgtgatctctggattctattctttagcttcatctctcattcatggtttcataagaggcttaagaaaaccatgactgttgtgcatctctcagctgaagtcagtctccaccaccaagctccaaatcccactcttacaactcgtgagactaagctcttacttctgagggttttaagtagctagacaactcttacaagatcgttaagtttatttatctgttcaagtctaccatcttcactctctacgaactccagaactggatgggaaaatggaa

SEQ ID NO: 339901 - DNA, 1000 bp, Homo Sapiens
ttttttttttttttttccagtgacagatttttttttttatatttaaaaacaaaaccaacctccccccaaataacccccaaacaaacaaaaaaacagattaaataaaatttacagtgaatatacccagcaaacatctgtatgtgcaattaaatactgtgtctgttactgcggcacgaacctcaaacaaacaatatacaagtgttctgggggggccaggggaatcccaagttttaactctgtggggtctaggaagacaagatggggaagtgagagaatggggcaatcaattttgtttatcttaattctgtccatataaatatattcataaagaccaaaaaaggaaaggaagcttgggatgttaaggtaataggaggacagtgtgggactttcccaattctacctgaccaaaaaatgagaaattaattttatgataggagaagagatttaaaaaaatgatagaagaggatggaagccaggcacagtggctcacgcctgtaatcccagcactctggaaggccaaggcaggtggatcacctgaggtcaggagtttgaggccagcctggccaacatggtgaaactccgtctctactaaaaatacaaaaattagccgggcatggtggcgcgtgtctgtagtgccagctacttgggaggctgaggcaggagaatcacctgaacccaggagctggaggttgcagttagccaagatcgtgctactgcactccagctggggtgacaagagcgaaactccgtctcaaaaaaaaaaaaaaaaaaaaaaagaagaggatgggaagaagagtgatgcaaggggggtcaaccagggaaaaagagaggacccatggcaggggagcaagaaggagtccaatgccagtgtaggtatctgtgtttccatcttcatcactgtcttaggttccagtttaacatcagtttccttacttcctgcctctgtccatggtctgtcaggatccttcaaccccctccaccctgcccttgctccttctgt

SEQ ID NO: 339902 - DNA, 1000 bp, Homo Sapiens
gaccatatatggtttgtttcatatagttgggtaacattaaagtatagcttgtcaagtgttccacacattgatataaaaactaccttatatacttgttcagagtaccagcaggtactagatggtctgaaggcagaatacatttagacatgcgtttcaatgtatgaatgagtgtgtgctagagaggaagtgattacatctacttcagaagaaatactcagtgggtcatttgaggtggtattttgacagatatccaagaaaaggtcgaggtacatctgcttccattgttggaattctttagatgtcaagtctggattgtctaggactttatcgataatggctacttccccttctctggcctttaaagtgcttttgagaattctcagccggtgtagtttttcattcattacaggatcattacatctttttataaatgatagcttgtattccatcttggttgaaatacgatgttctcctagtggtgacagactggcctgctccagtgccctgtataaatcttgcaatgagtctcctaacttttcttctctgctttcacttttttctcctatgttttcccctgctgcctccccttcctcctcctcctcctcctcctcttcctccacctctgggggttgcacgtcatcctgtgggtcacaggcactaactggagcattcagacagcaatggttgaacccgctatctcgaggcagagtaaaacttcgaggcttgcccccatttccatttagcacttgcatcctctcactctcagctaaggggtatggcccatagtgatcctgcaggtggcatttctgagttggcagggtagactgccgcctgtgctctggggagatggccgcggagtcagagaagacagaatcctccaggggcagagtctgaagatagtgtaagcctgaacttgtcagtggcgtctcaattaaatcctgccaggagcggcgctgactggctgtcttgcgaatgggagacactgcactgctcccagtta

SEQ ID NO: 339903 - DNA, 1000 bp, Homo Sapiens
ttttttttttttttttcacaacacaattcagctatatatttaatttaaaagacttcatgaaattgtgggaggggtaagggggaaaaaagaaggagaaaggaaggaccccaacaacagtaagactccttaccatctacatctcatctgtgtttctcttattataacccatgaaatatctctacctgcagtgcttattacaaatacaaataccatcctcactcattttcaacagctacctcactaattcttacacacttgacaactttagaactttgtccaattattatttggccaatgcttgaaaatgatttaaaggcataaccccaagtcttagaacagcttagagcaggagtataaatattcagattccaaagacaaggactactacccacatcaacctgcctgtgacacctcacaactaagaaaccagtttttagtagatcaaagatgaaaaggtgaaacgtacagctcacaaatcaaatatctgggcactagagggaataggtgtggttggaaaaataacccttctggaattttctcagcatatttttaaatggcagtaacaacatttcttccactcctaaaattaattttaatagtgaactgaggtaacattttttgtcttagcagatagctcaattccattgacaactgacttgtcatctttattaatttttacaaatgcatgtctcctaatatgaaaaggttgattttcactttattgtgtgctttgcacatttacagcagcaacaggaagagcttctactgaatagattttagtcttcaaaaatgtgactgcatcttccatctctagtttgtccatctcccagttattgaccaagatcacatgaaaacccattgcattcaaatgccgcattttcatagcaaggaatcctctggggtggcttgaacccaaacaataagcagatctggaaacacatagcacagctactctttgaatatctgtagcagaagttgtatccacatcagaaagtggtag

SEQ ID NO: 339904 - DNA, 1000 bp, Homo Sapiens; identical to SEQ ID NO: 159264

SEQ ID NO: 339905 - DNA, 1000 bp, Homo Sapiens
cttttaaattcataacaaacattaaataatttttatgagtttcatcttagatgagacttgcctttaaatacatgtttgtgttttctgtggaagttacctatatgtcttcaaaaacctgactggtctaatctagaaaaattactctttgagacagtcatgtttctttgttcttcttttcctttttttcttttttttctttttttagaaaaaagaaagacaaaacagcaataaacattttagctctttaatgagcaaagatcatgtttcttagcattggactaatagtcattatccagattatctttatttcacacaatgaccagtgacatggccaagatgtacaaagttggttccatcaagtagtatacaattttttgtataataatctttcattcttgaaaaagagtaactgaaaagaaaggtttctgttactgcagttagtttgtcagagaaagttctttgcattatcttataaactatcaaaattgctagtcatctgaaaaaatgtaaaaaaaaaatcacataactttagtctaatagaaatatagtacaggtgagagagaaagtatttatcaggatgtgctctttaagtccatctcatttgtttttcaatataaatgtacatctgattacatatacaaacatttggaaaggtctgtgatatactgttactggtaaacaacagggggatgaagagtttcctgtggtctgagaatattcgtttaaaatcacacatatgtgtaagaaagactaaaatcctccagatgttgactctcctaggttctgtatctacgttgtactctactgagattgcgtgagtaaattccagtgaatgaacctcagtgagaaagataagtgatgtaaagagggatataactttataatgaattgttattagtaaacattttgtcatgcagcatgagtaaatcaaagaactcagaactataatcagagtggtaatacgggggcatcctcatatcatgaaagactgttgcaagta

SEQ ID NO: 339906 - DNA, 1000 bp, Homo Sapiens
ttttttttttttttttttttttttttttttttttttacaaaccattcattttatttcctgtattgggtttatacaaacttgcaagatacaaatgcagaactcactgggattcttcagtacctaaatctaaaaagaatgctgctgaaagggggaagcaaactctcacctgtttcagtcaggccatccctcctcctggggagggggctcattggctagaaagatgctaaggggatgctacagctgtttgtcccctgacagagattccatctatctaaccttcacccttcttctaaggccacttttatgctaaataaagacactgagataataaatttccttgtacagtttattgtctaatactagcaaatcaaattggccccaatatgtgcataaatagatatacgtgtgtgtgtgtgtgtgtgtgtatatatatatatatatataatgtgtgtgtatatcatattttttcttagttttaagagctgccaggtagagggtgcctaaaggggaaaggaattggttccctcttgccgtagccagccctgcccaagaacatgcctctcccaaaggccggagagcaagtgtgccacttgtgcccttagaaaatcttcaaagtgacagtagcagtatttgactgcagcctcttggttattgatcatggaggtaatgtgctcattgagaaggccctggatgaataatcagagcttccccaggtgggtcacttagctctggacccccatctgggctctgttcattcagagcaggatgttctaggctggcgacagggtgtcagtaaatgccccaggtgggaggccaggcttcaaacgctggccaggagctctgctctagattcccaagcccttgatttcagacctagacaaagacttccatcctgcccaaatccttgcaaggccagagaccctttccccactttgatggttgacaaaggctaagcagcttggaaggctgagctggcttagttcggtgccccagtggcagc

SEQ ID NO: 339907 - DNA, 1000 bp, Homo Sapiens; identical to SEQ ID NO: 159267

SEQ ID NO: 339908 - DNA, 1000 bp, Homo Sapiens
tttttttttttttttttttttttttttttacagtgaatagcatgtctttattctatttacagtatatttgttataaatataatacatttttgaaaagcttatttttaattaacttgagatttatattttaaacagatcaactcaatagttaacgttatataataaagaatatggtaattttaatgacaaaaattgtattgtgaaatagcgcactctatactgagatgaatgaggggaaaaaagtcaaaactcctttcaaaactatattcaaagcatcagaaaaaatttttttttctttttacaaagttatgtataagtcatagggaccaccaaatactgaaatatgaagactctatgaccaaagttcaaaactgattttaaggaactgtgtgaagcaagacaggaaaatttgtatttaacactctatagaacttcacagtaaagctggaatttagagactaatggcttaacaggagtactgccaacaaggcctttcctttctcagaatcatctcctaatattcgtataccattgacaagttgtaacagcagacttagactttgtgttttcttaagatggggcttaataaggtgcacaaatatgctgatatcctgtattatgagcatgtaaattattctcagggtttaaagaaatacagaaaaagaatgttaagtattctcagtccaacgtgctttgcatcatcaacaaaatgacaagtcaaagtattttgcagggatcagatatcaatcaacctccataacaagttaggtatatcaaatactgctgtaaaacccatccagcaaaaactgattattgtggatttcagtacaaatttccaagttgtcacacattactgatgatgatcagggcaggcatggaattctgctgacttgtttcaaacactgtaacttggtccgataacttggcaaataccctaggagttccaaggttataaacacctgtatgaacaaagcatgctttcagctgcagactgtgaatc

SEQ ID NO: 339909 - DNA, 1000 bp, Homo Sapiens; identical to SEQ ID NO: 159269

SEQ ID NO: 339910 - DNA, 1000 bp, Homo Sapiens
tttttttttttttttttttgagaaagagggtttatttagcacatctcagagttacagctcttacagaaagacacttgtctaggcacagcaggtgtgttcaaatttatatgaatgactacttgagttcagacgggattacgtttttcttgcttttgacttatattatttcacacatcttgaattttagagtctaggcttacacatcgtccagtttcttggcatggcttgcttaatctgagctttcaaacttcagattaacctggactgaggctaagagtttataatgaaacccaaaactaagcaagcttcccctggtttcagtttaattgttgaagtcttcataacttcctgggcataggaaacatgtatctggcacattgtagaattagtgatttttttaaaaaggcaaatctgcaatatatacaatagttgactccttgggcatagctattatgcagttgcaaaactggaaatcttcaagaatcctttcatatttcctctttattggtgctaattttccttctgcaccctagtccttagtttggcaagttcctcttctaaacttttaatgtgttccttcaatgtagccttatcttgctgggctttctgattggcttggcttcgtgcttcttcaatcttcctttcataccacttttccatctgggtagaaacagcctcaaaaaaatactgggtaagctccagagcttgggaggtgtcccgaatgtgagggccagtctgctcgctgcctgtggctggtggcggctgcccacaggtgctgctggctgcgggttgctgggcacgatgccttgttggcccactcttcccagacttcttagtttgagtgcctctgttgacgcagggcccagcctgctgatcagatctggctgcctcattcatgggtagcaaggctgtctggaccttgacgtttctcagtcgggagcctgtacagtcagaagacgacagctcctgctggagtctctgggtagcagtggagttgagg

SEQ ID NO: 339911 - DNA, 1000 bp, Homo Sapiens; identical to SEQ ID NO: 159270

SEQ ID NO: 339912 - DNA, 1000 bp, Homo Sapiens; identical to SEQ ID NO: 335809

SEQ ID NO: 339913 - DNA, 1000 bp, Homo Sapiens
agggttgaaatgatgtgcttttatgggaaacaaaaatatccaacaacaataacaaaagcccttcaatctcgccaagttcttaaccagtgacaataaggcaacttccatgattgcgtctggctggggatgattctaaagggtcaggaaagtgaaaagacattggccaaaaagagaagttgcagggagggctgacatcctacatgagaacacagcagacttccctctggcccctcaccctatcaccccttcaatttagaatctccccccaatctacaaagatccttcctgaatttcctcagatgcaatctcttccagaaagctttcctgggtctgctctagctgcatatgacttttcattaacatcacgcacactttctcattccttctccgatcactttctgccttacatccgttatgtttgggtacatgccttacgatacccgctattggtaggcatatccctgagaccgagtcccaggttgactcaccccgtgctcccctccccctcccccattcagtgctcagtattcagcaggtgctcaacatcagaggtgctcagtgagggtttgttcaatttaagtcagttctacatttgccatgtcacatcgccagcctcttgagagtcattattgtcattttcacttcttcatccttcctccatgatctcaaaatggtccgactcaaggcttctccaagaaggaacagcccccaccaaacattacccattcaaggtgaaaggtttggagaggagaagagaggttaagctttctcccctgttcagggaggcgagcaggaagggaagccactgggaaaatccaggatggccatgagcggtgttggccaacacttcattttggaatctcataagcagccactcttccaaaagtttccctgtgaaacatggccaactttgcagcaggagccgaggactggcgggagtatggtatggttgccctgccagcccacagaccagaggcatagaccaagaacctttctttga

SEQ ID NO: 339914 - DNA, 1000 bp, Homo Sapiens
tttttttttaaagtttatcatttatttccaatacattaggataaaaacccactttatgcaactgtaccctttaattcatttcttctgaagaaaagtacaaaagaccagactaaaattgagacaagcatttaaaggaaaatcctttgactcagagtccaaaaccgaactgtaaatggttcattttaccaaaagaattagtttttgtacaaaatataaagaattctacactataaacaaagacggctgtatatgtaattaaattagaattctagtatctgcttttcctctaattcttctggagtacaaacatatttgcaagtcagaaatctaatattctcaatggacagactgtcttagaataagcttttacccttaagatatctggaaagatagtactcattctttcccttggctcaaagtccaatatatcagtaagttttaatttagtttacaaaactctgccatattaacatgaagagcacactaatgcttaatgtttaagcattatcttttaggaagtaatacaacacagagctcaacaccgaatctaaaaggtcacaatctaagtcattattaattcagaaaacttcagcaacttctatctttattgaaaaagaccaaaccaatcccttatctcctactatatcattactctattttcatggcccttctatcaaagaaacagcttaaaataaaacttggttagagttaagtcatagaaaatagttctctagcactagctgaagttcagacttgatcaggaaagcaacttctatacagtaatgattttctgactcagtgtttaagatagtattaacctgacttttatctcttttaacatttgaaatctttgttatctaaaagtctttcccaatagaattataaccatgatagttttaaaggagacaatatattaaaagttgagctggaaccacatagtcctttaatatgattagccagttatccaagtatcaataacgttaatcttttaaatgaaaac

SEQ ID NO: 339915 - DNA, 1000 bp, Homo Sapiens
ttttttttttttttttgttgtaaatagagttaacataatatatttattttaagtgccattcatgcatatcagttctggcagcaacaatcctaatgacacttggaatatttctttacagcactaaacagttacaaataatggttgccgttcatcatagaggcaaaatatgaaatcgtgcaatagcaaaactgtagaaacattaaaacactgactgtccaacagcagtacagagagcaggttgtatctgcacaaaaagccaatgcattttcatcacatatatacaatatagatatgtacacatcaccctctgaatgaacaatatcaaaatactctattccatttgaaattatccccggattgattccctcccacttcaaaggacatctgagcgacacgtatttacaagaacacacatgaatacatttacatttcaaaaactgccacaaatgccagtcggattattctcctgaacagagtgtccccatttgtttacatgcatttactattctttccccctaaagtcttcagtcaatttaagcccaagacagaacttgttctgcattagcaactaccatacaaaatggccactagagggactctctgcacctcaccaggtaaccctgtctggccagggcccacagaaaaggcctgtcctgggctcctggaccacctggatcacaggagagtgggatgggtctgggtgaaggctttgcctccatggccattcttgctaagtttaaattctcataaaaatattcatcactgcaaatcagtaaatgattgccaaatgggaaattcgcttcacacaatttataaaatcatcatcagtggttctactcaaatcactcagtatgagactgcattccaatatccaaattgtttaaagtgcacattgctacccaagcaattaaaacagtttcaaaacagctattttggtgtctagaaaacagtgacttaagcaaaccattgaaaatcacccctcttttttcaagcatttact

SEQ ID NO: 339916 - DNA, 1000 bp, Homo Sapiens
tttttttttttttttgaatatttatagatttatttataatgaaattatggtctaaatatttacaacatataggaaaccagaggataagtttatacaaagccagcctgcaaagtattcaaatgtgcaaaaatgacagttcaatatctcaaactattcctggttcagcagactagctccttcactttcacacatcaatatttgatacaaaaagttattttggcaaaatctgtaatgccaagaaaaaggacaatttgcaatttcagtcattaagtccaaaatcctatagccagcagtcagatctctctgttttagctgcaaccagttctgggagagagagaccactgtatttcatttctgtgatgagttctgaccagttttagtcaagaagttttctctgacccagctgaagacaggatcttagaagggcaataaaaacagtaatggctatgagaccaatgtgcctgaaggtgccagctttggatcaccccaattaaaaaacacaatgaaaaaataatttcattttcctatccaggatccagctatatccaacagttttaaatgagacagcattttccaaaacagaaataatccaaaacaaaacagggatgcagatctgtcagaattaaatactgaaaaggacggtcttaaaatcatttccccactaataaatagtaaggctctgtttgtaaccagttatatatcaaaattgaccaaacagtagtaaaatacaaataaaactttctttatgtcagaactggggctattcacctggaaaaggctgaccaggtcaaatgtgtatgggaacgaccctgttaggatgctttgttggacaagcacatttcaccaactgttaaaaagcttctgagataaatttgtgattctaattaaattttaacagattctatgccactgcagaaataaggatttttgtggttgttaaggaacccctttaagaaaggggggcactgaatctctaacttctgcaaaggtccagatggtt

SEQ ID NO: 339917 - DNA, 1000 bp, Homo Sapiens; identical to SEQ ID NO: 159271

SEQ ID NO: 339918 - DNA, 1000 bp, Homo Sapiens
agtcagaaatatagctttattatcataatatttcataatctaaaaacttctttaattctggaacagaatattccaacttctgtacaactgactggccctgcagaatactggaaaacaatgtctaagcaacttgaaccttgcagataagaacctgtaacctagtttgggaaaaagggaaaaagcaagaaaagcggttcaaaggaagatttcttccctacaagacaaataaaattaaatctactctccatttcaaccttgaacatagtttcccagaaactttggtgatttcttcaaaaaagcaaccgccttaactctaaggtcaacggcccatgtggacaaagaaaatatttaaaaataagacacaaacaggacatggtacttagctcaggccatggtatgttaagtggagtatgcttctgagtaagccatctcccatgttttgacactaaatttatgtctctaaggaggcacaacatacataacacatttctttatatggggtcaaaatttagtgggaacgtaaaaaaacattttaatataataaacaaatctcaaaataattcgtcttgtgaaatgtagagtaggatgacattatggtactttctgaagatcatggggtaccactgtcaaagagagttgccatgccctctatgttagatgaaaatccaaaatgtcagttactttaaataaaacagaaacaagttgtcattgcacacacattacaggacaaagagcatgcaatacaactaacaagtcatgtttttagtatgtaaaaggctaaggtgcaatcatggtataagcatcaataataaataactttagagggggaagttaattctccaaataaataataattataacattacaatttttacaatgttagcctaaacagtgctattcacagcaatgtttttgcccacttgatagctgcttatatatcacatgaatgatctacccccccataaactgaaagtcaaagtgaagattcaagaacattttc

SEQ ID NO: 339919 - DNA, 1000 bp, Homo Sapiens; identical to SEQ ID NO: 159272

SEQ ID NO: 339920 - DNA, 1000 bp, Homo Sapiens
tttttttttttttgctgaattataagtttattttttatcaataaatatttttatacttacattgagtgatgtgtttaacaacaaattgtgacagagctgagtgctcctatcttacagggtcaatgaactacttattaagccttactggtagcactgaatttagcagttctgagaacatgtgaaactatgttaaaactgaaggcactatatatttttacataaaagcttgaacatacagatgaattataacctatgtgaagaaatcttagatataaaactaacttttcaaagatacaaaagaaattaaacaggtttcctgaaattttagttccttggtcctgttcacctctgtggggaaaattcttagttccagtgataactgttctagttactacttttaagtatgtaaatactagaaaggtagtactagtgacatcatcacgtgtattgttatctatggggcaaatgtgtggtgcccagaataaaatatacctcatgcctagggtagggacatcctttccagctcaaacgtgggtagggatgtgggagaataagaatgtgggagaaccaagagaaaaagtggggctgggagagtggagttcccgtagggcataggcctgtgaagtaacactggggcagatatgtatgttatatacaactatttttttaaaaaacttatatccatgttgggagtagatgggtatataacagtttggaaatactatctttggagaatgtatttttgtatttataaatcaacttttaaaaactgtctcattcaaaagggaataaagacctgtgttatcaatgtgtcattttcttctttcctccataactgtaccttgaaaccttactgctgacctgcagaaaatgtgccgcgttatgtacctggctcatcttcaacacactaaccatgaacactaatagccattaggggacatggctacagatactacattggaaagttgtctttaatcacacaggtgttaaactcaatata

SEQ ID NO: 339921 - DNA, 1000 bp, Homo Sapiens
ttttttttttttttttttgctaggaagcacacaggtgacattcggaaagaggagagcgtccaagcccctggtgaattctgtgcatttgcatcctggtgcacttggagcagggagggtgtgttactgaacacagcagtctgttttcctggcaatcagggtgtacatctcagggggcagtgggagcccggaggctctatttgtgccccaatgcttctctcacagcattgtccgggtctgctgacaactggggatatacagagacacaacacagggaatgaaagggtgtgtgtgtgtgtgtgtgtgtgtgtgtacatgtgtgtgttcaaggctaggagggtctaaaaacagtcctaaatgatgaagaacctttgtaatttacccaaactgagaggttattaaatgatcaacctctttgtaaacgtctccccaaccccatccccattgctccatcccagggatgagagaggggctgtattcagagcccacatcccagcatcagggaggagggagtctttggcagcagtgcccaacgtgacgggggctcaaaggcaggctcagggagatcagcagggtatggggggaggtaggcatagagaagagagatcagggtgcggtgggcagctagagcaggctgggggggacccgggacatggagatggggacctgggcactagcctaatcacttgacacgtggttctcattctgtagctggtgccagcgctctatcttcttgtctttatttttcagacactcgtaccagtgttttaagcgctctcccttggcagagatccccagctggcagcctccgatgtaatcattggacttgccgatgtcatagtcccagactgaaatgtccagtgacttctttgccaggtcactgtgtttgatgtcatagaaaaactcctcattgaattcgggattcaaggttttctttttaatttgagtcttgtgtttggccttctttcccatgtccggtttcagccagagcttgacgaatggg

SEQ ID NO: 339922 - DNA, 1000 bp, Homo Sapiens
tttttttttttttttcttggaatcattggtttaatggttctgaataaatggttaagattgatgtttccagccaagtgagatttgggtttagatatagtttgggcttaagtatcctttatctcagattaaatgagacagtgcatgtaaaccacttagaagaatgcctggaacacattaactttcattactaatgtttttggtcattcttaaacattttcacttctgccaccaccctttatgcagtctggcacatagctgtcactcagcaaatgtgagcaaacaaacactagagactttagtctgccaggtctctaacatgcaaagccatggggccaggtccatacactccctccactgagaaaaagacaaatggcttaggctacaaggtttgggtcaccaaggaaagctgtcaaataatgaagtgggtaagcagattcctaaaaattggaaccatttcagcagcagtttcatccacagggagacagagtaaatgctctctcaaatctgtctcacatctatagaaaccttactctatttatggtcttttggcatcttgctctgctatctcacttgagatcactcctatagaactaatagaggaataaatcaaaagcaaaccagtataagtagagacgcaataaaatttggatgtcttgagttctgaggggcttgcacacacttgttaaggcatgcagtgtgtgctaggggcttcagcagggaactccactcaaggacgtggtgtaggaagcaaagacaaaccaacccaagtggtactgaagaggacaagatgggaaggacatttttattttccctaatcttcaggcaacctcaccaagctggaggtcacatgtagctgagtgtgaaaccaagaaaaatacgaagcttcaaaagtactgtgcgttgtatttcttcattctctggcaggctgggagtccaaggtcagtctaggcaggagggctgcttggcctaagcagtcacacaattttcaccgtcttgagca

SEQ ID NO: 339923 - DNA, 1000 bp, Homo Sapiens
ttttttttttttttttttcttttttttttttttttttttttttttttttttttttttttttttttttttttttttgcttgcaaaaaaaaaaacaaaaataagtgcattttatttaaacaacggaacaaacatcagagagcatcccctgcaaagcccccaccccagagcctgctgatggaagcggggctgcaggacgctctgccacaacggcagcatctccaactgcacaaagaccccttgctgccagggccgggcaccggcctagctccttgcctgcctgcctgaggcagccgtggaatcagggcaggggtggcacaggtagaaaagacagatggaaacaatgcccatgaatatacccaaagtgtcccaggaggataaaagccgtcatgaggaccagaagccaacccagtctttttttggcctcctggagaagttgtttttgagacctgagactccagctgaaatggctccctgaggagccccagggagcaggaggggtgttctgaggacagcccctgaggaaaacacagtgcctgcagagggacagcccccagcaccctccggcagggctctggacagctaagcccagtcctgagagggtcaaaaagagagatggaatgctcaagaaaagaggcatttaaaaattaagagaagaaagacaaaaaaaaaagggtctgatctgaggctgaggtattggagatagatgtgggcccagagaaatcgggtcccagggtacacacatgctgggggtctttgtcctgatgaattaagaaccatacacacaacctccttgggagccccgagcagtgcgctgcagggccaaggaaacaaccagctccaaagggactccctgagcctccgaaggcagctcctctaacgcctcccttcctcccaaagggctcccggccctgataccccgcagccaccgcacgccatcagcttgccatgtcaatgacaagagctcgtacaagtccacacattttagcctgagataggttat

SEQ ID NO: 339924 - DNA, 1000 bp, Homo Sapiens; identical to SEQ ID NO: 159273

SEQ ID NO: 339925 - DNA, 1000 bp, Homo Sapiens
ctgagcatataaagacttttatgaattctaacgcccaaccccaacttgagcattcattgcgctggtcctaattcacattcaaacgccctgagaatggagctaacaggatacactgcacccaatctcataggcacacacaggatagatccgaataccactgcaaagacttttaaaatgagctgatattaagacctcagttcacagaaagccaaataaataataaacatcttctgttggatacaaataaaacagagtctcataagataacattcacatgtcgagggtacatatcggaactactgagaatacaaggatgagctgcaaaaatctccacttgtctggcaaatgacaactcagtggacaccaaacactgaataacatgtacagtggaattatctgacaaagactttaaaagagacattataaaaatactcaaatgaggccaggcacggtggctcatgcctgtaatcccagcactttggaaggccgaggcgggtggatcatgaggtcaggagatcgagaccatcctggccaaaatggtgaaaccctgtctctactaaaaatattttttaaaaaaattagccgggcgtgttggcatgcacctgtagtcctagctactcaggaggctgaggcaagagaatcgcttgagcccgggagacagaggctgcagtgagctgagatcacaccactgcactccagcctagatgacagagcgagactccatctcaaaaaaaaaaaaaaaaaaaaaatactcaaatgtgccaggtgtagtggcctgtaatcccagcactttgggaggctgaggtgggtggatcacttgaggccaggagttcaaaaccagcctggccaacatagcaaaactctgtctctactaaaaatacaaaaaattagctgggctgtggtggtgcatgcctgtaatcccagctactcaggaggctgaggcacaataatcgcttgaaccaggaggcagaggttgcagtgagctgagatcgcaccactg

SEQ ID NO: 339926 - DNA, 1000 bp, Homo Sapiens
ttttttttttttttttcttttttttttttttttttgattttccattttttttattctagtactacagtttacagccattagatgataaacaataaaacatcactttttagaaaatccatatccaaagccaacctcaagtacacagtaatttaagttaaatccactttttaaaaaaatttcctaataggtttggtacttaatttttctgttttacacacataactggaacttgtaaatgggcaactaccttcttatatgtggaattatagttttttcttgtcctttcccccaaaccacatatattaaatcatgggacattatatatcaaccctcacctaggctttgggttattctataaggaaaagcctttgtcagagtttggctgtctccttcctttcccattcccacaaaagatgtgtgactaagtggacaaagaactcagcactgggcctgtttaagactctgaccatattctccagaagattctgatggatgttttcttctacatatcttataactttgcacctatagagaagcatgttttagaaggtaaagcacttggggctttatataatagaatttaaacgcatgctatgtgtaggttttagaaagttcaatttcggtatttgatcactccttccaaatgctcgtagaaaaggcaacccatcaccacaaaaggttgatgaagagaagaatacagtaggagctttgtttatataggtgcaaattataagaattaaaataagttcaagagcacaggatcttccacttccatgaagttggtctaaacatatgttctttggacttaattttggttcaagtccaatctgtgcagggacctatataagcacacatggaatctatcttacactcttaattctggttttgccaagaaaaagataaagaattttaagagctggaagcgaaggggttatctgtgtccccaccaaagcagctgaaatgctgcaaagcataccagaatgaaaaaaagagaaaaaaa

SEQ ID NO: 339927 - DNA, 1000 bp, Homo Sapiens; identical to SEQ ID NO: 159274

SEQ ID NO: 339928 - DNA, 1000 bp, Homo Sapiens
ttttttttttttttttttaaacaatccattttaataatctaaattatttacaatacaataacatggattcatcctttttaagacatgggattgtaaaaatcaacaagtgaatgatgcttcaaataatacatttaaatacattaatcaaattttttcagtgcttaaaactttttctccatgggacagcaggctctggacaaaagtgcctagcatacaagttttcccaatttccttctatcataccagctgcacataaaaaggttcatcacctcctgtctccaaagtgtctccctactgagtgttcccaggcagacaatagttcctgggatagtgctgtttggtaacagaaaagcccaagcgtagaggacggattaaaaggcagggaccagaccaccatggatacaaatcccaagacagaggatgccccatgccttccccatgaagcttatctgtctgcctgtgtctccatgattgcaggcatagagctacttgggacctccaggatgatttacttagcgatatgctttttacattctaagaatcaaaatggtcctgtaattcccaatagagaaaatagagccaattcattgttctcccctctcccctctgaagccagtttttaaagatgagccttacccagaaaataagccccaaagaactctcatctaaatgatcagacccttcctaaattacctttggcaacctaggtaattcttttttattacacacctccaacctgaccctttctacagtttcaactataaatgttcatgcccctcgtcaaataacgttgctaggatgaatttgccacaggtttgagtacagagagaacaagcaagaaaaatgtcagtgtttattttaaggagagtggccaggatgtcagtcctcataattggtcccttctctctctctatcctccaaggtaagttctttgttgacttgataagctttagtccttctgtacaacttctagaagatgcacttaatggtgcttctttgc

SEQ ID NO: 339929 - DNA, 1000 bp, Homo Sapiens
agttttgcaaatatttatttatttattttgcaggaatttgctataagcaaaaacatccaattgggtgatgagaagggcttaaaattcccctctgtttgggactggtctctccagtttacagcaaaggatcgcacccttttccataaccccttctacattggaaagagcacaccttgtatacagaatggctccgtgaagtcttttaaacggacaaaggtaaatcacagctaacaaaacgtgatgttggctcacacgtaaccaaacacctctttttcagaacagagagcgttaaaagtaaaggcagttccaagagtaacactgctaatgtgggtttctgaggggtcattccctttttaactcaaatgactgtatcccaactttcttcctggtgtctgaggcccacaaagtctcagtacctgagagtgggcagattgcagctttgagcctgcaagcctgatttactaaagccccatttatccatttcttgatgattcaagccgccactgtggcagggaatgccgcctggctgtgatgtagtcatggcctcctgactgctatattcttgtcctaataacattcattgtttgcctttttaataattcccaaataaattcttgggattttttttggtagaaaatttgcagactactgaaaggtacagaacaaagaatcagacatttggcctcctgactgcctctgttcagtttgccattgttcttgatagaatcgaccaggtctagtgttttttctagcccgtcttagaacttatccttaagcaaattagtggataggaggtactctcatcccgcccccattcaggctgatagtaacagcctaggtagagtcaacacataaaaaagtgtaattccaggggaggaggattagaataaggacacaaaggaagggaggaaaatgttctttgaggctgaaattccattaatttttcatagtattgagtttatatttgccattgcatccttcaatctttctaaaaagggaa

SEQ ID NO: 339930 - DNA, 1000 bp, Homo Sapiens
ttcattttcactttacgctttttaattgaaattaaattagtcacttaacatacataatgcagtgtttgttttccagtctagtagcttttcagcattcagttttgaggctcatgggaaatgttacttagcatcaagatgtggtttgatgagtgaacaatgtcagtatcaactgtacttaacagaagacagaggggctggggttaatctgcagctaacaacatataaaaataaaaacaaacacagacccacaataacatcaacatgcattattaggcaaagatccaaaattaacccaacccacacagatttcttctaagctgagattacacatggaaacagatactttatcaagatccatagccatagtagtaaggttcatcagggcggaatccatatgctgtggcagggcgtccaagaatgccaactggttggccaaagccatccattccaaggctgccaggaaatgaatgctgcccaacaacatctccattttgaaggtggtaatcattgaagaaatcgggacttatggctccttcagaggcaattaatccatctgagttgtagaaaaggtcaggtctttcgagaatatctccttcatgaatgtatggctcaattcgatcatcaccatacaagtactgctcactctcatccatctgacgactctctaccatctccagccactgagagttatgccagcgaaacttttcactctgaattttcttagcccattcttcatcatattccgctataatatctaatgtattatcacagacctttcggatttcattattcttatcatgcattaggtctatgagatatgctggagcctgtgtttccttgattatgacgtctcttgtggcttggtggaaaaccatctggtagaagacataaattatctgacacacaaattcatcatcttcttgttgagcatttagcaattcaatgagtgcagggattatgccagatttggctagcaatgcagcacaagagtcatccatgg

SEQ ID NO: 339931 - DNA, 1000 bp, Homo Sapiens
ccaagacaaaaaagaactggcttcaacaactagctgggtctgtgctggcctccaagaccttgaatagcccagatatggagaggttaggtaatgtggccatagtgggcgtgggatgagacatcatcagttcacgccaacacccgtggctttcctcagcagcccaggtttctccatttccccctctgggctctgaatttgtcctcctgtcccagactcatagcctcccctaaagggcagaaggtaccagtgaggctgaggctgaaggaacacccagagactccaagatcggaggggagggcccactccctggagcctactgaccccctccagctggactgacagcctgccagggacaaagcaggaccctgaccacaggaccctcgggaatagcccctctactcttgctccccagggaactcccctggaagagggaccctcagcatttctgggagtccaggggcctgctgcccacaatccccaggtagcctcagataaggaaaaagataacaagttggtactgaaaataaagcaagcgaagagggatttaaaaaatctcaacttccttttcatcctgacaggatttccccaagcgtgctgcagaaaaagcagcatttaaatagagtcctgaggtaacagttttccgagtgcccaggcactcgaggcggggccgggctggcccattgttgacagtgtcccacagagccagcctgccactagtcctctagcactgagctcttggcctccacatactccagggccttggccttgactgcctgcacatccttctcagtgccatgctgcttctcgtagtccaggtagcgcttgaagaagaacttcattctcttgggggccaagctcagatgaatgacccgctcaaagatgtcccggacgtccttctggctgccgtgcttgatggtcatgtcgatatagaccgaccagacatctgtgcgctttgggtaggtgctcagcgtgttctcaaaaatggctttggcccgctctg

SEQ ID NO: 339932 - DNA, 1000 bp, Homo Sapiens; identical to SEQ ID NO: 159276

SEQ ID NO: 339933 - DNA, 1000 bp, Homo Sapiens
gatgtacaaaaatacatttattttcaacaatttcaaaaccactgtcttttttttacagtagaaatattcaagtggaacaataaaaccaagaacagtatatgtacatatactgtatatatagatatgagtcatgcatttgtattccagtgtttagtacaagtattgcaattgtctgccccatttaacccttgaaacaaaaaagcaggatctttagaaatattcctaatactgatctacactgtagccagccagatttctctatatcacattctctctgtctcacaaagaagaatgggaacaacatcccacaaaaattaacaggtacaaaatgtggcctttcctcccatatatatacattatatcattttcaaaaataagtgtgctcaggctaagcctgaaaataaaaacaatgcttacagcatggcttaacgtgaccctattgaaaaaaattggtatgtgtaaatgtgtgaaggggctgaggtgctggaaaagctaaaaggctttgaaagccactcaccccagaggcaagaactaccttaagggaactgaaggcagacatttgactttaaggaagttgtgtacatctgacaagcaaatagcacagctttgctaaaattgcctttgactaatatcattaaaggctagacccctacttggcctggagagttttgcatgaactcataattccacaaatgcctcttcccttccaacctctttaactcctcccatgccaagagacattcactgggctttacctagtgcccaggggacttttctgagctcagaatagcctgagaattcaccataagcattatgcattttcatagaatccaatttaaaaacagattgtcattttaagatccactgactgccttctttagaaaaaaatattttctcagactgataaatatcaagtttttccttttagagaggaagctgttttcccccatctgggtctcagtatgaagcctctagtgggcctcttcttcacctttcatat

SEQ ID NO: 339934 - DNA, 1000 bp, Homo Sapiens
cagggcaggaggaagaaacgcaggaaggatggctttttttcccattacatcagaacctgggttcgtgtgtcaggcaggcacagcccaacgagtcctccacacacgagcacagtagaagccagcaggatggggattgatttggtgatgctgaccagagagccaaatattaagtttcccaggacggctgctgccttgcatagcgcatttaagaagccaaagcctgttgccctccggtctgtggggtacagttccacagtgaccacgtcaagagagttccaggctgagatggtcaatccattgtacagacacagcatgcctatcatcatggattcactggtgccgaaccaaaggaagaaacagctgatccccgaaagcaccatagagccacctagcattgttaagcgcccaattctgtccatcagcagagcagacacaatgttccctggcaatactgccaatgtccccagaaagttgacaaaataaatccagtaggcactatagtcatcatcaaaggtaatctgacatcccgtcttgttgtgaaaaaacgagcagtttttaaattcactgtcaatgaatttatatggctcaaaatctgtgttgtcaaaaacagtgtcaataaatgtgcagttcttgaagtaggtgttcactgaagttacatcctcaaaggtgcaggacttaaaaacagagtctttgaaagttacagatttgaacttgacccctatgaatctgccattgtcgtattccattccagtatgaatctgattttccattgtaaagttaatagtgaaatttgcatatttatctctctccacatttctggttagcaatgcatattcatcggactgcagaggtttaatgacatcagggaaccaaacggataatccatagtacccaaaggacagggtgaaccaaacaattgtaagctttattgtattatccctgactgggtagttgaaacatctcataaaagtcaaccaaattccgtacagctcggtgcgga

SEQ ID NO: 339935 - DNA, 1000 bp, Homo Sapiens
gagacagggcctcactctgtcacccaggctggagtacagtggcacaatcatagcttactgcaacctcaaattcctgggatcaagggatcctcccacctcagcctcccaaagtgctgggattacaggtgtgagccatgatgcctggcccactgcaactttttaaaacccacttataatttcttctttttctcattctttatttgctgtttaaaatcttttctatcatttcgagggatggaagcagcaataggaaactgatgggcatgctcagtctgcctacttaaattggaaactgtgtactctttttgcgtaaacttctagtttaagtaaaacatacaaaacttcacaaattaactctcactccttaccttccctgccttcttcatactgaaaatattaaatagctaaagaagaaaagatagaaaaaccatttggcgactcactttgacatacctgactgtgtagttttgctttgggacttactagaaataggtgtttccagtaattttgccattgtagcaagtttgctagcagcattcataatctttttctcagccccttcttttccatcatcctgcaaaatctgttggaggcaaatcaaataatatttgcgcatctttcgggcggtttcttgacgttctcgcagtacctctgcttttaccatttctgcagctcgttccttactctcctgaatataacgaagcatgtcacatttaattttttttacagctttaatgtactgcccacgaagttcttccaaggctcccccactgcatggcaggcaagcattttcaatggcccctgctgacaatgaccttggtggtgttttacaaagtgtttgcaattcttccaatttattcttcatgtcgttgttttcttctattaattcttcaacaactttattattctcttctccaattttttccactacagctttgtgcttcctttctaaatgctgaagatgcctacagcatttctccagttttcctttcagatcttg

SEQ ID NO: 339936 - DNA, 1000 bp, Homo Sapiens; identical to SEQ ID NO: 159277

SEQ ID NO: 339937 - DNA, 1000 bp, Homo Sapiens
ctatgatcgaatacagggaggcccagttgaactttccagagatgactgggaagcccgccgggtgaggggagtgagtgtgggatccaccagtgaggacggtgggaacaatttgtaccatccgatcaccatgctggacaggtcgagttcttccaacaagatctgagccacacccataaagcatttgtggtccattctgccatagtctccccagacaatcacctgaagaactttaccctgtggactttcatcaaaaaccagagactgctgatacaaaggatcaagggtttttcgtgcaattcttgtcttcttcttggctatacaggccccattttccaaaagatatactttgacatatggagcaggtgtagatttggaaccaggcttttgtgtgaggcttcgtgctctaatgacttccacttctaattggccctttttgtcctccattcctatttgtatatcacccattgcaggggtggcaagggtttggcggccaacaagctgggctggtcccaatccatcaagaaaatcactgaattgactgtcagctcccagtcgcactccaggaaatattaaattgccctcagagctgtaactgttgatgctgccatcagtagactctcggctcggctgccttaccatctttctcatttcagctgccatgcctgtttctgtgcttctctggatggtactttttaactttttgtggcccgactctgtttgactaagctgggatgtgcttctactccttcgagacactatggcaaccactttggcactaaggctggatctccgtttctttccacctgctccaactgtacccacagctgtgtctgactggctgccgtcattatgctccagtgtgtacatctctccactgacactggtgctcttcatgatggatcttcctgaagtccccatccgtctgccttgcattttgggggtaaatgaactgattctacccctggggcgctcagattgctctgacataaagcttgtgctg

SEQ ID NO: 339938 - DNA, 1000 bp, Homo Sapiens
tttttttttttttttttttggataggaagtgataagaatatttttattgtattattaaataccatgtcatctttcccccccactgttacaaattatagatactacatgaatgatgatacataatttatattttacggtttgccagtatgatgtatttacacatgcagttagtaccaatgtcatgctacatttcctcaggagatgcccattcaaaacaaaatgtgagcagcttatctactgtaagaaaatacttctagagggtggaatgtataccaacctggacctgcaagttcagtattaacaatattagatttaacttagactcctgggttatgttcctttttcttttttaaataatactcataatttgaacaacatatttatatcagaaaattttccttcttttcttccccatcttctttttggtgcttaaaaaagaacatagaaacaccaggatctagcagccaataataaaaggccacaatctgaaaacaaatggcatttaacagtgataccacttgaaatgcaaaacattagaaaaatacttggaagctaaacataaaagttcagcacagtgatttttctagttattggatataacatggcatcacctgcacagccaagaaatgagacattgctttgggaagaagagttaatactaaaatgatttcagttggaatttgagatgctaaagaccatttattttgagtgttttattgtcataacaaataatctgtacacattctgtgtattaacaggtacatcttttgctgtaactttacaaatgcttaaatgtaaaattttacatttgtaaaaaattatatatttattgaaccataaagttgcaatggggcacaataaataatgagactaattgtccaattgtattttggctcacagttaaccatgaaattaaagataaaactacttagacataattatctaggaaggtaaagggtgtagaataaaactccccctgccctcaaaatatggcagcttg

SEQ ID NO: 339939 - DNA, 1000 bp, Homo Sapiens; identical to SEQ ID NO: 159278

SEQ ID NO: 339940 - DNA, 1000 bp, Homo Sapiens
agtaatctttatcccttcagagaattcttcctttaagtcttgggtgagatattttattatttttaaggtttatatatctatattgttagaacaagcatactctggcaatgttgttctttaaaaaaagcatggattgcatttatatagtgtttttttccaaaaatctgaagaaattatcaagagcacttggcagagataacttgatgaaatcaggggaaaaaattgatgtccaacttttaaatatacaaaaacttgattgacattctacataattcaaattgtgtgcaagatgttctcaataaacatttacagactgtatccccacaccaatgtcagaaattcaaagctggtcctattactgatgtgatacatcaacatcacaatgtcagctatcaaaaatcattttaaatctatgtttttccaacaactccagttccatcaatgaaaataattttaaaggatatcaagcttggaaaccataaaatattttgcaagctttgtttgtttgtttgtttgtttcttctgttttgcctttgaatctagggaatgtctcttatctctttcaggagatagtattgtgcttctgaacagtcatggcgttcggggaaagaaaatgagccacactcaatgtgaatgcatacacgaaaggttttggagcacatacattaacataaatctttttaaccatacgtataggtctccagacaacactcagacatctatatacattttttaatatatacacacatacatttacatacacacgttcacacattcactcacagatgaaggaaaaaattgccactgtttggattgcaaggcagtgtaatgaaacgttctagtcactttagagggctgctaatgagctttctaaaaaaaagtattcatggaaaattagaaattaagttttgtgattggtctctctctgctgctgtcagtcatctggttggtaatacgtttgcgattccgtttcaatttagaaaggtctttgtcaaacact

SEQ ID NO: 339941 - DNA, 1000 bp, Homo Sapiens
tttttttttttttttttaacaaacaattgtgtttattgacaagttcatacatcagtacaaacgggcacgttaaaaacagcgcccccgccccatgcagccgaggatgaggcaggaagcgccgcgacctgcacaaagtataaaagttataaataaggggctttcaaaacagggcgggggcaaatctggagtggggcggcggttgccggtggcctcagacatgcagaaggggacggggcgccggccgggccacgaggccccccacccacatggggcagagggcaggaaaagggcggccacattctcacaaacttctggcgaagggtagctccctcctcgtgaaggacctggcccagagggtgaacctgagtcccacctgcggtgggcgcggctggtgtgggaagtcggggcacagcaggcacgggcccgcccccgccgccgcgggagttccagggccatgcgggtagcaatgctagagtagtggggaagggccaggtttggagcagctcaagcgcactcaggctgatgccccggagctgggaaccttttgtaaccctttttctttttttttttttttttgagatggcgtgtagctttgtcacctaggttggagtgcaatggcgcgatctcggctcactgcaacctccacctccacctccagggttcaagcgattctcctgcctaaacctcccgagtagctgggattacaggcgcccaccaccacgcccagctaatttttttatttttagtagagacagggtttcaccatgttggccaggctgatctcgaactcctaacctcaggtgatccacccgcctcggcctcccaaagtgctgggattacaggcttgagccaccacacctggcccagaacccatttctttataagcctctgcctatggcgcagcagggcgggtgaaggggctctcgtggcctgaagctgtggtaaagctgctctgacttacctgcagcagaggggagcagtagggcccagaaaaaccttt

SEQ ID NO: 339942 - DNA, 1000 bp, Homo Sapiens
gtttaaaaatgtgttttaattatattttcatgaattccaggaagaacatcattgcagttaatgttacaaaaaaaaaaaacaaagagggacatctgaacatgcaataaaaaagtgaattcacagtgaaaataatgcatgtcagtactaaaatagagttgcttggttccctgaaggaaaagggtttcttctaattatctgttcacttggattttattatgagaaaatattctgtgaaagctttggggaagttttcaatttgtgctactattatcattagagtctgatggaagtccctcattctgaaagccgttgttcgcagtctgtaattcaatcagaaaattcaaaagtacaacaggtagtttggcaactcgcttcttgttacatacaaagccattagcaaaaatatgtaacaaaatttatgtaaaacaaacaattttgtccttatgtacaaaagacagccttcttcctcacaccctcacggcctattccaaaaagtgggaagggcatggggagcagctatccatcccctttcaactctcattatgggtgggataagaacatcctaaaaggcaaggtaactattttaaagtttttaaaactgagttataaaaatgcatctgggcttctgaacaaagagggaaacataggaaaaatgataacagattaaagtaaggaattcatccctttgtcgtttgcaaagtctcttaatcaactcaacagttagagagtaaaaatgactacatttgtgactgcaatctgaggacacagtaaaggacatcttggtgaaacacacacacattataacccgagctgctgaggagtttcacatctagggcatgcacatatttcatactgatacagtttacaacaactcaagggagaaagatcataataggtacatgggaaatgtcaccaaatctatatacaaacgcattaacagggagaacacatgaagtcaaagggagacccaaatacaagtttaaaaatacatttgaaaatc

SEQ ID NO: 339943 - DNA, 1000 bp, Homo Sapiens
tagaacaagaacaatttatgttaatctctacaatctgtgttccttctgcgagcagtgcctgattctactaaaattaacacatttaagttcagtcttatgcttaagaaaaaaaaatctaatgagggactaatttataaagtatacacaaatataattctttaataaatctttccagtgttcactatatctgcattacatgtaatgtttccatccacagaaactcaggatagttcttgtaaaatgaaacagaacattctgtgttcatctctggcaagcaatgaacaaatagaacttgctcacaaaggatctaaaagtgctgcctcaggaacataaactacgtgctatatgaatgagtcttggttaactggctactatctgggatctcttcctctgctcataccactgaacccatctcttataaagcctatgagaaaatgaaagctattgcagaagtgaaattcaacatgagccacccaaattcttctaaggtaaccattctaaagcaaaatcagcagaagtcatctcttctataataacaaacaaaaaacccaaaaggcaaatgctactgctcaatcatcagatgaactcacagaggcaaaaatatgtgacaacagcaataattcaagtaaagtatgtatgaaaatttaaacacgccatgttcaagttaagacagaagtgaaggggagctatgatctttatattagtcaaaaaagctaggcataatcaccaaatgttaattcactttacagtcatcaatgagactattgtatatatttttgcaccttgcgcttgtaaaagcagataaaatatttaatatgtaatttacaatgtattttaccagctcagcatacaggatgtatacagattatatcaaagtagtagacagttacgggcctgtgcaaaccctgcaaaaatagtacttcagatatctgctaattaaaaacaaaaacagtttgctgtttagaagtgatacaatttcaactaccacaaaatacaaagg

SEQ ID NO: 339944 - DNA, 1000 bp, Homo Sapiens
ttttttttttttttttgggttgtagcaaaacagttattttgaatgttctgaattttaacaattcaaaggagaatgtgtttggtagccagggacctctatggactaaattctcaattcatttatttgtagatcagcaaaagacagatagctgctgctcctgtcagtaaagactgactgattgattgtctaaggttttatacaataaaacaccaaaaataaatgtacttaaaatattttaaatttagagatttacataaaaatatgcaggtgtttaaaaaacagaaaaagtatagaaataaatgaaaccctatcttaggccttaccaaccaaagaacatttttaatactccacacttattttccattcactaactagcttattaaatcagctacatattgtattcagaagtggctggtttataagcaattccttattttcagacagcacaatgcttcaatacatttaaagatttaaagctatgttagtaataaatgcataaaagaaaaataacataacttgctttaatacaaaggtttttaataaaaaagtcaaagtctacattaaatcaggaaattgataaatctgaattatacaagctttctatatacttagaaaaaccaaaaacacacggtttataataaaactcttttaattcaaaatagagtctaatttaaagaaaatgtcattatgcccagtagactagatagggttttgtcatttaaattaaattattcacctgaaatatgggaaatatataatagagaaaattcaatctcaagggtactttgcaaattatctagttaatttgcatcatgaatcaaattcttagcttctaaagggcagacacagtctttaattgcttttagataggcacttaagaaatgcttttgatgaggagaaaaccccaaagattgtgaatcactctattaactccagggaagaatgagactctcaacaaagtagctttccagaactacccttccagtgccaagaaagtaaa

SEQ ID NO: 339945 - DNA, 1000 bp, Homo Sapiens; identical to SEQ ID NO: 159280

SEQ ID NO: 339946 - DNA, 1000 bp, Homo Sapiens
tttttttttttttttttttttttaccagaaaatagcctttaattttacatgtacaaatgctgctgtaaattcgtaacagcgaagaaaaatatatacgaaccggtttaaaaggaaaagtaaaaaacaatccacagttgagcagttgatgtgcaaatcatcccaggaatccaactttctgtctcttgggccccaggctttcttccttgtgcagaacactctgcaaggaggcatgcagtaccttgcccacacgcttgccagtctccatcatctcgaagatgctctctgggtccaggctgcccttccccactttcctcatgcacgtcacaactcccttgctggtcaccgacaccagcaagctggccagcgagcaggcctcctcctgaagagtagcatccaccacatgccgatagccaatcttgcacagagtgacaatgcaggggacattctccacacttagtcgtatgcagtcataagggtcatctgacaattcaatgtccttcgacccctcttcatcctccaaaactcgaacccttggtatccttgtattgaagagagcagcctttacagcaatggaaatggcatcaaacaaatttccaccacattccagaagcagcacatccacatagagaacccagcagtgctcccgaggactaatgcagagggtctttaagtcgacactgcttttattgttaaatatccgatagagggtgttagcgatctcggtgccaaggtcatcacctcctctaccttcaaattcaggggtagcactggctgaacagtcaacaaagaactccaagtagccttcatttggtttctccagcttcggcgtccccatttctgctttcactcccaccaagatgtctgtgtgacccagcttgaccctggcggacccactagtgttggacaccacatcagtttccacttcgacacatcggtagtcctcacagccacggccatccacacggaggtcttcctggacgccatgcacgatgtacacctt

SEQ ID NO: 339947 - DNA, 1000 bp, Homo Sapiens
ttttttttttttttttttttgctgccatgtgatagaagaatgatttattagaacaaattccatgacaaatcatataaaataaccattttccgaaagacagccacaagaccacctgagaacgaatgtacagtgaaccctccgagaagcccggcaaacaaggaccagttcccaggcaaaggctggagggggaggaacaaaggagctcagtgtggggaggagcaggaacttgtgaacttaaaacattgcacagccactgccgaggggtgggaaggagccgtggatgaagcgtgaccacttcatgtccaggggcaggcggggtgggcaactggggcatgcaggggtgggcagcagcccggtggaccgggctagcacctcctccatacagacagcaggctcttggggcggggaccagggggggacacctgccacccccgccccccctcacacacacacgtaaacatcaggtgggccgcaggctcagaggaacagaacccgtacacccaaccccagctcagctaaaagtaaacaggggacacacaccacccgcttccagcctccagtccccagtgccgctcccccagcagctggccctgtccaggtccgactctcataccattgccaggcagggtgtggagctcacccacgccagtctggtccaggtgggacacccccacgtccacccccaccaaccacggccaacgggctctttggcttagaggctccggcaacacgggctgccccagcaggggccacggcagaggcaccaagctctgctcacctgccatgttcccagctgaaagaatcctgagaaaacaacagttcctgggcccgtccctgcccccatgcccacttgaggcctgatggcgtgaagccaaaaggggagggcgtgtggtgcaggccaagctgcgagcttccggaaacccggcttccagtgactttggtcgtgcgctcacccccgccagaagggctgccatgcacccggctgcacccaggaccttgg

SEQ ID NO: 339948 - DNA, 1000 bp, Homo Sapiens; identical to SEQ ID NO: 157573

SEQ ID NO: 339949 - DNA, 1000 bp, Homo Sapiens
agaaaataataatttattttaacttcattttactgtttgtaactaatcatgattttgtgaacttgcctgtataagtctgtaccttcaaatctacaaagcaaaagtttactacaatgagcacttaaaattccacaaaccgtctccatccacaactttcctgtacatgcaaattctttcaatgggctgcaatatttgcaaacatgctttaaacttccataaagatgcaagatattttgctttctgctaaaacctttacactctcttgggaaccttaaccaggaaaatgtttaaatgtatatcccaactctaaacgctgccggtttggttatatgtattaaatcgttaaccaccgggttgggtggttttgagttgaaaccttcacctaaatgataatatcttaacggtcacgcatatgaaacacattcagtaacgtaccattataaaatagggttccattaaaaatacatactggcagttgtatttgtgttttaggcaggaaaaaaagcgtgtttaacttttttatatgaatatagtttaaacaagttattctgtgaaagtatgcttaataaaagatctttctgaaatttaaacactttatgtaaaagggtacaggtagaaaagtacaattgctatttgaaaaaagctctgtttgttaatattgccttccaagatagtaagggtgtttttctctctcttcccttaaaatagacctatgacacccagagttgtagggtttgcaaatttggactataaacatgaagaccgtacttatcttatatacaaaaacttgccgcattgaacgaggcaggaatttctaccccagtggtagtggtctcctttatgtacataatgcagaagtgaaaattatacagtagtcaccgataggaaggaattgtatactctagtgccgtccggggattttgtgccgtgggttaagagttcttggatcgtcatccagttatcgaagattttcttattcctcttcttcatcatctttttg

SEQ ID NO: 339950 - DNA, 1000 bp, Homo Sapiens; identical to SEQ ID NO: 159282

SEQ ID NO: 339951 - DNA, 1000 bp, Homo Sapiens
gccaattttatatgaagttttattctcaaaatataaaaaaaaaacaaaaaccccacacaccaagggactaagatgatgttatttcacagcacttgcttgcctcagtctttacgaagaacacaattccaaactaatggacaagttcctccctgtgctctaggtcattcaaaggaggcaagctcctttgtcaaatcaggagctccatcagctgatcaggagcccagatgccagggtggattttctcagtgggatctagtattgctagaagagccttccttacatggcagaaacaggcacatgggcctcttcccttagaatgcatctgtctcacatgcttggggactgctgtgcaggaacacctggtgtggcctggcgaggcagcgtatacatggcccccaaaaactggtctgcaattcttcccgcttctcgcagcccactcagcagagcaccatgcactgtggctgggtagttacggatcgtatgttctcccgcaaagaagagtcgtggaatcggctgtggggcacctggaatcgaggggccaggagtgattggctgagccattaaatcatagtcatttccagatgatcctgcagcaacataggaataagagccccgagcccagggatcagcacgccaacgagacaccacagtttctttgggctgaggtactgcactgctaccaaaaatccctttgagaatggccaggcatcggccaacaatcacatcgtcacttatgttttccatgataccagcagcttctcctgccactagtgccaacagtattggagctttatagaggttccagaagaggaagagctcacccctgctggcagtcgtactgccaacatgcccgaacaaattgacacttggatcccagaacacccgatcaaaacacaacaccaccttgttaaggttgccaaatcccatcctttggactgcagatgttttccactcagggagaggtggcacaaactgaacggctggtggctgctgcttcagc

SEQ ID NO: 339952 - DNA, 1000 bp, Homo Sapiens
ttttttttttttttttttttttttttttttagcagacgatgctatcagcagataatagcacttttattagcagtactcagcaggaaaagaaaaagcagttcctggttgttatttctgttttctctgtttcttagggcgtccacttttcttctgtcctttcttcttcgttttaaggagaacagctttttctccaataaataagcttttaggatgtccttctgcagttttggaagtaaaattaagtccctgcttaggtttactgacattcttcaatcgtggatttgaattttgttgtttaaatttttctttattaacagaacgcatgactctgagttttctccccatgagttcagaattatttaatttcagagcaagatgaacagaatctgtattctcaaagagcacatagccaaaccctttgccgatgcctgtcattttgtctctcacaatcctcacggccatgatacttccacagtccagaaagtgcttctcaatggcagattcttcaactttataagggagattccccacaaaaaccgatctcttgtctctagatgaggtctcagatgcgagatcaactctaatacgaaatccatctgcaatctgggccccatttcttttcaatgcttgcgtggcagcactctcctccttaaacacaacataggcattaatatttttctgatcaggatgaattttacgttttattgctgccaactttttggatagcgttccctctgctggaatcagagaacgaaatcgtacagattctatttgtccatactctttaaaaaacgacttcagcttcttcttattacatgtaacaggcaaattcccaacaaacacagttctctcattctttaatctctcttcttcttggttgatttgaattttctttctttgactgacaactgtgtcttctgtgtcatcaagtatttttctatctgctactttaacaccaggttgagaatttttccttttctgcccttgtttctggtgaatt

SEQ ID NO: 339953 - DNA, 1000 bp, Homo Sapiens; identical to SEQ ID NO: 159283

SEQ ID NO: 339954 - DNA, 1000 bp, Homo Sapiens
ttttttttttttttttttttttacattttaaagacatttttattgagctaattttaacaacattgctttagctggtgacagctgccccaaaccaaaacaaagccatcatgaatgctattcaacatcctcaatgtaatccagtatgtttttgtacttggaatatagttaaacttttgacattacataatcaagcaaatagcagtgcatactatattattcaaaaagactttatctatttcatttaaaaaatcaagttgcaagtggcctcagctttatcaacaatcgtagtgacacattccacacttcatgctctcaaaataaaaagtgccctaaaactaactctaagttttttagtcactgacattaatactaaccaggttacaggaattgaagtttaacattgtacaatataagcggcaataagttactgatatctgctgacaaattccactcaaactaaatatatccttgatacattcaaaaagacattttgtaaattttaataagctagttagtgtatatgctgcagtgcaaaaaaagtgacaccctagtttcctgagctttaggaaattaacaattttctgactactactttcaacttaaaataggctctttattatatgaagccatgacaaaactatacaattaaattgggcttttggagaactgaaagactggtcagagtcagggtgatttaggacaatgaaaaagttttcaaagcaaaagtatttacaacactacaaaggatactatggatctgcatgtagtgtaaagattaaagataacctactgatttcacaattgtccctcctctttcaaaaatattacactgggccaggcgctgtggctcacacctgtaatcccagcactttgggaggccgaggtgggtggatcacctgaggtcaggagtttgagactagcctggccaacatggtgaaaccccatctctactaaaatacaaaaattagccgggcatggtggcaggtgcctgtaatcccag

SEQ ID NO: 339955 - DNA, 1000 bp, Homo Sapiens
ttttttttttttttttttaggactttacatgtgtatatatatagctctcttaggcaccataatcagtatgagccaacaatatttaaacttgattcaggccacattcagacatttgctcttatatacaaatatttaaattaaatacaatctgaaatgtgttctgttacatacaaaaaaggaaaaactatacaacgcagagcagtgtgtgtgttttaaataattacatttacatgtaagctaaatggaaccagcaatggtgctcaagtttttatcatcccttccagaaaatctttttctaccatctcttctattttttgcctggctttgctggaacatggtttgtggttctccagtttcatgtccttattagggaaggcatttgagtagaggataggactccctgagtgtcctccacatcggcttgtgactttgctgttgaagacttgactgagcacattgaagaacggcaggagctgctccatactgcgcacggtgcagatggtgagcagcaagtgccctggctcccaacccaatgttctccctgagttgtcttcctctggatttttctttgctcttttccgaagaagttttgctagtcgtaccacgtaaggtttaaattctcgttgatgtataccctgccttctgacttccaaacctgaatcatctgaggcttctggaataaaggcccatcggtacatctgaaactgaggaaggttttcagagggcaatgcgagagccaaatccaaaaatttgcaagcagagagatagaggtttaaccaccgctggctgttatatgaagtagagaagccattacctcctgtgtacgttgtctccagaccagccacagagggccctgaagtccgtgaaatatcttcatcagcagtgagttcctgctccatcagtaaaaatacttgtacaagttctgtaatcatggtaggccagagtgaggtaagatgttggggagacattcttaaaagtaacactctgaaaaacaggaaca

SEQ ID NO: 339956 - DNA, 1000 bp, Homo Sapiens; identical to SEQ ID NO: 246502

SEQ ID NO: 339957 - DNA, 1000 bp, Homo Sapiens; identical to SEQ ID NO: 159284

SEQ ID NO: 339958 - DNA, 1000 bp, Homo Sapiens; identical to SEQ ID NO: 159285

SEQ ID NO: 339959 - DNA, 1000 bp, Homo Sapiens
ttttttttttttttttttagagatccttcgtgctacaaatgtggcaacaccttgtttatttagagtaagatgtgttaacatccagcatgacaaaatttgtacaaagttcacaatttaaaaatgaagtatcacagcaacttgtgattccacacatttatagcaaaattaaagtgtcaacaaacccatgccgtgtagtacaaaaataaatcaaacttcagttccacagagagcacaataaatagtttatacaaaattctgtcttaataaatgattacttaaattaacttagaaatgaatatgaacaataagttataataaactctgatgactcacaataatccatatgaaaggtcagcattctaatatgtgacacttttgtgatccctatataatagtcacagataacttttgatttgagattatgtaccaacgttagatgagcagcaggtttgtgcttaaaatccctttccattgtacataggtgataacaataagaatccaaaactgatactatctagtactctactaaaagcattactatattggcaaagaagctgcagacacaacgcggtggggaaatgcatatgctgttatgaacaatgggggccctaaaggcagctggggccctgggccacacggacggcctcaggtgactgcaagcaccttgcttcagctctcaaaacgcattctgagcatggcagctgcaaccaatagcacaacagaaagggggcgctgtacagagaaggttccgcagagccccgaaataattacatcgtcttttcccagctagttattaaagtccttgtggaaaactgtaagcttttgtacagtgaacagtataaagtgccgctgggatatacatatatttatacacatatatatataccgaggttgagtattgtatcagaatattcgtcgtgagatccctgtagtctccctttgcaacattattgatcagccgtgagggctcctctataatccatccaggttcagtgtcaca

SEQ ID NO: 339960 - DNA, 1000 bp, Homo Sapiens; identical to SEQ ID NO: 159286

SEQ ID NO: 339961 - DNA, 1000 bp, Homo Sapiens; identical to SEQ ID NO: 159287

SEQ ID NO: 339962 - DNA, 1000 bp, Homo Sapiens
ttaccagttcatcatggaatttctgttgagggtcatgaaaaacacttggctacttcctccagatcgcacggatgcaaaaaataccttatcatttctttcacatagaaactttaacctttgagctcgcttatgcataaatactccatccaaatgtcctgtttccactgaccggatctcaatagctttctcgccccagcccattatctgattggaatgaatgtaggccacagacgtgggcatttctccccattggagcaccacatccttagttatccggccataggtgtttacatacaccccctcatcctcatagcaaacaagcatttccattccatctgttttaggcaagatgacaatagcatgaggagtgatattgccctgaatatgagatggtatgtagatatcataagagtttcctgaatcaacatcaattacatggaaaccagtgtgtgaaccaaaaataacctttaatctttgaccttcttctaccgtgagatcaactagcagaggcttgtgctggagatctgcaaaagacttaaatgccatgaatttatgatacggtttaggagcccaagcatatatttccacagcattctttaaggcaatcaccaaaaatttgatcctttcatatttaacaactttataatgtatacagccttccaagtccccaacagtgatccagccttgtttcttttctacttctgggtcattatgtagtattctgtttcttaaccatgaaagatagtaaactcgtagcttattcttctttcctgaaattgtcacaaggacattcagtccctctagcacatccatctgctgaaatcgcctccggttgatcagattatagactttgccttgcccacttcggtccaaaagcatcaggccattttcagtccccaccagaaggtttacaccccacagagctgcacaaagtatttctgagttgaatcgtttcttgtattttctgatttctggtgtgtcgctatgaggccgaatgttg

SEQ ID NO: 339963 - DNA, 1000 bp, Homo Sapiens; identical to SEQ ID NO: 159288

SEQ ID NO: 339964 - DNA, 1000 bp, Homo Sapiens
ttagcttttatgtttattcaacttcacagaaatccaaaaatgtgtctgaaaattggttatctatttaaatagcaattgttcattatggtgacataatactatgtgatggcagagatatgcctaatttaaacaaattcttaaattcctgacattcttacaagtggacaaaaggaaatcttaaaaatcagacttacaagttataagaagatatagaaagcaatttaacctttaatacctggaataagttttacagccacatttgtaatttacatatacagtgaagatcactgaaaaagcctcctgttgcactgcagcaagaaattttattataatgtagattaaacaaatttgctacagagtgcagcaagataacctcactgaggaataagattttcataatggaacttgttacagggagttaaatattttcttaatgttatacagtacatattttcaaaatgaacattatcactgaaatagtttgctaacaattgttagcaattaatgttttatacacacttaattttactgtaaagtatgtggctctccaaatcttactacatgaaatgttaagcttaaacgtaagataatcccctaagatggagactcaagacatcaaaactttgatcattattgcacctatttttctacacaaaaaaaaaaaaaaagaaagaaagaaaagaaaaatttacatcgtaatccacccaaaaaaagaacagacaggtcgtaaaattacagactcattggcattgaacataacaaaatctacaatgaacatttttttgtgaactgctgtacagcattacaaaaatgtgaaatgaaatttgcttaactataatcatgcaaataaaaatccttcacaatcactttttcgtatgttttataaaatgttcttaatatttccataaacatttctggtgcaatttaatcaatgacaaaaatacaaagctattccttattctttatgttatagattttaaaacatgcctttgtactgctg

SEQ ID NO: 339965 - DNA, 1000 bp, Homo Sapiens; identical to SEQ ID NO: 159289

SEQ ID NO: 339966 - DNA, 1000 bp, Homo Sapiens; identical to SEQ ID NO: 159290

SEQ ID NO: 339967 - DNA, 1000 bp, Homo Sapiens
agagtaaaaaaggagtttatatatttataaatgccaaataaataccagaggccacccaacgccccctcccagacagggctgtctcccccagccctaggcttctagggtgtgagacatcttggccccaagctatagcccaagagcagctgtcagtctgtgctaccagggaactgagtgaggatgatctgtccagccaagtttcactccccctgagtgaggggcccccatagccacaggcctgggtccctgtataggaccctaagggtgaaagactcagggggagaaggtggccatctcgagtgagacccgctgccacagctccttggtctgtttgctgcgcttgaggttctgtaggatgtcgttgaactgcatcatgcccatgggcgtcaggcagaaggcgctgcgggcactccggatcgcattcacaaagtcgtcgtagtccgcaggagtcaggtgaatcaagctgtggtggatgtactgcatgtatgcctgctggcagcgctgcaccagttggtggaaggccggggcacgcaggtggttgtgggcatgagcgggactcagccgctgcagcgtctccatgacgatctcctgcagcacaaacgggctcagcacccccttggctgcccccacacagaactggtgcacgtagttcactcccagctttgctgccagccccagcaaccatttgacatcatcagtgtaggggggggagcgggagaagttgttggggtgatcgttgtgtgcccggcgacccagcatctccagtgccagcattccgacacggtaggcagcatgcaggtggtgcaggctgtggggattgactggctgactgtgtgtctcctcctcgggcggtggaaaacctccgctcaccagagggctgggctgtgtggtcagggcaggcagtgaggcaccttggatggctggaaacgtggatgctggatggacactgctcactgttccctggccccacaactcacaggccacactggtgggcagtgga

SEQ ID NO: 339968 - DNA, 1000 bp, Homo Sapiens
ttttggagtaagtagattctgagtttattgttaagatttctttatttacagtacaagtctccaaaagttcaaggcagttatcttttaaataacatgtcaatcatataaaatagctagaaccaaagtagagaaatatatacaatacattaagtactttcaatatagtggcatttttcatattaaattaaaagaggctactatgatttacaatgtcatttccctagtttaaaattcaacatgtcaaaagacataatgtacattttttacaaaactgacacagcagtattaaaactgctaatgattgtagtttttattttttctataatacactgcacctgtgttaccaaaaaaaaaaaaaacaaaaacaaaaacattgcactagatggtttgaatactgcataagtcagtatattaacacttgaggaataatgaatggcctggtccgttttatgatcaggctcattcacaacagttttcactcttcaagctcagcaaactcctacaggtaattactttccttggcagttttacacaggatcactgcaaatgggtaaaatgtcatgaagctgatgaccacaatgccatcacaaaagctgatatcgatataaccctactatttacaatacctaataagagccaaagctagaaaatcactcactgctaaatcatggaaaaaattatagtttgtaggaaattttgaatatctataaaatattcaatagactacaaaagagcttgcaacagcttgttctcattatttttcttaggtcagaattagaaaaaagtaaatcctattttttaataagttttgatggcatcaaaaagcttcacatttataaataagatttttatacaaagcaacatgttactgacatagttttctcttgctactatcaattattctcgggactcatgttgtatgttaaggaaggaagtattaagatttcttcctcattcctaaattttcagaatatactctaggccttgaaggaaagggaaa

SEQ ID NO: 339969 - DNA, 1000 bp, Homo Sapiens
tttaagaacagggacattaaaaactttattcaataaatacaacaaataatttaaaaatatatttcaattccaaagccaattaagaagaggaagtagagagaaagggaaaaaagtggggatgaggaaggtagaggaaaagagaaagcggccaaacaatggtttggttgggctgtgtttcagagtataccaccctttaaaattctgatcaaatactcttgacccataaacccttagcccttgttctgatggggtagccacaggagtccaccagctgggaatcatccactgagctctggatcagagcattctagaggctggaatgtcgggggagttttaggggtagttttccggtcattcctaaaaccatccgtcctaactcccaggcaggtttaaatagtgcaaactcttaggcagagagctcccagctgcatagtttcacaggtgagtgtcccaagccagggcctccaggaaacaggtcccagagtacccaggggtccaaagccacttcggtgaatggaaatctaaaggtgaagagaggggaggccagggcacagagtaaagctcctgggctaagccagtggccaagccagaaaacaatgctgggcagaaaagggttacaaggcaggtagtctggacactggattcaacagcttgccatcagccagggaaagtgaagctgaggatgcatatggagcagggccaggaagatcaggagagctgagggagaacaggaaaattgggaggaaggaagaggcagctcagcagcaaactccaggagaaataaccagcagccctcacagatttgtgattgtctcttaaaaagatttattttctcttcttgcctgaatgtacaaaggcaaaaagagtacagtttgtatatatatatatttatatatatatataaaaaaacaaggaacttggtaatgtacactttacagaagggaagaatcaggaagactgaaattaaattcaacagagcaacgccaatggaacaaaatct

SEQ ID NO: 339970 - DNA, 1000 bp, Homo Sapiens; identical to SEQ ID NO: 159292

SEQ ID NO: 339971 - DNA, 1000 bp, Homo Sapiens
gtattgaaagtagcaattttatttgagttaaaattatttacaaaaacccaaagacatacttcatgaaactggtacaaactattttttcctgccgttggcttttgctccaaagatcacagctgagaaatactgtataaaataaaaataggattggattcagaaaagtactctactgttctaatttccaattggtagtatttacagaaatatttacaatggaaaaaaggttactttaaaacttttagttaagtcagcctcaagtaccctaaaatgcagagttctctgagggttaaaaacacacaaatgcactgcagttggtgaagtgattatctcccccaccacctccccccaccaaaatctgcatctctatcagtgctcgacaattagttattatttaaaaaacaaaacaaaacaaaaaactgttaaacactgaggtaaatcaattttcaaatgattaccagtgtaacagaaaaatgcagttcgccctgattgttctcatccaaatgttttataatattccttaccatctgccacaagtcaggttcaccaaaaatctgtccctttccctaaatccaatgattaataaatatcaatgtattttgcattttaaaataaaatataactaatttaattttatgggtatcatttaccaatatgtttttaaaagtattttgctaagctagctttaatactcagggcaaatacaatctcaatggttcccacgttacactggcgtactatgttcttaaaaggtgatgggtaggggttggggtgggtagaaggaagaaaacaatttgcctggaatcagttacttccttacagatttcccaacaatctgcattatcaaaaataggaagacaatagaaggcagccactgcatttaaaaacattacagctggcactgatacaagagccccgatttgtcactttatacaaggaaataacaaagtctaaatgggtaaaaattagacttttagctattttccccaatacacaccaa

SEQ ID NO: 339972 - DNA, 1000 bp, Homo Sapiens
ttttttttttttttttcatttgtcacttgctttatgcaaacattcgagtgtacctctttcaccacagggctagagatggtctactctgtacatacatttcacaacaaagaaaaattctgtcattccccaactctatgaccaaggaaaacttttaggatttctttaatttgtagcagagacacagtggcctagccaatcggcagtgctatacacacagtatgccagtttcccacccctaccctctttctccttttttaaagcttcaaaggttagatcaataaaatttaaaatttcctcatttaaggagaaatataatgacccacatgttaatttatattaaaaactaaaaataaataatggggttcttaaacaaggacatctttaactaggttatgattagaccagcctgtgggtgaaatgagagattatctcttctccctggaaatgtcttcaaggctcagacaattcagtagtttttaaaaggccccaactcacacatctcaggtgaaaagtataggcaatgggcaacaaacaagacgctagtatgcacttggcttctgataaattgaaacaaagatttggtggcccagcctaataaatgacagcacgaaactagaggtttaaagtaagttttgacatcacatatagatccctcaaccctaagttactttggagggaagccatgagaggctggatcagtcctcaagcctcagctaaggatggatcctatttcttcccagtgcaaaacaccaaatgtacctataaggtggagtcggcaaggagagttcccctcttactttgaagcaagagatggaaaaagtcagaaagatttctagataaaattgagaaacacaaaaggcaaagtaaagtcaatttaaacaggcctcacaaaaatcagccggaattcttattaaaaaaaacaaaacagaacattcatggatgggcaaagaaaggaaacaatgcagacgcctttggacttcaagagaaagcccatcaggaa

SEQ ID NO: 339973 - DNA, 1000 bp, Homo Sapiens; identical to SEQ ID NO: 159293

SEQ ID NO: 339974 - DNA, 1000 bp, Homo Sapiens
ttttcatttttgcaatttcatgtcattttattttggtccagccatatctccttgtaggagaaaaaaaactgagttattctgttcttcctgattgtcaatccattacactactttatccattcctttttgccctcaggtttaaaaaagaaaaaaaaaaaagccttcttgacaaccttagcattttctataaatttaagcttattgtgagcttgaacatttcaaacacttctatatttcactctcctctctgtagcttttgtcatgccagttttcccttcttttgcaaatgatctttgacaacctggcttcatcagagagctctgagatgccttagatgcccattctctatcttattggctaggttcttttaatttaaagaaaaaaataatttgtagaatgtcatctaaaagtttccatccttttatggtccccctcacaatttgaaaaactcgaagaggtagctggctaagaagcagaaaggcccccttttggttctggggactcaaccgtgttcttcagtctggtcttgcatcctctcttcccagctgagaagcctgaggccccgagtagatcagataaaccggggaagacttctacctgaaatggtctgattcacggttcagagggggaacaagtctaaatttgagacgtgcttccacactattctttctcaaactttaaagtgaacatacttccttgcttgcaatctgttgatggatctcttctgcctacaatatatactacaaaccccttagtctggcacacaaggccctgtgtgaccagctcccatttctttttctagcttccccaaccccaaatgccttactaaaagaacttttttctctaatgcattaggctgtttcatacctttgctcagattattccctctcagccagatccctacctcctgagaacacctattcatctttttaaagctcaaaataaaaataatgtcctcaaatctctgcaattgagtgctcctttatgccctctttaacct

SEQ ID NO: 339975 - DNA, 1000 bp, Homo Sapiens
accattatggttgggtttatttcaaatgtagttgagaggttaggctgtctttggagcctgcagctgtttttctgacaacatgaagttttctgagatatgttttcactgaatgctaaaagaaactggatatttattttgatacaaatcaacgtgcctttggggtgttatgtttctgccccaggaggattactatgggtgaaggagaagtactatgttgcccttgatccctaacaagcaccatcactctctgcagcttcctagtgtggtcccgatggacaatcgaatgcaaaggaacttgaactccatgattaagaaaggaaaaggaaaaaaaatgtgaaaaaaaaatatcaaagttttaaaaaaagggtttgtctgccaagcaaacaaaagtcatggctttaacaaaagtcatggtatcatctacacatttttttttcctttgtgaagaactgtggctagactaaacaaaacagaacagtacagaactcagggattcaaaccaaggtaatatgtccttcttccctttctccagttggcattgccacattctacataagacaatgggggctgaagcctcatccttcatgctacctcaatcaagaagctttctttcttggacatgtgcacaagtttgtccttcttgtggtgtgagtattcactagggatgctccccctcctaaacttctcttgagttgagcccacaatccccacaaccattgggatgcattgcattgcatcagcagcaggtgttttcttgctgttgttaatcgttagaagtgtcatatttgcaccgtatgtctaggctagttccggctgatgggactgatgccacatgtgaatcatgagttgaatgtataaaaatttcagctttgccactgttgtcctttggatggatattatgcacagggaaaagtagatggagaggaaaacaaagagttgatcagctcctagttctggagttggttattagaaattataaaaaatggtggctctgctcaga

SEQ ID NO: 339976 - DNA, 1000 bp, Homo Sapiens
ttttttttttttttttttttttaattatatagtttattgatctgcttggactttttacaataattaaataattatagatttaagtacataattttaataacatttaaaatgtaagcctcttttcattttacattagtcataaaagcatttgaatctttgtaaataatagtaaattattaacaaatatggagaaatcaattcagcaatctgtgtgaacacaagaggttttccttttacattttaaaaaatgccgaaaatgagatatcaaaattaggaaatgacatcttcttttcattaggcatgtaattattttacactatgtgttgacttccctagatcacaacagcttaaaagagggttaagccccaaaacacaaaacaaccaaaagattgtaatgcccgtactaatactttctaaactggctttgaaatagtcaccacttcatcacattccattttgttttattgtcttttcatgaaaataaaagtcttcccctaactggtaacatccacattataaatataaccttcctactccagagctataatttcagttttgactgccactcctgctattcaactgtcatcttctttatatgatgaagaagagcatctttttccaagtgagcctctgcaagagccattttagctttagccagttcctgtttaagagattcattctcttccatgagctgttccctagtgaagtcaaaggagaactcaggaaagttagctgactgagaaggccaaggaacccctgggcttgtctgagtggcttgcgtgacactgcgttgtttcttcagatcatactttccactggtcagcagcactgaatcgcttttgacattttctttcaaatcatttccagtgttaagcatgtgagaatctctgatatgaaaagagccatcgtcacttctctctaccacaagatgatcaatatgtacagttacaggagctggttcaagggatactgtactactccggggactatcatcttttaa

SEQ ID NO: 339977 - DNA, 1000 bp, Homo Sapiens
ttttttttttttttttttttttttttttttttttttaaaccgttaaagttacatttttattaaacagccaaaaatcttaagacaaatacctacagaccatttcttcattggcaaatattttccagtcataaaaggtgataatttatgggattatattccagtttcctctcatgtaaataaatacatacactgaatctctaataccactctctctagatgtatacatctatttggaattgctttcttagtatgcactcagcaagcactagcataagaacacctgaggttctctgtcctcatttaatacctgtaagagaaaaggactttattctactgaattctgccctttttttgcaacaactgaattatccccatatttatttacaattttaagcttgattgctgtccacggagttactgttgcttctcaattataactagtgttagaaggcttgatttcataaatgttctttttaatccaaagatagatcatatatgaaaaccttcctcaatactcctttcaaatcagatgcatataaactatgatcccaatttccctgttagatgtatttctgttggatatttcctccgttgtcaccacagaggaagggaaaaagcagaaaagctgcccacctaacaaaggctaacataatggctaggctaatatattgacatgctatcatctttatgatgttttgaatctaactagcagacatatggataacttcctgttgaccatgtgcatctaatctgctttcttaattatacaaataatttttatttcaaattagcttctttctactactcagtataatcctctcacagcctggcatatacttggtagcacatcattcactagagagagtacgagagaaaattaggttgacaatatggggcaaaggggtagtctcctttaaggtgaggggaaaggagatgggaatgaaacatgccaagtgtatgatggttagggaaagaaatatcttagtagaagctagaaaac

SEQ ID NO: 339978 - DNA, 1000 bp, Homo Sapiens; identical to SEQ ID NO: 159294

SEQ ID NO: 339979 - DNA, 1000 bp, Homo Sapiens
agactttatcactgtataaaaatgtacagtggttttattgacatgtacattccaatatgtttacagctgcaagataatgaggcacactcagtattgcacttcattaaaatttcaggctcaaacttaacctagaagtttaaatgaaattgcatttgtaatttagtaattcttatacaggacaaacattgatatgtttatatacagtgtgatacttattacatttatatgctgtcctaacacaatgttttttttttttttaaataacagtctaggaaataaaccagaatattcctctttttatccccacccgtgatgcaattgtacaggattacaaaaaggcagtatacaataaacaatgattatttttcttttttgcttgaaagccagcatcgttcttagtccatgggcatggcgattcttttatatcaattatctataaatgtccaatgcttcacaggccaatgacggtaatggccacatgcaaacacctcacaagtttgatgtcatttgttcaaaagaagataaaccaaaataatggggaaacttttcatagcaagaattatgtacatggtatttggtatccttcttgcactgtgaatggttcattttcatggatgtaaaaatggtcccgtccttatcctgagcagagtttaaacttcaccgcatcctcttgggggatgaaggcaatttttctctctgtagacaaaggatctgcgtgttctaaaaagtgtgggcatttctgcacactccacatcccagagcaaactcttccccagtgggtggatgaacaacatggagtggacattcagttccttctaactgcttgcctttgggacctgcaggacagtgtggtagttcttccttaggaatgctagtcattctttgaaaatcatcatgacaagcattacaaaaatgtgttgttccaaaacagaaaaaaacagccactgaacagcagtagcgacatttatattccaaaaagtctgtgccatgtttgggacac

SEQ ID NO: 339980 - DNA, 1000 bp, Homo Sapiens
cactgaggaagctctttattccagcagaatccccaccctggacgctaaggagacgagcattccactgactgtcaactgggagccgtgggtttgtgtggatgactctgtgtgagctgaaacagcctctgcagggtaaggagcccacagactgtattacagcccctgctcaccaagccccgacggccttccgcaactctgccctttggactacggaggaacaaaataatcgttcagttttctgggccacaaaatacaagatgggtctgggttgtacaaggagcttacacacggaggcaagaaagcgtgcaaacaggggcgggaatttttcaccccctgggtgagccagtgctcaagacatggaaggaggacctgagtcaccctcccggagtccacacgggtttgtgtttctggcttttatgaaccatgtccaactccagcttccgtcttctcctgagaggaagaagaatattctatgacgtcaatgatttttttccctatcacaatatcataaagaggtccaggagcaggcctaagagaaggaccaacaaaagccaaagtgtctgagaacaacataatactgacttttctttgttggtaacagtccatgaaacgtgcacccctctctcctgagacacggtgaggcatgaggggaggcggcagaggagttgtgggtaggacattgtaccgtgtgacatcacgatcatgcagccagtgccgacgggacagagatgtgagaacaagcacgcagggctccaggctcacccgggagggaggtgggcggtttccagctaagtgcccagcctctcaggaacactgtctgtccagttcagccagggccatcccctggggctcgccatctgggctcgcacctttagccctcatcttccctcagctcggtgggtaaaaacttatactgctgctggcggatttgggccagttttttccttgcttcttccagttctcgctctttctttagcatttcttcctgggcggcgatgat

SEQ ID NO: 339981 - DNA, 1000 bp, Homo Sapiens
ggagaaaatggaaatctttatttttaaacactagtacattttcaggctgttttaaaaaagaaaaatcatgttacattagttcaaaactatgcatcaaagcatatttatttaaactctaattttacaaacacataatgaaagaaacatatattttataaatatctactcggaatatgtattatgaaaaaaagtgtttaaaaataacagccccagatctccctctttaaatatataaaattcgcataacaattcataagaattctttctcaagagccaaaaatttcatttcacaaaggccaacaactcagttcccatcagacacaatcaaaagtaataggaatattcaaaaatgtaaaagttctgtacaagggaaatacagatagcacacgggtaaatctcattagcatacatgccatttgtgttttaaaaatgttttataaaaactgcaatttgaaacaaataagtgagagtccttccctgactgtggaaaatatataaattatcgccctacccgctgggtaccgaggtgccacctgctggagctagagagagaggtccccgtgtgtttcctgacagggccctaagccgcacaaggggacccgcctcctctgtggcagtggcttttccttgtgggtgattcactagtatttcctttcacttagaaaacttctttgggatcatagaagacaactgctcacaagtgaaagcaagactagagatgatttcagattgctgcgtccaattcattgtgtgtattttgtatttttggtgaccaaactctggaaacccgatttaccactgtcagagacacaccctgtcacctatgccagcaaatctcacggcacagccccaaggatgtcccttcatcttctcttttccaacccaagctgctctgtggcctgcagcgatgtatgcagactactgtctcttctggcacttcttctggaaagagctcttcaaaaaagtgcggtatacagggtcggccacatattcattctta

SEQ ID NO: 339982 - DNA, 1000 bp, Homo Sapiens
ttttttttttttttttttgggagttctctctagttgatgtttattagtctgcatagtgacttatgttccaaacactggggatcccctcagcccctcctatcttacataggaatgcaagttaacttgtttcaatacctgttataaaaaaacaaataccccttttaaaaaatctgattcaacatattttttatttcacttttttccatttctttataaaacagtcatctcactagcagctctctcccctagagtaggggaagggggtggaggaggttgggcacctccaaaggagaaaaaggatagcagggaagggcccaaggttacctcctgaggttcttctgggcctgtttcaacaatgtgtcaaagtcaagagaatcaaatttgctctttacaggtgctgggtcaaagtcttcccggttggagtcaagatcagaatagctcctcttgcagaactgccttcggcccccaaagcagagatcaaagggctgctcatctgcctgccgcagcttgtggccactctcaatggctgcaaatgcctcctcagcatagcgataagtgacgaagccgtagttgtccccttggacacggaagtggatggtgcactcctcaatctctccaaaaacggagaacctctgtttcagctctgatcgagtcatgcggccaggtatctttccaatgaagaccacccttctttcttctattgcacgctccttttgtagcactctttgcctttggtaatggtcatgtgaacgataagagctgtaccgccgcctcctgtcacttctccggcggggggatggggatcgtgagcggcttcgagaactggatgatgaggatgaggaagacgaagaggaagatgatgacgaagaagaggaagagcatcttcgagaacgtccagaggaactacagctggaccttcgccacctcttgtgtgggggggagagggacctggaccgagatcgggatgaggaagacgatgatgaggatgaggaagatgctt

SEQ ID NO: 339983 - DNA, 1000 bp, Homo Sapiens; identical to SEQ ID NO: 159295

SEQ ID NO: 339984 - DNA, 1000 bp, Homo Sapiens
tttttttttttttttttttttttttttttcgcatggattccctttattgaactgtactagttactgcagtcagattaagtcacatttaaaagcagaccatccagttgcactgaaaccgattatattcattacatagttttaatcactgtccggtgaactggcaaatccaatcaaagcattagtctttaattaaaaaattaaaaggaaatattcagacaatagccaagcaatcacatcacgatgcacaattacctagaattgcaattaaaaagtagttaaccgaagggggtggggggtgggggggaagaaaaacaagaaagaaaaaaaagaagcaaagaaaaaaaatcacactaattcttttttaaaaactatcaatataatacatgaaggaacaaaggacaatagccttaaaaagcaggtttctctaactctagaaatgtagtctgcggcggaaagtctaaaagcacactagctgtagcaggacaataaaaaatactgagcatggaatacttttaatctctgccattaatattcatttccagctgcttataatagcagcgcctcatggccaaatcattagagttttacatctgggttgcaaatgacactttgattggatgtaatgttcaaatggccctccccacggcgtctccggcaagccttctgcggagaggtgtcctgttgagcgatccctcactgtgcgtgctggctcatcgtgtggttctgcagctcggtctggaagaagaacttctgagggcactgtgagcagtcgtagatcttgtcctcctgcccgtgcacggcaaagatgtgctgctgcaacttgttggcctggacgaagactgtgaaacacacggggcatttgaaggtgccgcccatgccctcgaagctgtgctcaatgaggtgacagaggagcttggccggggagtcgaacatctggttgcacagcttacactcgtggttgatgccttcctcaatcatgtggttggcaacgtggatttgg

SEQ ID NO: 339985 - DNA, 1000 bp, Homo Sapiens; identical to SEQ ID NO: 159296

SEQ ID NO: 339986 - DNA, 1000 bp, Homo Sapiens
cctttgagacggagtctggctctgtcacccaggctggagtgcaggggcgcgatcttggctcaccgcaatctccgcctcccgggctcatgccattctcctgcctcagcctccagagtagctgggactacaggcgcccgccaccacacccggctaattttttgcactcttagcagagacggggcttcaccgtcgtagccaggatggtctcaatctcctgacctcgtgatccgcccgcctcggcctcccaaagtgctgggattataggcgtgagccactgcacccggccatggcattctttagctacgaaattttgttagtaacctgaaggaagagtgagaggctgaccttaatacccctaaaagattcaggctatggctaagtgatccctgggtcttacaaaggaaactggaggctactgggaaagctcagggatcctgggccatggtcttccactctgataaccaattcattctcctcatctaccctaaagtttcctgttcacacagagagagtcagaggtagggggcatggataggggagagagtaaaatctttagtcttcaagttccttcctactcattggctcatattctgaagtttatccagttttgtagctaataggaaggaggggagcctggctgggcaaagggaaacagagaagccatctgtcaagggcaccgcacagccacagggaagctggggagggggtacctgaaagatcccattggcagcagctcatgggcactgcacagacacacggaagctagggagggagttacctaaaagatcccattggcagcagctctgtttctcccgatttcaaatcagagccaactcaagagggagggacatgcttccaagcagtgaagctggggccaagtgtctacagggatgcttcgtgaggcacccccaaagcaaggatcttggccttctgttcctccacatgagctccaggtaagtttatgatgggacagattacaacttcaaacatcaaatgtggt

SEQ ID NO: 339987 - DNA, 1000 bp, Homo Sapiens
tttttttttaaaaatagaattactttattaatctttgaaatcagtaattccaaagggtgcctttaccctggctcatgttgtcaatggcacaccgatttgtctcctctctctaggaaacttgtgatgaatgctcctctttccccctagatcctccgaaaagggaggaacaactttggcggatgatgatgttgaaattttaagcttgtacaaagaaaataaagcttcatactgtaatctggaaaagaagaggaagcaaaatgcaaatagccaaagagcctcttttatatcatctctgtgcagcagcagtaaagggacagagaagacctaagcagtttgggggcatggggcaaagggaaggtaaaagatacaagtgtgctctgacggggtatataatgcatcagctgaatgtccccactgccaagttccatcaaaacccagaagatctgctttcttgttgtcccagtgaaagtctgcattggctgattggcaaccatctactgccacttctgctcgaaggctttggggactttgaggcagcaaaaaaaaaaatactatggaccccttgaagtgctggtggatgcttcaccctcaatcatgcacccaggagtggtgaacaggttgtttctctgtgtgtttgtggttcatattttagtgtgagcaggatctgtagagctggtgatgggcacaaaggctgcagggttaaggctgctctggagtccattcagctgcccttccgcggaggaccctttggaagctttctgggatgttgcccttctgagcacttgttcgtggttgggtgggggtttgggaaccagggaggcgcaagaacttggaggtggtaccactttttgtggcagagtggttggcttctggccactagctgtggcactggaaattctacaacctgcaccattattcattgtccataaattggagttaggtagtgtctggctgccaaagattgcctggtgccgggctcgactctggtccaggagctgcc

SEQ ID NO: 339988 - DNA, 1000 bp, Homo Sapiens
tttctatgaaacctttatttcctttgaaacctccagaaacatgccagaaaatctcaagacagggatggggaaaaaaaaaagacaataaagaataataaaaaaaaaatccaaatgaaacaaatcaacatatgaaaaaaaaaacctgctgctatcttcggccattggatagaacatcaacctcaaattaaatagatctgtttttgcagaaatccttaaaaaataacagaaaacaaaaccaaaaatcataatttacacttgtccatgtacatgattaagtccccaaaatgattcgaatgatctgaagatgggaggagacaactgaaaaaaaaaaaaaaaaagggacccgatgagggtctaaggggtgggggtgggggacgggtgggccccccagagaaggggatgggggagaagatggcatcacagtagctggccagggctgaggacgctgcctggggcacgcccacctcactcttggtgttgggggtgagggtgggggcaggggcagcgctgaggtttcctcctccagggggccagaggctgatcacaggagacgcgataagaaccctcttctctcacccccacccatccacaccggcacctccgagtgcctgcgtcctatgcagtccccagagccccctcctctgaggttcctgaccccagagagaaggcagcagaggtccctggacaagggccgggttgcctggtgctggctcacagccagacctgctccgccaactcctccccgcctggtgcctcccaaaaagggcaccggcctgccctgacttcatccctctggtcctcccactgacccccagcccacaggggacacgccttggtcctcagcttgaggttggggggatgaatccacagactgtggccatacaggcttgttctggcgccaactctacatgaaaaaataaatatatatatatatatatatatatctttttctgtttgcttttaaagaaggaaaaaaagaaacggtttcctggaggaacag

SEQ ID NO: 339989 - DNA, 1000 bp, Homo Sapiens
ttttttttttttttttttttttttttttttttttttttttttttgcactggctgtacctttattatttttacctcgttcactaacagctccgtgacgcaaggttaccacacacagttagatagtgtctgcattgcacatctaaggctatacagcaaaagaatcagaattagtacaaatacaagaactatatttacagtctgtatactcaagctccaaacatcagataatatttacaaaataaaacatgaaaatgaaaatccaaaattaatgtacattgttgctaatgtgctcaactccttcacgggggagagatcagtttgcaaagtcttggttcaaaaaggccacttatgcattatgggttttgttgtcatgtgtgaggatggtgacaagagacttgaaatctcaacagacaggtactttagagccacaaagtctaagacgatgccttaaatacaagaaggctgagggactcctcaagtgagctgatgccagaataggcagaatgaaaaaaaatgaactcgaagacatgaagaacaacacacaacagccacggtttggcaagagaccaacctcagctcagactttccatctgagcacagccgtttggctatgagctttttactgaattttatagcaactctgatttcttcctttaaatgattggaggctttttaaagatcttatggggctcaaatactaacttcataaatggccttttgaataacagcagcaaataatctctcagctgatatttcaatttactaaggaagcacaaattaaaacattcctgctacacagtcatggtctggccacacactggggtgaatcactggccctggtgaacaactgtagtgcacacaagttagagtcctatgtaaacacatccagcaaaccttctgggagcagcagcatcatgaatcttttctttttttttgagacggagtcctgctttgtcacccaggctggagtgcaatggtgcagtctcaactcactgcagcc

SEQ ID NO: 339990 - DNA, 1000 bp, Homo Sapiens
tttttttttttgagcacaaggtcttttatgaggcatcaaatatacattcttatatacaaggaggaaaaaagacaatgcctgaaccccagctcctctccatacagcccctcccactgccaccctcccccgcccccaagccccagtggccctggcccttcgtacagccagggtccatctgtctgtctatactgcagcccatggtggagaggggagagggaggcaggagctgagtgaggagctggatatgcggggcaagaagaggagctggggcttgtaaaaaatatatttataataaataaacagggctgcaaaagggctggagaggcagcggagattctgacggacagaaggactcaggcattctggctcccaaccccagctctgatggcttcaatctctgcctcaggaaggatatcttgggctcatggtggccctttgggagcctctctccccagggctgatgctgggtgcccctgccccagcgaggtgtgtgtgggtgatatctgtaaagtgcattgtcttcagttgtaggtggggtaggtgtaagggaatggcgggggggcatgcaatatgggtgagggagggcagtgcccttctcatcccagacctgagccccccccaaaacctgtctggactttgatcaggataagaacgttgcagggcgaggcaagttcctgaagccgaagaggtctgggctggggcctactggagaaagggcatagactggctcgagagaggaagcactgccccacgtggggccaacacaagcagggtcccacccaccaagtgcatcaatggtccgtgtcctccagcaggcaaaaagacacatggaagtgtgtggccaggccctgaggtcagagagagggccaagccagctgaagtttggccacaactctacagagcgctctcctagccccacacggccagaggagccccagggaagccttcaccccgacagctccggacacctgcccttctccgccagccagagctcacagag

SEQ ID NO: 339991 - DNA, 1000 bp, Homo Sapiens; identical to SEQ ID NO: 159297

SEQ ID NO: 339992 - DNA, 1000 bp, Homo Sapiens; identical to SEQ ID NO: 159298

SEQ ID NO: 339993 - DNA, 1000 bp, Homo Sapiens
catgaacttccagtgagtgtttaatagtcaaataagttactgtaaaaataaataactcaaaaactccaataagataaagtgaaataactatgaaggtaaataactcagataataattgtaaagataattaaaaataaattccggctgggcgcggtggctcacgcctgtaatcccagcactttgggaggccgaggcagggggatcacgaggtcaggagatcgagaccatcctggctaacacggggaaaccccgtctctactaaaaatccaaataaaaaattagccgggcgtggtggcgggcgcctgtagtcccagctactcaggaggctgaggcaggagaatggcgtgaacccgggaggcggtttgcagtgagccgagatcacaccactgcactccagcctgggcgacagagcgagactccgtctcgaaaaataaataaataaataaataaataaattccaagcaaattaatttgaacatctgtaactcctaaaacaaaacaactacatataaataactgaaaatgaacaactaaataactttgaaaataaagtaactataaaccagtaactgaaactataaaattaaataaccagaaagctacaaagaaatgaaaatcaactaataaaactaaaaataaaatacaactgaaactaacaaaactcatttaaaaactaataaatcgatacataaaatacctcagaaagtaacttggaacgaactctctctacaacgaagcaatcttggcactaacacgaacaccccatgaacgctcgcagggatgctgggaggcggaccgggagctcccagtctgcggcccccgccgggtttgagcggctccggctcctccaaggctcgggctaagcggctctcaaccgattcccaccccgccctggagaaatgcgggcgtgtctgcaggcatttttgattgtcacgatttgggggcggggtggaggatggggtggcgcattcctggcacctagtgggtagaggccaggggt

SEQ ID NO: 339994 - DNA, 1000 bp, Homo Sapiens
attatacaaattagtagtttatttcttcctttagtattacagttccaaaacgtaacttgaaggtcagcacaggagctgctgtgatataaaaggagagagtcacctggcgccccctgcagtcctccagttgcccagcagcagtgggacgctcagtggcacacagtgggtctctgtatggcctcccacctgcaaggacttccccgggcaggcccagctgcccagaagccccggaacacacaggaagacaacactataggatggcaggtggggatctgtgcaatacaaacatgtagctagaaaacccaaccgaggatctgtctagaatacttccgatatcaatataccgtagttgaaaccagaaccgtctccagctgtcagcagtcttggcggctactgtacagctgtcagcatgactacaggcagcgcccgaggctatctggggtaagaagtgggcctgcacatcacatcggtgagtcagtgagagtcagggccagagggaaaagcaactcggaggctgaggctggcacagatacacacaagggagtcacacacataacataataacttgttatataaaatagatatgtggaatctagaaacaccttgagaaaatagcctataaaaatataaactgtagtgagagtgtacaaaagtattaacagaggttcaacccataaaaaaccccatccatttaaaagttggcaattcctagcaggtgttgggagggagctcccctcggtcctggtgcgcacgtttggacaggcctttgggtttcccagctggcagggtcccccttgcaggggccacgggctgggtgttggggtgaaggttcagaggaggaacagcagcttggggcagcccctgtcagaagggccccctgccatggcagccagtggaggccagggaccttcagggcactggaggggacagagcagctctttcctcagtgacccgagggaggggaagtgttagcgcaaaagagtggggcccacagtcctgg

SEQ ID NO: 339995 - DNA, 1000 bp, Homo Sapiens; identical to SEQ ID NO: 246503

SEQ ID NO: 339996 - DNA, 1000 bp, Homo Sapiens; identical to SEQ ID NO: 159299

SEQ ID NO: 339997 - DNA, 1000 bp, Homo Sapiens
ttttttttttttttttggcacaaaatatgttatttattgtcaatttctgcaaagacacatttaagcaacaaaatatacatttgtcaaccttttagaatttgttttgtacattaacaaatacaatgtgctaccatagcaataaattaaatgtacattatttacattacataggcagttgggatctacgaatcacctcctcactaagaggaaagaaagcaaagtcgtcgtcacatggagcatcacttccaagccacagttcttaggttcgaccacacaggggaatctgcacactcacacgccagcagtccccgagctggagtgtccaagggtaacacccaaaacaggagagagctgcacgcatgctaaggagcaggaagcgggggggggagggtagttcacacttccaagcagaaatgtcacaaaatcaaagacgatggcaattaaattccagtcttccagccaaatgtccccctccccagggctggtaaggcacaggacagagccgctgccccacagcctctcactcggcagggctctgctgcccttggccctagtggcgcttgtcttcttcctcccaaaggggcacacggtccagctgaagggagggagacatgggattggggtgtacaaggggctggcggtaaaacagagtttggtaaaagaataccccagccagccccaccaggctgcaggatcaggcttggcaaactttactggcctccccttgcctcgatacagggtagctagaggctgggggaggagccgaggggtcctgagcatggctgactggcctggtccctgctggcctcctgtacccatgagatctactcgaacccccaactgcttaaaacagatctgtctctactgacttagaaaccaatgagaaaggtagtgtttgagttggcacctggcagggtcagggaggaaagcgaaacaggctcttgtcctgccttgtcacgggagcctgagtttctattaaccaccttcgcttaagaatcag

SEQ ID NO: 339998 - DNA, 1000 bp, Homo Sapiens
aaagggaagcttagatttattgagcgcctactgtgtgccaggcagtgtgcaaggcgctttacatacattatcgcattaaatcctcacaacaaccctgcgaggtaggtgtttataaacccccatttgacagatgaggaaactgaggctcagggaggtgaagtgatgtggccaagttcacatggctaataaatggcagacagaggaggtgtccaaggatcggagagaaaaaaaaaaagacttcggtgtctgagtcccaagccggctggggtggatgagtacaaagatgggcccggcgggctctagaagtctgggaggccggaggcctgctcccggccccgcacggctggagactgcaaggcgggggacccgcgctcgggaactagggataggattgagtggcagagccgggattagcaactggggagatccgcgacctgcgcgcgccctgtagtggctatagagagtatcacaccccacgcctgctggcttctggtgaccggcctctttccttgcctggccggtttctggaagaggccaagatgggagaaattctcaggattttttcaggtgggcgataccacctgggagggagatcgtggccacgcctcagagcatcactaaggagcatcggggtggaggaaaaggggaaggcctaaagaggtcccaagctgattcattggtgtccttccctccccagctcagaccaccacaggccagggtcagtgacagggccgctatcttgccctgccttggggagccctcaaccaaacctgggagactgggataggagtgcctcactcccttacctcttctgcaagccttgggcagtctcctgaattgatcatgactttgggtgacacggaggccgcccagaaaccctcaaactctgttcacttattcccaattctcattcttggcttgtcgaggggaggatgagatagagtcctttccaaagatctcaaaatgtcagagacggaaggatggaccttagaataccatc

SEQ ID NO: 339999 - DNA, 1000 bp, Homo Sapiens
ttttttttttttttttttaaaattatgagatacttttttatatatgctacattaacaataaaaacattgcaaagggaagtaatactcaagagaatatcatcattttggaaaatacctggcattattttgcaaaacttgacaagccaacaactccactcttacgcataaagtctcttgcatatgtgtaccaggggacagtcaaggatgttttgagtgtactgtttctaccaacaaaaactaaaaacaaatgtcaactgataggaaaatgaacacttaaattgtggtatactcacacagaatactatagagcaagtaaaccatccatgcatataagcgcaagaatgaattttaaacataaactcaaaaaagcaagttgagtaagacttcacattcagacactatatgtagaaagcttcaaaaaatgaaacagtatgtttggagaacatacatgtgtgattaaaaaatggcaaggaacaataaaaaatgacatggggaaagaggtaagaaaataggaagaacatacatataggtaattggcagctttccatgtctttaggtgtgatgagtttttaagtgttgttattcatcataccttacaagtaatatataattttatctatatatcaatcattacacaatataaaaaaaatctttagaagatgcctatctcctaatgagtcagtgaatggtgggaaaagtccattttctatagactaaggcagcacactttttctgcaaagggccagagagtgaataagttaggcttgtggaccatatactctctgatgcaactattcaactctcacgttgaactagacagcagccatagccaatatgtaaacaaatgggtacagctatgctccaataaaacgttatttatgaaaacaggtggacatctggatttagcccatggaggatatttgctgacctctggtcaaagctaactgtttaaagtttatgttccattatttgccattccatttctttttaaatttttatg

SEQ ID NO: 340000 - DNA, 1000 bp, Homo Sapiens; identical to SEQ ID NO: 159300

SEQ ID NO: 340001 - DNA, 1000 bp, Homo Sapiens
tgtgtgtgagaaagagacctttattcagcaaacaggaagcactacagacgctgggaatccccctccctatgacaggggcagctcccgccccctcagccccgtgactctggggctgctctaggtgtttcctgcatctgccccctcagtcataggcctcatcttcatcctcttcctcatcaccaaagaagaaagtctcttggtccaggttctcagactcatcgtaggagaagctgtcattgtccagctcctcatcaaactcatcctgctgccactcgggcacatcatcctcatcgtcttcctcctcctcttctgcctctggccctgaggaggcctggggctgactgccaggcatgttgggtccttttgcctcccaggcctctactgatggactctgaagaccaacccggaaatcctgggcagaatgctgcaggatggcaagcagcctctcctggatccgccggagcagctccatgcccgtgctgaggcagtcggcccgcaggaggcgcagggaggaggccaggtctctgcaccgcagcagggtttcctccaggaggatctgcagggcattggtgtgcagctccaggttctctgtctgctgctccaccacatccatgtactctgcgtcctggctgtagaagctgtacacgcaggcgtaggccagcaccttccgagcctgctccagtccctggcaggcatcattgaggaaggtgaaggatctgggcgggggcacttcatggatggcagacacccggttccgcaagttcacagcaaactcccgcgcctggtgatggaaagtgcacctctcattatagtcctgaaaccgcttctcctggcgagctgccttgcttaccatggcagagcagttgtaatagtctttgtgatttggcttccaggacttgaggcagcgccagcagaatccatggttacatttggcacaggtcatgtgcaggcacccctcgttcttctcgatgggagcctgacagctgggacagcgcttgga

SEQ ID NO: 340002 - DNA, 1000 bp, Homo Sapiens
aaagaaataaatccttttattttataacattccttttctttttaaagatgcatacagtacttgtaagcccatgaattctgaaaaaagctatagaagacctggcactatttttgagaattacaaaactgggcagcagaataacacctttataaaggtcaaaacataaagcaataaaatttagtgtttgcacacaaaaataggggggttacattcaacacgttttttaaacgtgcatttaaaatgtttaatgttttctaaaactttggttgtcatgctttattataacttgttaaatttcacaattatgtagataattgaacccaaaaggtaagcaaatatatgacattaacacagcagcaaaagcaagctaatactgcacaatcatattagcggactgattcagaaatacatgtttttcacaaataatatacaaacttagtttctgataacatagttcaatgacttccacgttataaaataaggctgagaaatgagacataccagaacatgattacataataaaatgtgtatttttaattacaattctaattttacatatagggcaacaaattgtagtttctatagaatagtgcaaatgagcaggacttttctcaaaaatattaaaattgaattcatcccatgtgactcagatttcatgaattattcatgaatattttaggtttttatgtgatgaatataagtggtaaggttgatataggacagatgtgtactcataggctgcaaataaaaatagccattgacttaatttgctggatgtgaagtgcaggcactgataacataacttttagaaagttccatttgtcatcatgtaaacacttttgttcatcatacagtattttatcgaagattcataattcatttaaaattgtcatatcgagtaattcctccaaactctttttgatatgtggtggttgagatgcagcctgatttaacagattctgacccatctgtgcaaagagtgcttttgataatttagctg

SEQ ID NO: 340003 - DNA, 1000 bp, Homo Sapiens
tttttttttttttttgctgtatcttttgagactgaacctttattttctgaaaaacaggtatttcatacaatctttgccatgttaatgcaaatatgcacaaagtaggcatgtatttgttttccaaaagatgcattatgaacattttcaggaagctggtgtgatttattcaacttttaaatacaatcacaaaattatatccatcaggaggcattacaaccttttgtacagaaaagccactatttatacattgttactaagacaaggaagattcagttcaactcaacttgctcttagaataagggtaaaaagtaaattaacaagtaagtgaagtatgatgttgttgccactgacattacaggtggaaatataagggaaatttaaaccagaaaaatgacacaataactttaaagaggagctgaaactttgtcaaaaaaagaaaaaactattagcctgttttcaaagaaaaacattctaaaagtgtgcatttcagaacatagaattcttctaagtttaccatcttcaaaaatcttctaaattgtatgacacttttacattagcacaacaaacagctttttctaagtctagccaagttcccatggaaggcaaacgaccctaagtagttcatattttacagcccttgaacttataaagcttttctcattaagagtcagttttacccttctgtaaataaggatggtgatactgttatccaggcctaaaaagcaggaagtgcaacaaacccttagggtttcatgatacagtgaattttcccctccccaacgtttggaaaaaattgggacacttgctagttcttccctgtgggaagaatctttctaatattacccaaatattgaaaacaaaatctaccttctttaacccttgtattagtaattctacctccttggcttatggggggaaaagtcctagttttaaattgctggcattttacaagctcaacaagataaaaaattgaacactggttttcatactctaattttat

SEQ ID NO: 340004 - DNA, 1000 bp, Homo Sapiens
caatcaagcttttaatgaaaagatcataaaataacagtttcttatcgctgtacatttaagactgcacacttctgaatggagagatcagtcgttggtgaattgcttttctatgacactgggcagctgtgtagctgcagctctgacctgaatttatacaaactctcaagggacatgaactcaatgtgacaagtgacagcggcggtggccagtacaggagtgcgatcccggtgtccctccccccttctgggaagggcataaaacaaaacatgatccctcttccagttccaattaaacaaaacagctataaccccatccctcccccctccccttcgaggtatttgcgagaaatgagccagtgcccaacctgggtcccccccggggtgggagagggcagagggaagctagtgatgggtggggtagagaggctcccctcagcacctggccccacggggcccgccaagtggagggtgggagccctggggatcctccctgccccagtgaggtctgttatgcagcatttttgaggtcaataaattacagcaataaatagcaaggtgaggtagggggagggggtcctggtagaaagttaaagtggggtgactgaagccggggcatcctaggaagggggtcctgggcagcctcagttcccaccgctcatgcccacccccaccccggcgtggaatgtcagactgaggctccagttaggtccctccccagccctcactcctggcgtctgattcacaggttcagtaacatctgccccaacggggttctgggaaataggaggaccttggtccctttagggggcatgccagggctgagagcccttgtctgctctaaggcctggcacctttggcttttgtcccccacgcctgggggtggacggatgcagcctcctgctccctgagccctgccctccggctgcccaggcctcaccccaactcaggatggccgcaggagggcagggggtcagcctgcccagcggcccagcccggatcgc

SEQ ID NO: 340005 - DNA, 1000 bp, Homo Sapiens; identical to SEQ ID NO: 159301

SEQ ID NO: 340006 - DNA, 1000 bp, Homo Sapiens
ggtgcagcgatgtttaatggcaattcgtataaaccaagcccatgcacaagtagaaagtgcccgtggagccggcaggaggcccccgccgcgctagagaaccacaagcccggccgtgcagccctccccgcggcgccttaaatagattcttcactatactctgtatgttacagtatgtacaagacccctcccctcgggggacggggcggactccgcaacgcgttcctatgtacaccacctccccttcggccctgaggtcagtggccagagtcgggtgatggggtaagacagggccagagagggaggaaacagacgcaaacatgcggagtcgggtggggacacggtcagccctgaaacacgaggggcgtgcgcagcgaaggcagtggtgggaaccgaggcggatacattcagagacgcgtcgaacaaataaataaggcaagtcaggagggggccgagtcgggtgcaggcaggaggagctggggagcaggggcaggcagggctccggaggtcacagcggaagatgcaggtatgtggggcgcgggttttctggagccaggaccaaaagagacggggcacgaccaggagggacgaggagaggggtgtgggagcaaggcgtggggaggagggaggaggcctacagagggctccaacaaaggtgaacaggaaagctgccgacaggggctccccctgccccagaaagccctctccctgttaagactgcacgaggcgcccccagggtggtgagaaaggcggtggccaggtcatgtggccagtcccggctggggaagcccttccagctcctggttctgcttcagttccctcatcctgtgtcggcagcgccgcaggaatctcatgatcttccgggctgcctggtcctgcttcttggtgagaaaggagcctttgttgcgggcaggcagggtggccgaagtccggtggggagggccgggcctgcggcggtaggagcggtagtgctgctggatgagcacagccgctcggcggctct

SEQ ID NO: 340007 - DNA, 1000 bp, Homo Sapiens
taacagtcaataaatacatgtttattgattaaactgaattataaaaaacaaaaccaaaaaaaaatttccttctactactaagccatgcaggcagagtccacaaagacaacttcctggccaaaacccagctgatccactgttggtataatcttaaaaaaaattacccatcaagaaagtcaatcgtgtgcagaagacaggaaccccagctctgctaaggctgtggctgctgcagagactaccaaagagtaggattaggttgtagatagacgtgaccaaccatagttcttgaactttctcaaaggcaaaggctgacttcaaagtccattgtctgtcaataaaatggcatcaggcaaaaagctggggaagagaagcccagatggatccttggttgttttcagatgtcaaaggttcacaaagctggccaagctgtttctggaagggacttttccagttcactatattatagtgtgctgggggatgaaaaaacaaacaaacaaaaaagcagggtggggtgggagaaatgggtggtaacaaatgtcacacctgtaccaccaggcccatcacatcttgagcattccccagtctgtgaaagcctattaaacagggtcacctagaaaaaaaacaagtttataaatccatttcccctcattttattaaatgttccacttatgtacattttaaagacgaaccatttacaagcttgtgcagtttgcctccttggctcacaggaggggaacattgtggaaagcctcaggataaacagaagacttggttttttgctccttttctctgtacggtacagtacgttttggtttacaaccatgagtacatacaattaaaaaaatccctcatgcaaattgtagaaaaaattttctttccttgaagctggcagtgaaaaataaagattcatgtcattttctttgtgcacacccctgtgcgcttcttcctgtcagattcttccctaagtattaagagaaataggggaaagccacagagcacg

SEQ ID NO: 340008 - DNA, 1000 bp, Homo Sapiens
gagctaagtttttttttaatttttcacaaagagctccagaaggcaaatagtttatcacttccccactctgaaatagcacgcaagacagatgatgcaggggaacgggtgtccactctttcttgttctcagagctcctgcagcaggcctgaatgaaccgcaagcggggcccatgcagcgtgtcctctgcaaagtgcaggtgttcagtccacacacagcagcaccagcactgctgatgtcacggttgtctgtccagaagatcccacgttagatcccaagagaaatccagacagggtttagcctccagaggcagagagcgggtgccaggcccagatgcaaaggcctctatactgacgccctcacatgacactgcaaaggtcaaatgtcaaaggtcaaatgtcttggcttaggactataagggagagataggacaaataatgaggtcaaggaacctctggattgctgaagagatgactttaaaaaaaagtcacatctgcggctcacagtgttcaccaggaaaggacactgcttgggattctagacctgagcagggagaaacaaaccgggctaaaggagacagaactttcttcacagtagaacagtcctagtctaaaatgctaggatttaagtccaaagtcttttaagaatgagagttcttaaatctgtcagaccagctgacaggggracagggaaaaaaaaattctctattaaacaaaacaccacaaaaatcaacccaaacttccttcaaacccagcaacccagacaactaccaccccattaaaaaagtcattaaagtcatgcacacatgcacacactcaaatatgaaaacaaaaaccagatacccaaggaaatcttaggaatcacctaaggaattttcactcgctccccagatgctctttctgtttttctgggggtgggtgggaaaggaagtcacactgacagctaagtctaagcggcacaatttagagttgggtgagttccctttcctccagcggcctagctt

SEQ ID NO: 340009 - DNA, 1000 bp, Homo Sapiens
cccgcttggctatctcaggacaaacgctggagcccacagtaggtttgtccgtaaggcttttattataaagaagattccagagtcccagctgcccccctccagcccccatgggctctgagccagtcccaacactggctgagttggctgcgaggggcccgcatggcccatcggccacagagggtcgtttctggcaggaacggagtgggtggtagtctcaggcgccaggggcgctctgccaggtctgcccgctctctggaacagtcatttccagtgttgcatggggagcctctcgggacccctccccgggtcctctgcgcaagcggcagctattcacagttggtgcatgatacgttttttaatatataaaagctttaaaaaaaaaagtggtgctatctttagaaacactttcagcaagatcaagtagcccagctacagcctcggtgcatcttaacccctctccttttcctggagacggggctcccagctcctgtgccccccatccctcccctccaccctccctgctcctggagaagcccacagagcaccccatggcgcgggcactgcccactctaccaacagccgcccaagcaacaaaaatctgacactacttgaaactgtctgtggccaggatcctctacgggtgagggggaagtggagataacattttggtagttgaagcagaaaccaatcaaaggtcagttcaaggagggctccctgcaccagtgtggatgaggtagagtttctgggctgcagcctccgggctggcggcctcctctcccccagtttgtgcttggccgcctggatgcacggggctcttggcagcaggaccaactggacgttgtggagcaagtgggtgggcacagtgcaggccgtgctgggcagatgggggagcctgaccagctctctggcctccatcccagagactgatctggggacaggtgggaggggatggaggtgcccaggggtcaaggcgggggcgcccctgtctcagagagcagcc

SEQ ID NO: 340010 - DNA, 1000 bp, Homo Sapiens
ggcggtgggcagtttattccacttcatgcagacactgacccacgcactcacggagcttaaaaataatacatcgaaccacacggatatcatcccctcctccccccagacacagaaagacacttggctgagtgggatggggtccgagggtccaaaagcctccgtcctgggagaaggcagcagtgtgggcccaggtcgggggaggggcagtgtcctttctccccggaggaaaagtgcagagccagggctaaggccccaaggcagggaggcccccctctcacagcagattggcaacgggcaggctgggaaggcgtccttcacagtggccatcccctgaagggccaggccgggccgggcccgtgggctgcagctcttgggaggctcaggagcatggtgggcagcaccctctgggtgccgggcaccccaggctcagtcttgggcactgtccgagcgccacttgagggcgtggtccttgtgggcgtcggggacaatctggttgcgcatgcccccgagcaggctggacgtggcctccgtggccaggatgagcggcttcaccacagtcgggggcagctggcggatcacgccccccacggcgcccgtcagccccttctgctcatggccccgcgatgccacgtcacagatggtctgagctgtatccaagatgccctctcgcactgtgtcgtaggccttggccacaccctcccgcaggtcggcaggctgctggcccctgcgcagcctccgcgcagagcgcttatcctgcagggagcgggagacgggggctgccggggacaggatgtcatacacggtctcagctgtggcctggatagcctgtaccaaccggttgctgagttccagggcggcagaggctgtggatgagccaaaggaggcagcccctcgctgcagcccccgcatgaggcggccatccttcctgtactgctcaatgggcagccacagcaggtcccggaacccttggaagagctggacaaccgagtgcatggggccc

SEQ ID NO: 340011 - DNA, 1000 bp, Homo Sapiens
ttttttttttttttttttttttttttttgcctcttttgttaaacagcaacagagctctgccactttggccaaccaccctcctttgtcctcttccttttccctcctgccaagtgtcctattctcaaaaggtctaaatcactgccttccagcttggtgggcaacctgctgggggccccaagtgaggtggggaggggctccctagctatttcccagtgacctctatcacatcatcgtctttatcctcatcatcattggagctgaacccaacctcggcaacctcatgagagtcaaatggaggcacctgggaccgtaggaggccaccagctgggtagcctgcatgtggggacatgtagcctggatagatagacatgccccgcgaaaggttgctgggcaagacaggggaaggaaaaggcgcaaacatcctcggctcggacaggagtggctgtgagaatgggagtgaatagctgggtagtatccctggcacagaagggttgagcatgaaggaggggttgctggcagtgactgaggtagccgtggaagaggaactgacggggcctgctggcaccagagggtcagtagtcactggaaacaccaggcgggcatctgccagcaaattggacagctggtagtaggagggggtactgcccataaacagggagttctccccagcctgggaggtgaagggggtggtgaggttatggtttaaggagacgggtggcatggcaaacccgccagagactggatacccgtgttcatacggctgcacgggggctggcagatgacccttcctggaccgccggcgggatgactcctgggcagcaggtggtgtggccaactttcgcttgtggccccttaagtccagcactgggtgcctgtcaccacagggctggccagtcaccaagagggaactattgaggcaatgaccccctagtcgaggctcagttccgagagctgtcccgggaacagcactgctgtccataagttgggccggggggccagg

SEQ ID NO: 340012 - DNA, 1000 bp, Homo Sapiens; identical to SEQ ID NO: 159302

SEQ ID NO: 340013 - DNA, 1000 bp, Homo Sapiens
ttttttttttttttttttaccttattatatagaatttgtacaatatatttcttttcgtttgcatattttacccacagcttaacatcctttttacaggctgaactcactcaggctgatagaatcaaaattctttcaaccaaataagaaaaattcaaaatcgtaaacccgtaagaaaacaaattaaaaacggtgatgaaaatacgtcactcctctcgttaggaacagtgtctgtttgtacaacaggtatgctctggaacaggatttctttacagcgtaggcacgtgtttccacctttgctctgcgggcttcgcctcctccgggcctggggctcctggaaagcgccgggacgcggcggctctggctcggcagcgccacccggtggccggagacagaggcggccgggccgagccgggagagcagccgcgggtgcgagcggactcaggcttgtttcccgtgaactgcagcgaagatcccagaacagcaagggcagtgggcggacaggtgctctggggagcccagcgtttatttacagctgatcttcctgacgggaggatggagtacagcggcggccactgccataggggaggtgactccggccctaccgcccgctttactcggagtctggggtgtggaggggcgtgggtggcgctatctcgtctaccttccaggttggctgtgagtctgagcacgcagcggggcctccctcccaagcactaagacttgtttcctgtgagtcccctcttgggaaactccttactgggaggcctcctcgggtctgagggatgaagaaggtggggccttctctggggtggtgcaggcagctcccaaagcaaggtaggtttggcaaagagcaaaagatgggaaaagggtttctacggagccagcagcacctgcctattcaggtcccaagccacaggaaccaggccaggcctttccaccagggcaatggcctcagtcctcaggccaccaagttccaggacctgccccatgtgttcccgtc

SEQ ID NO: 340014 - DNA, 1000 bp, Homo Sapiens; identical to SEQ ID NO: 159305

SEQ ID NO: 340015 - DNA, 1000 bp, Homo Sapiens
tttttttttttttttcggatagaacctttattgctgaacataaaacacctgcctgggaggcctggccagtggcctcttcactgggccgaaaacctgggtggggagggctgggggctgcagggccactgttgccaatggcagtcggggacaggcctggaggccagccctgcctggcaccctggaaggtggtggggtggggacaggggcctggcttgggggaggaagaccaggccctgcgcacacgctggtcatggaaggttgagggccaggcaggcagagcagtgtccctgtggcccccaggtgaggcttggtggcgggcggccctcctgtggggtagagtggtggacagagcctctttcctctccaaggatgagggtctgaggtaggtgcaggccggtccctggggtcctcacagacgtggtttgatgtgcagaggcttccctgagtccttggtgaggggggccctaggggcccggaccctgggctgggctcctgggctcggcgaggactgcagggagatgaaggaaggcagcttgcagagcctgttggagcacgctgctgctaaggcagcctcctggagagatggtgcctcgtggtccaaggaagcgggaggggatgaggaggaggaggaggaggacgaagccttcgaggatgagggagaggctgacccccctgggcagtggggaggtgcagccacggcagccgcagtgagggcagccgagctgggcgtctgcctggtggggcgctgggatgctgaaggcttcctgggcccgtggctggccgagaccctgctcctggcggttgcgtcgctgggccctggggcgggggacgtggctgcccgccgactgtggcgtttctgggtacggtggagcagctggcactgggcgccgcggggacacgcccccctgcgggcaaagtcggggcacagcagcgtgtgtttcttcttgcactttgcacccagggggcagtagcctttgaggaagtcgctgcagacctcggc

SEQ ID NO: 340016 - DNA, 1000 bp, Homo Sapiens
gagttaatctaaagtttttattttctaaaagtataaaaacacatacaaaaagggacttattcttgagaaatgatcatatcattgtaacacacaggccattggacaaggccactatgcagaaagtattgctcccaaaccattaggaattttaatcaccactttgttccagactctttagaagttactatttctaaaatacacatggacaaagaataagctttattcaaccagactcacaaaagtaaggattctgcttctctaggttcataaaatagaattccaaggctctgaggaaaataaacttgtgtcagtcccagggaacttttctccccagaagttgattggtcactctctttttatatagctgggctcgcagccggtatgacttatattctgattttctcttctcttcttctctctttttctgtacttctggaagctgctcataaatccgtttggacctctgaatcatttccttcttgctgataggcttgttcttctggatagccaggaagactctcttgggcagcgggcacatgcgattctggtggccctgccgttccctgtcaatgttgaatagtgcatcccgctcggtctgtaacatgctctgcagcttcctctcctggactattaacttcaggcgctttatccgctccccagagcgggagatgaagtcaggtctgtgaaactgaagcgattcctgaagggttgctctcacaaatggcctcagtaggtctctgccagcctctctgcctgggcctgccaggtagccccgaccgtccaggtgctgcccctgacagttctgctcccgcagtggctccctccagggtctggtcttggttattggttcaaaccaggagatgccagggccacaagtgttaggcacgttttccttctttgatctagactccacattttccacaggaacaaaccaggaaactccttcatgggaattcttcttgttcttttttaactttctgtcctcaggataaccggtaaa

SEQ ID NO: 340017 - DNA, 1000 bp, Homo Sapiens; identical to SEQ ID NO: 159306

SEQ ID NO: 340018 - DNA, 1000 bp, Homo Sapiens; identical to SEQ ID NO: 159307

SEQ ID NO: 340019 - DNA, 1000 bp, Homo Sapiens
ttttttttttttttttttttttttttttttgatgagagcttaggcttttattcttcatctcttcagtgggcacacaggctcaagtagatataggctgggcacaatggctcatgcctgtaatcccagcactttgggaggccgacaagggcgggtcacttgaggtcaggagttcgagaccagcctgaccaacatggtgaaaccccatctctactaaaaaatacaaaaattagccaggcatggtgatgcacatctgtaatcctagctactcgggagactgaggcaggagaatctcttgaacctgggaggtggaggttgcagtgagccgagattgtaccacctcactccagcctgggtgacagagcaaaactctcaaaaaaaagtaaaatttcaaaaaagcttcacaatataaaccttaattttaatgacatattggctagtcaataaacaagtcttatctcatctcatctcttttctgataacaaacacccgatgtgttcaatttgctttcatatttaagtctttcctgaattgctgtcatcattcaacaacagttgcatgtcgccttgctagctgtcaaagtagacttcatccccaaatggatataaagctcgaaggagacttgaggctgtcgtttgtgctggtgttcctctagccacaggggctgctgaccggatcctgtccacgtggtccagccacacctcttgcggggctgtatgtgctgccttggtctgggctgcctgcggcttcagacttgagctgggccttttccgctgcgggtgaaccttctgtattccctgatgtgtcttggccagagacaggcttggccgactggctgctttcagtactgctttctttcggtgtgccttcccccaggattccacctgtctccttgggctttgtatccaaaacaggtgatttatgactgggtaccaccgtgggatgctctcgtgcctctgcgtctggtacatcaaatgcccggagcacttcagggctcttgttg

SEQ ID NO: 340020 - DNA, 1000 bp, Homo Sapiens; identical to SEQ ID NO: 160789

SEQ ID NO: 340021 - DNA, 1000 bp, Homo Sapiens
ctgagtatttgctgtattttatttgttcacatttagcctatttgaggttaacactacttcatttgacagtttaaaaatcatcctgtaaatagaataaaaaacaacagcagcaatagctaaaaaaaggacacaatgtataataaaataaaggaatgtgttgaaagaaatattccaaagaagcaaaggaaatgagaccatgattatgaattcaacaatcagaagaaaaaatcgtccaacatctgtaaaaagcaaaatcataacagtaataaaaaagaagcaagaattcaaagtgcaggtgcgctagctttcatttccacatccattcaggaaatagagcatactattcttttatataaagtgacaagttctgtttttaaaacattcagttacattatcttgcagattttttttcagtttacattatctctacattgatttgatggaaagatggtcatatgcgatatgtggtataaatttcttcaatctatggagaatacggaaatggtaaagttgactgttttacttatgtttttgcagtaagaagctaaacatccagtatcagaagcatcagtacttttactctttcaaaaacaaaagcaaagcaaaagcaaaaacctgtcatgagccctctgtctttgctgctactttcagattctctgtgacaaaagactgttacttttcactgaattctaatgagttgacgtaaataatcagaacaatttcttaaatgcaaaattggtctggtatctgtttaaattggtcaatacaagtgttattctggaatcatgtaaaaatcacttactttcataactgtttagaaccccaaatgttttccctttgaaggggaacatctgtggaatatgattttgaatagaggacttctatgaaatatatttcaaatcttaaaaatatttttaatacttcctaaagtggtataggatttaccctcgctgactatgccttccatttaagaacagtcttgcatttgtggcttttcatt

SEQ ID NO: 340022 - DNA, 1000 bp, Homo Sapiens
tttttttttttttttttttttttttttttttttttttttttttttttttttttttttttttttttttttttttttttttttttttttccaaaactagagaaagtattttattttattgatataaaattaatttatgggtttaaaggtatacactgaggggtcttgcctactagctttattttgtagaactttacattatgtgaaatataaataaaagcatatttttaaaaatattatagttcttttttcatcatttattttcatatatgtacactgtcatagaattaggaatctgtatgtttactatgactaataagctcattaatcatttaatttgctatttctgcagttacctaaggcatgtctagatcacacaattaaaaattatcatatggtaactttccagactactatttaaatttccatatttttagaaggacaaaatgtatttggcagttcttccaataaattatatcttctgtataatcagtaatctgttaaagataaaactaataattttgaaatttaaatgagagccaccacatgcttctttttgcacaaagaatgccaaaaggaaacataaaattgagtaccctaagagcaaaacacagcccttaaagcacacataagaataaaaattgttgtataccaatgaataacaaatccaatcaaattctgtgtttgattggttttattttatactcagctttattttatatcacaaaactgtaattcaggtataaggttatttcatatatacactctggcactttgtcattgctggagaatgctgattagtttgaaatggaagaaaccaacgccattcttgcttgagatgggggcagttttctctcaatgttgcaaaatatgcaccaaatcatttaagacacagaaatctctcttggtagtggtggattatagatgagaatgagaagaaccacagacttatggatgtattaataatctattttgagacactaaaagactggtgcagacacaa

SEQ ID NO: 340023 - DNA, 1000 bp, Homo Sapiens; identical to SEQ ID NO: 160545

SEQ ID NO: 340024 - DNA, 1000 bp, Homo Sapiens
gtttttttaaaaagtatttattttttactagtgaggatggaactaggggaagaagtttacagaaaagatgtccatatacaaagaaagaaatagcaaaatatttttggtcataatttagaaagaaactaatctataaaatggagacaattctccccaattcatctctctcatagaagagcataagcacgggctctcagttccttgatatcctcaagaggccacggatacgtctgacaagagcctgtatgaaactatatcgagatcgaacttttgaatataatccttcaatgtccagaagtttcttttgtagtgattctccaaaagcgttgattgcatcagcctgaagctggtctaaatcatgttggctcactatagccagcccacttctaaaatctagattggtttctgaggcgaaggaatcttgcagtcttctgcttttaaacaaggttctcgaggcaaataaggaatcttgagaatccgtgggcatgcaatgtaacaagtagtactccagatggcgccaaagaataaataggcaggtctctatgataaaagaacaaagggaaagcagtttagctcgattgttgatcaccttcaccaagcgccgtcttgctagaacatatttctgagcagtggagattttatcaacaccagcaggcatcacagactgacacaactcttttatctcatctgggggaagctgctctacattttgtagcttgctgacactctgtcgatgactgtcataatagctgaagaaatcattagcactctgtttcagcaggtagatgataatgcctaaaccaggcaggcgccagtatggaaccactggagcttgggtatcttgccgcggtccatctctattaactgtttctgaaaggctaggagtgaagagacacacagcatgctggaaggtaggggaactctgtaacatgagtgactggcaatattccattacattggcacaaatctgctgcatagccagttcaatctcatctttctt

SEQ ID NO: 340025 - DNA, 1000 bp, Homo Sapiens
tttttttttttttttttttttttttttttttttttttttttggtgacatggcccacatccgctgagggcacctttattgtctgggacaggccctcagcccctcctgccccatccacccagacaagcaataaaagtggtctcctccctgtgcatgcttctgctttcagccccagcctcgtcacttgactgtgaggatcctctgggtgtcagggaagtcctcctccagcagtgagtcatcgaagggttcacaaaaggtgtcgctgccaaagacagggttggggacagagaccagggtggggttggtcccttcttgccacggtgagaagtcgtcatcagcatcatcttccgcctggaaggcagagaagccaaagcccatgggcttgcctcgggcacggaggtagagagctccggccaccaagccaagcagtgctccagcggcaagcacagcccccacgcctgccgccacaggtggggcttcaggcgccagcactgcctggggctgtgggggtgccaggagggggctggccagagcatggatgatgccattgaaggccatgatgtcccacacaatgatacggctaaccacaactgtccctggggccacaggggcccaggaactgttgtcagggcctgcgtcactgatgatgaggctgaggcctgagtgggccggaagcaacttcccctggctggcgttggcacttaggagggtggcgttggaggcatgcagctccaagtctgggccactcagcgtcatgttgtccacaaagccttcattgacagggacgaagagtgtcttatacgtgagctcatcatccaggaagtccaggaagtcgagaccccgctgggtggcattggcatagcccaatagcatcccatagaaggtggagaagttggcagtggcagccagcacatccagcagcttcccattgcacgtgctgatcccgtcacccacgaagccatttcggcatcggcaggccacatcttgcacacggaagcagta

SEQ ID NO: 340026 - DNA, 1000 bp, Homo Sapiens; identical to SEQ ID NO: 159309

SEQ ID NO: 340027 - DNA, 1000 bp, Homo Sapiens
ttttttttttttttgttaaaatggcataacatttatttacaatattggtacagtttgagtggcaagtcaggacttcacaaaagcaaaaacattctttttgaagggagtggcaggcagtagactttccctacacctgccagaagcaagacagacaaacagacctataaacattatgaactaggcagatggacactggcctttttgcttcttggaaggaactgaaaaaatgcataaaaacaaccttgggtgctgcacccttcaacactgaaaccacactgtggagggaggaggggcccaatgagggaattccccagcacaagaaatagtgtgaaccaccaagaaatcctagttggtaggacaaagccagtgtcttaatgcctgaccaagatcttggttcagaggcactgcctcagctgagattggagacaagtccttagtcttggtcccaatcactacagaggctactcgggtggaaagatacccttcggtcttctttggttggcttttctccctgctgtgtgcattggcatctcgtgggggtttcagcggctacatgtggggaggtggtggcaaagtggctacagtgtgatgcagttttaataaaaattttattacacagccataatgtaatcaacacttctccaaatccaaatgatactaaatacagatctacatggtggatcagaatgactccagcgaattatctggattctataattttatgttttttaaaaccagaaatcaaaaaaaaaagtccaagttcatcatgataggagaggtcccagcagctccaggactctgctgaagtccaggcaatgttaacagtctgtgattccacatttacacaatagtctataaagagtttcggtcaatggactattcaagtatatatgattttaacgagtccatcaccactcctttgcccaagtgaactgtgtcacagctaccacaaagctgtgttacagtcatatttagcaattttacaatcataatactcctt

SEQ ID NO: 340028 - DNA, 1000 bp, Homo Sapiens
ttttttttttttttttttttttttttttttttttttttttttttttttttttttttttttttttttaggataatcattcaaactttttaatctccctttacacattatattaacattcatattgcaaggcattccattcacaaatattacagtttgataaaaacttcacacacatactcccaaagtctataccagattcagtcaactttactaaatcattcaaataataaaagtaatgaaaacattattatattttaaagcaataaggtctgaggcactctgggaaagatgttctcttacaagtataatgtgtcagtggtatgaaattatattacaaggatgcccagtaatcaagtacactctaatgacaatgactttgtgatttgatatgtcttcactggatacactcctacttggacaactgctgaaaggaacgtagatatggggcagctgaggtcatttctaatgaggttcccaactatgtaaaggagaggtgtgtttccacacacgaaggacagctgcatctctactgcaaggttacagtacacaaaattcctttctcatcactatcacatttactcaacgttagattttaatagcccacttgacctcctgggttcacagctggagacactttagaactctttccccatcctccaccatagtgcaaacttcacgcttctctgagcacctccaaggtatgcccttgaagtaaaacagaaaagggaagaaagggggctttttcttttccatttctgaccaaacagaggtctgaaatagcagtgtattatgaaattctcattccctgcaacagtcagccaccacttggaaaatggctatttttgccataaactagatttttaaaagcctgataaccttccaaagtgaattttactacattcattcactgacacacagagtccacattggagaaagtctcattgggtgagtgcttccctatgcacaattacaagggtaaataattagcatgggggagagg

SEQ ID NO: 340029 - DNA, 1000 bp, Homo Sapiens; identical to SEQ ID NO: 159310

SEQ ID NO: 340030 - DNA, 1000 bp, Homo Sapiens; identical to SEQ ID NO: 159311

SEQ ID NO: 340031 - DNA, 1000 bp, Homo Sapiens; identical to SEQ ID NO: 159312

SEQ ID NO: 340032 - DNA, 1000 bp, Homo Sapiens; identical to SEQ ID NO: 159313

SEQ ID NO: 340033 - DNA, 1000 bp, Homo Sapiens
caatttaactaaacagcatcaagttacaaaccaggaaagtgatttaaaactaaatgctggcttatctttctgaaacaaagcatctaaatttgacagtccaaaatggcacttattgagtgtccgtgacaatacatgctgacaagcagcacacctcttttttgtttttttaagacggcatctcgtgctgtcacccaggctggagtgcagtagcgtgatctcggctcactgcaagctccgcctccctggttcataccattctcctgcctcagcctcccaagtagctgggactacaggcgcccaccaccacacccggctaattttttgtatttttagtagagacagggtttcaccatgttagccaggatggtctcggtctcctgacctcgtgatctgctcgcctcggcctcccaaagtgctgggattacaggtgtaagccaccgtggccagccagcacacctctttcaataaaggaactggcagaggaggcactgtgtgtgaccacagtgccctctgtgagcagggaggatgggtccagcttgcttcctttttccatcagcctccctgtgaaacagaagtgaggcagctggtttgtactctgctatcttcccagaatcaagtttctccccgtaaatggtctcaagtttctcccgtaaattctatatatgaacttgtcatttgaagtgggaataaataactgaattttaaaaatcaggaactatatttttagcctaaagaaagtgcaaacttgcagtacagcagagaacaacctcggtgcctgtgattcctcacaatgcccatgccaggcctttcctttcctttccttgtctctccatctgttaaaataccagcatccgtgtttttgtaaatgtacttggcagattcaaaatatttctttaaataattcaggaagtgctttctaaaaggagatgcggggattgttgagagggatctgtaagagcacaggaagggcgagtcccggtgagtgagctctgcggtgtct

SEQ ID NO: 340034 - DNA, 1000 bp, Homo Sapiens; identical to SEQ ID NO: 159315

SEQ ID NO: 340035 - DNA, 1000 bp, Homo Sapiens; identical to SEQ ID NO: 246505

SEQ ID NO: 340036 - DNA, 1000 bp, Homo Sapiens; identical to SEQ ID NO: 159316

SEQ ID NO: 340037 - DNA, 1000 bp, Homo Sapiens
tcaggaggcagatgcatatctgacatccagaacaggagcctcgtcttcctcttcgggcatcttaatggaattatctggggacttcacaggcttctggttactgggcccattggtctcttctttaccatgttctgcctcccattcttgtaaaacttcatctatgttgaagcggcgtcgataatttacaaaaaagtttttcacttgtaccactgatttgttcccaatcacgtctgagattgcctgaaaatctcggccatatttcctgatggcttgtacggcgagaagctgctcttctgtagtccaacgtgcattacatttctgaatgacctctggaagtcgatatggttctattccaccatcaagtttttctttgagagcactgtttgtctgtttaatattctggatctgtcgtttgactgaaaccaattccatgtctagttgtctcagcaccgtggtagcagcagtggcattggcagaaacagcctccacatcttcttgagaaagaaacattccttttggaggtttcctttttgctctatttttagcttgtgtgctatgtttttcttttttgacctgaggaactgtctcagtagggggaacctcctttttgctttccttgttttgatcaacctcaatgtcaatgggattgtttccatttgcctcttccagttcatcctcgctctcctcccgctcccgtttttgtttccgggcatggcgatccatcacactagttttagtcctcgtcttcttccaagaatagtaaaatttcaccagacttgctatagatttatctggaagcatttgttggattctatgaaaagttttcccatgaaaactaaaggcttgctcaaataagactttatcttccacagtccactcatctgggaaaggggtaaagttgggcaaatcagccaatgacttttcgatattatgtttatgccagaagagcatcccaagagcctgttccatgttgtacccatgcttttctttggcaatggca

SEQ ID NO: 340038 - DNA, 1000 bp, Homo Sapiens; identical to SEQ ID NO: 159317

SEQ ID NO: 340039 - DNA, 1000 bp, Homo Sapiens
tttttttttttttttttttttttttttttttttttttttgacagttctgttaaaaggtttaatattcaaattatacattaaatagaatcaaacaggcagcagcagttttattaagcatcaagtcagttggcatgtgggtggcggagtgcctggtaatggaataatagggtcggcgatgcccgccaagattccagagtaagtcaggtcgctaggtgagttgtgactgattgcttttcctgcagcgcacgtgagcagtatcagccatctctctcctacccgctccacagcctactgctggctgtcctgtatgtgagctagcagctttttaatctacctggaactaaggccaaaaattatcagccctttcgttctggaaggagagctgatctcatttgtcacctgaacaaaaagcaatacttaaactgaattaaaactacccacacgtgaagcttcttggaattgtcagctattgttggcgtaagacctggtaaatgtagagccagtgctgtgccctgacctggagatctaacagacttggcagaaatgcctgtgcccagactgaagagacctggggctcaggaagaggctcggaacgcctgccctctattctatagaaactgcaggcataggccctgattacattttttgctcttggtaaaaggagtcaatgatacctttgtacttctccaaaactgtgagccgtttcagtttcatcgtgggacccaactctccacccgaaatggagaagtctctctcgagaatggcccacttctggatgtggtagggccgggccgccgcgttcatgttgaccctccggatcccctcttcgatggcctggtacacggcctcatccttcttctctatgatctcggacactgtggtggctctgctgcccaccctctggcagaactccatagcttgttcagtcagattatcagtctggtcagaggtgtctgggtccagagtgcacttcaaggtgagcagcatggacaggaacttc

SEQ ID NO: 340040 - DNA, 1000 bp, Homo Sapiens
ttttttttttttttttttttttattctctcataaaaatcatttattggcacatcagaaatgacaattttttctagtatagtagttgtatgcatctgtaattgcaattcagtgtaaactacatgttacaagtcactagaaatctaattagcaggatgaatttaataaagaacaagaggaactatgagtctaccacggcccagccattgagtctcattggagagtaaatcaaatatcaaactagtgttgccctgcaacagtttttctgtagccaagaaaaaccaagacacacataaacaggatagcacccattccataaattaggtacacttaactagaaaaagattgtaactgatagaaataatctaaataaagtaagcacaaaagtaaataattagctatttacatatattcctttttgccaaaactttaatttgttagctttcccatcctatctcttcccttctatttgttattcttgttttttcatggtgaatttcttggctcactgaaaaatatttagacaactaattagaacttctttccgggtcctacctttcctaaaactttatgacaaactaatgaatttcaagggtaacctatgtaagtctatctctatatagaagtaagatgcattattattctgctatcagtcatagtaatgacatacagtcccatgtttttccaaacattgtttggactactccagaaaattaggctgtgaatggcagcagagtggatggatttttcattcataacaggcacagatagtatatatggagacaagcatgtttatcctgagaatgtgaatgctgtggactgcaactcaagatctcccattactgagaatgggtcctttgccctctggtcactcttttttttttcaactgtcaatttttaaggcgtggtatcatagcagcatcagcaaataagaatgctgacatcatttctaccaagaagggctctgtgatgagtggcagcaggtaccataattaaatagtg

SEQ ID NO: 340041 - DNA, 1000 bp, Homo Sapiens
cacgtctgcaagtcagcgtttattgctcaagcgtattaaacaaaaatgtagactgaaagagacagttcttttaaaccccatttttccggattttttaagcgctctaaaataagaaaataagaaagtgcaagccagcaaaaacgttccaagtgcctaattctgactctgaaacttgagctctctggtctgcccccaagaagacatcagcccgccccgggtcgtccctgtggctcccaccccattcccaggagcagaccccgccagcctcaaagctgcagggaggtgggggtggcctgcagacagggtggggtctgcatccggtaccagtgacagcagcctctcctctcccacggtggcgcttgtttggggctgtggccaaagtgtttgcccggcccctgactgtgtccttccggagctgccgaggactgcagagagggcctggcttgtcccctctaggagcagctgggaaggtgtcttgcctgcatcccccttcaatggttgaaaataatgattccacttgtcatgaacaccatgaaggtatcttggcagccagagtcactcctgttccgcagtgggaaacctgggagggtcctcaaaccccctggcagggtctgcaggccgccccatccagctgcatctcccaggcctcctggttctttgatcttgatggccccaggccacagatgcatctccgggcctttccagcagcccatgggggaccagtcaatacaccccacggcggtgaagagaaaacgttcatgtcttctcagatcagaaggaaagaaacaaaaccattgtgaaggaaaacacctgctggaaagtaattatcaaagtaacagcattccagtttcacagtcgccccaactcactgtggatttactgccgtcagctgggaggacccaggcgccctcgggacgaggagacgcagggaaacccactcctggccatggcactacccaaagccagtgttattctcacacccaactgtccctgcagcctg

SEQ ID NO: 340042 - DNA, 1000 bp, Homo Sapiens
aaagtttaaacaccttttatttgaagaaatattgcttctagactttcctgaagccagaattgttctataaaagtatcatggaatattatacatgattaaaaaacagagtatgcttcctaataacttgaaatctttttacaaagcacattattcatgatcataaatatgtttgttctgtcatcccaccgatgatacacacatcaggcaagcagctaatttgaacatatgtacagagtctatgataaagatttaaagttaccaaaaagattcagctataacatattaaattttctttaaaagagtttaccataaacacttaaagaaaacataatttatctaagcacttgaattatctaaaaataagaagaaaacctctcttagggtaagcaaaaacacatcatcttggggagctgaataggagggtactgatgactcagtgaggtaatcctttagctggtatttaaaaacctaatacacaacaaggatattttcaagaatacagattttcaaaagcaattttgaactatgtctttaaaagatatcagaacttggtgaaggtcttacaaataatcatagaacacaatgttaagaaattaacttctcttgtggtatgttgaaattgtggagcattcatgattttcttttattgagaagttcttggtgtaaattcaaaactagtcatattttatcaacatttaagcttcttagtcatgccaagaaaaccaaaaaagatgaaaataaaagatctttagatctttttctcctgtcaagaaaataacccaaaatatagcaatcttaaaggtatgatgtatgatgaacgctttgaggctaggcacagagagagcaggcaatcttcattttgtttacttatttatttattttcaccaccaacattattagccatgcctttctgctaatcgattttagcaagtcgaggtaaaacacatgcaacattttctggcaaaagcttaatgtcaaacaatatgtgatccatactgtg

SEQ ID NO: 340043 - DNA, 1000 bp, Homo Sapiens
ctagaacaacaacataggcattttatttcttttcattaagcttcttagtttcttagtatcacaatggaatgatgagaaaacaacaaaaacgtgagtctttgcaaatctctgacaaagagcagagatctcaaggcaattggggcgggggaggcttgacagaagtgccagagcagttccaacgtcacatctctccttggctggaatggtgagaaggtggcactgtcgtgagctgtccttggcaattctgccccatgagccacgtgcgcctggtctgcatgggccaccccgcgggatttcctggtgcctcctagtacctggccacacacccctccgcctgctccaacgccctgggagcaccgtccagtgctcaggtggacccagaagccagctctgctgggcagcggcaagatgtggaggagcggcagaggcaggcagcgttgcttgcggtgggagaagccaaggagtgtgaccaaggcccatctgggagacatctgtggtggaaggtagggctggcgcaggtggcagcagcagaagtccgtgtccccaggcagtagcaggcctagagcttcacagtgccagggggcaggctgtcgttgcagagtctgtagtagcgcaggtcgttgaccagcctgtgcacattctgggtgaatgagggcaggtcccgatccatcttgaaattccgccccagcacacttttctggttggcatccacaccatcacagctggtcaggaactctgggaggaaggcggcaaagaagccatcaaagtcgactgaggccatgttgtagatggcgatgccaatctcctcctgcagaagatcatgggacttgtggaccaggacctggagcagcacgttcacaaactggaacagcatggcagtccggaagatcttcttgtggtacagcttctgcttggtgttgagagtctccaagtagaagagattttgtttaaaaaggtggatgtcgggctggagaaaggactgtccgaaagcctgcatgat

SEQ ID NO: 340044 - DNA, 1000 bp, Homo Sapiens
tcattatttagagaatactttattagtttctgtaatcaaacccatgtagataagaccttacatatttaatacagtgcgttacccctgtacaaatggaaaaaaattaagtttaacgtttctagaccaatatggctgttaatttctgtacaatgccaactcaacacagtaaaccgggatactttttccaaagttgacagcacagctaaagtttccaaaaattcaaattatatatatatatgtatatatatatatatatttatataaaaagaccaatagcagtatgttatgcatcaatagcagcaacagcttttccaggttctgcagtcatctgaataaaattatagagacatccagcacactccatttaaaaaaaaggggggaaaaaggtaaaaaacaaaaccccagaaaattgcaaagttctgttactgttgtggtacctggcaccgttttttaaaattagcttctgaatcatcatctggaaagaaaacattctagaataacatcattaaaaacagctctgataaagcacggtcactactacgtatcataaagcaggtacaagatattttacattcacagaggtatgatacagtactgtcctatatctataatactagaggatacaattaaaaaggcattatttgagacttgattctacttttccagcagagggcccaaaggatggcatgacacagctctgtaaagaaatgcaccttcttaggatttcctttaattagtggcacagttctaggtactcactgttcttcataaacaccagctaaaaactggtataaaaaaaaaaagaaaaaaacccccaaatcatgggattcatacaaagatgactgagtgggggcaaggaagactcaacctaaccagcattttaccaaatctgtcatgtttgaatcgtgagagctccatggaagaaaggagatgctaagtagcgcttcaaagcttcagaccacaaccaaaacacagcaccatttcaaatagaagcagtagc

SEQ ID NO: 340045 - DNA, 1000 bp, Homo Sapiens
tgtgagcatgaattatttcttgttttattgctttcttgtttctttcttgatgcagagtcaatgtttttgagtaacagtaataagatgcccaaaatccaacagtaaacattcaaatagtaagatctgatgcagaacaaagtcctcaaatgttaactcctataagttacatctagcggaaccacgagggataaaggctgaactcatcatcttggtttatgatggaaaccgctatcctctgacccagggaacaggaggaagtctcgaatgccagccacctgtttaggcactggtggcagcactgtggtctcctcgtgaaatggccggggagactcacagtgagtctaagtatggcaatctctccttttaccccaggattaagagatgccccccgcaactgagagaatcaaaagaaactcctatggaatagaagacgtggttacagtgataaagatcagaaatgattgtgttgtcaaggaagtgacctgtgactgcacagaaccccatctttgtgagaaagcaacccactcttaagtgcacatcagagaggctttacacagtgactggctgcaagcaggacaaccgtgagcagcattttgcttgttgaaggcacaggtcctcgtcatcctgagagaggagagtcactgtgtgcgacctctgaaaaactgtcagctgtcataaatctgactgcagtttcagcctgatcttttttttttgaaagtcccagactcttggggcacccctgaatatcttgatgtgcctactccttctgcaagaagtcagatttccaagggatggagactcaaaggaacatgattgcattacatcacacaacaggcaaaaataaatacatgactctatagtatgggtatgaaactaccacaaagaaatatctcagaccccacaactgcagctcacatgctagcaatacctggtagggtctaaaaggtgtcagctgtcccataaagcatttacctactatgactttgatcaactgtactta

SEQ ID NO: 340046 - DNA, 1000 bp, Homo Sapiens; identical to SEQ ID NO: 159318

SEQ ID NO: 340047 - DNA, 1000 bp, Homo Sapiens
ttttttttttttttttttttttttgcaggatgagacacatttattctacatctggtcacagtaaatctcacccagaccacaggcaggatgccacgtggctacaggcagctggcggaaatggagatcatctgttctggtgctcatggccactctgggcagaaagcaaaggtgcctcatggcacctactcagaggcactgaggccacattcccatctccaggcaccagggatgtctctgaagggtgattccatttggagtttccaaaatccaggacttctgagagccaagccctagttccaagtcatcctgagtccaggctctgccagaatcttgagcacctggagctggtggcaaggcagcctgggggctgaaagggcctcagactggaccacagggcagcccaggggccctgggcctcagggtcgacgatcctttctgcggtttttgtgtcccacctgggaacctcgccgggcagccttcaccaggcctttgaactgtccctgcagcttcatcttcttcctgcggttgagcttgcttctgttgagggggatgtaggcatagggatccggccggcctttcttcttcacatcaccttttgctttcttggccttgtattcagccccaggcatagccttcttggccacagggcgatgaatgccagagcctccagcttggtactgagggggtatctccagctcctcctcctcagcctctttctggtgcttgagcttctggtgctttttattcctgatgatcacatcttccattgggtcagccatctcttcatcttcgcctttggcaccttcctcttcctccatcttgttgccgtctgcctcctcccttatgatcagccggccatcggcgctcaccttgaagctgtggtccttcttcctgccccggcctggccctggctgcgtggccaggactcgttgggccaccttgggatccaggaagttgaggggctcgtccccaccgccctctttcagccatgcccggctcc

SEQ ID NO: 340048 - DNA, 1000 bp, Homo Sapiens; identical to SEQ ID NO: 161122

SEQ ID NO: 340049 - DNA, 1000 bp, Homo Sapiens
tttttttttttttttgtcataaaacatctttttaatgtgaacactacttcatacaatgaaaaactatttacaatgtattgtttccagattggctgcttttacatcatctctacccatgtgctgactcggcatgtatcttcagccagggagcttcagtccaattgcacattctcctcgatggctctccaaggaccccggggattcagggaacccgtccacttacattctctttagtaattatggctcagcaagcatgccaccaaaatcatctagaacccagagactctggcaaccccatataagtaaaaatgtgtagatcaggtttttttctccaataaataataatttgacaatccaatccatttccatcttaagaaattgttttcacttaggaaaatgtttctcagtggagctagagtgaataatctttcttcatactggaactgagttagaatgtctttgtatacaaatatagcatattttggccagcaatataattgcctgttaaagagtttatttgccttcacacgcacgattgctacatacattcacagttttaatagactgtaattagctattccagttgtgctttaaaatcccgaatattattctcattagtgagtgcaaagcaaatgtcccatctgactacaattggtcctagagttataaactccataatggtttattgtaagtttcctcattctccagtttcatcgtttgctttttcgggtatgacttccaagctccggcgtggcttctggacatcagcattttcggtgcctggtttattcagtccacatgaaacagcagcaaaatggatttgtttcaggttctccaatgtctcattcttagcatatttcaaaagatctgcttgtccctttaagatggtaatattccaggtaaagctctccactgctttttgtagttttctttccttcaaaccttccttggtgcctatgctgtgcaagtgttcatggaattccatggctgccttctgaca

SEQ ID NO: 340050 - DNA, 1000 bp, Homo Sapiens
gtctttttacttcttttattgaactccataaatattttcataaggctttgtgtcattacaacatttttttttgttaaacattttttaacacacaactttgacacttgtttgacagagtcagtcagataaaagaaacaaaagaataaactggcaaatgcagagcagcaagggtaatcaaagtcactgttgcccatccatccaccccagcccaccccatccccaaagcactaaaagatcactatttggcttcacactagaattgttagaactctcttgttgctgttcttatagatccattagaaatatacacatagagagggggggaaaaagagagaataattagatgtctgtcttaggactccccacagcaggtcccattgaacacactagcaaagccttttggagagcaaatcctggcctcactgagttgaggaaaagggagctcagggccatgcggaaattacaacattacagaattactggggttaccattgctgtcaggacataacaggttaggatactgaacccaggtatttaattgggctccccttggggctgttggccactggtctgctttgatgctataggctgagggaatactccaaccaatggggaaatgatttcttgttgttcacaaattagtggcatcaggtgatgccagtgggttcagtagaggagaagtgcgggttgagaagtaatatccctgatcctggagccctgggcagaagccccaaggagggaggaaatgagagggcctagtcaagaaatgtaggcccagaaacttgtccaagcatcccctcccggtgtgctgccaaccctcgaagaagcatgtcaaggccaagcctagtaaggaggagtgagaagttggaaaaagaggtacactgaagggaggcctgcatagctaccaaaacactctgccagacaggatattttagcctgggtgctgggcaccaggacccttgccaaagaggcttacgtagttaggtcatgtgctgaacag

SEQ ID NO: 340051 - DNA, 1000 bp, Homo Sapiens; identical to SEQ ID NO: 159319

SEQ ID NO: 340052 - DNA, 1000 bp, Homo Sapiens
ttttttttttttttttttgccgaacgaaatttttacctcacgttcatctcaccaaagtctcttcagaggagcctggtttacagggtgatgaagctgatgatgatacagtagtgtacacactgctaacgtgaatcagactggaaagcaagtcagtacttcagagtagccccgcagaaaaagagcgatactaagccttcttagtgtttcgtttgttagtagtgatgaagagaaaactgcttggaagcttccatgggtcactagttagggacagagcagcacaggtgatcagacagggctgagcaaacacctgactgaccaacagaaccagtctcctcagcagcttacattgcagtcaatacagagggttatggaatttattgatttctgcttgaaataaacaagataagcaaataggagcttacaacacaggtcccagcaggaggggtcacgctctgcatcaggccggtgtccacgccgctgccgtgtgtgacggatcctgataggcctggctgctgtagggcacctctcgatttctctctgggtccttaaccttccagtagcctctctgcagtccctcatcggctggcctaaccgtcctgccatagctcccaggtctcctgggctaagcagctcatggcattgttggggggcaggagtttatgtcgatctgtaactacaccattcctgcagttctgaaatgagtggcccccattttcaatctgcaggcattttaatatcgcaaatattgtagcacttctgtagtatattttgggaaaacgtcttccttcagtctaaacaaatcaagccccattttataactggctattttgtaaagactcaaaacagattagagatcttaatgaaatgatctcttaaatgaaatgatgttctttatttcacgaaatcatcaatcttaagcacgagcaggaataaacaactcccagaagaagcttaattcattcttcctggattttcactgtgtgttattaaatcacaaaaa

SEQ ID NO: 340053 - DNA, 1000 bp, Homo Sapiens
ttgtgttaagaaatttttattctttcctttggatttgtgatgaaagcacataaaattacaagtggaagaaacatcatgccacaaaattgcatagaattattacaaaaatgtgaattatgcattttaaataatttgagatagaagaaccaaaatatgtacattttaagagcttcaaatactttgtcctatcttttttttcttcttaaaaggcaagagtcacaacgtccaatccatcacaaacaatattaacacagtgcacaagcgcaacattaaattcaaagtaatgcaagcaaatggccctttttttgggaattacttaatgacagcttatctactacaggagtattaattaatgtatggtgatactcaaattttaaaatgaaatataaaaaaccaaaaacacatggctatgtcattagaactttgaaaattggtttacatggccaaaaccatgctattctcagtagtgtaaaggtatcagagagacacagtctaatttaatacacagctctactttctattataggaaaaaccacagtacggaatttcacacattcgacaaagaacaaggcaaatacataaaggcacaaaactgcacatcatacagaccccttttctttatcttagtctatttcaagtaatattaatattattaaatgatagtatcattgtagtagtttcaatgatgcaagatggacagtgttacacactaccccacaactgcaaaaagtgtcattgtacagatataaaaatgtgattacagtaaatggccaaatacaaacatattgtaaaatgactaaattcactaagataatgaaatccaactaccaaaacagttttgtgtaagtcaaggttattcaactttattctatctctggactaaaatgtgatacaatgttctgcaataatcatcattgtgtttggttatgaatgctattattagttcattcttcttcaatttcagacagtctgtaattttgtttataaaaatgcagcattc

SEQ ID NO: 340054 - DNA, 1000 bp, Homo Sapiens
aagatttaatgctttattgctcttgatggcaaatcaaaatatgctttagaaataaagttaatttactggaaaataggagtttttgcaccaaaccataaaattgcatttcattacatcaagagaaccccctcattgtctacaatcatgcccgcttcctttcccctcagcgcccgggacacgtgaccgagatcataccctaaattcctgatccttttgcagttgccacatactgtggcttttagtacatcataaaaaagtgcttgtcctgtggcctcagctgggaggccctggcgctggggctaaggggcccaaggcaccatccaaaggctgggaggaaagaacccaaacccaggccctcctcctgccctccagcctttgacaggcaactcatttggcatgatctgttttggtgtgtttaaaacatacatttgcatgtgtctagtgtaaagcaacaagtttgaggaaataagtggaaggagagaggaagttccagttagatggttccactagtgtctactggtaattggcaaaactatgagtgttgctaacctgggctgagggcacctctgcctgtgcaggcagctgaccaggcttggagaatgagaaagggttcccaaggacaggatgccagcgggattctttgttgcaaactgcacacagtgcaatttttgggaagcagggatggggagtgggcatgagaccgggttgttgggaccactctggggtcaggccctgggtgaggcacaggaggctgcacacaggcacttggtgggttctgccgggtcagggtgggaaggcaggagaagtgtctgtggcaggacgggaagaagcttcagtacatccctctcttgcacctctgcccactccacctgaggcgtgggctccctccccctcatcctctcaccacatgcctgaggcgtaggctcccctcatcctctcaccgcatggggcatttgctcccagcctctacttccctcaaggccttctcagcagctggggc

SEQ ID NO: 340055 - DNA, 1000 bp, Homo Sapiens; identical to SEQ ID NO: 159321

SEQ ID NO: 340056 - DNA, 1000 bp, Homo Sapiens
aagatttgattttcttttatttgtggcactaaaagacagatagctgtgatgaagagcaattggctggtagctcgtgcctcaccaagagtttagcaacgttaatcagtgaatgcagaacagcttccattctacctgaggcctagatctgagatcgctgtgaaacattaaagtgacctcaccatacttgttttctcactcagatacacattttatttcatcaacacatcttgatttctattacttttttcaatataacaaaatgttttagagatatatatgaaaaactactgctgtagttagacctcattataaatattggtgactgggcaccatgtgagaagaccacgatatcatacaaagggagccaatgagctgttggacaaacgcgtcaaggctgaaccaaaattgtgatgctctcagcgcaactttgatctgaactcttgacaggtgggcatccaacatccctgctccttgaccctctgcaggattccagaaggctcccagtgaagtcatcaggctccgtacacaggcaccgtgggggaggcctatgtcacttcatagcctggggaatggctgtccatgtggggcactgcccatccactccagtggtggtgtgacctcagccacccgccacccttgcaggactcgggcatgccctggccacatgatcacgtaggactgttttctgggtggtaatagttgatttttaaaagcttagttggtcagatcatggactgtgaccctctgtgaagtgttagccccaaatatttgaggaagaagaatccagcagttttactacctaacaaagccacctttgaaaagcctcccaattttttttcttactaccaaaacacacagcatcatggagcatatcacattcagattgttccatctgattcatatgttttttctaaaattcaaaagatcttaaatcagtaagtagtttcatccatctgtatgtggtaaaagtctcaaaggtccaaaatcagtctaaggcatg

SEQ ID NO: 340057 - DNA, 1000 bp, Homo Sapiens; identical to SEQ ID NO: 246506

SEQ ID NO: 340058 - DNA, 1000 bp, Homo Sapiens; identical to SEQ ID NO: 159323

SEQ ID NO: 340059 - DNA, 1000 bp, Homo Sapiens
attcttaataacatcttttattaattttgcaagaggaaaaaaatagaaatttattttagagttaaagcttgtacagcctttttttcccctcctaaattgcacagtacatacgattattataaacatcagctgcggttctgggagtgagcttgtgtcgtgttagtgccatctccctgacaaatctgacctgtacccacatctcagctgggaaggagtagctgggcctccctttaatgcagcggcactggtttgggtcacaagagctggtttgatcaacccctgactccccctggcgggaggtgctcgtcacatctgggagctgagcagaggtgccgggggcttggaagctggagaaatgatggatctttctccaggagaaacaattcttatcttcacatcagccccgtgctccaaatgaaaagcgcgtttgcatagctgctcgagcccaggctgctaagctcatgaagtatttgccggggctctcggttgcataggaacgtacctcgagtacagtactgcggcgggccgggctgggcgccagaaaaacaacggattaatatttgcaacgagaaattacccactactgggaaaccaattaggtccctgatccgagcttgttacatcgatgcatatagatgcgttctgggcttcactcggctgggggtgcaaggcacatttccaactcgctgggaagtggctgaagggggagaaggggtgggggcctgggaaaggagcacctcactgcctgcctccaagggcacaggggcagagacagaaagcagccacatcagtgagcacagccgtgatcagaccaggagggacatgtggcagagagtgcagggagggcctgctcaagggtgaggggagatgggggattgtcctcagtgttccccaacacctgcatccagagggcactggggtgagttcttctggccctctggggtctggagctgccagcctgctggccacccacccacccttcctggcccggcagcagcac

SEQ ID NO: 340060 - DNA, 1000 bp, Homo Sapiens; identical to SEQ ID NO: 159324

SEQ ID NO: 340061 - DNA, 1000 bp, Homo Sapiens
atatttttttcggtttatttctgattatatttggagaggccaattttacatgatagcttcaaaccaaccattgtacattaaccaaattttacacaagccatttgaaaaaagatctaaaaatgtgcttagttattggtattatataacataacatttatcaagcaccaagagtgtgctgagagctgtacagaacaaacatagaaaagacagtccctgccttcaagaatacccattccttcaggatcttgcacataaaatttcaccttacattccacactcttttattcataaggcataaataaggaagtttgttgcatttctcattgttacttaataaatattgaatacccttttccccaattataccaacaattacttgtatctttgcctttaaatacaaattttcatagtacagtatacagtatatactgatttggtattcacacaattgaccacaatattcttgcaggttggttataatatgaagcatgttgaatttcaacattcacaatttttataccacttaacaaaatcttttattgttggcagagcttcttctgtttttttctatttcaaaaaaaaaaacaacaacaacaaatgtgatgccactgctcttatcttgataacttgtaaacagaaacagcactgccttgattccaataagggtatcagaactatggcacagatattcagaacagtgatatttagcacgtctattaaactagccttacagatgtcaatcacatagttgcataccttaaaatactaacaatttatgatcagctagtaatggatgatgtaagttatgatttagtttactgtaatgaaggggatactggtataaaatgtcggcaaaatttgagcggggaaatattttttgcttttctgcaaggctgtgttcaaaacaaattcagattagaagatgaaatgattatgaaagaagatgaaatgattatgaatttaatcattggttaaggatatttaatttcaaaataatctc

SEQ ID NO: 340062 - DNA, 1000 bp, Homo Sapiens; identical to SEQ ID NO: 159325

SEQ ID NO: 340063 - DNA, 1000 bp, Homo Sapiens
tcaccagtccgcgtcctcctctatgtaataatcaggggcggtaccatcaaagaggccggggtcgagggacttccgctgcttccctctggcgaagacgcgggagatggagccgaatcccatcttctctttcttctttttccgtttttggtcttcaagatcctctagtgactgtacaatagggttgtgcaggttcttctgaactgggccgggactgtcgccgttgcagagggagtgtgtccggtgtcgaggggagttgatgtcgctcggtgtggacgaccggtcgccttcggcggcagatgcgtcggagatgacagagggctgccgggagtggcaggggctcaccctgaccgcttgccggtccgcagggtgaggggggtgtgagtggtagagagtctgttgactctgccggatggctgcggtcagcgggaggtccgcctgcaccacccactcctggttgccattgagcaccgtctcgcccggcatggcgagggaatgccgcttggggacgtccttggtcagcgtagctaaggactgtttggccatggccagctcggcctccagctccttcatccggttgtccttgaggtccagctgggagcgcagtgccgtggcgtggtctgtggcctccttggcttggcgccgcagctcccacttctcacgctccagcaggtccttctccttggccagcgctttgaccgcatcctcgctctccttgcggtgctgctcatagttgcggatgaagtctcggagctgctcctcgcggctctccagtgtggcatacagctgctgcatctggctcaccaggtctgtcttctcgccctttaagcgcttccgatcagctttcatggcctgcaaggcttctttggctctggctagctcctgctccttctgggccagctggaccctgagctcggtggccgagaggacctcagaggacttgccgccctgcgactcctccaggtccttcgccaacatctccttcatctgccggagaaggtga

SEQ ID NO: 340064 - DNA, 1000 bp, Homo Sapiens
gccttttcgtttaatatactgtgtgtaaaaaggatggagacaaaaatagttttctgagctatgaaaaaaattaagttattacaggcacatttactgtttcattctagaaacatctcagtttcacaggttgaacattcagcagctttgtgtttttaaaaaacattctttgaccttgagaaaactagatctctcctgttgggcagagttttgttcatggtgatggtgtggttatgcaaattacagtgaattatactgtgataatccatgcaagcttgcatctcggtgtggctgctcctcgggcggctcctcgccaccatgctcctccaaggacgtcgggtctccgggtgactgaggctgtgaggcagtgggggaatgtggggcccaacgggacggagggcgacggtttgctggtctctcgggcctggagaagcagggctctagggatggagctagtgcagaacaaggtagttcagcgtgaggcgggcagggctagagtccccagggggcagttagcaagacagtttggttctccatgggccctggctcggctgtgtcccccagcgagtggctgtcactgtggagacccgggggcccgtgggcagcctgcctcctctcctcctttaaggcatgttccagcagcttcttgttgaggatccgggccacgttctcagtgagcgtgtagccagggggagcagataagtcctgcttcactggcgtgccctctcccccttcctccctgcacatctctgaccccaccccaatggggctaggcgaccttcctcgggaattggtgcctgtttcctggcctgggcccagctctggtcggggctctgctgagcgagaccgactgccggcccgcagccccttctggaaggggtcctgcaccacggggctgtggtcaatgatgttgaagaggctggagaggccatcattaatggtggtgtgcacggggctctcccttgtggtggtggagcgggcccaggctgactcactgtaccct

SEQ ID NO: 340065 - DNA, 1000 bp, Homo Sapiens
tttttgtttcaggtgttttattaagtgggccatactgtagctggtttctaagttgcaaaacataaatttaataataataacatagccagttagattgtgacaagcttttcctttccttaaaaaaagaaaatacttaaaaacacacaatggcgggttaaataaataaaacattttaaaaaagaaaaaagaaaagaaaaacctgttaaaacatgcttatgtttacttctgtgaaactgtgccaacaggaaatgtggtatttggcacgatgacacatcccggcatgtctccttcccaaacaatactgacaaaaaagaaaatacgtgggactgactcatcggtgcttgcttagaggcactactaaaaatccctttgattggagcatggggcttcccgcgcagcacacctgtgtgtggcctatgaaagccaaatatccataataatgttaatatagaaaaacattagtttaaaaatgatgtggaagggcctcattaatgcgacggggcaaggaaacataactgtcccgcacgcagtgccacaggctcagtccagggaggcctcaggcttccagcatgtggccacggcgagggagggcaccagcttcaaaataagcggcaccagcctcgctccctctccctatcactctttcacatgaaagtgtgtaaaaagcaaatcagcaaataaactctaaaatagattatttattccaaaaatcctctagttttctttttacagtgagtgtacattttgtctcctactcctgcacaatcgcttaagtccctttgggaaaaaaggtcagagctgcagggtgagtctttctcagtcctgctgctggctggtgctgggaggtcagatgtcgatgcccttgacaagggacgtctccagcgtgatgttgaactcctgcaatgtctgcagcacacgaatcaaggaattgacaagtgtatggtctttgatcagtgccacatcctcatacatgtgtgcagtgatggggcagtcagccagc

SEQ ID NO: 340066 - DNA, 1000 bp, Homo Sapiens; identical to SEQ ID NO: 159326

SEQ ID NO: 340067 - DNA, 1000 bp, Homo Sapiens
tttttttttttttttgattctggaaatattttaattaggttccactttaaaaaaaaagtagcttccttatgacctccacagtgagtacattaactacattttcacaaacagaaaacttacatacattcaactgtttacaagacatgtctccatataacacatttacattcgtgtgaaatctatgaacttctttaattgcatatatttatgactcttacatctggtaccttttaaaacagctaacatatagtatgcttatttcctataagttaattaatatatgactatttaaggtgagaagagtctcatttgaagaattacaatagttatattcataccatgggaaatcaatagtttttctaaacataaatttcaagctaaagctttagcaatttaagttatttaactaccaatgcatgaaattcttatcagattgtcccatttggattacagtttaagtcatttcaagctgttcacaattatttgtgcattggtgggggggaaagcaccaaggataataaattgatttttcacatcacagatgaaatcacagcgcaatgatttcaatatcccttcaaaaatctaatcatttataaagagcatttatttcaaatgctcaatctttaagctttcttagtgtgatcaactgatacactagggataagaatggaaatggttaaaaacagatgctatacataatacttactaacttaacagaattcagatttctcctaacattgttgatttccatttttgaactgacttctttagatctaaaaagaactctgaaagtaagtgtaacatttatacacttgtcaactatacttaaaaagaaactctgaaggtgcctttcttgtcaaaatacaaaacaaaagttttcctgatgaacaaggcaccttgtatggtaaggaaatatataaagaaaatattttctacaaattaatatataaatctatgtgcacaaaggtgtagttctcccagctgcatatgtaatatttta

SEQ ID NO: 340068 - DNA, 1000 bp, Homo Sapiens; identical to SEQ ID NO: 159328

SEQ ID NO: 340069 - DNA, 1000 bp, Homo Sapiens
tcaggtgtactcggttttgcggatataattggagggaacgtagcccttcttcccgttaacctcagctaaccaccactctgtatttcctgtaacatctttaaactcgaggatcttgagtttctgattggctgacacgctcagctcatttgggtttcgtgccttgaaggtgtagacagcaaaatagacctggttgccttctgcctcactgccatctggctctgtacttctgtcttccggagcctgggctgttcttgcacatcctttgacgaggtcttgactttgcccatttcgtcctggtacggagtagccaactatttctggatgcctgaagttccggtagctcctcggcgtggcagtgggctgctttacatctctagctacatctgcagagtcccctgaccttggctgggaggtggagtctgggtctgaagggcatctggaaggactactctctgaattactcggatttagggatgcactgagagttccttggtcacattcttttggcggaggagatgcatcttgaggctgcttctggcaagaccccgaggtaaaggatacagccatgctgctggggttgaaggtcagggtgctgccgctgttctggcgtgggaacctgggggaggagctgccgtgctcagactctgtggaggagtggctacccacggaggcatcggagtggctgcggcgaggattgtagggctttaggaaagagctgtacacgaagcctttggtgactccattgtcaatcagccagcggttctggctgcccatggggtcttttttcttaatcacacccaccaggtcaccttccaaaagtgagacatccaagtcttgggcagcattgaagttccgttctgcctggaagagtttttcagggggatacctggccaggagggaggcccggagttcttctgactgtagcatgtaacttggcaggcccaggagtggctttcgagcagactggcggtcaatggttttcctctcaaacggtttcttg

SEQ ID NO: 340070 - DNA, 1000 bp, Homo Sapiens
cgcggccgcgtcgacgtaccaataccctctgcatttgaaaatgttgactcagatgtttttccctctacagaactagaaaattgtccccccactttggtctatttactcatttgaagacaaacagggttactaagagttttacataagttatttctttagagtgacgaagtgttagtttacttcttgcttagtggagacaaaaattgtgagataaagaggaaggaataggatgtacacatttacccatcaatatagcacccagtgttatttgagcaggacccttctgttagcatctaaggtaaggttaggacagtcaagataaaatactggatgttggccaggagcagtggctcaagcctgtaatcccagcactttgggaggctgaggcaggcagatcatgaggtcaggagatcaagaccatcctggctaacacagtgaaaccctgtctctactaaaaatacaaaaagttagttagttagttagccaggcgtggtggtgggtgcctgtagtcccagccattcgggaggttgaggcaggagaatggtgtgaacctgggaggcagagcttgcagtgagattgcaccactgtactccagcttgggcgacagagcgagactccatctccaaaaaaaaacaaaaaaacaacaacaaaaaaaaacactgtatgttaagggagactccttcagtatctaagagcacttgggggtggactgggggagaagggatgacttcatttacccccatagttatggagtcttgagttctaagaaaattttcatccctattgatttttatgctaaaaacagaatcttacaaatgtgatagctatatatccaaatgaggtggtctagtacaagcatttctgaaaaaatttttgaatgacaaaattttatcctaagcgatatgttttccaagtgaatataattctagtttaacacaacattgcaagtcaggtgtgcacattttactaacaaacatatatcaatgtgatttcagggcct

SEQ ID NO: 340071 - DNA, 1000 bp, Homo Sapiens
gcagaatcaatttttatttctgaattatacagtgaggctatatagatatattgtgtcattaaagacttttatattattaatctacattatggagaatttatttaccaaaacgaagtctaacagacactttattctgagcaatccaatgcatgatagaaaaacctttagatatataaaagattaatttgtgcacatctaaatgtttctaagggaacaaactactgaggcattgtgataagacgagagttgcaaacatagtaccataactgaatatttaaaattacatcttaacaaaggctaggagtagtgacttcctcacacacctcagagaatgtcttagagagtaaccccatagaacattgtatggcttcaacagaaacttcaggattttcttccacactgagctactgccctcaaacaaactttctcactccttgacactatcttctgtgcaaatttctgttctttctcttaatcaaggagctttgagaaacaatgcttttgccccaatgaccccttggttcccttaactacagatctataggagaaatgcaaagcagttcccagaagtcagaaccaaagcaagaatgttcagagtgcaagagctagagagctaaatcatgtgaatgtttacctctgtctacctatctgcttagggattatttttctaggattcatctaggattctatttacttggggtgaatgtacatggtagcttttccctagcacatgcaattaaattaatttgtcttttaagataataaaatagcagatacctaaatatcagagtggttatgcagcctacagaacagctgaaacaaaatcattgggacaaatgcccataattttcatgtaggaagatgaggcttcaaacagcataccacctgagtagttttccatagatgagctggacaagttaaaaatatatatataaatggtgagattgttgctgtgtctgtttggctataacaagagccctctatgaacagctctatgccc

SEQ ID NO: 340072 - DNA, 1000 bp, Homo Sapiens
aactttttttctcttttattgccaagtttaaatttacaaggaagttccagttttcatttccaccctcgtgttcagtacccacgaagcatgagtcatgctggcgaaagcaggtacttccctagagcggtcccgaggctcagaggcatcgaggttttctaaccctcggttctcactgggacaaaaattatttacatatttttagctcaaggaaacataaggaactcgtacagtgtaggcccaatgtcaagatgactacattaaatgcttcagatttatttattgcatctagacaagaagatcaaaatcagttcaccccacgcctttttaaaaaacggtgcatctcagagaccttagaggaatctagcgcgtctggcagggctgcgcttcttcacctgccccttaggttgcttgtgaacgcaagtgtctgggttgtgggaggctgccaaggctccgggagagggactgggctgggacagcggcagaggaggggctgctcacggaggcccctcctcccaatcccacgcgatggtgaaggctggcccttcctgcctgggggagcgcctcagctggccccatctgacctgctgggacaggtaccttgcacgtccagaaagggacgagcacacctccacaacaatattcaaagccaaggtttgggagttcctgcggccagccctgctccctgacttggcaaacccagccggaggtgcacaggggaagggtggaccagggcctgggccataactctaagtgctctctgcagggacttggggggcgggccggatgggtctgtgggggctgacctcagacctctgaggctatgacctgagtgtcagaagccacagcccccactgtgggccttcccacactcctggctcttcctctggatgccaggggcccagcgtgtcctgtctggactggcctgtctgggagcgccccagctatgaggtttgacgggagctcctgaagacatagctgtgcccactgccgctgagacctg

SEQ ID NO: 340073 - DNA, 1000 bp, Homo Sapiens; identical to SEQ ID NO: 159329

SEQ ID NO: 340074 - DNA, 1000 bp, Homo Sapiens; identical to SEQ ID NO: 159330

SEQ ID NO: 340075 - DNA, 1000 bp, Homo Sapiens; identical to SEQ ID NO: 159331

SEQ ID NO: 340076 - DNA, 1000 bp, Homo Sapiens
acccatgctagcagtaacttttaattgtatctcttgaaattggtaaaatggtgagtcgggctggggaggcattgattaatacctccaccgtgctctccgccggcctctccctgagcgcggcttcccttttggctgtcggcgatccttgctttgactgtgggtccccctgggctccgcagggcttgaaggagagtgtctttgttccctgctgcttctccagctcccactctattcggatctgctccagctccgtcacctcagcaatggactccttcaggtcctccacgaacttctgcatctcgtccgagcccagggcacagaaatgcagcacctgcttcttctcggagcccgagagcggggtcaccagtgtgatgccatgagagtaatactcgttctcaaagagctggaactgcatgcccagcaggccaactgacttgcaaaaggtgtacgtggaggagctcttcttcttcgggcaaagtttgagaatcaccagcaggtcattgaagaggaacacctccctctgatgcgctgcctgcttctgcagcttgttcacatccgtcacctcgaagagccggctgcagcacaccaggcggcggtggggcacggacagcactgtcttcatgcccacaatggacttctccaccttggtgacgtacgtgacgtggtcctcattggacttgagctccttctgctgtatcctctcatagatgcctaccaccagctccctggggatgtcagcgccatcgtccacacctcgaaggtttcggatgaagtcctccagcatcatcttccggtcaggcttgatgttggggctgtacatgtcggtgttgaggaggatgatggcgaaggcgaggatgaagatggtgtcggggttgtggaactgctgaaccacttcggggttgcacatgcagtagcgctggctgaaggcctcaatgagccgctccaccttctgagcctccccctgcacacggatgtgtgcctggaacttgcgcagggcctc

SEQ ID NO: 340077 - DNA, 1000 bp, Homo Sapiens; identical to SEQ ID NO: 159332

SEQ ID NO: 340078 - DNA, 1000 bp, Homo Sapiens
ttttttttttttttttttcagccttaattgtatctttattttctgcatgaaacaatgcagagatttgactaaagactaacatttaataattttcagttacagcccttcagtgaaagctttgagataaagcaactagaatctcaaaatgatcgagccaactctgtgaattagtattaagcataactatcacatatgtaaacgcgagttatcctctccaatataggggaggcatataggaaacatgggaaagtagcagtatgaacaagagtaaaacaggtagtagaaaacaacagcatagggatgaaaaccttgcaaacaaagaattactaatttaaagtgtaaaaattttgcaaagggaagataactcaatttctacattttcagctctttgtattaaacattttttcatctgtaactagatattggtttttcttctccatagtaagatcacctgatatttgataatttatgcttttattactacttgttttatgataccaacatttatgttcacatcctcaaggctttattttcaagaaaaaataaagtcgtagtagcacaatgtgataagctccatcttccaaccaatttttaattgtctcattggtatgtatattaggactaaatggctgtattccatgcaaaaagtaaaatgagcagtaagtcaagtgagtattcaggctatataaaaacttctacctacctgggccttgattattcctggtaagatgattaatgatagaaaagtagattatgaaataagaaaactaaaaggcatgttaaatgctctttaaaggtttttaactcctgtctggtggagcaaatggacaccatctgtataagaaagccagataccaagaaactgagagttttacttagtgaaaccttccactacttatgaaaagtcaaatatcatgtataactcatccagatcaactagtccctagacactgatttttgggaaggatgtaagagaattactgactcagatttagggttt

SEQ ID NO: 340079 - DNA, 1000 bp, Homo Sapiens; identical to SEQ ID NO: 159334

SEQ ID NO: 340080 - DNA, 1000 bp, Homo Sapiens
gcaacatttaatacagtttttatttgtttaatttggtaaatgtagaatgtaatggtttcaaggcaaaccctgcactacttcagtcacaacccaatagttaacatgattctgaagaacagtcttatctgcaatatctacccacttctaaacaaacacatctatagaaatccatgtacatatatattagttttcaacaagtcaggattttcaacaactctaaaatttcaattttatattctgaacacacttcaaaattatccacttgatgcaggatataaccatagggagataaaaattcatgcaatgatactcaggttttttttttttaaaggtaaatccaatatttgatcattcaatgctacataaagtgcattgaatatcgaaaataaaacaagcgccaattttatcattaattaataacacatttattatcttgaaaccaaactggcccaagttactttttgtctttttgagtcagctctgtataaactcatttctctcaagcttcctgggaaataaaaaccaagatatttcatttattctttgcagttaacaagagatggcagcgggctcaaggtaggtatgttcttgataattcagagtcagaaagtacttcttcttgagcagaaggttcataatctcctacattttcagccaactcaatatctaactcatcattactttctgcactgtaatcaacttcttcaaggaatcgaggttcatcttcatccaagacataagtggtagggctagttactttgcagcttgattcaattaaatcattttcaaagtcaagcaggctggaaggcagattatactccaatggagaggtcagtcttttcaaacgtaaaagaccaacacaaaattttgctcccatctcttccagttctcgggtaccaatctgtaaacccttgtattttccctgatcacagccacataaagtactctccatggtataacttctttgtactcctatttccctccaaactacaacacgtgc

SEQ ID NO: 340081 - DNA, 1000 bp, Homo Sapiens
tagggtaaaatatacagatatatttatattatcaaaaagtccccaaattggggaaggggcatcaggtagtctggaccccccactcagcccagactggaaggaaggctgaagtccccaaagcgcagctctcagccctgtagaagctcagccaagagctccctccccgtgagctgagtgctcctctacagcacccgctttctgctgttctggagtttgttgggaggagcagggggctcccttccggcagggccccagggcctcacgcctctgaaagggtggtggtcctcccaagttcctgacttatgcccatctctccagccccacaaggacagtgaacccggtggggtgagcaggttgggccaagaggtctgaacacctggacagagttgggagaggttcctgcccaggctgacccctgctgcctcccacccctgccggggaaccccatgctgcagtcaggatggaggatgtgggttgtggggtgcagtttcccatgcaccccccgctggctcacatcaggccttggagcataaggggtgtctgaacagaaggcttccagcggcggaatcctagagccaaggatgggctcctgtgctcagacgttgcgcagaagagacagagggtccgcggtgaaggcagccacactccggcgcatttcattttcactacctcgaagggggatcagtgacacactacccagccggacctcaggcactgcccgggacacgcgtgagggctctgagggccacaccaggccgtcatgctgcacaaacagaaaggtagcgaaccactcccggagctccatctgtgtgtcacagcagaggtaccactgctgcttctcatgtttctctgtctcatgcaccactgtgaagccccagcaggtgggtggcctgagtttcttcttcactcccaggtagactttgagactcttaataggccactccttctcaggccggtgactggtctcaggggccccgctccacggcctctggctccggac

SEQ ID NO: 340082 - DNA, 1000 bp, Homo Sapiens
ttgtataaagaatatttaatatgtgagccattttgactatacaattatgtattacatgaaattataacataatttataaagggccaggcacagtggcttgggcctccaatcccggcacttcaggaggttgaggtgggaggatcatttgaggccaggagttcaagatcaacctgggcaacatagcaagacccaatctctatacttaggaagatttcatttatcaaagcttcaatcactgcggaagagctgacatttccaagatgagaccaactttgatatattgcttgcaagagaagtgtctgtgctcttgtagcttgaattgtgagatttggaagttcaaatataccttcagttatagcaatctgagatcttttggtccagcatgtggggagtttcagaagtttcccataaagagcagtgctgaaagagggaataactggtacaggtaagcagtaagatccactgcaatccaaagacgtcagtcctgcctggaaaccaaatatcttaagatagcagtgtacataacaataatgaagcaggttatcagaaggttgagtaaggctgctgaccacatgcaccaactgttcagcatacattggcactgaatgttccagattaattttatccaccaatattcgaatggatggcaaaggccgaagagactggaagtttgtagtattcatgaagttacttgagttcttttctcccataatgacaggtagtaaatggtccagcaagttgaattcagccatggaaattgtgcaggtacatttgaggagagtaacacttgtatgtcgagtaggaatatattcctccagaagagccacctcttcaggattcagtattgtttcattttcatccttaatatctgattttagcctgctatatggttcatattcatgttccaaggcacacacaatcattttcaaaatcctatgcaccgcactgctatccaaacgaaaatcaagaggacctataacaaggcttttggtggacttct

SEQ ID NO: 340083 - DNA, 1000 bp, Homo Sapiens; identical to SEQ ID NO: 159335

SEQ ID NO: 340084 - DNA, 1000 bp, Homo Sapiens
tttttttttttttttttttttttttttttttttttttttttgctgcatgattttattactataaatatacagtaaaaacgaaccaacgatgagcccatctgagcacatcagacggcagcacatgggagtcccagcgggccactctgcggcccgaacttcacgcaaagctctggcaccaggactgatggccagaggctggggccttggtgggggcggggggcgggcggtgcagggggctgtgtgtgttgttggggagaggtgcatggggggagagaggtgcttggggtggggtagaggtgcgtgggagatgctcggtccgagtgcacacacatgcatgggaacatgtgcaggagtatgtgcgtgtgtgtatgcgtgacagcatgtgtgagcgtgagtgtgcatgtgtgaacgtgtgcgtgagcatgtgcaagtgggcgtgcatttgtgtgtgtgtacgtgtgagcgcatctgcgtgcctgtgcacgagcgggaggggtggctggcctgggtgtgcagggagctgggtgtgaggaccgtgctgtccactgctgggtctcgcccaggaggcagagctcatgctcggagccaccgtgagcctcagggagggtactgagctgccccacagccgacctgtccccaggcccagctgcagggcagccctccagagccaggtgagcagcagacacctgcctggcccagggctccgcaggggtggatccagccctgggtcaccaggcccaggcactccctttgccatctgcggcccaggaggtttacctttaaaaaaacaaacaaacaaacaaacaaaacaggacgaggtcgcccagaggccaagcctcccggccgggaccccattccccaggtgtgctgctggcttcctcctccctgggccagtcctgccacagaagcctgagacagaacaaaccaaatcagagagaactgcaagggggccgggcgcggaggctcacgcctgtaatctcagcactctgggaggccgagg

SEQ ID NO: 340085 - DNA, 1000 bp, Homo Sapiens
tttccaactgttaaatccagtcttacctagatcgtcagcccttagtatctgcaggggtttggttccaggatccctgcagataccaacatctgaagatgctcaattccctgatacaaaatggtacagaatttctggcatataaacacacatcctcctgtatattttaattaaataatctctagattacttataatacctaataaatgtaaatgctacataaagagttcttgtattgttcagagaataatgacaagaaaaaagtctgtacatgttcaatacggatgtaaccatcctttttttaaaaaaaatcgtattttccatttgcagttggttgaatccatggatgagaaacctgcagataccgagggctggcttcatttagattcctaatcattcctccaggtagtcaattttttaaaatcacattgacaagctcattcacccatttcttcattcaacacatatttattacagggtgattggacttctaggctgtcagagctagaaaaggccttatgcatcttttaccccacacccttcattttacccaagggagatggaggcagggctagccctaaacccagagtctctcagcctcacccctgatctaatcatcatctcaccaccccaaccaagcacttagcagtataaaaccttgtgcaaaatatatgtactttttcacttcaaaaatgaaaatattacaagatgagtttttgtaccttactgtaatttataaagctagtaaatattagcaaaatggaatgataaaaccaaagagtaaaagtgcctttaaaaaagtaattgcagggtttgtaaagattctttccactttttgtcacattaaatattttataaagtcatatgacatatacatatgatgacttttctgcctttctgcacagttagaaagtcattcaggaaagacaatgataccacaaaacaacactcagagaatgcacattccacagcactgacatgtatcatctatggtcctggtcta

SEQ ID NO: 340086 - DNA, 1000 bp, Homo Sapiens; identical to SEQ ID NO: 159336

SEQ ID NO: 340087 - DNA, 1000 bp, Homo Sapiens; identical to SEQ ID NO: 159337

SEQ ID NO: 340088 - DNA, 1000 bp, Homo Sapiens
ttttttttttttttttttttaaggtaagaaagtttctgcttttattgaaaatttatatatgactcagtattgtaataaataaacataaccattttcacaaaaaatgacagtgctatgctaaagaagaaaatattaaatgggggatttacttgtagtggcaagactgactttttatcaatacagaataaatattaacagcattcgtgagccaatgttgagacccaacaaaatgtaggaatcaagcatgatgtaagaaataattatccagagaaaaagatggtgtattctcggatgttaagactgtctttgtaaactggtgcatatcaattagtcccatcctcacagctcaccttcaaaccacagggcttgtttctggctatgttaaaggaccatcctctgaggaaagcagaggagaggaactccattatccttacagtgaaacgcaaccactgcagaaaatctccactggtaaatagaacacagtttaataagtagattggatatgatctaactataaaatttaggtaacagagtaagtgttacatgtggcaggaccggaaaaaaatcatgacatttttcttatccccttgtacccctcccactgtcattatgctattaccaacaacaacaagaataatgtttcaaattttcctctcatcaaaaaatgagagaaaataacgagggaagtgtttttgttctttttcgaacagtttcttgaacacctccaataccaatcactcacaaggtgtctgtgcaaatctatctcacaggatttcaaggaaattgttaactcacaaaaaaatccttaaatgaagctattttggagttctgtatattatttggaaaggagggaggaaaagggtggtggtggtaaagtagaggtaaagtagtacaatccagccaaacaaaatgttaaaagttttaaatcaacaatgagtctgactttttctggtttgggaagcaagactctaaaatgttgggagagattctttctgatctg

SEQ ID NO: 340089 - DNA, 1000 bp, Homo Sapiens
ttttttttaaacaataaacagaatttattagctcatataacaaaaaaagtccagaggtaaggccaatctcaagcaaggcttgatcctgtacttaaacaatttcaccaaggacttgatctctttctgcctctcaactctcccttcagtggtgtcagcttcacgtgattcctggtcatgatcccaaggcccaaggtggtcatcataaagacccaggaatactactacctttttcacattcaacaggggaattaaaacagcttctacccagcattcccataagtcttgaaattccctctggcttcattgtcttaactcacaagatcatacctaacccagtcaccatagctggaaagatggaaggtgtcattggcttagtccaggacatgtattccacccctggagaggctctggcagatcatatgaattcccaaacagaaatggggggttgctgggaaaggaaatggaggaatgaatgtggatgcaatcagcaagacctaccacttcccccattttatggatgggaaactgagactggagatgggaaaagctttgtccaagatggcagataagagctgggactacaacctggcctttcagtctgacgactctacattatttccactctactttatccccaccttgttcagaccaactcacccaatattgagtggtgataaataggaagtcagacgaatcaatttctccctatagtgaaatgaacccctttggagtcatcacatttcagatacctccaatgggtttccgagcaagtcagcagaaaacaaacctgtgtcccaagaattcttgcagtcgtaacatcaacctcagcacttctcctctcctcttggggccccctaagaaccaagtggctactgctacttttaaggggagaatgcattctgatatgcaaacattatcacagattcatgcactcaaaatctaattttagctgcaagagacttcattataagatgttcacataattaagcagctttcttcc

SEQ ID NO: 340090 - DNA, 1000 bp, Homo Sapiens; identical to SEQ ID NO: 246507

SEQ ID NO: 340091 - DNA, 1000 bp, Homo Sapiens
ttataaatgttgccagtcaatgccaaccagtgtctgattggcttcctgtgcatgtccaatttcctctgtgacactgtgttggtgccagagcttctgaatcttcttgaatcgctctttgcataaatgtaaaggatttccccgtctgagtccctggtcggtctccccatagtcatcaaggtaaggaggagaataaaaacagcctttggttttgccagctaaaaatagcacctgacattcccgtactctcaggaagatgcccactccagagccacaggagtaggtgtgagctgtgcaggctcctacatcctccccttccagttcagtctggcagcagtaactctgggagcacagcagagatccgcacacaaggcacagagttggggctctgctcttatcaccacctgatttcgggcacgagaaattggatgcttgattaatgaggctgctgtaatcctctggaaggtttattaatttgttagattctcttggatatcttatagcatctctttcaccttctagatatcttttaacttcactgttacggcaccaactttcaatcagtgaattcattatctcactattttcttgaaaaaggcaaatgaggttgtttggtagggaaagatagctacataaatgttcaaaatggcttgttccaggaacttgaatgtcgggtggggaaggaactccatttaagtaatgaaaaaataaagcagaacacttcaggaaaggcatgattccagctctgacactcctccacagatgccagccggatggtatttctttcaaggcacttcccgtatactggtgaagtgttttatacaaagcaagaactgctgattcttcttcacaagggggattttcttgatccatgccattctcttctgtacatgaggtaagtaagatctgtatgatgtgtgccatagtaaccagatggaaaatgtgaaggtctccagtgccaaggctgatccctgaaaaatcctgacactgcaacgcaggaaat

SEQ ID NO: 340092 - DNA, 1000 bp, Homo Sapiens; identical to SEQ ID NO: 159338

SEQ ID NO: 340093 - DNA, 1000 bp, Homo Sapiens; identical to SEQ ID NO: 246508

SEQ ID NO: 340094 - DNA, 1000 bp, Homo Sapiens
gtatttatgctaaacctttattactttaagaaagctgtacactttttaaaaaaatttgcacttataaataatagaaaaaatattagaatcaaaattccggcattacagatgggaaaatatgtactataaggaattcaagttaacagaggcttgatttatataaaagaaagctgcagttttaaagttgtattccttaaagaccagattatagcttatctgaatgggcttgacactttcaaatggaataaagttacaatattaaacagattagggtaagaaaatctaaatctggcacatctctattatttgacagtgtttaaccaaatacatcatacagaatagaaggtgagtgccaggcccctgaggaggagctctcgtgttccacagcaaagcgctgcccaaggactgcgggaagtgatccagctgccttcacacggaggacacgagactgcttcctcaagggctcctgcctgcctggacactggtgggaggcgctgtttagttggctgttttcagaggggtctttcggagggacctcctgctgcaggctggagtgtctttattcctggcgggagaccgcacattccactgctgaggctgtgggggcggtttatcaggcagtgataaacataagatgtcatttccttgactccggccttcaattttctctttggctgacgacggagtccgtggtgtcccgatgtaactgacccctgctccaaacgtgacatcactgatgctcttctcgggggtgctgatggcccgcttggtcacgtgctcaatctcgccattcgactcttgctccaaactgtatgaagacacctgactgcacgttttttctgggcttccagaatttaaagtgaaaggcagcactcctaagctccgactccgatgcctgctctttgactccacggctttcttgacagaattcaggattgcaatggtgctcagggacatgggcctggctttgggcagcaacctctgcaatggccctgtttca

SEQ ID NO: 340095 - DNA, 1000 bp, Homo Sapiens; identical to SEQ ID NO: 159339

SEQ ID NO: 340096 - DNA, 1000 bp, Homo Sapiens
catatttattgaatgcgtttattttaacaaccaaaaaattctaacagcctaacaatgcacataagttaaaaattaattatcacttagtgataacaaagatagttgatttacatggaaaaaagaacatttacaatatgttaatccttattcacattgttgataccgcaataaaacacaatttgtttttttcatttcacaaaaaaaaaaaaaaaggcgggaaattgtgctttgtcaagaggcactacaagagaaagtttcttcttccaaatagatattatatgacagatattgaataaatagacatatatgcattgtaattcgcaaagatctggcaagaccacaggctaaaatgcccacagattcacttagaaccactgcaaacttggcagtgaaattaaaaaataaaaggcaagacttagcattgaaaaatacctaataaatttttggttgaagtgtaaaagataccaaatgcggatgccatcgatagatgaaccaccttgtaagagcttggcaaaatcagtttccattacgtgtacagagtgaccttcagcaacagtgtaagaagacaatttggaaagagtaactcggagatcaggaagcagcaaccatggactttctgattaaagctgcagcatactacagaaataggaaggatggggccagggctaactgcaaacaaccatccttttgcaaaggtatatgacgcttatgtcaagataatttttaaacatcattatttgaaaaagtacaggaaaatgtccctttaaaaactccagaggttactgagcagctagaattagcttgtattgcaacatgtcttctccctgtatattgtaagttctgagttaatatctacacatagaggttttttttttaactcctaccttttatacctttcaaatatataaatagtattaacagttatattacaatgtttgtgtagtaaacagaaaataactttcaaagtgatattgcatgaggtctttgacaaggttttgtg

SEQ ID NO: 340097 - DNA, 1000 bp, Homo Sapiens
cagcagcatacactttatttctaaataggcatccagtgacacgactgttcatacatctattcctgactcccttaaagagtccaacgagatgacgcaggggctcctgcatggcagccacaggtcccccatctctgacccgccttcccctcccagcccaaagccccaccaagaagagcagcacatcactgctcaggaaacaggggcctaacaggggcctcttgcagctcacttgggggagaaaaatgagtaagtctggccttcataatgcttcttaaaacaaaaacccagcactcgtcatttttacaaaggaaatgatgaaaaggaatgtaagattcacatccatcttgaggacaattcaagcttcgtcattttgaggacgattcaagatttgcagatccttacttggagaaaccgtcaaagcctttggtgtaagccaggccatgcccaccatgcaggtggaagcagggaggcctccccatcccagcctgaggctctggttccgcagggctggcagctgacttttgaccacggatgcacatcttcccatccaatcacaggcccactgctcaccagcacttcgcgctcactccgaagccagtgaagcccccgcagagcagccggggagaccaactcaagggcaccagaggccacagcaagaaaatagctcgggagagggggatgggatggggcagggggtgtgtgttagtcttcctccttctgttacatgcctggtaacagtgaagcccctcaatgtctaactgttggacaactgtttgggaaacggcaggagactaaatggaagggggctggctctttattctcgaggcctttatcttgactgtgagatggagggcgtgaaatggagggcgttagacagaggacccggggctgtggagatgccttcccgaggactctgcttcatgactccgcatcaggaagctcagggtttcctacccgcccccagcaagggcagcaaacactggctctcactcggcaggga

SEQ ID NO: 340098 - DNA, 1000 bp, Homo Sapiens
attatacaattctgtatttagcgactcgtttacagaacgtgttcctttttttaaaattttaaacaaagttcatcaatctctcatagaaacggtttgtgtatgtgtgtgtgtgttttttaaccgttataggacgtgaacctgacaaagttgttcacgggtccgctagctttaagtacaacaggatttccgtgttcaaaagactatactaagtgcttaatcaaatcccgtcacactaaagccaaatttagttctctaggaatcggagtctgcgtataagcctggatttcaacgttgtgttggtttcaacagtaaaaagtggtgtgttcccccacggttgtcttaattgcaacagggtggtggtggctaaaagatgtttcatttgttccagatttgattactctgaaaatggtcactgtttcctattgtcaaaatataaaaataccttcatctggataaaaatgtatacagtggaaaactcttcaatgcatagcctgggtgtatggaaaaggttttccttcagggtttgtgttttgttgactgtttggtgtggagactgcagcctgggctgggtgtgagagttgggatttctggaacggtccttatctgtccccttctggttgccgggttttgcccatatggtttcaaaatgctagctacatctttgaaacctccatcggccatctcacccgctggcattacattggcattgattatattcaccttctcatcttcattctggggagtcactcaattcagccttcccatggacagtttgaaaaaggaaacgtaataaaaacaagggagagagattcagtaaccaatatggtggccgttctatccaaattgggaactctcaccctagaaaccatgccaaagacgctggaggaagggttcctctgagttgggggttaagtctctgctccccaacaggtcatgcgttggaaggtaggaggatagatttggaggctgggatatggtgaacatgctgcgatgaacttgg

SEQ ID NO: 340099 - DNA, 1000 bp, Homo Sapiens
ctcattaacaaagcagtcaattccctttatttttaaaattttatgtacacatatgaatgatctgtataatgtacattcaatatagaaagctttatatatttgatagtgtatagaacatttcacaattacactcatcttttacataacatcttgacatccatttttaaatttttttgcacaagctccttttcattcaatttggtaaagccagttatacatactaatgtgtactgtgagctttcagaaggttaatgattgaggatgccagtgaagggtgcagggacaaaacctaatagtcttggatggtggggggaggatggccacgcagacttgatgcaggagagggaaatattctttcctggggaaaagtgacttagcccaatttttgttgactgtagctcaaccctacagtcatgctagttcaaaaaaaaaattacaaaaactaggaagaaagttttgtctttttgattcacagttttgtaaacagatataaaggaacaaatgtgcttacatacaccaagaaaaaaaaaattcttgtgtacccacttatgttgatccacagagtgctttcttataatgtgatacaattaggatcactgactttttttcctaaaaatatatttatagaaaaaggaataacactgtcatgaaaccaggagaaaggcagtaagagtttgcttcaacgtatcagctggaggaatgtggacttggcactggcctttcagcgtttattgtctctcgtgaatatttcaagtctgatagccaaggtcgcctgcctcatggtctacaggaggtggcaggttagacatgactgatgtagatgtacctgcggtaaggtagccagcaactccaggtcctgtgaggtatcctgctgtttgtgactcagaaatgaacaaatcatgtttctgatctttgaaggcactccagactgaagaacggcacaggatttcattcacctgttctccatactgcaaacttcgagtcattgccttgagagctt

SEQ ID NO: 340100 - DNA, 1000 bp, Homo Sapiens; identical to SEQ ID NO: 157515

SEQ ID NO: 340101 - DNA, 1000 bp, Homo Sapiens
acaaagagtttgattttattgatatttaaatatattaaatatttcactgaaatacatggttcaccatcctcccccacccccacagtggttacattataaaaccaaagcccacggcctcccacctcctgactcctctaccaactgggtgaggaaagggacaatggtagcccaggggaagggcatggctggcactgtggtacggggatccagggtgtggacaggccctcccacctggcaagaagcagagacaagccacccaaggctgaggtcttcccactctgatctacttataccctcacccctaccccatggcaccaagtagtctcttcctatcccttcctatccagggatatggctggggacaggggagtagattttctgtctggaaaacaagtcttttcccctccttctgccatgactaatgaagtacctgatggcccatttggttgatgcatgaagatgcccaagggaggcattacccagaaaccaggcctccacagggagctggtgtcagaaggggcatgaggaggggcaagtgcactgcctgccccttccactcccaaacctagcaactctggaaacccttctcctctgcctctctagtcatttccaagacaaagtgatcttcaagcaaaattcaggctagtgcctttggcttaaataggtacagacagagaaactgaggcaccaacaaattcaggccagagtcaaggaggttgcagggaaaggggtaaaaggaaggcaaagacaggaagggaatctagagttcaacctcctaacccttctgccagccctcaaggcttcacaagggactggggagctagaaacatgctagactcaggctgaaggctggggaaagccaagtttaaggttcctcttccccaccccgtagtaccagtatccaggtcctcagagggattccatgctaccccagccccaaagcataccatgtcccaggacactatctggggaagccaggaaattcctcagcctctgtcca

SEQ ID NO: 340102 - DNA, 1000 bp, Homo Sapiens; identical to SEQ ID NO: 159341

SEQ ID NO: 340103 - DNA, 1000 bp, Homo Sapiens
ttttttttttttttttttattttccagagctttaatcacacaaagagggaatgcctaattctctaaatgaaatggtctgtgatcactgaagcagagatctaatatatcacggcaaattaggtagattttaataaattacttatctccctgaatactttacatgtgcttaagaaggaacatagcctgtttgcaaacagtgaaaacccacagcctataaaaatcctttgaagaaaatgacaaataaaaaagtaaattaaaaaatgaaatgcattatcctagacctctagagacaattcctttgcagcattgattcacagctccattaaaaatatcaattaaatccttcagtgagattgggtaaaagctagaaaattaactttcagagctgcttttcgaggatctggttacccagatacaccctggcactgtactggcttgatgtaaatttaaaaaatgataaaaagatactcctttcacgtctaactaagcatatcagaatttgagttatacttttcataatttctttctgtgtcatatactaagttttcaacgtgtaaatttcacatctatctatatacctatctcctttttatatatacatccctgggtcaccattacaaatgtatgaaaataatacaaatagaatgaacttttaagaaagaaagacaaaaaacttgcagtcattgaataagttggtgctaagtttcattctttatatttaattgatagaaactgcatgcatcaaagaaaatgcatactgagctttaatgtgcataaaatggatattagcattttaaagaggaagattaacacattaatccaagtaattttcatatattgcttctaataaaatcttcacagtataaaactcttaatgaagctaatcataggcattccatttagtgggacgattagggataacataaaagtatttctttttcataggttttctaagatttatgcttttgcttattaaaaataaaaatgggaattgcatttc

SEQ ID NO: 340104 - DNA, 1000 bp, Homo Sapiens
gtctcgggaaaaaaaaaaaaaagttttaaaattgagatataattcacagaccataaaattcatcttccaaagtttttaattcattggtttctagtatattcacaaagttgtgcaaccatcattccacaatttcatcatcttccaaagaaagcccgtccctgttagctgtcatgcctcttctctcttcctccagtacctggcaaccaccaatgtgctttgtctctgatacacagatttgcctattctggacatttcacataaactcgtgattggcttctttcacttagcgtaatatttgtaggattcactcaggctgtggcatgcgtcagaatttccttcctttttatggccaaataatattccattgtatggacagaacacacttcatgtcttaattcatctgtggatggacatttgggttgttgctaccgtttgacttttgagtaatgctgctatgaacgcgggagcacaggtattgtgtggatggatgttttcaattctcttgggcatagacctgggaaggttatacttttattgatattaatagttctgatattggacatccctgctgtgtggtttcacctctcatggactctgacggctgctgtgccttctctgctcggcaggcggtgccctgaggcacaggtgggcgtctggggctggaactctcgctaggcgctacaacttcctctcctgccctgtggcagagccaagccccttgcagggctgttgccagcatgggatgagtctatgaaaacacgtggcacgcagtaggtccacagttaccactggcagcctggcaagcctggcagggcccggacggcagatgcgcttcggtgctgctgtgagtcttgtgctctgccttaggcagaaagtcctgggtttgtgttttgtgaatgaatgacgcatgagtgtgccaaatatcctttacgtgacagaagaggagagggctggcttgattgagtgtgggggggaagaacctggatcttgtaatgtaatt

SEQ ID NO: 340105 - DNA, 1000 bp, Homo Sapiens
tttttttttttttttttttcaaaattatgtttattaatgttttagtatacacattatattctcttagaattgggggaaaaggaaaaccccactcaagtgaggtaacaaacttgccatcttttacaaaatttcattagaactgacaatgttatggtgagtccttaattcctgagaatttgaattattaagttttctgtgaacttaaaacaaacgctcacattaatttttaaattacagtatgtctgaaaaaataaaattaatgttaatgttatcaagaaaaatcatcatccaaatgtacatattaacctattagatgtgaatatactgaagccctgttgctctgcagtttgacaccatttaaattcgtttccaggatcttatttcaaatatatgaacttataatttatccagatagcagtgacattattttgacctaaaggaaaaataattgtctgtcattttcttctcaactgtaggtatccagggagtcagcatgtgaactctatctagtattgataaaataattaatttacatgtgtagggataatgaacacagaacatgtgattctcttctagtaacaatttctatcccttaataggagatgatttcagagaagttagagaagaaaaacagagaaaacaatactgttgctatgaaatgacgaatttgatataatcaaatgcaagatcattaatataaacacttataataatgaaaatataaattattaattatgcagcatgctttagggccatttctacagttattatgaattacaaatattaaatgcctttaatctatccactgttcataattctgtaagccatgtttacataataaacaaaaaacatttcctacatattctgtctcttctgacttttaacaattaaagtatttatcttgggctggcaagttaccctgaccctaaccagtaagtacaaacagggcattgtacacccattctaaaagctggaatcaaagaataatgttagaagtatt

SEQ ID NO: 340106 - DNA, 1000 bp, Homo Sapiens
agttacatagcatctaagttttctgatcactaccaggtaattttcaaccaataagaaaaaggaaccaacactcagctctgtagaaatctaccttcttttagaaacctcaggcctctgcacccctttagacaactcatttacaaccacaaccttccatggcttctcacatgccagccagggcagggtaaaaacggcaatttcttacaccgaaaggtcctttttatgtaacaaacagacctccccaaaccacaacttttttgtcctattgatgactcgcatgagatcaaatctctagtgtcccctgactgccccgacagggtctaggacaacacaggttaaaaaggacagcagggtcgttcaactcccacactgcctcaggtgttttctcaaagcacgacaattctgcaatggagacttacacgtggaaaagaatcaaactgtgcaggtaccctcagtcctctgccactaccagctcaatagcttgagctcagaggatcaagtcaagtctctgtctcacttttaatctagcacacaagaggcacaactcaggcagtacacggtattgaagcatgcaacaggtcattggtaacaaaactcagttagattaagagtacattaaataaatctttgtagttgagtagaaatcacaaaacagttggtgaggacaggtctgtaggctcagctttacatccaggtttttatacaccagcagccagattcacaattgatagatattgcaccggaaagatgtgtgcagggaaaagaaatcatcatcacatttaatgttcatgataaaaaaataaaaacaaaaccagatatgacctccatgtagtacataaagtgccttcagaattggtgcatttacaacaaaaactggttatttagctaccattagcaaacgcatacaaacaggagactaaacagatctggtttccacagttttgaatcaagcagtgccaagtttcattcaaaatgtctctactacaaacagcaaagagga

SEQ ID NO: 340107 - DNA, 1000 bp, Homo Sapiens
catattcaactgaagaaatttatttacttttttctaggtacatagatgacataattatagacaagttttgatacataggaaaacccttccgtccacctctctttatgctaaatgaatcatcacaataatttttacaatttttaaaacaatacacagctttcttgggctgaagcaattgcaagaacatattggtactggtatattacagctacttacaatgtttttaagaacagcaatggagaaaaataagttatttaaatattgatttcatatacagaaagtgcaatgttgttagttgttatataacttgctcgacagtttcttttctctatcaattttaaatcaagataacttggactcagactattatatttttttctgaaaataatacagtacacacatggcagcagtgacttggcaagttgaccttttttgctgcagttatgaaagcaaactttactatgtcaggaactgatttccaatagattagtaatttccaatttcacccatacctgggggttcaggacagagaaaagggcctctgactaaggcaaggccatgaaacaatatcttagttatctgggtacataaatagtactagctggagctgactgcatttccttccagacagctttgaagtgaaaatcatacacaatgttatgtgtagctacctgagccgaactgcctttccaggtttcttttgtgctttccaaagacaacaattttcaccattactcaaaattctgtaccaaatgcaactgattaaaactggatattcctgaagcctaccacctgttcactaatgtccacaggcagccccaatccacctcagtcaaacgtcacacccaaacattcagcttttctcagaccaaattaaatgtttacagaaaaaaaaaagaccaaacgctaaagatatttttaaaatatttaaacaacacaataaagtaaaaacaacctcagacccctcagactagacattcccactgaaaattctttgtgg

SEQ ID NO: 340108 - DNA, 1000 bp, Homo Sapiens; identical to SEQ ID NO: 159342

SEQ ID NO: 340109 - DNA, 1000 bp, Homo Sapiens; identical to SEQ ID NO: 159343

SEQ ID NO: 340110 - DNA, 1000 bp, Homo Sapiens; identical to SEQ ID NO: 159344

SEQ ID NO: 340111 - DNA, 1000 bp, Homo Sapiens
tttttttttttttttcgaactggtggtgtttttcattcctaggttagaacaggacaaaggaaagattcttctagccatggttctagaagagcaatctaaaatctatactctgttcattgtggtagtttgagtcctgaaaatacctgttcacaggggcatgttaaaaagtctgaagagttcaaatctctttggaaaatcctctcagtctagttcaggccatgatgggatataaaacctctgtaaggagccctccagcaggcgttccatccataaagagagcttgctcaactttcctttgatgggcctggatccaaggccacaggaaggtttccctcgagattcacccaggtagagggaagagtcaacatcactgcacgaccctatggcttcctcctcttcgactgtcttttggggcttgaagaggcagaagtatttcttgtggccattcagagccagtacataaccagtgtagtcacgctccatgaaatgcttatcatattggtttgggattggagctgcatcttgagcaaattctagtaagtattctagccattctctgtgtttatctagactcaggaaggagaagtgtaggcagctgctcccagtaaatgtgtagacctccaaagcaaatttctgtagtaggctggtcttggtagaattcgacaggatgaggaccacattcatgtggcctggcctcagacgtaccaagttactggtgtatgttacatctgtgagttcagttacctccacaaagccttttttaggaatcttgctgctgttttctttggtgaagcttggctcagttttcccagtcttctcttgggcttcctctttttctggagggcttgactctcgctcatcattagagtcgctgaaagcctgaacgatgacagtgccgaagaggatgaagagggcagagaagatcagggacagcaggggcatcatttccctccagttgttgtgaaaaatgctatcccagcagtctgagatgtagtcagaa

SEQ ID NO: 340112 - DNA, 1000 bp, Homo Sapiens; identical to SEQ ID NO: 159345

SEQ ID NO: 340113 - DNA, 1000 bp, Homo Sapiens
actataacattcaacttttttcacataaagccttccatgatcttatttattacatctagtttttctttatacctctaaaaaaaagtgccttttagatttacagcttgtgcttctaaagcaaaggttaaaacatcatgccccaaaggaaaacaaggtaaaaaggaagctgccatataagctcttaaaaattgtatgttacaaggttctaaaatctcttcagcactggttggttggtagattgtacgacactgacatggtgcttgggagggtcatttatctgatggttggagcagcaccatgggaaagctgcccagatggtctactgaagtccttggctgtgcacagaatgggccaagggcccagaattcatgagtccggggaactttggaggtccttactcaatctccttagtgctaaggttcagagtctcaaaccagatttcttccaaaccttcttgttgtctgtttgttcccccgtcactgtttatcttccacctctgaagccataatttgcacacatgtgatctggaggagggctaaagctgccacaccgagggctttcgccaagatcaaggtcctcttgttggtagtttgggattgcttatgacccgatcctccttatgctaccagcacttctgcagatggcatctgcttagttcagagtggaggagggccattcgtgtatctgagcatggggtggaatgaccgggcaaagttgttggagagggcacagctgtagtcttcctctgacattggtacaaggcaggcaagcccgatgaggaggagcaggagaagctgaaggggaagagctgctcggaggactctgaacaggaagccgcggccggaccgacctggccctggctcagaaagggaggaatcggagccaccttttgtggacctgctatgtggactgctgacagagggtccaggctgtgagagactacacttgcctcgtggcgttttctgtctgtttggggtgctccttcctgatgtgggactca

SEQ ID NO: 340114 - DNA, 1000 bp, Homo Sapiens
ggtcagcaatgtctttttaatacagatgtggtacagaatgtttaattacagcagggcagtgattccagttaaataaaattaaaaacctttattttcccaaatataaaattactaaattaatgtcttaaaagaaaatataacatggtgacagctttaaagtacaccaccattcaccacaggatttatgatttaccaattacatactccaccattttggcaaaaggatgaaattcttaaaactgtttataaacctaatatagtaaagactgtatacatctccatattgcacatttttatgtacaagaataaaacattaaagtgtattgcatatactggaacagcacaaatttatcacaattaaacttaatgcataagcccatgtgagtattaaaaatgtagaaatgtaatacatatatgtacagaatgccaggactgtattaacaatgatatgtacataacaatatactgtactactttgtacttttcagcatagttgcggttattaatataggcctttggttctaaactgcttgactagttttaagctcacataattccttaagctttcatattttcttaaatgcaaggaaatgaatataaaagcactaaatctcctggttcactggtacaaaaattacaatggtcagttcccttaggtcatcaaaaactagtcacaaaaatagttcttgtattcaacctgaatgtgccacaggaaaaaaaaaatattttcaagattttccagctcagcctcgaggcaaaaggtcccccaggcatcaatgtcagtgcagccctccctgccatgtagatcccagaaccttttttttctgtaggccatctattctaacactactctgcaaggaagaataaaatctaagtccagctcaagagtgtctaccacacctttgttaagacacaatgaaaactttgaatattgccagtgagatttaaaaaaatatgtgcaccttcttacaactcctatagaaagtctgttaagaaataa

SEQ ID NO: 340115 - DNA, 1000 bp, Homo Sapiens; identical to SEQ ID NO: 159347

SEQ ID NO: 340116 - DNA, 1000 bp, Homo Sapiens
ttttttttttttttttcaggattataaaaaaagctttattagtgcatatatacaaatttacaaggtcagaaactggagaaatacaaagagctttaaaacacaatttgccgtttcctcagtttaaagtgacttttacctgattgtgatacaacagaaagtacagaacagtaaactgctttttaaatactggaattttatggagaatacattcacataaagaaaggaggtgaattttgttttggaacagggttaagacaatggagacattaatacatagagtgtcttgttgtatttactgccacatacttgaggggaaattctcaaaatcaaggatatgaacacctgctgctgcctgtatgccacctagtgtgcgaaacgaccgagctaccagttctagaacttatgagaactactctaaagagtgtggccatctatcagcacgaggtaaaccacttagacctcagcacttcaggggtggccgactagagaaaagaggccagaaaaagcttcagacaattccagtcaagcaaggtagaatgcagagctgccttctgaattgcacttgttctggaggagaagttaattcttcacttttgtcagggagtcctctacagaagtgttatactcatgagccacatgttcttcaagactgatgaggttaatacacctaacatgctaagtttgccagtttgagaataaaggcagcatggtcaaagcaattccaatcacctcatccctttgcaaaaacagaaaaattacatttcacaaaagtgaaaactttgtatgcatacactcttgcccaggaaatttataagatctcccccataacatttatagtttatttgacaataaaactggttaagactttgaactgaacacaaaacaaacaataatacaaaaaagttttaaaaacttaaaaactatgtgtttggagccattttccttctcttcagccttgctctccaatcctcaggaagggcttcaaaattagcatttctct

SEQ ID NO: 340117 - DNA, 1000 bp, Homo Sapiens; identical to SEQ ID NO: 159349

SEQ ID NO: 340118 - DNA, 1000 bp, Homo Sapiens
cttggcaccgtttctttttattatagctagacacaagatgcccaaagatatacaaaacaaacaatacaaattttaaacacttttacaaaggtgacaatataaagaaatgaagactatggatttatgtttgcaaacattaatttcctttgaatactgtctggtgttaaaacctaacagtttaccagaatttgtatttgacacaactatttttaaaattatagtggacaaaactaatgaaattctaatcatcaatagcctatgacaaataactattataattaaaattaatacaatcttcaactattctcctaagtactgttgctataattttctgtttattaaaactttttattttagggaaaaaaactgaccttactgctattcctggaaaaagaattaataaactttcattaaatattcaatctcaacttttaaaacttaaagctctttatttctgctaatctgaaactacttttggttcactgctaacttttaaaatatcttaatcaatgtgatttaaggtcattttgtctgcagagtgctcatgtttttcatccttataccaaagcagtaaggcaaaaaagcagttccttttccaaatcagacaaagagaaaatttcatccattttaaaagtcaggaactagaactgctgcaaatgatccgaccaacaggaaattaaggctgctgtgattttcctttatatttaaatcataaagtaagattagcagtgctattccctgtgaaagttgaatttataacctttgggcttgaatcacaggacataaatattgccatttctgtttatacttctaagacactgttttcacaatcacttttgataagtttttagatgcaattagaaaacactacacaatgctgagaaagtgcacaactctgctacaacgagatacatgctagaggtgtaagagcagattctagtgtttggtgagcattggcacagtctgccccagcctggcacacagatgtacaggatacaca

SEQ ID NO: 340119 - DNA, 1000 bp, Homo Sapiens; identical to SEQ ID NO: 159350

SEQ ID NO: 340120 - DNA, 1000 bp, Homo Sapiens
gaggtacagatttttattttatctagagaaaaacacaagaccaggtttatttcatacaatgttattcacacatttttcattttctaatttatacataatatacaaagaagtgaagttaacattatttcatatgaaccaataagagccaggacttagacaaactggtccagaaacaatccctatcaaaaggagacactcaagagtaaagcctaggtagttttgcccaattgttttattctgaaatgtgattttcagattttaccaaaatttcatgccaacttactaaaaggtaaaaattggggtgggcacccaaaatggcagactgtaaaatttctacaagaacaggtacttttgtagagcaggcctgaaagtattgggaagattgggttgtcagcactgggacaaatgggaatgagtatcaggaccccaagaagagggtttagtttctcaatgtagtattctctacttgtcattttctaaaattgcagagataatgcctgtgccaacagagggcaaggatgaaggaagactaggaattcaactgtacaaagacaggaaagccattaccaatctccaacatgacagctttgatcctgaaaccatgggctgatactgagaacaaaagttcgatacgggccgaaatactctgaggttggtaaagtaggaaaaagtgagacagcggctttgtgtgggttttaaaaaaatgaaacaaacacaaggcgttgctgcagtgactgggacatgctgatgacccagagtgactatgagaaggaacggtgacaagtgtttggatttaatggtctcaccaaggaatgttgggttagaaaagtaaaataactcaacaccaaacatgaaaaagtatgcctggcatccccaaactttatgccattatttttaggttcataatatgaacaactaagtgataaaacctttagattccatattgtgctcagaagattgcgtttcttctgcagatctctagtaaaaaaagatctcttcc

SEQ ID NO: 340121 - DNA, 1000 bp, Homo Sapiens; identical to SEQ ID NO: 159351

SEQ ID NO: 340122 - DNA, 1000 bp, Homo Sapiens
ttttttttttttttttatttttagtagaataggtaactttattttaaataactttcttaaccctgcccattaagatcacagtaaacatacaataatttttattatggaaattaatctttacatacaaaatcagctacgtaattttacttacaaaacaataaaaactgttctttactgtggcaacaaaagaagcattttgacaaatgaaaaaaattaatgcaaacaaattaaaacaatgcttttctttttacttgcttcactgtctcttctatttattttctatgatcatttgacacaaacatggattactttgatatctactgaaacataaatgataaggttcttaaaggttgaattaaaagtctgggtgttcaatattttagaagctgaataaacaaaacgaaattggggtttgtgattacagaggatttatcattttttccctttgcccatatgaaaatatataatagaaaattacccacgggaaaacatttttaaatttaatgttgcgttcctatcaagtttaataataatgccaagttggcaatttaattaattactttcactaaggattaatactttgtctagaatggagtagaggtagactgatcttttcgtattcaaatattttaaaatataaagtttaaaatgtcataaggaattatataaaatagtatttttaaatatttgaaatttaatttataattatattcaaaataattaaatccctttgataaatagtaagtaagttgttgcttgaaattcatttggttgaaatgattactctaaggaactcttttagttatttttaactaataatctttagaaaaaaatgtctattttttaataagggtttctagttttggaaaaaagcttctaatgatttaaatgcacttacagatgctcctaccactggaaaaggcatcctatctgtttttcacactagtatttacaaagtattatgtgacagagcagctgttgaactaaaaaaataaaatgt

SEQ ID NO: 340123 - DNA, 1000 bp, Homo Sapiens; identical to SEQ ID NO: 159354

SEQ ID NO: 340124 - DNA, 1000 bp, Homo Sapiens
ttttttttttttttttgggcttggggggtttattaagtgatgctttagtctcagtctctgccagcaactgggagtggggtgactccactcaccccaggatttcccagacttgctattttagaggagagaggcaggaagccaactatcctctaagccacagcttgggaagctaggctagtactggggtgggggcagcagagctgagaccctccaccccgagcccctagcctgtgctatcctcccagcctgagggggaggagctgaggcaatcctggctgcagcctcccacacacagccctgctcttggtgcgccattcactgccctgagctattcatgatctctgctcccagatattcacctcaacactccaaaagccagccccttcaggtcttcagtcctgcggaaggcaaaaggagggacgggggcctctgactgagcagcttcaaggagcctctcctttctgctgcccactgaatgccggccccttgtcttcagccctcccttagataggaaggggggtggtggcctcagactgcaccccctttcttctcttcctggcatcccattctgtcccagcacagcagccaagagcacaaagcacagcacctgtggggctggtgggcacaggagaccgtgctggcacaggccagactgcctgcagccctaggtggggcctgctccctgccctggaagctagacagagggagacacaaagcagaagtggggcaatgggatgtgcagcccctgcagcaggaggaggagcacacgaaccctgaccctgctactcggtgcaggccactccaggccttgcttctctaacagcccctgtggctggctccagagctgcctggtccccataaagggggctgaaaggaggatgggtgatccttgaggaggggaagggtctgcagagaatcactcagacaccaggtattacccagctcttcccccaagacctagagggtccaaactcctggccccaaccaccctgcatcttgg

SEQ ID NO: 340125 - DNA, 1000 bp, Homo Sapiens
tttttttttttttttccatgttaagaatattttatttgttttttgagattacatagtcattattgctgatctaatacaatcacttagacataaagatttccaagaacttctcagaaatggtgatctttagaagtgttattcctttcagtaagatgacagaactagatgattacgtatatagatatatagatatatatatatatatgtatatatagagtttagaacctgtccacatataatttgctggtgttgcctattttccttccgtaattttcctttattgaaaaagcttaatgcaacaatgcattttgattcctttttaaaaaccacggcaaagttaattttgagaaaaccacaggagcagcaatatcagatctgtttagagaaaagcgaagcagcataaaagctttgcaggagtatgtggccatggggagccgtgctcatatgggcaagtaggatagggagggaggagagcagagggaaggtagagtagatacattttttttctttgtttaaatgaaaaaaagaaaactgaatatctccattaagaaggcaaaaaagtgccaggcacggtagcacacacctgtggttccagctactcaggaagctgaggcaggaggattgcttgagcccaggagtttgagaccagcctgggcaacatagtgaaaccctgtctctaagggtgaaaagaaaagaaagaaagaaggcaaaatattagcacagattcattgtagagaaaatgttatgtatcctcacagactggagccacatacaaagagataagtagccttctttcccatgcttccagataaccaggatgcatctaaggtaagaggttggaggaaagaagacacattgctctgattccaagggtagagggaataatgaccagatttcaaccctaagatagaacccaaatacttgggaggcttgtggttctttcttcttaatggttgataacacagtgtccctacagagaggtcatctgaaactcagaggc

SEQ ID NO: 340126 - DNA, 1000 bp, Homo Sapiens; identical to SEQ ID NO: 159356

SEQ ID NO: 340127 - DNA, 1000 bp, Homo Sapiens
tttttttttttttttttcttttttttttttttttttttttttttttgttgtttcagccattttaatacattcaagaatatttactagaacaacatttaaacgtatcgtcggtccgcagaagcctgggatcgagagaaatagaaacgcgactggcccttttgcagtaaagcttgtgcttgaagggagaagaggcaaagtggcttcttggagacttcgtgccagatgccacaggactgagagcatctccaaatgtcactttaaacacgtgtgagcatctatagtcattcctaaagcccacagtgtcctaaggatcctattagacgaggcaaaaggcaatgcttctggaaccctctcccttgcagctctgcacgcaaaccttccccaaggaggggcccgaggcaagtctctagataggcggggccaagccctccccgtgcccaccctctttccctgttgctgacctcaggcctgatgctggacccatgagactcccagagagaaaacacagatacagcccatccatccatggccaccttcctccagaagatcctggggacccctacccccccatcccatgaggcaccagggctgggctcgcatggccagcaagggataaagttgggaactgcagaccaggggaagccccctcattcttagggcaaaacagcccctgaaggacaaaataaataaaccaaaccatgaccagacagctggatccggacaggtggagtggcctctgtgaaggcaaatgagagcaaaagtgggaactgaggacacctaagtggagagacacttaaaaacagtaattctcacatgaacatcagtggctcatgccaacagcagagctggccatcaacagaggaacagcaacaaaaacacaactcagacggggggcgggacggggccaggagtctgcgggggtctctgatatgctttgtggcatgactttgcttgcctggcctctcctttcttagctgaaaacaggcatttcactaaaggg

SEQ ID NO: 340128 - DNA, 1000 bp, Homo Sapiens; identical to SEQ ID NO: 159358

SEQ ID NO: 340129 - DNA, 1000 bp, Homo Sapiens
tttttttttttttttttcagtaattcaataatttattcctctaaaaaagtgtgtaaaagtatatagctctcatccacaaggtatatatgaatgacatttaaaatggaggccttttattattgtttctttttatcaaagtcttttagtgtactgtaccagcgctatactgtagttatttttttaaatgaacttcacatatttttgtattctttcaaattgtttgctatatataaaagaagctcactgcaaaatgcttgaaggaaaaaaggaaacaaaagaaattcagaacttcccagaaatgtacagcttttacatttaaaaaaggttctgaaatatacatacaagcatgctggacaatcccacccttttcccctccccatttcccctttttttgttcaaaccatggtaagagttctgatttctgcagaatttccaaaattaaaaataaaaaaaaataaaataacttctcactctgtagcaaatccagggcttgtacatttcagattaattcagtaaaaaactcacaagtaaaataatgcatatttaagggaaatattatacagactttttcacacagaagtacataataagattttttaaaatctattgccattcatttatttttgcacaaaaacgtataaatatgtcaccagcttttcttaacttaaaaaacttaaataaaagacaccagatgaaaactaccctttgctgccattttttttaaagtttttttgtaggggttttttattttttgtgttttttttctttttctgcttagaattgggtttctagggaagaaaagcccctgcattaaaaacagcccatttaaaaaaaaaattcaaagttctgatgaattccgggaaaaaagcaaccccaaagtggtaaaagattacaaatatctactttacaatttgtcttctcaccaagataattttatacaagtttacaatcttcatcttcttatgctcttcaaaaggccttgagaattttcctttctgat

SEQ ID NO: 340130 - DNA, 1000 bp, Homo Sapiens
tttttttttttaagagtcagtatttattctgattaatattttacaaaattttgacatttaatttatgtaaggagggctaatttattaaacactttacaggtttttctttccacagaataacacggtaagtagcaaaataatacttggcacagttataaataaagaaaatataaaataaaaacatccatagcttaagtacaatgatgctgttttacgcccattaatatcaaataaattcctggaaacaacaaaaatatgaatgaaaaaaactccaaggaagtaattcatgttcagtgctgagaattaagttcctatttgctaaaagtatccaattaagttgataagaactattcccaaaggttcaccatcatacacaactttagaactgggtttatagttggttccacacacaggacctacaaaataattaaacagatggtatactgctgcatagctggctcctgaccatctgaccatttctgagttatagatttcacaggtactacaagatggttactacaaaagcattcacattgctagtattttccatgtaattacacatctagaggtttgtctttttaactgaatgacatctcttttgcactgaaaatattgtaccacaaacaaagaagatggtaacaacattcttagccaaactctgaaaaaaccaccatagtctttaactggttgataaaaatgtattcgataaaaatgcaactgagtcttcatgtgaagtggctcaaaatacaaaaaattaaaacaaattctagcattttataaataactttgaatttaaaaattatctaaaatttcccccaattagtagtcaaaactagctgacatttgtaaagttaaccaatttttacattctatgacaaaatggcacaatgctattgccaccccacacccatctcttcccttttcaaaaataaagtacatatgccaattttctaatattaaaacacatacactaagggtaatctttttttgatgtgtgact

SEQ ID NO: 340131 - DNA, 1000 bp, Homo Sapiens; identical to SEQ ID NO: 159359

SEQ ID NO: 340132 - DNA, 1000 bp, Homo Sapiens
acattaagcacaatacagcaatttatttagatgcttaaaatgaatacaaagggaaaataaagatcacaaaattatacatactacaacagtgtgtcatatattagatggtataaatgaatccaccatgatggtgttgaactaaagataaaactaaatatccaaaatgcagcactcattggtttgctgcttcaacacaacacacttttatacagatctaaaaggtgtcaaaattagtagctgcaaagtcaattcttgcatgtgattttagcttaaaagatttcagaaaacagatctgaaataccagtttttgtttttgacagctgtaatgtcaaggatattcagaacaagaaaaatcctataatacaagagagtccagatatatatcttacgtggctggcctctgttgcaagattgtacaaggttatgtgcaaaaactaagtctgtccaaaaagtccatactagcgcagttttgagcttttgctaggtaaactagatagagcgtttattacacagcaagggcaacactaaaaaaagaaatctatgatgggcacacagtaacaggatcatgagcatcacttgaataggtctaaaagactgtacaaatatacatttcaactattcagaatgaatacatgaaaaaaaatcgcttttcccaaagtctactatacacattagactggtagcttgtatgttggccctacactaccatgtgaattagtttaacacttctcaaagacatctgaccaatcatttcacagagggaaagaaatgttgaaaaggcagataaaataaacctctgcttttcctcgtgtgtattcatgagtcaccagcttattggtttttcacatttagttaccgtgtctgtcagagaaggttctgaagcaagaacagcctgtcctgtcatagacttagaaataaccactggaactgcagcggccacatgccccacagtccaaccagtactcacaaggcagtaccagtgagaagacagctttgcagt

SEQ ID NO: 340133 - DNA, 1000 bp, Homo Sapiens
ttttttttttttttttttttttttttttttttttttttttattttgccagttctattattaagaattttatttttgagcattctatatacatttataagtgtacatatgatgtattttatgtacatggattaggaagttcttcaagggcaccattaagtgcccactggaaaattttctacaagagaatagtttggaaaataacagatcaatttaggagactaaaactatacattgatataaagaatggatataggttttctcaatccagaatagtaccctcaccccctctgccctcccctctcctagatggtcaccatagggcagtaaagtttaatcagttgagcacggagcttcagggcgctggcacccagactatgatggagagaaggaaagagcaacaaacaaacaggcacgttggtagttggctacagcctgggtataagcccatggcatcttcttcccccgagactggggatgtcccggcaactgagtaagggatgggcctcctgctgctgacttctccatagtgaactcaatctccttgcctcacaagaacatcagagaggtcctctgttccttccagttttagattcttttcattggctaaatgtaggagacaggcaaaagccagaggtatggagaggttctgagccatgacagggggcaggctcctctgcaggtccttcgtgagcccgctaagcatcttctcgtcagccacttctgccagggccgcttcttttccagcttccctgtggtttgcctctgcatctgcctcctttccggagagcgctgtcagcagactccacatgctctgcttcagtttcttcatgtccatctttttggcagtcttggcatagtgaatttcaattttatttaccttctgaggctcagctaccaagtttgactccccatatgttgtgatgtctaatccttgggcttctggagtgtcaccattctgttgtgctgtcttaggtggatggcaaggataaggtgagaggt

SEQ ID NO: 340134 - DNA, 1000 bp, Homo Sapiens; identical to SEQ ID NO: 159361

SEQ ID NO: 340135 - DNA, 1000 bp, Homo Sapiens
tttttttttttttttttttgacttggcttctctttgagcctcctggatcaccgtatgtctgtcactctggccagtcctgcctcttcacaaacactgattcggctctcctaggcttccgcctgtgtcccagtctggggtttccatggagtgtgaacacgaagttaagagtgaggctgcttcagagcccctggcccatgtgtccatccagactccaagtggagtgtagggctcccagggcagagaggggtgggaggggcagaccctgcccaggcagtcctcacattggacagggcatcagacggcatcccaagggctcgccctccctttcccccccaccccaactcaggtggagggggagcagctgtcaccagagccgatgttggtgaaggtttcggctcagcacggaacgaacatcagcggtgaacctgagggcatccagcattgggagcaggttgagaagggctgtgtcgctggggtcactgaaccaggatttgatggggatggcattgtctggatggctcctgtaagcccctggggagttatccaggatcacaatgctggagaggtcactgtggaccacagagaggtccttgatgtagctgcccaactccaaagtgcagtgctgtctgtaatatctcctcttaagaatgcttctgctattgtccagtttatctgccacagcagagccatagatctccatgcttgctgtaaacaccaccagctcgtaccactggctcaccacttccaggaagaaatccacatggggcctcttatgtacaaaaaaccggacaggatgtttgtctattaccaccttgaggatgaagtcaggaggcgtaccaggccggactgtgggcctcaggaccccatcatggtgggagtgaataagtgtctcatccagatccagcaccaggatcttcctcttcacctgggctagccgattccgggacacaggagataaggggaggatatcatatcgaacagtttggtactgaattaccgt

SEQ ID NO: 340136 - DNA, 1000 bp, Homo Sapiens
tagggatggtatgaatttaatattttttagtattacaatatattcttataaaaaaggtgcaagtgaaaaaggacactgtagattatgtccattagcctcatttgtcatctgaggcagctggtgagaacagccttggcgtgaaggcatccctggtagaagtcgggggagatagatagtcacagttccccagttggtggaaatgggatgggagtagggagaggctggaacagacccttccccattcacctggagaattttctcctcccactgccctaaacactttatttccatcacaggggagaaatgctgctgagaaggttgtgtttgttaggttgatgacgaattttacattggccacaaaattagctagagaaacttatctaaaggtggcaggagcagtggggagggcatgaagaaagcaagaccaagaaacaacctattaaggaccagctcagccaccccgactgggcaccagccccttcttactcagttgagtatgagtccatggtccaaggcactgttggagatctggctacagtggcatctagcaccagagccactggccagatgtagaaaataaatagaaaaatatctttcttttagagtgagaaggctgagctctggaacaacgtatttgtgtcctctgtcaacagttgaaccaaattctgcttttctgaagatcaaatgtatcttgaacagcttccatagtccttttgtttccaggtgcgtatccagtcttccatggtgggtgggaatgccagacacgcttgtggagccctcccctgttccctgcccctgagggggttaggttgacatcagcctggtcagtttgggagaggacctttagaggcctcacccacaacctcccatcttccccaacacttgtcttgcagtgggagctcttggggctgcagatgcatatagccaaactctctgcagctgttctgcctggaagccttcatcttgccctcacctgggttccaggatggcctcttcacac

SEQ ID NO: 340137 - DNA, 1000 bp, Homo Sapiens
tttttttttttttttttttcatgttgatagacactttattgtggcttgtttgtagtaaaacattcaacccctcaacatgggtatctgttttggtggtgtttttctgttggagactacagcgtggtgttcaaaggcttttagcctcatctcatatcagtctagtcagtggttgcctataatttgatagttcaatgagttagaggaaaatgtcaggaaaatctggtcttatcccaaattaagggctgcaagatttgtgacccattagtataaagtgcttatgttcagtgcaaaaaaggcagactcagaagggcaagcagacgccagagaaggacatttcctgggagatggatatgttctatgactcaaggaaggaaaagccaaactttagcccaaatgggtctagtagtttcattacagtctttctcctctctaacaggaccaaaacttctcatctgacagatgtccatgagttgtttattttactactaaaaatcttggttcagagggaaatccacagggtttctaagcaccagagacactgacttcagcttccagtttctgtttgtctcagcatcatggatgggaccaataggctgagctctggccagtgagaggttcagagctgcagagctttctttaggccccacatttgcaaattgaagtcactgagtatgacacaccttttctcaaacattgtcacatcttgcgtgggaagacaagacagtgcatattaaagaagcacttcacctagttttccaccaaccagatgtgacctattcattattccctcattctgactctgtccagaggcccaattccaaagccaacccttgactcccttttctaagacagagaaaagaagcgcactcccttcccaatgaccccacatgtctgcatatccatcctgtggtcctgaagagactgaagggaagcaggagggaaaaggaagcagcttcctaaccaattcaaggagcgcaaacaggactgcagctcaaatagg

SEQ ID NO: 340138 - DNA, 1000 bp, Homo Sapiens
ataaaataacaaattttatttctagaaaatattttacactaactgtgcacatgcacacacccacacagagcttaaccacacatggatttcctttaataataaatctaccacatactattatattacaatttataatagcgtttttgaagacacaatggggaaagctttgtcattcatttataaaccgtccataaattacaaaagaaaggcagtctgaaaagtatgtataaagagtaaaaacaatttacaagtggacaagaattacaaaagagtaaccatcaaatacatctgccagcaactttgtaagtaagtcttttgttcaaatgccaatgatgaagatgggtatggactcatttggagcagatttaaattgagtctggttttggtgtggcttatgcattatgtggattacttgtgtgccattcattgctgtgtatttgggtatggcattttgacaacgaaagtaacagaaaaccatatgccacagaatagaacattaaaagcaatgaagataatcggctttctggaaggttggagtactggtgctttaccaaacaaagttactttctctccttttctcttttttgaatgattgagtaaacattttctgtgtgtagcctggctggctttgaaagactgaaactagtatcttaaaatgcacagcctgtacaacttgatctcgaaccactgtgtcaggatgaagaccactgaatgcacgacacatacaaagtatacactgtttttattagacagtacaaatcattgtgcatttataaggcagaacatcaaggcgaattaaactaggaatttcaagaccagagtcaaagtgaaagttatgcattatgaggcaagcattttgagaagggagaaaggttgaaaatcattcctttaagggcagatgacaaatgcacaaagactggaattacaggtagggagggagctacaggtgatagctatgcgcccccgtttgttaataagacgtcccctcccacctcccaaa

SEQ ID NO: 340139 - DNA, 1000 bp, Homo Sapiens; identical to SEQ ID NO: 159363

SEQ ID NO: 340140 - DNA, 1000 bp, Homo Sapiens
aggtaaacactgcaaggaggaatttagtcatttcatagctcccagtccaccctggatgtgcatttcttgcaacatctcaataagttaaagaacagttattcacaaaacttcaggttagtgttaacagtttttacctggttaatttagggctagacactcagttgctttaataagacatttagttatggttcatcataatagtcacccattcttcatctttattaacttagaaaattttacttctcatttaaagccctggagcatttttttttttttttgagataagagtcttgctctgtcacccaggctggtgtacagtggcacaatctcggctcactgcaacctccacctccctggttcaagcaattcccctgcgtcagcctcccaagtagctgggattacaggcgcacgccaccacgcctggctaatttttttgtagttttagcagagatggggtttcaccaggttggccagactggtctcgaactcctgacctcaagcaatccgcccatcttggcctcccaaagtgctgggattataggcatgagccaccacgcccggccgagcatacttttaaaaatgattttgaaacacgggtctcttttctttaagtcaacatttgtctaagcacgtctgtaaacgttctgttacagggagaggaagagtattgagcaagttctcctcaacaatcagacagttccgttttagggactgacatccttctagttcaggaggaagtgtttccaggtaattaccaatgagctccagatgagtaaggtttgacagctcacccacatgaggggacaaattcatcaagctatttttccccaaaagtaaacactgcagctttttgcactgaaacagcccatctggtagcatctcaatattgttgttggtcacagcaaagtactgcaaattactcagatactggatttcttctggaatgaaggtcaagtggttatagcttagatccaaataatgtagtttagtgcataggaaa

SEQ ID NO: 340141 - DNA, 1000 bp, Homo Sapiens
tttttttttttttttttttttttttttttttgtgggtcattgttgaaactgtgagttcattttattactcacaattttttatttatatttgaattcttccataacaaaaagttttaagtgtttgatctaacaaattcacttctgggaatttatcttaaacaactttttttttttgcttcccgtccaacaactttattaatgaacattttaaataaagaaaaactcttacaaataaaaatattttttcaaataacaatagtgaaaaattgggggcacatgaagtctccttttttttgagatggagtctcgctctgttgcccaggctggaatgcagtggcaccatctcggctcactgcaacctccacctcccaggttcaagccattctcctgcctcagcctcccaagcagctgggaatacaggcatgtgccaccacgcctggctattattattatttttttgtatttttagtagagataattcaccatgttggccaggctggtcttgaactcctcacctcaagtgatctgcccacctcggcctcgcaaagtgctgggattacaggcatgagccaccacacttggcctaaattctcataataggaaaacaataaactatggaacactcctcgacagaattttttataattaagagcatttatccaggctacataccaacagggaaaacatgatacactattaagtaaaacactaggacattaaattgtatatattacatgattaaaactatgtaaatatttgtatctttgaaaaagactgaaaaataattacatatgttcagaatctaatcatttcccacctccttcaatgcaatggcctttgtctcttgggagaggagggcactggagtcctagtctaggggagcccagcaccccagtctctcgcctgcaaccctgttaacagccctgcactggtctctctgctttcaccctttctctctccaacctcctcagcactggccagctagagaggtccttcagaa

SEQ ID NO: 340142 - DNA, 1000 bp, Homo Sapiens; identical to SEQ ID NO: 159364

SEQ ID NO: 340143 - DNA, 1000 bp, Homo Sapiens
ttttttttttttttaaaatgtagtcaactttattctccttaaaccacaaaatagagtctttggttgtacaaacatcactagttacagtctcgccgaggtctcggctggggtggggcagttagttagtcacaggccagaactcctgtggggtctctttaaaatgctaacacccaggttaaaagacttggggcaagggtggtgctggagctggcagggcccccaccccaagtctgggggaggtgcctgctcctctaggagggcacagggcccaggccacggcgcccaggccttacggggcggcggctgctgcacagtgccacatcttcagggcccacagcgccgggtgagggcctgcccagaagcaccagagccacttctccatcctcctcctgcgggccagggctgggagatggttccagggacctcaactcctcagcaaagtccggtgacaggcgtcccggggaggtgctggtctgggggccgaggtcttccacaggggtgggcgacggggtgggcgcaggggaaggggcctcggccagtcgctccaggggcccccgcgtgccccggccttcctgggacctgctgaggaccatctgtgctcggagagcgtcctgttccaatgacttcatcctggctgccctccacagcgcacgcttctcggcctccagggcccggagctcggcaggggacagggcacgctcgggtgccggtggctccggactctgcacgcgcagccgctcctggtggcgccgttcagctttggccgtccgcaccggggcgccacctcccaggggcgggggggacgccgggctctgccttgaggtggggctcgggctggcccagggtggctgctcatcctcctgttcctcctcgcccagcgtctccccgtccagggcgagcctcgcttcggccccagcctctgccgcctcccgcagcatctgcgctctcttctgctgtagttttctggcttcctcctcctgcatcttccgcaggtcgtcag

SEQ ID NO: 340144 - DNA, 1000 bp, Homo Sapiens
ttttttttttttttttttagcatttgaacagttagccatcatatatttttattttattataagatattttaaaatttgggaaattacaattgtgacagaaaaccagcttcataccaaaaatacactttcaattactttatcaggcaaataaaaacaatcttcatttatttgctctttccagaattactatacagtaaaaattcaatactgtatatgaccgacacgtattaagcatacatacaaaatgaacggattgaatgttcaaaaacaaaggtaaaaataaatagcaatgataaaactttggaaaaaataatgcacattttagttgtggaaaatatggttcttatatatacatagtttatacttaatagaaagccatctctttaaaattgcacaaaacatgggaccaataaagcatagtattttatggcatgtaatactataatcctaaggaaatttgttccttgactctaggatataaaacacttaggtttgtaatataataaaaggtatgtagtattgtttgagaaagactgtcttcctcaactcacattaacctgtagtaatcctacaaaaggctgtacaggaaatttcacaaaaagaaatattaaaaaattatcatgcccacttcatgctgactaaacagccaaaaatgggcttcaaagtaaacttggtggccatttaatatttcaataccttttttctgttaaagactgtttcttcattctataaaaacactttgtgtttaaccgtgattggcaatctcagcacaacaaaatcctggcaaaatggagttggtttttgcttaccttattttcatgaataaaatatttcaggacaggaatttatacaaaagaaacattaatgctcaattcacttataaccagagttgtatcaggagtgttactacattatttaaaaatcctatttaaactcctttataagaaaatcaaaggtaacatttccatttgtattatggcatagccctcgacttagagaa

SEQ ID NO: 340145 - DNA, 1000 bp, Homo Sapiens
ttttttttttttttttttctcaacaattacagaatatagctttatttatagaatcttacaaataaaacatttacagtccacataagttaattttcttttctaatttcttctcatacacctgagttatttaaaaaaatactgtgatggaactgcagaactgtaaagggaaataagaacaataaaatcctaacctctcttgcaaaaatcagacaactttgttttaaagtagatgcccagcatattgccatctctttggaagaggacttactatactcagctcttacgctacccaaacagagaagccttctttttaaaacccaaggttaaggaccagtgaagaatagctccaatttgacactagacacaaaatacctttgggggcaaagacaggggcaagctgtgtgccggtggtgaagtgagaaggagcagaacccctgtccctgcctcactgttcctgcacgtgacatacactttccttgctaacttattaataggagctggtgcatctggaaaatgaggtcgaagctgctaatgccaggggtgaaaaagtcctcccactgacttgctactccttagacttctaatatgtacaaatgcttgaaacagcaaattcaacaactaaaaatcaaaagaaattgccaatttttgactcatgaggcaaagctgttgccacaatcagtggcgactcaagtcagacgatgtgagcgtctccgcccctcctaagctccgactaggactgacctctgcgccaactacggtttaaagaggatttccctttgaggcagctgtctatggaaggaaatttcttaaggtaatataggtgtgcacaaaaagggaaaacaccctatttcatttttcaatttgttaaagattatagttttgagctcctctcctaaactagaaatccactaactctaacttagtattctactccaagacaaagggtattatgtttaaggaatgataggatctattgggaatgctaaaattataaatttaa

SEQ ID NO: 340146 - DNA, 1000 bp, Homo Sapiens; identical to SEQ ID NO: 159366

SEQ ID NO: 340147 - DNA, 1000 bp, Homo Sapiens
ttttttttttttttttttttatatttgtaaacatttattctcttgaactgaaaaaggcttgcatcagcacacattgtacagccttgcaaattacacagaaattgaaaagaaggttccttgttcataagtgcaatgaatctttgatgtccagtgatccgctgcaaacaatgaaaacaaactgtaaagcacttaagaagtttccagcactcatcaaatgcatttccttaggtgacaaaaaatccacaaggagaatgcaaataagtggcatttagttattagagagatacttgaaaaaaaaaaagtggaagtattttcctgcttagaatgatttctgttcccctttgaatgtaagtggtttaagaggcattaagaacataatttattttatacttaatgttcacactacctaaatgaataaggaaagggccctacaaggaagagttatgtattttttggtaattgtttctgagtttagagattcaggggaagagtaatcctctatttgtgggctcttcttagcatccctaacccccaaggagatagtacatggttttgacttggttatttcactcctgcattctttttcccccaaattttaagttgggtcacattgtgctggctgcaaaaagaaatacagggtgcaactggttataatcattttgaagaataatttgctgtacaatagagctttggatctgatacaagaatttagaaatataaaacaaaataactataaaagttaggaggcatttgaatggcatttccttagaaaaacctgctaactctgtatcattctgatgtggattcctagtcatgtggggtgaaatgcatatttttccccctttgctggatcactggcctttcttcaaaggctataatgccatgaacacacatcctaggagtctctataatgttaacagaagctccaaataccaagccaatcaaagatgggagagggcaggggaaccataaaggcgaagggtccaaaggtggctgttac

SEQ ID NO: 340148 - DNA, 1000 bp, Homo Sapiens; identical to SEQ ID NO: 159368

SEQ ID NO: 340149 - DNA, 1000 bp, Homo Sapiens
ttttgaccaatttttaaatattgctttagggagattttatttgaaaacataaatttcaaaaagaaagcacatttaaaacatcaggttttggtgatcagggtaggtaaagtatttttattataaatttcaagatctaaaaaataatttattacatttactaagataaatctaagatgacctttttaaaccaagccacgtgtgccctgcatagtgacgtcgtggccctcgggcatggaaagacacgggtctgcccttcctttagggctggaaagacacgggtctacccttcctttagggctggaaagacacgggtctacccttcctttagggctgggatcagccagaggaaagaaaattatgccgatgctcaactagcatatactgattaggactattttggtttattaccctggcattgaagaattcaggtgaagatgccaccactcttgaactctgaaagccaaactagaatctgcagagcagcctcagtcttaaaattcaagcttctttttcctactttttatttcagtgatatttaggacactctctatttcataagaattatgatctaactggctctataagcccaagaataaaaatccttaccccctagcaagagacccatagaactcatcagtagtaagactaaggtcccatattggaaaaaatatactagcccaaggttatagacagggaccatccagcaatagagatgttgctggcaagtaaccatggtggtgggtgaccactagcgaaaagggctgaagagacctcagaaggtcatccaggttatcctcctgccttgacacaagacacatgtgtctctctagccagagttacttgcagttgcactcacaagtggggaccccaggtctccttcatgtgattttctctgtgtacatatttcgaagattcccaaaggcagcatttttacaaggtggagctgcaggaagcttcggggacttgacagactgagtccagagcaagccctcgcccgtgg

SEQ ID NO: 340150 - DNA, 1000 bp, Homo Sapiens
cagaatccagtctttttaatccagtcttgtatacagtctccagggcacaatttccaattcaagagatgcgtgaagacacgtgaaaatgtaataaatacacaagataaaaagcaggcagtagccatctccaagatgtccaagatgtaaacggcagacaagaatttgaaggcagctattataaacacgctcatgagggcaaaggaaaatattctcataaatgaatagatgtgaaacatcagcagagaaaaaatagccatataaaaaatgagaaataaaaatagtaattttgagcttttctatagttcagaaacagagacatagcaatataatttatccaatctgaggagaggaaaaaaaaaagtttaaagaaaatgaacagagccttacagacctgtgggatgactgagtctgagaaaaggtgagagatagaaaaaatcaaatggagtataaaagtaaatcaacaaaatttaaagaaaataaacacagccttagagacccatggaattattgagcctgaggagaggagagagacagaagaattagatgggttgcaaaaataaatcaataactaacagctgcaaacttgcaaaaattgttcaaaaacctatttttttttttaatctaaagatccacgaatcccccaccaaagtacaaataaaaccataccaaggccatattgcaatttaggaaagcagcaggcaggactttcaattgacttgatatgatttatcatttttactatttgtaagaatggaaataagttcttagagttttggtcttggagaaagtctgacgttaaggacaaacgacagttattaaaggcagatgactttccagacttgtcttaaatgttccattcttcaccttagaacttatttaaatttgtttcttccaaatactgcagtaatattgatgctccagagagatgtcccacggagattctgctcttgtgcgtctgccctgcacggagctgaggcagtgtctatcagtttcagaagcg

SEQ ID NO: 340151 - DNA, 1000 bp, Homo Sapiens
gaaggtgcaaagttgtgtttatttttcagatctctagcagagaatactctaatcccatgagttcttgttcctattttttgctctttaacttgggccatttcttgagtacaggctcctcgtggacacctggctgcttcctgccagggaaccggtccctctgagcaccttcagagatggcaccctgactgcaaagagcctcccagagcttttgtttaatggccttgcccagctccaggctgtacctcttgggggtccctgaaggattccacagcattggctccaccacagcgtggtacagagcctggtaaccctctgtggggagaccatggatggttagcgtgtcctccgacaactgctgtctcttttgggtttcaggaagcaacactcggcccttccaggctgctgtcccactgtcctggggtagcgcttgggtggcagccacatgttcagcatatctgtcctcaagatcttggcggactgttagttttttctcctttgaactttctttactctctctgatgcctcctgcaggcctcctatgccctgctggctgcttgctcttggaactgatgaagtttcttttcctggcctgctgggtggctttcatcactgaatcgtccttgtgctttaatctcttcgagagttttccttctccaaacttgcatggtggtgggcagcacttattcttcagttgccgcctgagtacaagcttaaccagggagaaggaactggcaattaatgggttccttacaacttcccaagaggaagtggtagctggtgctggggcattaatgttctgctttgcacatgttctggccatccagatgttggtgagagccggtgagtccacatagcagtcctgaagcctggtatttaataagatggactgtcggagtccatagatagggatgctggggtctcgtctcacattgattgggtgcatatttcagttgccttaaattttattttcgctagcttagtaaggggaagaaatatgtat

SEQ ID NO: 340152 - DNA, 1000 bp, Homo Sapiens
ttttttttttttttttttatttaacatcgtttaataaaaaagtagtagtgcaaacaggaaagtagcataaaaatatagtgttgttgtggaaggctggtgcttgctgctgagaagctgaagccagaggaggccaggtgtgaggaaggaggattctttaaaggcaagaagagagaggcctgcctttaagagccaagagagccgctcatccatgaccccaacacagagctctgtagaactgctgtcacacgccaaacaccaacataagggggtgagagaatgaactccagccgcttctcccaacacaacccaacagagctattctgggacatgtgtgtttgcgagcttgtgtgtggagagcaccaaaaagctcatcagcagccccaggcctctgtgcggtctggttttcagactggcacccgcaggcagtgcatctgaagcaccttctagttactatccccatctggaatcttggttttctccattccatgtcaccttctattgccaacccaagggtgccagtgcctgtgggtctcattatatgatactctcttccaggactgaatccgctagtctggccaaaaaaaaagcactcagccacatcctactccccaataaatgtctctggggtcttcattttctcttccggctgatcctcagttcatccagttccttctccattaagtgggattcagcagtggactctgaaagcatgtctaataagatgtccactttcagccgcaagagattgttctcttcctccaactgctggttccgcctgcgaaggcgctgaacctccctccggtccacaccgccactaacccctgtctctgctatccactggccattttcaaacttcaggctttgccctgccaggttcatagtcggggatccgtattccaagcccagctccacctcccgggttgatcgatccaaagaatgcaggttggagagagatgccgacttccgaggaggtgtcttcttcggactgaacgtattccca

SEQ ID NO: 340153 - DNA, 1000 bp, Homo Sapiens; identical to SEQ ID NO: 159369

SEQ ID NO: 340154 - DNA, 1000 bp, Homo Sapiens
tttttttttttttttttttaaacgttaatgtgatctttattatacagcacatctggtatttgtgtatcccaacaagtatacagaatactctataaaaccaaacccaacccttcaatattacactaatgaagattaacccagagtcgcatctcttcaaaatgcacacaattaagacggtcctgctgtaacaatattatggaaagagccaggtagcacaagaaaggagagaggataaagactgaagtgtgtgccaaagtcattgtcttttgttattgcacttttattctacacacttagtatcttacacttttatttaacactgtaataaacattagtcctttaaaacaaagaaaaaacattacatgaagacaaaagacaacaggctgcccagaccaattttcttttcaactatctgggcaaggtggcctccccagtgctagatgtcctgatgcacctctgagatcacctcaattggactggatgttaacaaaacagatgaagttaaaaatgaaacccttttaggaacagtagtgctactggaaacctccaggagagtttggaatacaagtgtctcaaggccactccctccttacccactttaacatcaaacaagctctattcatcccacctccataactgaaggattaaccttctttttctttttcttttttttttttttgagatggagtcttgctctgctgcccaggctggagtgcagtggtgtgatcttggctcaatgcagcctctgtctcctgggttcaagcaattctcctacctcagcctcctgagtagctgggactataggtgcccgccaccatgcctggctaattttttctatttttaatagagacggggtttcaccatgttaccaggctggtctcgaactcctgacctcaggttttaaaaagtgggttacttgatccagaaaatccaaaagctttggaaattccaggaaagcaactactcttttggcagtggactcttccagggttgttaatcc

SEQ ID NO: 340155 - DNA, 1000 bp, Homo Sapiens
ttttttttttttatcaaaggagtttttctttatttttcataatttagctgaatcaacacaaaattgaatactgtaaaacaagaaaaaaaaatatgctgtaacatcttaaatctcccgatctctgccctcgaaggtgtctacacttgctttcaaaagaaacaggcgtggggagaagggccgtcaactggcctcaaggtccgtgagtggcgaaaggggcaggaaatgggaaacaaaacccattggaagaagcatgttcaagatattgtacgctcaagtgttgaccaatacagggaccagagagggaatcaggagccaagcctggcccgcagcgaggggaacccggcctccccgggcacgaccgacacatccgggacgccgacgccacggtcctccgcacgcttctcccagagtcccgccttccgtgcctggcaccccggggtccgcggggcaccacctccccgccgtgtcccacccccagagtcttcagaaacacacggggctcggcccgactctcaggacggccgggactgccacgttaattgttaaataggattttctacaaatatacaacatataaaaactgttaaatatataactttaggctttgcaaaatacatttaatgatctctttcaaacaagtgttactcgagttttctttgctttctggagctaaatggggtatcgatgaggcagcagtcacgggagacccaacatgctcttggcagatactggattatccaactatcaaaaatggagctgtagaagaggcatgtttaactggttaaaacagaaagggattttagtacggtcaagttgatctaagtacagaggaataaagcggcctgcgttcccggcgtctgcgtgggggccgtcgctgcctcccgcaggtgtgccacggcctccgcgcagccgaagcccgtcctccgagggtgcgcggggtgctcctggggtggaggcctccaccacggccgccctctccgctccgccggggccaccagca

SEQ ID NO: 340156 - DNA, 1000 bp, Homo Sapiens
acgctgcaaacattttaatgattattgttgagcatacattttggaaattttttacttcaaacggcaacaagttaaataaatgtttataatatacaaagaaaatacaaccgaaagtaaaactcgctgtaagtgtgccttgcacttagaccaggttttccccccttaatacatctttatttttgagctgcaaacacacttaagactttgatcttcatagtatggcatttaggaaataaaaatatactcccaccttaaagaaataaaaagtttggtgcatgattatatgccaaacaaagagagaacactagaatactcttgatagtgcaggcatcattaaaaaggaaaagaaaaagcttgagatgctcattaattctctatgttttaaggaagcaggatttttgaccaagtagcttaaaagccagcaaaacagggatcagtgacagcaactgtagtgtatggagtatgaaatgacaaactttacacaaatacactgttagaaatttaccagtgaacactgaagatctgagaagctgctctttggaacagtcaagtgggaccaccttattccagtcacataagcccttgtaaagtaacacagtgttctgtgctatatacttgctggctgggtagttacaggatttgttttgtcattagcagctaaaaaacttattccacatgttcttaaagccttaatggtggaaaaaaaggcaagtgtcattagcatggtggatcatatacttctctgcacacaaacacaagaggcttcactagtatttttaaagtctctgatgtctcccattgcacttcaaagctcaattgagatgaaagcctttctccattgtagcagctagcaggcgctctctcatgatctcctcggaagaatattcaggcaacttaaggtaatgcacacatgtattgactgatggatagcttgcatcagtagcatcaaccttgcgtacaaccgtgagcctgggatgcaggttagccagtccacctgggg

SEQ ID NO: 340157 - DNA, 1000 bp, Homo Sapiens
tttttgctggataaatctcatttctgtttttttattgtcttttatgttaaactttctacaaaaggatgtataaacgggtaagtagagaatctctatctacaaaatgttttctcttttaagtattacattacttggtgtacatttaatagactgacatatataagcacataaaaatcattttacgtaatacgctgcgaaatacgttgactcctcctccgcctcacccctgaagtgcctcctcctctatcctccccatcactttcatcatcttctgtctctgctgctgtattatttttagggctgcctcctccaagcagtgaggtaattgctttgttccgagcatttgtgctagctgaaacctccccttcttcttcttcttcatcagggtccagatgttccatgagaagtttgaaatctagatactgttttactatactccttttcacctcttctgtgattttggaattagccatgtcactccgcaggaagtccagtgtttgttttggatgaaaatgaactcctgtttttcggtttatcgctttatcatatacttttgcagattcagatggagagtacttctgaattttactatcagaaaatccacaaagattcttcaaatgttgttttaacatgagaagtaataaaataccctgggacacatttgcaaattcgattaaaggagctgaattttctggcaaacatttcatcactgaatttatatcgtcttctgaatctgaatctgaatctgaatctacacgtttccgtgacttccgaggcctggaaacttcttcttcactgtcgcttgactcattttccttactaggtgatgattttctctctttccttttgtcctttaccatagactccttgaatgactgcagtaggttactaccagaaactgagagtgtaatgtctatatgatgcattataaacaacggctcttcctgtgtctggtatggaaaacaggctagattgtctgctatatacaagagcatagtca

SEQ ID NO: 340158 - DNA, 1000 bp, Homo Sapiens
tttttttttttttttttgccacgcaattctgaataaagtttattaaataatatgtacagcaaatgtagtaattcaacacatctatttatcaaatcaatccactgcaatgaagaaaaataaatgaacagaaaaatctatgtctgcataggacatgctctcagtgtgtaatttaaatggcaatactttaaattaattggttatatataatgtcagttatttttctttcagaatataaccttttttgtagtaacctattctagcaataggacttaatacgactgcagataaataggactgcaaaaaccaaaaacccaaaataatgaaattaaaaaggaaaaaaaaactgtaactgagatcagagttacctttcctccccaatagaatacttatcgtaaattttaacactttacaatggctatttttgtgctaaaaatctgtaggtgagttatttggaattccttcatttaaataaaaatgcaaaaaaacttcatgacttcctttacccccttccattcaaatttttaaaattatttttctatacaaggtaggtacatgggctatacaaagttaaatatacatatttacagtcccacttcttaagcacattattttttttttcttttactgatcccagagagactgcaaaagataaggagtttggggcttgcctttacccggaagcatggctaatatatcaaaatgtgttgcaaggcatgccgccagttagttgcacttgctattaataaacctgtataaacatttcagcataaaaataggtactttatattactaaatgtctgaagacaaaagagcaattggaaatctctgtttcttgtttcgtcatacataggaaggcgacgtgatgcaaattttaacacaagattttattaaagacgggcaaattggtgaggcatacctgaatttctggagatatacaaatgcgtgaggctggcatcatatgcaaatgtggctttacaaattggttttattttctagctgt

SEQ ID NO: 340159 - DNA, 1000 bp, Homo Sapiens; identical to SEQ ID NO: 159371

SEQ ID NO: 340160 - DNA, 1000 bp, Homo Sapiens; identical to SEQ ID NO: 159372

SEQ ID NO: 340161 - DNA, 1000 bp, Homo Sapiens; identical to SEQ ID NO: 159373

SEQ ID NO: 340162 - DNA, 1000 bp, Homo Sapiens; identical to SEQ ID NO: 159376

SEQ ID NO: 340163 - DNA, 1000 bp, Homo Sapiens
ttttttttttttttttgggcaacactcattttttacatttattttgacatatttgagcttattccatattaacaattatttatcatgcttttgtaacacatgacagcatttttcctttaccaaactttttgtgtacatattttaatgcctgcataatcttccattacacggatatgccacaaatattatgctagtgtacattttttattttgcaaattatgcactgtcataaatatttcagtgatcatcctcatacatatttctgtcttcattacaagttagacccttaaggtgttaacaatagtaatattattaatggcacctactatgtgccaggcactcttttatgtgattcatacatatcatctcaatccacatgacaacgctttgaggtagatactagtagtaacctcattatacagttgaggaaattgagccacaggttattagcaatgttaagagccccagttaagtgactattctactcccttaatgaaaaccatttctgataggtatgttgtatgtgggcatggtgtgtacacagtgagaagagcagcaggaaacatgaaacccaggacctagttctgagtctgacttcactgaaaatgtgagaccggggccaattcacttgatctcaattgtacaacgacaagtatgagctagaggctgccatgttcctcgtagttctcaagtctcctgattctaaccatcatttctaggttttttcctcagagagagatcaagatctctggttggcttcagcaatacttcatctatcattcaacaatcaatcattgagcagctaatatttatgccagaaaatggagaatcatggtcagtccctatatacaacagactgatttatagaatgaaagagaaaattaaaatagatcctcttcctgaatcttttgtgggttattaacttaccagagaatctgaagactgggatcctctccatagaatggaaaacctttgtacaaacagaataaatgtgtataca

SEQ ID NO: 340164 - DNA, 1000 bp, Homo Sapiens; identical to SEQ ID NO: 159377

SEQ ID NO: 340165 - DNA, 1000 bp, Homo Sapiens; identical to SEQ ID NO: 159378

SEQ ID NO: 340166 - DNA, 1000 bp, Homo Sapiens; identical to SEQ ID NO: 159379

SEQ ID NO: 340167 - DNA, 1000 bp, Homo Sapiens; identical to SEQ ID NO: 159380

SEQ ID NO: 340168 - DNA, 1000 bp, Homo Sapiens
tttttttttttttttttttttttttttttttttcccaggcaggacaaatatgcttttttattgtgtctgtgagatgaaatgaggagtcctggctgggtctgaccctggcctctggcctccaatcccagaggctgtctccctggttcagggagggtggcggtccagactgtccaagctcatgccaggctgggagctgggagtgggttagttcaaggtagatggtcaaggaaggcaagcaggacaaggtggaagtcttgcggcttgtggaggtaacaggcatggcctgcattgcgtagcttcaccacagagtggttgggcaggtggcggagctgccgcagtgactctcgagccaggatgtggtccagctctccatacaggataagggttggagtcttcacagcccagaattgctcctgggtgtagttctgggtggaggtgggtgcgatgggcacaaatccatgtagctggtggtggcctcgcatcaggaagggcagggcatagtggccactcagcgaggggctcaccaacacggcattctgtacctccaggtcccgcagcgcccgctccagcagcgctgcccgccctgcctctgtgcttgcctcctttgaaggtgccgagttcccaaaacctggaaggtcaagggccacggcccggtagcccctctgtgacagtagctgcagtgtgcccagctgctcccacgtgtgagagttaaaggcctttccatgaagcagcaccacctccaccctgtgtgcctggttgagtgggagcacctcgcggtaaaagatgggcgagttgccaggggtgagaccagccaggactgtgacattggggtctccccagaggcaggaagtctgctcaggggggcctggcagccccacatacagtaggagcatgagcagcagactcaggcccagcagggctacctgggactggctcatggaggtctgtaccacagtcgggcccaacgggatgagcgggcgggccccgcccaggcggaacc

SEQ ID NO: 340169 - DNA, 1000 bp, Homo Sapiens; identical to SEQ ID NO: 159381

SEQ ID NO: 340170 - DNA, 1000 bp, Homo Sapiens
acacaattgcaggagattttattggccccatgacatccagtgacagtgtgggagcaggctactctccagggacatgtttttggaggcatatggagaagggggcccaggcgaggtggctcacacctgtaatcccagcactttgggaggtcgaggtgggaggatcgcttgaggccaggagttcgagaccaccctgggcaacagagcgagatcccatcactacaaaaattcaaaaaattagccaggcatggtggtgcacacttgtagtcccagctactcaggaggctgaggtgggagaattgcttgggcccaggaattcaaggctagagtgagccgtgaccaccagtgcactctagcctgggcaacagagaaagaccctgtctcaaaaaaaaaaaaaaaaaaaaaaagaataggaagcttctgatatttgtctttctggagtactatttgctttgtgattcccacaatgcaatgcttcacctagtacatcatctggttctcccagacccttttaggactgaactgtgctttaaatagttacatgtctgcctgttacacagtggaaactagtttccttcagagggacacgaaaccacagatgaggccacaaagaaagcattctccttccacagcaactggctgagaaaacagaaccaggaaaattctgccttgaggaaacaatgtcagcttcctgaatcatccagggagaaagggggagagaatagattttaaaatgcttaaaaaatggcctttcagagtgctctgttccaactgtttgtgtgtttgcaatcctgtgtcaataatacttggcctctaacagaaacacctggcccccagccatcgtcaacacacattgggccccttctccaaaacacaggaggctgagtcctctcctgccctggtgagaggcgcctgccacagagggatgggagacagggaaggggaagttctttcctgaggctgaagctctcgagcttggaattgcgctgtttgcaacatggcc

SEQ ID NO: 340171 - DNA, 545 bp, Homo Sapiens
ttttttttttttttttttttttttttttttcctgtcaagctgttctttatttcagggagagggcaggggaggggctcagtctttcttggcagcagctttcctcatggcggccagtacgttgctcagctcctcccgcttcctcttggcgcggatgtgcgtccccacccttttcttgataaatttgagggcccgtttgtccttggagaccttcagtaactccatggcgcgccgctcgtacggggcaaagccacacacctcccgaatcatgtcccgcacgaacttggtgtgtttggtcagacgcccgcggcgtcggctgtgcctgggcttgctcacgttcttggtcactttgtggcccttgttgaggcccacggccatagggtagcgtagggccatggctgcggacagcgacggggagaaggggcggaggtgagtaccggctcagttcccgaggcccagagccccgcgtcccggctccttcagcctcgctcgccacaaccaaccatcctccaacctgcacagaggacccgggagtccggatggcggcg

SEQ ID NO: 340172 - DNA, 1000 bp, Homo Sapiens
ttttttttttttttttagaacacaacactgactttaatggggcagccctgagccgtaaccttcaaaccttccgcctcagtaccccgtgcgcgaggagggaggggtgactgctacgggcacatcgtcgatgtcctccctactcctggcgatcccacgcctcaccccttcctctccagctgctgcggtctccgtcgccgaggtgggtcccaggtaagctcccaggaggggcaggggagcccctcagcggcccgggacagattcccccatggctgagggcatggggaactagcgtggatggagacgccgccgtcctcggagctgggcggggacctgattctgggggtgtggacagagccaagggaccgccccccaaggcccagcgccgggagatgcaaggccgggcccaaggtgttggacactgctttgggggacaggctaggtctctgcacgtggcttctgggctctggaaagcggtccattctcctgacccggatctccggagtggtaggaggcggctcagtcccgggcctgcgctcctagagttcctgtcccatctcctcccacgctcacccatcccaaggaaggagggcactcgggccccagcaggctcgtgagagcagcgggctccgccctcccaatggtctatccatcggtgggtgggtccggcgcggcgtcggggctctggcgggtacccgggcgtccccgcgcggcccgggccgccgctcaccgctgcttacgctccgcctgctggagccgccgggagaggtcttcgatccgcacattcttgagctggagcaggtgctccaggcgccttaccttcatctgcaggacctgcacggtctcttgagaggccaacagctcctgctccttttcagcgatctggaggacgaagctggggtcgccctgcaacgcccggttatacgctggaggctgaggcgccggtggccggtcccagctggggtgagaagcagcttagcggaggcttggacctcgggcccta

SEQ ID NO: 340173 - DNA, 1000 bp, Homo Sapiens; identical to SEQ ID NO: 159382

SEQ ID NO: 340174 - DNA, 1000 bp, Homo Sapiens; identical to SEQ ID NO: 159383

SEQ ID NO: 340175 - DNA, 1000 bp, Homo Sapiens
tttttttttttttttttttcataataaatgttcatttttttattattataatgacaagacaaagtttttcatatcaccattacactcatgctagggataacaatacttcctctattataaatgctacttgacctttatttactatgcttggcataactgggcatgcttaataaaataaaaaaaaaaaacattcaaatttttttcttttactaatcgaagtacctaattttatacaatttgcacacttttaatgttagtaacagaaacaatgaaattattttacttcttgatacttaagagtttaactccaagacatgcactacaaccacataatagatttttgtcatcaatatgatggtcctggcatcttatatattaagttcacactttaaattaagtactacttgctaaaacgaaaacaggtaaaaacaatgaacagacggttcacgttaagaggaatacgaaaagccaataacaatactgacataacaatcttatttgtaatgaaagaaatacaaattttaaaaatgacataccattttttaattacattggcaaaaattaaaccaaaaagaatacctacaattgaccaaggagtattctggcagggggagggaagtcacatacatatagtactaattagaggggtaaattgtataattaaagccctatgaaccagtcaaaccaatcattccacttttagaaactttctcaaggacataattaagcatgtaactcaaaatgtacaaggacattcactctgccactgcttgtagtaataaactgcagataatcaaaatgtctaacacagaaaaaagtgagtaaattatggtaaacctttcttatgggaaggcagtgggcttccaattccattcttcacacctagcttagcttctttcttttcaacagagtctacttctaacagagaccaaaaatgtcagacattgcctttctctgtaacctgatctaagtcaatggaaactgaggggaaatcttctgg

SEQ ID NO: 340176 - DNA, 1000 bp, Homo Sapiens
ttttttttttttttttttttttgagggtaatgcaacttcttatttattaatatataataacaacaattatacagctcatatctgcaactgttaggtctttgttatgtcttggtcactttgtctggactggccgtgaccttcagctccagggtctgggctaggaagacgttccagtgaccttcgtgggggccagcgagcagtcggaagtgctgtgcctctttctggaagtcttgcttcctgactttcttgatctgagtcaagtggaagattctggctgtgtggccttgggccaggtacttcacctctctgagcctcagtttcctcatcttttaccagcttccagaggtagatctccaccaagtccgaggcctcgtgttccagggcaaagcgacgcaggttgtctgggcttggggataccgatgtgtggacgaggacccggcccggtgccttgggacacctggtagaactgatctcactgtggccagggtctgctttgtcctctgggcaaatcttgcagcacttcccagccactttctcggggtgacggcaggggtactcggtgggacaggtcacacgctggcagtcctggcggccatcctcacaggtgcataggatgcagggcaaggggccgaaggcacggaaggccgggtgccacacctccccgtgggagtacgtcttcccgccatgcacacaggctttcttatgtttctccttcaggacgatcttgacagttgtgctgcctgctcccttgggtctgaagtggcgagggatgaagctcagaggggcgctgaggccagtgggggctggggtgcccgggcctctctttctcccagcatcactggaacatggatcctgaggatgtctcaccccatggagcgactgcacactgtcctcttcatccgattgctcacttgcctcatctttgcaggcctggcagcaggagtctggcagcgggaggggtgctgggcagcctggttcggggcaggttgtgaggccgcag

SEQ ID NO: 340177 - DNA, 1000 bp, Homo Sapiens
agctcagaggcccactgctttcaggcccaaggtcgctgctgtgctctgtactgtcacttggaactgccctggattccagtctcctggtcctctcatgcagaaggcagggctggccaaccaccctcaccaagggtccttggagctgggcagatggtgccggggtagctgctatctcagaggctgcttgagctcgaacaggcctgtcccgcccctgacgactttcccgaccacaaggcaggcagaaggagacctcagctcatcgtgggatcccagcatggtggcttgcttcagaaactggaagctggtttcaaatgtcatctgctgtagcggggaagagtttgaccggatcccaaagcgattcagtggcttgtaaacaccctcgaagcacatataatcagcaaccagggagagatggcgagggtcgaccgcgatgccatacacggcaaacacatccttgatctccttctcgatcacccgcagcgcctcaatgccatacgtgttggctatggcgtggatgtcgttggagtagaggcggcgcagatccaggacctctgcatacttgaatagctctgggaggttgattccttctgtgtttagcacaagctccttctcgttcttattgttggttgtttcattcaggaggcaccgagtgatgcccttggtcgcatagatgacggcaccatgggccaaagatactaccagggagctcatgtcaaagttgatcttcatcagagggagcttcactgtcacctggcaccacaggctctcctcggtgtcgtactggtagtcatctatgaacgggtggatctcacgcacagcctggacccggcgctccatggcctcggcccctggggctcctggctgtgggtgggtttccggggctgcgtcaggagggtgggaagggacgggtcctcctaagcccacctcttcatcttgctcttgggtctttcgagcaccttccctgtggggatttcgttcctcctgcatgtcttcatcgtcg

SEQ ID NO: 340178 - DNA, 1000 bp, Homo Sapiens
gagatggagtctcgcactgggctggagtacagtggtgagatattggctcactgcaacctccgcctccagggttcaagcaattctcctgtctccacctccagaatagctgggattacaggctcctgccaccatgcccagctaatttttctattttttttttttttttagtagagacagggtttcaccatgttggccaggctggtcttgaactcctgagcttgtgatccacccgcctcagcctcccaaagtgctgggattacaggcgtgagccactgcacccagccttaaggtcttataactagtaaatatctgcattaaagaacgagttgaatgaaaattctgataaattcctacttaaagtgtatccaaagaaaacggaaaaagtctaggagttagtgatattagattcagaagaatgagctttgtaattcttaaaaattagtctcagaatagaaaggattttaaaagtaattgagtaaagtcataggaaatgtgaccatataaaggaatggctctaaatgtattaatccagaaggaagcaacaggttaaacagtaagaggtaagaaacaaaaaataaggaacgagagagagagagtgacagggagagagagacagagcggggaaggagagaatgagaaggaaaatcaggaaaacgaggagaaacagaattaaggaggtgatactggaatagtatcagaccattctgaatcaatttaagaattgccatgtctaattcttatatggaagatttgaaatacaaggatattgaaaggaataacaaattataatgaatgcatagaaatccttatgtaatccaaggtcattaatttgaaggaagacatcaagaaaatgtgatctagaaatagaggttgagattgctccatttacaaaattattatgctctataatcttcccatatgcaaatatttcatattccctcttttgtcccatggacatatttcacagcaacaacgaatcaagtgctgacctaaatggggt

SEQ ID NO: 340179 - DNA, 1000 bp, Homo Sapiens
ttttttttttttttttttttttttttttttttttttttttttttacatatcagtctattttttattataaacaaataaaagattaaatcacacatcaaagacctagactccttctctgagacaccaaaggcctaacaaccagtaagataattttagacaattctattgaaagttattcaaaaggcatcaagtcaaaataacgaaactgccccagtaaaaaggggctgggcctgggggccaggaaaggcaagcatgagggcccagtagaggtggacctgtccctatggtaactgagctcggctttaaggccaggcattggggatcagctgctaggagcccacctgtgttcttcctgaggggtgggggcaccctagtcactgcctagaggcacatggtcccccaccagcctacagcatggaaacacccaatgtctgctctagcctattcttaacccacaactgggatgggagctggggacaggagaaggggtcatggggccaggagcctattcaggctctacaaccagacttccctagagaggccccgtgccagttagtccaatggccacacacatcagaaagggtagtcaacagcgttgcacatgtaggttggaggtagcccaggtgtcagccacaccctggtcacagcagatccagagaggcaatgttccttggagctgcaggctgctggatctactgctcgtccagtcccgggctcagacacagggtaagtcctccaggcccctacccagggcctgccctgacacacagctgctgtcagagccactggagccactggctgatgggcattgggacgagatctctgagtcctcagcagtcaaagagggctggccgcccagctctgcctcagcctccagtgctgcttcctctgggaagctgggatacaggggacagcggagacccagaagagctgggtctctgtacaggtgcaggttgagggaccccagaacagagcaagaggcagggtctccaggaaggga

SEQ ID NO: 340180 - DNA, 1000 bp, Homo Sapiens
tttttttttttttttttgtgggtaacattttatgtttattttcaatgcgcatttatattcattatccatttatgactcacaacaaacttgtgtggttggtgaatgggttcgagaatttgtccaaggtcacctaggaaggcaggggtggaatccattaaacaaagcgagtaaatatttattgaatgagcacaatatctgttgaacacctgttgtgtgccaggaactgtgttaggcttcaggggtttagacaggagtaaaccacagccctaccctccaaggtaatttaatggtgagaaaatgagaatcacaaatgtccatgcaagacaaattaaggtcccataagatgaaccttatgggtctcagggagaaagaaatcacattcaagcaagaggctcaggaaagaggcaaagaataatgaagattttgacaggtggcaatagcctttcaggcagaggattatcataaagagtgtgaaagaagtcagaaaactttagtgtggttttagagaacaaagagtacatcttttgtaatttggccagaggtccaatacacgtagcaaaggagtaggaaatgcaataggaaggtaattttggatcacatggacacagactaagtaccaagcagaggagcttgttcttgcttctacaggaagtgaaagctaatcagagctaattttggaagatcacaagagtttgcggaatggactgaaggagaaagcatggaagcagggagtccagagaaggtgactatgtgcctaagcagtaagtaaagagagccccaaccagaagtaccaatgtgggaagagaaaagaggttaaggcaaaacacattaggaactgtgttaggcttcaggggattagagattaggaaggaaggactgatgaagctaaagaaaaatcaaagatgaaaagaacttagtactaggtacagtattcttctgcacacaatgatgttccgtgatcaaggctctaactctggaaagcatgaagaaatacagtcca

SEQ ID NO: 340181 - DNA, 1000 bp, Homo Sapiens; identical to SEQ ID NO: 159386

SEQ ID NO: 340182 - DNA, 1000 bp, Homo Sapiens
tttttttttttttttttttttttttttgcagcagtacattagtatttacatttatttaacgtatgcagtttacacactcattattaaacaaaattggaatgcaaacaaatatacaaataccataagcattatcaaataaaataactggcactagtgttataagcatattaatggacctggtagggaaaagtgatggaagaagactgcagcccatggcatttttctttttaccaaaagaaaacgctcagtagcaccataatggtaatacttaaaagaaatacataagatagaacattttaactgctatcattgaggttaacctgcttttatttaagtgaattatacaggaaattaacagtacaggcagtattttggccaacttctgcttatgtcagctgaacattgtccataaacaaaagcaaaagaaaataatgctaatcatacatggaccttttgtacttggtacaagttctgcaccgtgctttgatttcatggttggagaagatatgcatgtgttaaaaactgaggttatgtaaagttattcactaaagcctgagtgtgtctttggtaggctaatactttttcagcattattaatcacattcatgtttatctatttcctgtatttttatatataatccaaggtgaccagagaagacatggaaaacaacacagcaaaatcctcaaataactaggccattaaaacccagtcgatcccaaaggcaccaagaatcaatggggtacaaacttccccttagagaaaggtggattttttgtaatacttataacctaatgggactttattttgtagttttatgtatcttatttgttgctgtcatatgcttaattacttacctttacattttttcctctaagatggcatcaacaataaacaagatagagtaccaggtatttctatttcaaagttgtgcaaaaactgccacaatcttgctcaaagtgtctaagtatccaaatggtagcaaatgagctgcattaagctt

SEQ ID NO: 340183 - DNA, 1000 bp, Homo Sapiens; identical to SEQ ID NO: 160624

SEQ ID NO: 340184 - DNA, 1000 bp, Homo Sapiens
ttttttttttaatttaaaacaattactttattaaaaaatagcaaatctcacaaatacttatttaatttcttatcactggccattggaaaacacaccagcatgtgtactgattgtctaacataaactgaagctgggcttgccacaagacgcctgtgcatcaacagcttgcgatcaacactggaataagtttggtgagctcaggaaagagaaatccctccgccctgtcaagaacatcagcacaatgcatttcaagtataatcccataaggcaacaatatgaagcacagcagcacaatctctgcgtcacatttcctgatgaagccttcaacaaggcctaggcctccagttatggtgaattacagcgagtcacatttactaaaagcagtaagtgaaaacgatcattgaacttgcactttaattactttaattccttgttgtggaagatgattctgctactggatttggctggaaaagtaaagactgctgcttctcttcaaatcacaagaaagcaaactacatttcattttagctagcagaagtatttggaacatcttgtgcatctgccaaatggagtttttgtatggaagaattcaattcttctaaatctgacagaagcctatccagattggagtcactggctgtttttctcttatcctcaggaagttcctctaactccccatagagctccaaattcaagcgagctaatttctcctgcattccccgaacatgttccatctgttcaatggaacattcatttccaaatgcttgaagttttccagagtggaaatcattcaaaagactgagcagccctctctccatctcctgaacatctgagacatcagtgaggaaggagtgctggatcggagttgactgagcgcctttgccctctccaccctgaggtttggtcttttctttcatcactctttttaactttggtcgctgtgaagttgactgtgatgcaggatttgaaaaccctgtgcttttactcactggaatggcat

SEQ ID NO: 340185 - DNA, 1000 bp, Homo Sapiens
tttttttttttttttttggttttctagatccatgtttattttcagttcaaagacaaagtagaaaacttgagagtggaaaatgttaccttttagttcacactcctaatcccttagtccccataaaataaacattctaaagtgtaagcagtagaaataatggaaactccacagaaacagaaataaattagtttctttcagtcttggtggaggtccttttgccgaacaccatactccactgtgaacagaattcatcttgaacgaagaagaaatctttggcctatttcaccacgtctccagcattgcataacagacatttttcaaattcagtttcttctccaactgcagcaaaaaggcaaagagtagtctgtttcaggagtctgcatcgggtcctgtgagagccttgtccacttagaacaagcctttaacttgttctgtttcggtatcaagatctatgtcataaaagcagggccgggtgggcagtcctggcatggtgctcatcgttccgaccaaagggtaaatgaacccagcgcctatgctggcccggacgtcactgataggtaagatgaagtcccttggcacaccttttttgtcaggttggtgagatagagaaaggtgggtctttgccatgcagatgggcaaatttccaaaaccctgttgagtgtaacgatctattttggcttgtgcctcaggagagagttcaatatctttggctccatagacagcctgagcaatggtccttatcttgtccacaattggaacctgaacatcatacaggaactggaatcggcttcttttactcgcagcctctctcacagcccgagccaagtccaccgatccttttccaccaacggaccagtgatagcaggggactgcatcaaaggcaccagcccgctttgcaagctcacacaccaagtcaatctcagcgcgggtgtcggtcttgaagacattcagagccaccacaacgggaaccccaaagagctgagtgatctgaatttgcttc

SEQ ID NO: 340186 - DNA, 1000 bp, Homo Sapiens
atgttttaattgcctatggcatatattacataatggctcaaaattaatagtctggctgaaattaagaaaaacagctgatgatgacttagtaaatccttaattttaagtaagcttttggccaaaagtcaggggtagaattgactcaaaattaacagccttcaccatcttttattcattctgctgtgatacaactaaaatggccagtaaattctcccctgggtctcaggtaacagttttccaaaagtgaagtatcactttctctgcacagtggtgaaagccggcatttggatgggctggatcgggtggacaggctgaaacactggcttctttctcacttcagagtgtgttttcactgcagggagcagctgattccttttgatgatctgtaaggccagctgagtattaccattctgcagttcaaggtagactgccagcaagatggcctcagggggcacctctttaggatggatcattgaagccgcctggtggagacactttcgggctttgtcatattcgctcctcaggcagtaagcgctgccaaggttgaacagcatcacagtcctggcagagttgacggaactggggtagcactgaggggcccgcttaccagaggattccattgcttcattttcacctttgtctgatccttggtcctgctcatttgaagagatccctaaggagacatcagtgacattctccgggttcaagtgagtaatggcatcagatattctgtcgagagagatgagggcttctgcagcatataaatgtcccaaaaacttaagagatcctgacagcttgggctgctgaagaagtttatctgcatgattcaaagccatgaggttatcacccaaagccagagccacgtaggcactgcaagcaagtatggagcactttaagttttctaattcctgttttctcaatggagaagaaggtggagctggaatgaatttatctccatcatggcttttactgctgcaagtttcactgctttcgctgctct

SEQ ID NO: 340187 - DNA, 1000 bp, Homo Sapiens; identical to SEQ ID NO: 159387

SEQ ID NO: 340188 - DNA, 1000 bp, Homo Sapiens; identical to SEQ ID NO: 159389

SEQ ID NO: 340189 - DNA, 1000 bp, Homo Sapiens; identical to SEQ ID NO: 159390

SEQ ID NO: 340190 - DNA, 858 bp, Homo Sapiens; identical to SEQ ID NO: 159391

SEQ ID NO: 340191 - DNA, 1000 bp, Homo Sapiens
atgtgtgcacttatttattcttcactaatattaaaccaggtaatttatatctgtctttggcaaataacatacacaaatctatatatatatatataaatgtttgtataaaattgaatattcatgattttaaatttgacaaacactgtcaggtaaaaatcaaactattttactaagttaacatctcattcaattagttgtaagttgtaatagcggcatattttacatgagactattagaaaaggataatattaagtcattaacattataaatctgaccacttttattaggttgaggtgaaatagagaaatctctactatcctggagagaaacaagcaataaaaccatgtattacaagtttaaagaaatgaatttatcctaaaatcatcagtatcagcaccccaacaaagcaactttgccatttctacttaaagtacactgtagcttgatcagacacttatctcagcagtacttgtttaagcaggtctctttgtacaaaagcaaaacagaaagcaaaacaaaatccatagccattatttaccttgcacccagtaaaagccaagagatttaaggtaaggacattttctaatcccatatccatgctaacatcatcaacattgctgatacaaaactcaggtcaggaaaagaagctcaaacagggaaggtgagtggcaacattttatgtatgctaaattggatggcaatattagattacatcttctgcaactgtggtgtcaaaaatctgatagcaaatttgattatctgttccatttgtgacattgtatgacttgatgaagcattccaaccacggatatgcatcaatttttattcctggaggacaaaacatatccatgatcatatccacacttttctgaaggtcatcatccatcagaacttctgatgctggaatctggaagaatttgtcagaatccatgagataggcttctagtactcctgttccatcatcaagtgtaaaggtcataacaaacacatattggagggg

SEQ ID NO: 340192 - DNA, 1000 bp, Homo Sapiens; identical to SEQ ID NO: 159392

SEQ ID NO: 340193 - DNA, 1000 bp, Homo Sapiens; identical to SEQ ID NO: 159393

SEQ ID NO: 340194 - DNA, 1000 bp, Homo Sapiens
ttttttttttttttttttttaccaaattgccttttatttacatacgagaaaatctcaccgtgtgtccagctggccccgtcacggccgctgaaggcagcactgctgggcaaggagaaacaaggccacacctgcaacctgggctgcagggtgaggtggctccctccgcacaggccccaggacacccaccatggcacaggccaggctgctgcccccacacggcctccacgaggtcacgggtccatctccacaaccccaaggcagtaagcagtgtgcctcgctttcgccaagctgggccaatgaagaggccccgcccccaccctcaggccccgccctctccccttggaaaacaggtggttttttcctaacacaggaaaacagaaaatgagcacgctttctatggctgccaaagtacaaggagaggctctgccctgggagccactgcatggatggtgggcaaggtccgggagccagctccaaggagcaggaagcagggggccatgacggcaggacaggcccagccatagccccgggaagagagactgccctgtacatccaggtccgggagcctcttccggctgagcagggccgcgactcggcatggccccagcacccgagcaggtctggagggccctcagagcggggcaggggcgggcacgctggggaggggcagctccagggccggcgtctccgcagcctgtgccgggctgggcttccggtgatccagctgttccagcttctcgccgagctgggagtaaagctccttcactgcctctccgctctggcctgtaggctccagggccttctgcaacgcctccagcttagatggggccaccctggggtgcaggtgaatgaggagccgcagcgcgtgccggtgcacgttctccttccttggagaggcggtgaggaagaagccatcgaagaggctgctgcagaagtcctcaagggcaaattcgtcggccagcagcgcaaggttgcccgtgagcaggtggaggaagatgtc

SEQ ID NO: 340195 - DNA, 1000 bp, Homo Sapiens
ttttttttttttttttttttttgctggttagatcaggatttctttttattcctcgttggtttaaaatggctaatcagaataaaaaataaaagggcctctttgtggaggctgggatctcccctatttagaggttagaacccaggtatcccctctacccagcaccatagtgaggtgggctgaggggtaacccccaagggacaatcggaggggcctaggcctgccactccttctctctatcccccgtttttggcatgtgatgaaaaatattgctttttggattcttctctcctggccttggattttaaaatcaagttaactgtgtaagctaggggaggctccaaggggccagtaggagcacactctaatccctctcccccaaggaggggattatccaatattgtttgagctaggccaagttattttcctgatctcccaccaccaccagtgtcttgaagttttgacccctttcctagggaaactaaatgccaatgagcctagaaaactaattctcctctccaagtccttccctcttgtgaccaaaattccagactcacctctccccaggcttcttcctaatcacacttagcaccagcagaggatgctatttccgtagttagtaactgggacaaatgagagggaaccacaggaaaaagactgacgtctcccctcttttcctgctggtctgaggaatgggaagagtaagatccccctccgtatatgtatccctccctcattttcccatcccaggatagatatataatttctttgatatttataatatatatatatatatattatatgtacacacacacctggtaacgcagaagaggaaaaaaatagaatccgtaacaataataaaaaaaattatttctggtttaaaaatgatctggttccctccagggcgagcaattgcacaaatgtccactgagtctggtccagggatcaaggaagggaaggtcttaaaagataaaagggggggttgctaccccagtctcagggc

SEQ ID NO: 340196 - DNA, 1000 bp, Homo Sapiens
ttttttttttttttttttaatttattagcacttaaatatattcagattttattaccatcgtctatagaaatttaacactagccatctgtgcaactgtcctctgaggcagaggaacaccatacgcaaatattacacactaagaacagtaccacattcgacaagactctttcttgattcagtaaaccaagcttgacaaaccggccaacccaaggtgaatgattacagttatagggtacaggggaaattatcacctagtgaatattacaaacaatattaaaatgttacacagacttacaaaagttctgcttttttttttccctaagactgtatgtatatgtgtgtgtgcgtacacaggttcacaatatggaaacctgtaccttacagcactcttgaggtttcagcaaagcatacattatagacatatttgccatacagtgcaattttattgtataagccatgaataatagtgcacttaaatccaagagtcacattcaaatattatcaagagaacaatccaaatacccggctattgaagaaatacacattctttgtttttataaactaagttctgcaactacaacatttttttgtgtagatggtattagatcagtaaggttttaaacaatgagatttagggtgcattttgtagaataattcacctctccaaagataacgtgcattttaaaagtgaagcaaatgtcttggccagacaaacacaggcagtgttgtacaactcagttttattacaaatcacaaatatagttaatccttagacctgcagacggttaaagagaatggctctagaagtcagtaaactctcatcagaattactttgcaggacaatgtagtgtttacagtgagcctcattatcttccactaaattgggcacaaattactgttccacagtgtagttcaagagctggaacattaagtttcttaaaaaggatttagataacaggttcaggcattttaatatccagtcctagaatttcagagggtc

SEQ ID NO: 340197 - DNA, 1000 bp, Homo Sapiens
catggaatcaatcttaaaaggcactaagtggcacataaagaacttaaaagctgcatttccatttttcctctagcttcctcctccataaagtgcacaaagcagagtaatatgaaaatagacacaggcttgcatctataacagcaaggaaaagaaatgcttccaagagaaatggaagtgtgtttaataatttgaaaccacaggagaggtctgctcatttattacagggccatgttttagctcttcctggatcgtctcagatctgccattcctctggatatgaacctgtggccgtggcagaaacccagaaatcagtaggggcttgttgtgttcttgtttgatcttcacgttaagatgctattgagcttttttatccatggatggtcttccaacaactgcatccctcacagtggcctgagtggaattaccgatatgagaagaagcctgctccaacacatatgcggcaccaaaatcaatagctccgcccagctcacgatattgaccagaatacctgatgtagccccaggtgaggagtgctattaacagtagtccaaccatacagttgaacaactgggctacaacctcaagacctatgaagccagtgaggcctgaggctatgtacaaagctacaatgcccgtgaacagcactgcaggggttcggaaggtgctgaagacgttcttgctaccattgtgcttgcagaagttctcatataattccttgatttcctcctccagctcctgctggtaacgaaagctgaaatccttcccacccatcttcttggtcttcttaaaatggtccagagcaagttgtttgaattcacagtgcttctcctctagaatgtctggagacaaataaggtttctctcccccacaaacctcttccatgttgttataataaatgtccttggcagaggctgcagctgctaagttgttggcttcagcagtggcctgaagcatggacttggggtgaggcagatcttctccttgataaattttaatatat

SEQ ID NO: 340198 - DNA, 1000 bp, Homo Sapiens
aatggtaaactgaatttatttcctcttggaaaacaattccagtaatctccaggttcagactgcagagtaaacattaataacagtaacatacaggttagttcaactgattcaagaatttggctgcgtgaaatcattaaggaaaaccttgaacactcaaagcttcaaatgtatccagggaaaaaaaaattctttgacagtctacataacaactattgcatatatagtgatgctacctgtcacattgcaaggcttacaaatatatatatacgggccttatccagctgtggggttctgttctgtgagaacatctcttcatggtttgcaagaatcttcagcaataaaaaatagtcttggatttaagcgctgatatacctaaagagaaattctaggcttaagtgtaaagaaaaggaagtccaaccatagtctcatgtataacagttgtttttaatctttcttccttaaaaatactttatcttaagccattttggtcatagtcttttttttttttaatcttgcctgaatagggcccaagtccacttgtctttataagaccattttagtatcagacgacataatacatgtgcaacactttatatacaaggggtctatccggtgcgcaaaagttcaaacacatgaacatccaacagtttgataatacaagttttatggtacaatacaatgtttctgaataatatacattaacaatgaaagtttcgtgcaaagagtaaaacatgttccctttttgtgccacaaaatcaattctccttgagagactgtacttgcactaactgctgtgttgggtcattgtatgattctgcagctctgtttggaagaaaaacttctgtggacattgtgtacagtcatagatcttgtcttcttgtccatgggcagagaaaatatgctgctgcaacttgtttgcttgaacaaatactgtaaagcagactggacacttgaaggtgcctcccatcccttcgaagctgtgctctatcaggtggcactg

SEQ ID NO: 340199 - DNA, 1000 bp, Homo Sapiens; identical to SEQ ID NO: 159395

SEQ ID NO: 340200 - DNA, 1000 bp, Homo Sapiens
ttttttacccttatacatttattctacaatttttgcaccctttatacatgttagaggcaacaacaataacttttagcagtgtttatttttgttaaaagaaaccaattgaattgaaggtcaagacaccttctgattgcacagattaaacaagaaagtattacttatttcaactttacaaagcatcttattgatttaaaaagatccatactattgataaagttcaccatgaacatatatgtaataaggagactaaaatattcattttacatatctacaacatgtatttcatatttctaatcaaccacaaatcatataggaaaatatttaggtccatgaaaaagtttcaaaacattaaaaaattaaagttttgaaacaaatcacatgtgaaagctcattaaataataacattgacaaataaatagttaatcagctttacttattagctgctgccatgcatttctggcattccattccaagcgagggtcagcatgcagggtataattttatactatgcgaccgtaaagagctacagggcttatttttgaagtgaaatgtcacagggtctttcattctctttcaaaggaagatcactcatggctgctaaactgttcccatgaagagtaccaaaaaagcacctttctgaaatgttactgtgaagattcatgacaacatattttttttaacctgttttgaaggagttttgtttaggagaggggatgggccagtagatggagggtatctgagaagcccttttctgttttaaaatataatgattcactgatgtttatagtatcaacagtcttttaagaacaatgaggaattaaaactacaggatacgtggaatttaaatgcaaattgcattcatggatatacctacatcttgaaaaacttgaaaaggaaaaactattcccaaagaaggtcctgatacttaagacagcttgctgggtttgatcaaagcagaaagcatatactttcaagtgagaaaacagcagtggcaggc

SEQ ID NO: 340201 - DNA, 1000 bp, Homo Sapiens
ttttttttttttttttttttacgggccacagaacagggtggtttattatttcaatagcaaagagctgaaaaatgtcgggtcccataaaggagcagaacctgacccagagcctgcagtacatttccaccccacaggggtgcaggctgggccaggcagggccaaaggcagcagaaatgggagtaagagactgtgcccactgagaagctctgctgggtgtgggcaggtgggcatgagatgatgatgatgtagtgtaaggaccaggtaggcaaaacctgttcaggtcttgttgagtgtccagagtggatccagaaggctgagggggtcgtcagagggccgggtggcccgcagcccttgcccgttatgggcctgcagaaagttatgcttgctcatccgctgtttgccccgcagggagctgtccagggagaaggcctctggggtcaaggaggccagcaattccagggaggaggaggggggccccgagctgggggcttcaggcactggcggctcctccttaggctggggagcctcaggtagtggggaggaaagggggggtggggaggaagatgggattggggtagactctgggaggctggctggcgggaggcctgggggctctgcagggcctggcaagctggcaaccggggactccaaccccccaggaggccgaatgctgagcttggcaatggtggcctggatggagctgatgggcacatccccaccgaggaccaggtcctgggagtcctgaggaaggtggttcttctggctgatgcttgcactggccaagggtttgcatggaggaggcacaccatggcgctgcaggacctgctccacgtgtctcaccactgcctcatagcagaacctgaggtgcagcttctcctgcagcatgtgctttctctgctgccgcatgcgccgcaccagctgaggcagctcagggattccgttcccagcctccacctcctgcacagctgcatagagcagtgcaaaggctcccgtgcggccc

SEQ ID NO: 340202 - DNA, 1000 bp, Homo Sapiens; identical to SEQ ID NO: 159396

SEQ ID NO: 340203 - DNA, 1000 bp, Homo Sapiens
tttttttttttttttttttggattcaaaattacattgtattccatacagtagaattttactatccatacaatgatttttaaagctcaagttaaatagtttttaaagcatttggtactactgtcatcaatacagtttttgaaactgtaaatcaggtcgaattttgtgcacatttcctggaccaagatgccctcagaagtaactgcctgtggtcagctttttatggtttaaaatcaattggtgtataaatttcaattaacacccataaagcttagccatggggcagcagagaagaaagagaaaagtattctgcataatcaatcctgcagacacaattctgtataatctgtcacaagaacgcaggcttgcagaaaatgaaaatagaatatttatttatgtttaacttaagttactctcaatcaaaaccaggcaatgattaaactggcaacataaaaaggagggagcacgagtcatggaggcgggaagtggtgcacctgcagacttgctctgctccatcactttttccaagaggcccaggaaatgtaaggtcatggctacatccaagttacaatggtagtgattacagccaggttagaaagggctcacttttgttcagagcagactctacatcattgaagagggggatcaggtcttcagattccaaagttcctaagtcaacgtttgttcctggaagacagtcaaggaaatcagggaaacgggtctgttggggattgatgttcatgggtgtttgtcctgcgttttctcctgtatccatctcatccacattgctgaggaagtcctccggagttgtggggacactgtagcaccctaaccccaggccactgtcagtgctctgctccctcgaatgatatggccctccattgaggaaaggatctgagctattattagtgatggatctcatgtctggggtcatcgtgggtgggttgacagcagcctgaactggggcaagagtctcagcttccatggggagctgtcgacaga

SEQ ID NO: 340204 - DNA, 1000 bp, Homo Sapiens
atcatctccaactctttaccccaacctggcaccttgtagggggctagaagggtgaggggaggtgtctttcacttatgcttaggtcactcttagaggactatcctcaaacttgaggtgacagggaactcttcacgggggcaggatttgatgttttgtttttagccatgtttgtcaatgacaatgtcaatttctagttccaatttgtacccttgtctcatttctacattaaaaacaaaaaacaatcatctgtcataaaagttcagagtaagctgggtgtggtggcacatgactttagtcccagctacttggggggctgaggcaggagggtcgcttgagcccaggaaagttcgagtccaagctgggcaacagagcaaaaccttgtctcttaaaaaagaaaaaaaatagagttcagaatagataaaagagttgttattctaagaaaatagactactgaaggagaaaggctttaataatattaaaaataggcaaggtaatgcttttcatagtatagtaagatttgcctaataccatcttatttctttgattaaaagttacttagcttcagcatgcgtgtacattcaaaatacaaaattaaagcatgagttgtcattaatttgcagaattctatgattgaagcctctaaatgaattgtgcaggagagggagtttgtaaacaactgactacagacattcacattgggtcatctttaaaaagctggactctgcttttggatgcttctcggaggcgagttggattttggactgaagtactgtcgttccattcctttttttgaggtgttatgagtggggctataacatcgccatcctgcggcttggtgaaatttctgtctgcacaccactgaacaaaatattgtcttgcggcatacaaactctttctgtccaccttcttacaatatactcgaatcagctgctctgcaaatttctctggcagaagttgtgaaacctggtttttagtaatcctgattgctctgttgggggca

SEQ ID NO: 340205 - DNA, 1000 bp, Homo Sapiens
gaacttaacagatactttattgctcacctttcacacaaagcacacctccagccattttctttcacagcttgacaatgtttacatgtacaaaaacccagcaagaagcatcatgtcatgtagatttcagtaagggagaatgtaaaacatcaactcagccaggcttttgttttctgcagcaataataaagggcctcctgcacttagcaaaaatctgtcttaactttgtagtgcatttcttccattacaaaaaaagttacctgcttaaagcaaactaacttgtatttgctgagccagtggtattaactcatgcataaaacaaatttcggtttgctatttcttctagcaaatttcaagtaaaaataaggttgaaggaggaatttgttttggatggatgcaggtcagtttgaattgctatacttaactaaatgcctacatgtactatagcttcacaacttagtttgcttttataatctttatggattttggccgtgttcaaggttttcagagttgagcatatgatacagtattccatcaacaaaataaggctactgaatgtgctatctgcagaagagctcatttaataggaactgacctaaaagttccatcatgaagcacacgtggcataaaagtcaaccggggggcagaactgtgcttggaaaataggcattggaatactttaagcaaaacacatataaatggttattcatatgaggaaggtttcctagtagtaaatctaaaaaagtctaggtgaatcctcattttcaaaactgcatattgaaaacatgaaaactacttattcaagtaatttcttcaaaaaagtttgcatgttctgactgtggaattagtctactgggcaattaaaggcaattttaaccaccttttaaaaaatttttcatagaaaggagagatgttatgtgtttctcaaataaacggcattatgtaagtccaataaaaaaatctaacagaattgaatgaagacctacaaatgcttatgccaagca

SEQ ID NO: 340206 - DNA, 1000 bp, Homo Sapiens
tttttttttttttttgatgaggaagacaaactttataggaagctgcaaaagaaatgagcagagcgagatatttgtggtaagggatacaaagaacatacaattgtgtacttgagaggtttcatggaacattatgacccatccaatgaagacatcaacattaacaacaaaaattaattgaggaagagcagtatgaaaatattctaatgcagtgctgtccaacagaactttctgtggtgatggaaatgttccatatctttgtgctaatacagaatctaccagccacatgaatactcaaaatgtggctaatgcaattgaagaaatgaatttttcatacaatttactttaaatttaaatagtcatatgtgactagtggctcctgaatgaacaatgcagttctaatgcttcatgggtcaaaaccagtggtttctttgggggacctctctaatcaatcagtgctaagggattgagggttgagtgttgaagaagaggaaagcactcagacttatttgggcacttacacaagattccaaattccccattgcttccagaggcaggggacagcacaacctgctctggaggcctcactacgagcctggctaatgtcggtgggactaaaagccttacaattttggtcattcaactagaaagaggcctacggtccacacgcaaaactggaggtcacccctagggccatctgtgcatggaaaccaccactctggagctggtagggagttggagggaggggtgctcacttccgggtggggtttccagagccagaggaggatttagaagtggaggaagtggagggaccggagggtcctgagggccctttctggccacctgcaggctgcacaggccctttcttttttgggattacgatcttgttcttgctcttaaacactttgctgggatctagcttattcacaaaggagtcggtctcttctgtgagcaggtttgtgttgtaggtgataggtttatacatgctgaaccattgcttggc

SEQ ID NO: 340207 - DNA, 1000 bp, Homo Sapiens
ttttttttttaagtaagaacccaagctttttttttttttaccaaaaaaaaaaaaaaaagttgggggcaaaggggaagacaagttttacacaaaagtactacaatggtaactccctttggtaaaaagtgtaataaatgtcttgtacatctgttcataggtactaaatctgaagccacagtactatggtacacaagaagctagagcagttatgctagcacatcaaagcatatttcttttaataaaaaattgacagtatgtacattatgtacaaaaaaacaagttaaaattgtgtgtgtgtgtgcgtgtgtgtgtcagagagtaaagctggtggatggcactaaggtagactagtaaagaggcagatacaaaacagttccacgggagctaaaaaggacaactgatttgaactcgttgaggttgagaaccagaggagagaaaagggtaggcagcaagggaatcgtcaggaataaaatccacaagatgatcaatcccaaagccaaactgcaggtcccagataaaacctaatgggtgatcttagatgtgctcgagtgaccagaaaaaaaaaatcaaatccagcttttttttccttttgtggggaggggagaggagcagtgaccatgatagttccaatccatctgagtattaagtccttctccagtctgttttgtaaatgcatctccatccagtcaaagtgtgaacagcatccggttccctcattgaaagttaggccacaggagactccagtcttagctctgctggtgtgtgcaagcaaactgcatgtctttgcttgcatggacttccttcccctccagggcaggctatacccaaaaccctttgggaaaagttccagcttcagctttgtaaggtattcatgttcctaacaggtagcccacttggtgccaggctgcaccagccacacacaggtcaggtggccatgtcccagagaggcccagtgaggcttgaaaggcatcttccttgtttcttcagtgtgtgagtgcat

SEQ ID NO: 340208 - DNA, 1000 bp, Homo Sapiens
ctaaacataccactccctcctggaaattacggaaccatctacatgtgaaactaagtcatcttcgttttcatcataatgttcatcactgacaaacttcattcccatttttagatcttcataataatccattggtctttcaaacctattgagattttctacattgttccactgagttttttcaggctcttctaaatagtctttacgtattagattgttcactggatttttgttttctttttttacactgtctgggtaagaatcaagctcatcttgttgaagaacatctatttgtgattctttttgcatatctgatggtggaatgtagttcttggcaaagtagtctccacgaaacgtccgtcttctcctatagcagaatattccagccaaaacacttacaagtactatgaagagagccccacccactacactagcaatgatcgtggcaattgtgtcatccttaattgttgccaaagttgacaatgggaagggcaattttttaggttctgttgctagatcctcgatgtcagcagttgagggatgccactgaattgtaggctgaagggtggtagtagtaggaggatctgaaatgtagatgactttttggtcacttctttgaccaagggaattggtcactttacagatataaacaccagaataattgaaagtcaatggatggacaaaatgaagagtattgtctgaagccaataaaccatcaggccattgtccatccaacctgctccacacagatttgaagggtggtggatttgcatcagcattacatttgagattaacaccttttcttcctacaaaccaatttccatcatatcctgttaccgaaacttcaggagcatactgtatgtctaatatgaaagagtatcggatgtccttttccaaggctggatgttttacaacacaagtaattcgccttcctctagcaaatctggttggaaatagcttgtactggctgataatcgttgccgtttcatttggaaaagaagtt

SEQ ID NO: 340209 - DNA, 1000 bp, Homo Sapiens; identical to SEQ ID NO: 159398

SEQ ID NO: 340210 - DNA, 1000 bp, Homo Sapiens
tttttttttttttttttttttttttggggacagggtatgtatcaggcagcatccccacaacaaccctgtgaggtaggttgcgttgtcccattttacacatggggaatgagggctcagcagaggtgaagtttcttgcccaggtcctgcagcaagaacacgagccgggattcaagcccaggtctgtcgggctccaaagcccatgtgtgttctctaggcaagaaatagggagtagtcctatccaataaagaccctcacgttaaaagctcaggggctcttcagcccaccctgaatgggccacagggtcagagatggaacccctccaggggagcagccacagccccagcatccactcgtggccccggggcagctgggcaggcagaagggaagggtggagagtgactgctatacacacagcactggcaaccagtgctacaggtgatggctctggctgtccagcagctgtgggcagggtgagggctggtctggtcttgaggacttgtggccccaggtgggcagagccaggccattgagccaggcggtctccagcagactgcggaagcgggccttcagtgtggggccaggtgggctggcactggtagcaggggtaggggaggcaccacaggactcttccccagcagctgcctctgctttctccgggccaggggttggtggcttcctgcctggcttcctgaccttgggggccggtgacttctgagccagggctaggctctctggctcatctctggccacagtgggctctgaggaggacacagctccagcctcagtgtcaaagtcacccagctggcggcgtacacagtcgcgccactgcaggccgagaaggtcggggtaaatgtccggcagctggcgcagcgccagtaacttcagcatgcgtgaggtgcagcctggcagggcgagctcccgcagtgcccgctcctccgacagcgtggtgggccgcagctccacacgatgctcctgcagcacatggtccacagaagcgggt

SEQ ID NO: 340211 - DNA, 1000 bp, Homo Sapiens; identical to SEQ ID NO: 159400

SEQ ID NO: 340212 - DNA, 1000 bp, Homo Sapiens
ttttttttttttttttttgaaccgagataaacctttttatttatttatgcttctccattttgtttaaaacaacaacaacaaccaccttaatgtaactgacagcccttccccctcaccctgcctcgggctgggggtagttaatggggaaatggcccccagggtggggctgaccagaagagcccctcaaggagctcatggagcccaaatcccctgccctggggaggggacctgtagtgtgtgacgggagcctctcccgagcctctgcttgtaccatcaaagatgcccttggccaacaagggtcaggaagcatgggggagggatttcggcctcctctgtccctacccagcccaatctcacgagcagggctggggggtttaaaaagggtggagcgggtggggttggctcacacgaaggagtactggttgttaatggccctggggtggcccccttcctctccatcaccccctagtggtgactgctgcagctgcaccattgggggcacccccgcgtccccaccagacccagcgccctgggcctctgagcctggggctatggcctcttccaattcaaccacggggaccagctcaaccacggggaccagctcttccgggacccctccaccgcccgctttctctttctcttgcctctctttggctgctgcggctgctgctgccgccacttctggcgccctcgacgcctcttctgccccaggctgtgggggatctgtccatgaagggggttcagggggctggggtgggtcatgggaggtggtcggttacacagtcactcgctccgaagggcatgagggtgcaggaggcatcggggtggcatccatctccctcgcacacccccgcatggctcccagcctgctcccggccctgctgtcgctgggaggatgggacatagctgacaaggacaacatcactggagcctcccgactccaaagggatggggtgcacccggaagtgctcgagcatatcgaaaatggactggaaccaca

SEQ ID NO: 340213 - DNA, 1000 bp, Homo Sapiens
ttttttttttttttttttgagaccttgatgagtctttattttaggaagcatattattagcttttgattttaagaggaatttactccttgctttccctgttttggggaaaatgaggagagctgcctccaaatcagggaattatattgacacaggtagacatagggaatggaactgaatgaacccaaggtgttacattttgtttcactacacatgagggagaagaataagccctgctatagtgttggccagagcactgcgactgacgccacagggtgggttaccagttaaagtctcagtgtgactacttggacacctatttttgtttagacacactattcaaagggctgcatgggaaccagaagttggcctcttctgataaatgcctggtacctgctatgtaaaagagctggaggtttctgttctttttgaactgacagaggaaagaggaagacaaggctggtggccttgggtagggctttcagtagttgcacagtactgggcaattcttagccttcccttggttctagccttgattagagatagtcttttttagtgtcattatgttgcccagagtggttctgaattccttgcctcaggtggtcctccgcctcagcctcccaaaatggtgggattacaggtgagcgccacagtgcctggccaaagctcgttttgatcctcattcatatgtcattgtcctcagagaggctgtcagctgggaaaagttattctcctgggcccttgaggccaaggtagattcagaactgaggatacttctgtgtatcatgtgataccattccagccacttgtcttcctcagctactcccacctgcccacccctctagaaccgactacacccatgagcagcagtacagaattcccagggcctttcgtaatggccaacatactgcttactatatatgccaggtatttttccaaagtgccttacacgtgtttattcagtccctacctgaggcaggtacttttttttttttttttgaga

SEQ ID NO: 340214 - DNA, 1000 bp, Homo Sapiens
tttttttttttttttttgatgatttggatattattattacaaagaatttaaatatacaagtttggctatgaaagacccagctaagccacttaggcaaaagtctatctttgatgtcatagtttccaagaagtatcataagagtcaaacagttaaacatttctctgtgcttttttttctattttctagaaatgttgtagagagaagctcatcaacttacttatacaaatcagatatactgaggaggggagataaactgacatttccatattttataatataatgtggaaagattcagaaatgactgagaagatacagtgatatgatatttaaagcaaatattggcatatcttatacaagaaaggcatcttacaataatatttctgttggtacattacaatttttcagctagtaattctaaaatgccagaggtcctatgatgcaatatcaaaaaaaccagggaactgacatacaaagtcaaatataaagatagtaacattcagtcatccacagataaaaggctatctggacataagcctgaaacaagcaagacgccatccactgcgatttcgccggttttgcccttgccacgttctgcttcaaaaatgatgcttttggtagcatcagttccttgatacaactgaattttccctgtcttccacttttcatcctcactcgtggtcttctcccatgccagggcattgttactgtttttcacaaacactcgaagtttcccgactttgtctccggccagccggtaatcaaagagcaaacagaagttgctttggggttgcaggtcaggtaggagaagtttcaatcggccaatgtctttcttgtgacctgccaaggccggaactgccatatagaagccaatagcattatctcgatcagcaggattccagtcaaaatcatcttctctatcctgtttccagtcacagatcccatgattgaagctgcagtcaaccgagatatttaaatctttatgttccagtttggaagttag

SEQ ID NO: 340215 - DNA, 1000 bp, Homo Sapiens
tttttttttttttttttttgtttttgcttagttttattaaaaaaataaatatgtcataaagctttctttttccttagggagaaaaaaaggaacaagtctcataaaaccaaataagcaatggtaaggtgtcttaacttgaaaaagattaggagtcactggtttacaagttataattgaatgaaagaactgtaacagccacagttggccatttcatgccaatggcagcaaacaacaggattaactagggcaaaataaataagtgtgtggaagccctgataagtgcttaataaacagactgattcactgagacatcagtacagatacatcttgcttaaacaacacagaagttcctgaaaagttttgtgtaaatgatataaccacaaacattaccaggagagcttggtaactgaaagaattccatggcgaattcttttgtgaacaactactttcacttttgtaaatccaggtatttgctttttataaggagtttacctagttgctacctctctgaactgaggaaacagcatattcaccaaacgttgtgctccagctggaccactggcacaatttccaagtttgtgtttctattaagtaagtagtgtaagtaaggtacagagtcagccagggaacccagctgtatctgacaaagcaggtgtaggagtgggactgccatctaccaataattccagcaaatacttttgctaatatactttgtgcaaaacacagtaataaccttatcaattcggctatagatgtacttcctttttctaaaactttcagtcacaagctaggtctggaacccgaaaaggaagtaatacttctaaccctcaagactgcctttaaccaaattagctgcccaactccttcaaattggaatggatgataatgaaagagactgagttttccaaagctgaagtttaacaacacaaaaatcacatttcatatcactaattagtgaaaagttttgctggtgacaaaaatttttcaaatggttgttttt

SEQ ID NO: 340216 - DNA, 1000 bp, Homo Sapiens; identical to SEQ ID NO: 159403

SEQ ID NO: 340217 - DNA, 1000 bp, Homo Sapiens; identical to SEQ ID NO: 159404

SEQ ID NO: 340218 - DNA, 1000 bp, Homo Sapiens; identical to SEQ ID NO: 159405

SEQ ID NO: 340219 - DNA, 1000 bp, Homo Sapiens
ttttttttttttttttgctagtgcggagttttattggctacaaaatagatgcaaaatgatgagaatctgaaggctgcagtaggaaagtagagctttaccctcataaactcgcactttgattagaaaagtgcaatatattaagagcattatgagaagtctggtgagactgttacagaaaaaaaaaataaaagtttctgagtctgataattccaagggtatcttttagaactcactcactggtgtctgtgcaaggactttccttgggggaaaatagattttacaacaggcggaaactttcattggtctcatgcgtgcttttggatttcattcacttgacaaagaactaatcttccgttgatggtctcctgggttatggccttgatctttggagttgcagacactttcatgctcgactttgattcttcccgtgtcccttcactctctccctccaggagccgtcggtacgtggtgatttccttctccaggtgggttttgatgcccagcagcacttggtattcattgttctgccgctccagttcatggcgtagctgcgtcagttcctcctcatagtgggagatgatctcttgcatgtcctggagcttgcaggagtaccgagactgggtctcggataacatgttttccaaagcagatttcgtgctgtactgtgtctgcaggtcaatctccagggcctggaatgtgcgcttcagttcgtggatgtcaccttgtctgctctgcacagtggctggactggctgcctcctgggacatggctgcagactgttctttataccaagtgtccaagtctcgatgcttcttctttattataagctcatattcttgtctcatatcctccaggaccttaatcagatcttccctgggacctgtatccaccttcacattgacattgaagtcacttggcacatgatgcttctccatttcctgctcatggtgcttcttcatgagaatgagctctttcctcattccttccacctcctgttcta

SEQ ID NO: 340220 - DNA, 1000 bp, Homo Sapiens
ttttttttttttttttaaagcaaagaactttttatagtgtttattaaatcaaggaccggttagatagatgatgggctaggcaggtgggggaagacagagctcactgccctgtggggtctctgtggggccagcccctgatgcccatgtggccactgatgcccagcttcccccaacaccccaacacaggcccaggacaatattacaaaagtgaacaaatgcaacctttttctgcttttacaaatgacatgtctccatccccggccagcaggggtaggggaggccggttgaaagtgacactccgttaaaaaggcaacaacttttataaaatgaagactaaggaaacagcccagggttcggaagctgagatgctaccctgggggtagagcatagacatgggtcgggcagaccttgtctcctttcacggcattcctgggagggtaagaagggctgtcgtgctcagggccagtggggactgaatccaggaggccccttggagatcccagccagatgaggctccagaactgcagcaactccttggggcagcatctagaggatgctcaggggaaaatgggtaggtttccagtctggatgctgggggaccccaacccagggtgagaaactggctaggctggaaccaatgtgccctaagcttccagaggctccgaagggcagagtgacttagcccatgccgcacagctggtcagaggcccagagtcccacttgtgaggctcttgcctgtcctgctgctgctactcctgtgctaatggggaacaggcaagggcagcaaggggagcccaggcggggagggtggggcttattagaggagacaagaaagtgcattgggtccgggctgggaggcaggaggctgtgctccagtcatgccactgcccgcaggaacttagattagcctttttccttctcaaggcctcagtttccccatctgtcacatgagaagggtggacttgattctttgcaattccttctaccattaaggttctag

SEQ ID NO: 340221 - DNA, 1000 bp, Homo Sapiens; identical to SEQ ID NO: 159406

SEQ ID NO: 340222 - DNA, 1000 bp, Homo Sapiens; identical to SEQ ID NO: 246415

SEQ ID NO: 340223 - DNA, 1000 bp, Homo Sapiens
gaaatggatcaagatcattttttattgcacatctgcttacatgtctgctgcttttgggcagagttaaacctgacatattgagtcagtttccgtcattttacatcaactaaattatagcagtgaattgcttatgtgtctcccaggcttaccttccagaaactagaacattaacctttccaatttatctaggtactgaagcacaaatttaacatttgtttttgcaaaatttaaacactcagaaacaaaccaaacaacatcctatacagaaaacaatttttatgtctagatatacaattgaggttcagagaacttctgattatacagtattgtaaaggtaatgataatccaaccctcttccaaactatttaattcctgtatatgtaattaagcatttattttcagaaattttaacactttcagcaattgattctctcacaattaggcatttttaagatcctccatcccaccaaaaataacccacaatgactccaaatcttgtttttcttttttaaaacgctattctcttgggactaaactgttcagaataatcagtattcttattccctttccactgtactctactgctcaatgcaaaatggagaatatgtggtccaaatagaaatatggcatttgtgcaggtcaagctttgaagagacatggaccacatgattagcctgatttttaaaaagcaacaagaatggtgacacaactattacaccaaacacaaaattctggccattaatgaatcagaagtaataactgatgctcctactttaaattcatcaatgccatatttaagaagtcaagcaacaacacatacttggcaaaatcttctaaattctcaagttatcaaacaaaaaagttatttttaatactttaccccccttatatcttatgattcaatcacttatattttcctttgttagattattcagaagaaacaattctatttaaccttaataagtttttgtctcacacattttatataaagttactaaaa

SEQ ID NO: 340224 - DNA, 1000 bp, Homo Sapiens
gccatagaaacgtctttattgaagaggacaggagtcatgctgagtttggggacatgcagtgaaggggcagtcgtgagctgtccttggtggtcggggccccaggtccgccctggaccccctgggccttcaggttctccctcgagctgttggtctggcccaggtgctgtggggtcctttgaggccagtgactagaacgtagattgaaatcggggttccaggatttgagatcccctcagggccttggggccttccatttattagagatggaggctttaggatttggggttcccttagggctggggctcttggaatttggtgtcttgaaacccatggactcggggcattgaaattctccagtttccagggatgggaattcctgtgtggggtttcctggtgcctgtgaatagggcttgaggtgtctgggagcctggaatgcatatcctgactgcagtctcctccataccaggcacaaggacctcatgattgggtttcctggggacttgggattggattttcaaatttgggattccctggggatttgggattccatgatttgggggtcctaggagttacggcattggggtcttctaggggctgtaggacttgagggcacaggggagtttgggacgtgtgtactctagggtttgggatccccagagtcctagaatggggcctccaaattttggggtcccccaaagggggaagtcgttacttaaaaaatagagaattttctgggagtctggccagcacaggagctgtgggccatgtggggtgggcttcatacaaggcactgggggtttcttgagggtgcagagggtaggaagacttggggggtcctgtaattagcacttccaggactgttttggtgtctgtaaattaggggtgacagtgggctggttatggtgggtttcttcttgagggataagaacaagggtctttgttaatgaaggaagtctctgattgaggggttggaatctaagggcttcagggtgaccatggg

SEQ ID NO: 340225 - DNA, 1000 bp, Homo Sapiens
ccaggtacaacagcaggttcttttccaattcctcaaagcgctgcatggggtgggggcagagacagaagagaatgtaaacattgggttccaccccctggagctcaagggaagacccttacccagatagggactaactggaggggtggaagggaacaaggtgaaaggtatgggtcctggtgagacaaaagcaggggggcctgagaacacagagcaaggtgggtttggagggagcacagcagggtgcaggaagggagatgggggacatttcctattccagtgcatgtccccttaaataaactgggtacaggagcattatggaaggagaaccaaaggacagaagacaaagcgagcacccccaccccaggccaacgccatcctctgtacacaattacaacacaggtccagaatgagagccctggccaggaagtgggggagacagggagggctgaagacagggaaaaggaagccagctccacctcatggtaaggggagctatggagtgtaagaatctgaaactgctgactcccatcaccaggagtcacccctgggatgacaacgggccattcaggacagcacctaggaggggacccagagggaactggggcaggagcgacagagaccccagctgagcctcatgggagatgagaggctccagactcatttgcagctgcccatctgtcctgcccgtgtagggatcagcagctggcgaggagatggggaaccaagccactttccccagcaagggacagcctgacaaggtgctagggggtggcaccttgggccaggcctgttcttggctgagggaaagaggggggccatgcagtccagccccagggcagaggtcagaagtaagcgtcctgccgggcctcggctgagggcctgtccccaccatcatgggggcctgggggcccatctgcctttcgacgcagcgaaagcttccggccttgagccttcttctcctgcttctgccgctccttctcctgcttctctcgctccttct

SEQ ID NO: 340226 - DNA, 1000 bp, Homo Sapiens
tttttttttttttttttagtccacaaagaaacaattttattagcccaagaagtgaagacccagtccctctgcttgccccagctccaccccaaagcccctcaaaaggataggtgtgggtaagggagaagcttgggatggaatgtcccctatccctcagaagactggagggaagacgacggtctgtgcaaataggtcaccagaggtgtatgtgtggggggttattagaccaggataacaggggaagagggaggggacagtgggggatctgttgaaggcccaggaaaaacaaggggagctggggctaaggaaccaaaggaggtgggaagagtggggctagaacccaaaagtggggtcctttctgaggcagggtggtcccttggctccccttcatcaccctcctcttgcccttgagtttcttcctcttggtcttcgtccccaggaccccgatgaacaggctgcttgcaaatggggcaggtcttccgggtctgagtgagccaggggtccacgcagcggctgtggtaggcatgagcacaggggagtacccgcagcttgtccccatcctcatattcatccaggcaaatggcacagacatcatactggtctcccttctgatagtcatgtgtaggaatctgtttcagttgctctttggtaagtcgattccgctggagccgtttccggtgctggatacaacgagctatcattactgctcccatggccaaaaccagcagtcccacaatccctgtgaaagggatgaggtaatagcccaaggggaaggtattgtctggaaccagaagcacccgagcccccttctcgtagacaaagagggcacgcaggtactcggagcttctctccccaataaatacagacgggatccagatctgctgctggatttcctcactattccacaccatgttcagaagttcattggaattcacattgtgtactacagcggcaccatatccagccttctgggcatttaggaccttgaggtcaaagttgc

SEQ ID NO: 340227 - DNA, 1000 bp, Homo Sapiens
cggcacgaggtttattaatatgatccaaacagatttagcttaagagatgaggacaggacataaaacagagatttggctgagctatataaagaaaaccaaaagagtgacaagattttcaattggtgacaatttaaagtcatttattaactaatataaaaataaatctacaatagaaccatgacttaaactgagccagtatgtggtacatgtgtcacccaaagtcagcaaggaaccattcagaacttacaccctcctggactggctcacacggcctgtctttgatctggaacctcatataagtcacctcacagcactgggtttgcagccagctacattttttctcctcagcctatgatcagttattaatacataccatttctatgtttcccatagcctctttcttttcagatagtgacagagctctagaaaaaactcatctggccagtactaaacagggaaggtgaaaaaaagtactttaaratgggtgtggggtcatttggggtaccaacagactcagataaacaagggaaccagagtgggcatcaacaaaaagcattgaggtaaggggcccagtggtaattcacagaaaagaccagaactggacaatattaaagtcaggaagaatggctgttacacttgaaaagtcacactagaagaacaacaaagaagaagaaaactggaatgaacagtagtcccttttatattttttaaaaggaaggaattttttaaagaaatataaaagtcaagtcaaaaagtgaaatagcaacaatgagtatttaaataaaacagaatgtagtaggaaagaaagaattcttttattcccacatgacagcccaattttttaaaatggttatcttaagtcaggccagttttattttattgaccatgtatatataacatcagatatttctaagaaagagaagagaacctgattgatgtctctcatgtaacatggaaaggaaaaaggagggagggaaaatggggaagaaaagtctccaca

SEQ ID NO: 340228 - DNA, 1000 bp, Homo Sapiens
ttttttcttatttcaaaaacagggatatctgcatttaatttcattcagtaaatcaattccagttaacttaccatctcttaaaaatgggagaaagcaaacataggacgtgaaaagttaaagatgcgtgacatactggagagtaataagacatactggagagtagtaagtgcacacgtggcaattaagggttgtaatttagatgtaacacaagaaaaaaagtaaaattactgtactttattgctgtatctatgctttcccagtatagctataatactacaaggagccacagagtgccaccttctggtttaaaactgtggcaccttatttcttttgaaatgtcactttataaggtgtatgtagaaagcaacagcagcagttacaaaatgttgtctgagtgattctgagagctcaaaacaaggatccgcgtataggctgaagaaaaagacgttcagttaacagtgcgcgctgtagaactttaacacaagtcttcaggtggaattcctgtgtaaaccttagtagagatgcgactcacggagaccaaaagtaaaaatctctttaccgtttacagtttagtgaggtggtctgcattctcgcaaacgacttacaaagtacaagaaatgttgcgtgtgagtattaggcatagaatatttcattttcttacggaaggagcagcaggggacaggaaacctagtggacgccccgccaccacctttcccgaagatgcacacccccaggaacggcagtgcaagcctggcagcaagccacccttacaattctttttggttgtttaaaatacaagcgctttctgacatctcaccctagcgtgtgagccccactcaacctggcaggatacaacccacgtcctcgtttagttttccccttggaattatttacaggatgcctacagatacggtacaaactagtatgaaattaatgatagtttgcgtttccagacacgctcccgtggttaaatataccacgccaattccaaagaatggtt

SEQ ID NO: 340229 - DNA, 1000 bp, Homo Sapiens; identical to SEQ ID NO: 159407

SEQ ID NO: 340230 - DNA, 1000 bp, Homo Sapiens
tttttttttttttttttttcttttaatataaacagacagtatccacatagtttatttctcacagttctcctgacaaatgaacatcattcaagaacatactgtatacacagataagaagaaacatacaaaatgttttaaatgatgcacaacaaaatccagcagtataaaagaatgcatgtgaacccttgctcactgtgcagactaaatttaatcacttgtttaaatagtaataaaaatacaatcttttatggatcttgtgcagactacaaaagagggaaattattaccatatatatgatttttatattaggcagttttctttgatgagttgtactgacaactccaaatacagaggcagaaggctgtgtattttaaaggaattaatgttgtgaattagaaactttacacagttactaccactggcacttttcaccatagtttgtacacatcacatgatcatcttatataacattacatttaaaaaatatatctgagtgacaattttataacattcacacaccatgagctggttaaggaagcaatgccacagttgcctcctgtagtgcttcactgttggtaattaaggacaattcattgtggttaaaagaaattagatatcaatatgattaagcagctccaatttactaaaggccatcaatgaccaccactgggacagtgagttcttttaaagtgtatatcctagaagcaaacaccatcattggttaaaactttgtctaaagaagtcagtttctgtgctgaaaactattttcacaaaactgaaggctactaaactgttttaatataaatactttgtcttctcattatcatatttatgaccaagttctttgaaacctttggaatttactctctctttaatgtgtgctctcgttccatctcacccatttaagatcaccacctaaaacgcagtggtgaaaaattcaccagggaaacctttgctcaccaggaatgttcagctgctgaacagtgatctagagccacaa

SEQ ID NO: 340231 - DNA, 1000 bp, Homo Sapiens; identical to SEQ ID NO: 159408

SEQ ID NO: 340232 - DNA, 1000 bp, Homo Sapiens
tttttttttttttttttttttttttttttccaggagataaaaaacatttattttaatgcacaactatagcattcatatgcctcagcccagggcaggggttgggagttaggtaagaagggatgcatttagtttgccctgtccccaaagagcgggtaaatagctaagccactcttcactcccagcacagaccttcagaagccccagatatcaggatgtaatggtagggctcactgctctaaaacagctcaaacaacctgctcccaggaaggcaagccttctgctccttggtctcctgcctaccattaggacacaatgttcttcgtctggccagacatctgttgaaaggctggatacaggacaacgtacccatctttccatctatatcaactatcctaggtctctgataccccattttggagcactgttgaagtcagtctctggaggtagtgctgacgcagagggggcaactgagaatagagctcaaagccctctgggagcgtggaattgggaagcttatagtgcaggaggtgctgccggagaccctcatctgccagcagccatgttttctgcagcatactcctgcgggcagctttgacctcatctgagctctgtgggtcctgagagaagatgaagctattgacatgagccacagccacagcatagagcacggggcaccaacgtgggcggagcgcaccagtaaccagggtccggaagtagagctgaaggagggccaggttgtcttcaggaggcactgtgtaacactccagggacacaggcaactgggtcagaggcaggctcagagctcgcaaggctcccacgtgttccccaaagagggcaaggcgcaaggtgacactgaaccgacgctgcaggggcaggaggaccagggccccaaagaggtggtccccaaaagagacagcctcaaaatgatccaggaagttggcatagaggtcagggaaagacgtcaggccagggagtcggcagtccaggttgaggtttggca

SEQ ID NO: 340233 - DNA, 1000 bp, Homo Sapiens; identical to SEQ ID NO: 159410

SEQ ID NO: 340234 - DNA, 1000 bp, Homo Sapiens
ttttttttttttttttttaaattacaacactttattgcagcatcggcaaaggtcagatttctgaagctggtgaagattgggcagcatttccatgtgaaatgttacaactttacaagttttgttttttatttaaatctacatgcagaaactgaaacatggtaaaagaaaaaatgcaaaatagctagaaaaaaagatgtaatcaagttgtcgcatacagatgtgctctccgactaaatatactacgcctgctggaaagcaaaccaaagacagctgtcctaagaaattaacagattgtcagaaacagactaaggaccctcatttctatttagtgggggaaaacaaaaaaaaaaacaaaacaaaaacaaaagcaaaataaaagctctacttgtttccatactttgtttagagacagaggctgtaaacccatgaaggtcaacaaaatattctcatccacttcttgttgtccttcgttcgttttctgtgacatgttgacgggcatgttttgttttcaatgatacttacaatgggctcacctagatccctgttcttgggctggtatcacttttctaagccatctgaattaatgctctctgtatagtaaaatagtctccacatttttcttttaccttaataggcaattttatagcactgactctgatggataaaacggatttttctccctcatcccttgttcctcttgaaacaaattcctaaacaaaagccttcctggtggattatctggtatttggatatctttcatcattttgttgtcctgcatgtaagttttactagaagattttcctgcttgctctatacttttctactgtagtcctggagcccccaaatgtatcttcttccaacgtgggatgttcaattcagagacactgaaactcaaatcaagtttaaagctcaagttcatttcccccacaccattaccatcacaacccgtttcttctctggctcaatcatctccttcacgctctccttggtgtaactgctc

SEQ ID NO: 340235 - DNA, 1000 bp, Homo Sapiens
ttttttttttttttttttgttggtcagcagtggttattgcaccattggcaaataatgaaatgtgtgtacatcagcgacaaccacagggtcagcacaacaaccctcaaaagtacctgaactgaatccacttcattcttgacaggaggggaataaacaggggccacacactcacgcacacgcacatcataccacagaatggaaagcaataaattattggcttcattcctgcctggaccctaagaaaaggcaccgttacagaacaaagcctctccaggccactgcctgagtctcctggggatgggctcctccatctggctgtggccatggccagccaacgctggaggcctgagcagagcttcctctctctgggaagaagtgagcttaaatatttggcttcttaccagagaacaactatttacaagggaagcagccacaccggcctcacaggtgagtgggaaattgtctcgagccccagtggatggcacaggcaggagacccctgcacacgggagcatccttcctgaagggcggaggggatggactttccgcccacctgagggccctgggcaggggctccatgagcccaggcttgaggggaaggatgcccaggttcttccccaacctccaacatgactcctccctcccccaggagtcagcatcaaccgacagagttcaaggcctggaacttctctctaaggtttctcactctgccctgctggctcgggtctgccgggtccctggaaccctcttccttcggctggcactctgcagactgctggaagtcctgaacctgccccagcagggccaccggtgagcttggtccctggccactgctctcctccagccctgcagtggggctgggaaggggtcccttctccatgacaatcacccgccggttgtcctccagggtgaggtctgcagtgacatacagggtctcgcctccatccggcttgctctggggcagaggcccaggggattgggcagcctctccgcctccccgg

SEQ ID NO: 340236 - DNA, 1000 bp, Homo Sapiens
aaacacttccagccacatgtttatttctttgagaaagcaacactgcaggacaaaaatgaacaccagtagtatatttcaacttttttttcatgtcatttgcctagatatatttttttcttatttttatttttatcttacaagtcaacctcaaaaacataaagcaggagagaaatgagccatgcctctttttcagtttagaggggtagctgacacaggatgagagcacagtaaaacttaagctaagatttccacattaatatcttgcccccaaacaccatgcagtgctaaaagtcacattcccatcatgcaagcacattaaaatatatggcgattaaaactcctggtttctattttacggcatttgctctttccacgaggcacacttcccttttgggctaaaggttaaaaaaaaaaaattcaaatacaatgaagaatccattattttcaatgttttctatgtggttctggggtcatgtgggaaagaactgagatgtgctgaagaggcaagggaattgcttcctgccccacgacacagagaaacgtgtgtctgctcaatgcctcattcaaggagacgagtggctttctgtgaggagagaaattatcccccttccacagtccatttcatacaggctgcaaacatttagtttcagggacttttattttcaattatgtattacaaaaccctgggcagggcagtcatctcccagttctaggattcaatttctcctgtgaggtatacaaaagaaattggaagagaaataaattggaaaaccacaattggatatcatattcttgttagactgaagaagaaatgccccctaaaactatgtggatatggcagcttttctgtacttaacattactcattaaatcatgtatgtggctatatcaaaatactgtctttcggccaggtgtggtggctcacacctgtaatcccagcactctgggaggcagaggcaggcagatcacctgaggtcaggagtttgaaaccagcctgggca

SEQ ID NO: 340237 - DNA, 1000 bp, Homo Sapiens; identical to SEQ ID NO: 159412

SEQ ID NO: 340238 - DNA, 1000 bp, Homo Sapiens; identical to SEQ ID NO: 336221

SEQ ID NO: 340239 - DNA, 1000 bp, Homo Sapiens
tttttttttttttttttttttttttagcagttaaacttttattttactgtttaaaatttttatttactttttttgtttttcttttctacaaaaggcaggtgatgattgttgatctgcaactattgtgttgtgcactccccgaaagggggcagagtaggaagccagggaaggtgctctgaggatgctttctatggagggaataagggctgcaggacactcactggagggagtgtctgggcccttctcctgtcctcctcagccttccctagctcatgtctatggtgttgaagacccattctgtgaacttcttcagcttgtccgaggcgttctgggactcctcctgtagcctcaggttgtcctctcgcaggtgctgcacctccgcctgaaggtgagctttgtcttctttttccttcttcaaatcttcccgaagcatcttcagcataccttccagctggtccactttagaagccagagtgggagaggagtctttactgctgctgtaaggcttcatctgggccagagcctggtcctccagctgatcactgttggatgcagcactcaaggggcgatggttttcatcactagcagcaaaaaatgaggctctctggacctcataggctttggcagcatctaccaggttggaccaatccaagtctgcagcagtgtcaggcaggggcatcaggccagggtcgggcataggctgcctgcgggtctcctggatgtcagtgagggagctgtccgaggctgagaactctccatgcagcgatttcattcctaaggtgtaagaaggcctcctcaacgggagcgacttggggagagaagggtacgtgctactgaagaggacgtcgttgggcagggcttggtccagaagtgacgccctggaggtgaaaaagtgctccctctggctattgtaaatgctctcgtccgacagtgttctgtgcaaggcccgccgtgaggtgggggtgctggggaaaggagactgaggagaggagagtgcgtg

SEQ ID NO: 340240 - DNA, 1000 bp, Homo Sapiens
ttttttttttttttttttcttcatgaaaactcactttataggatgatttttgaagaaccagtttattaagagattacaccaaaagcataaacaatttatacgtcaaactccgactgaaaaaaaaataaccgataaggatgttttttaaatgtactgtactcacaaataacaagacaaatttgacctgttcaataaatagaaatgaagtggctaaaaatgtttaaatggaaatggaaaacagtcgtcttctttgtacagttttgaaggggtgccccctattcacgcctacacgtagaaaaaccctgacaaaatcagaggttcacttaacactccaaccatatgagcgtattaaggtttcttttcagatcttaggagatcttgtccaccttaatcccattcacagatcttaggagatcttgtccaccttaatcccatcataaagactgttggcatgagttctgatgtactgttttaatatgctgagtactgttgattcaacaacaaaccttaatgggtgatgagcttttgcataccaatatgaatttgtcagcacttctgaaaactggccatcatttttcaaattcacaatttgctggatgtcagggaacaataggaagaagaatgagcgtcaattttcatgtcttcctttgcttcttcactggccttccatagaagtagtcagaaaaaaacaaagcaccatcaaccacacttcacaaacaattcatgttggcctaagctttgctcaacattcatatgacagaagatagaataatgaaaaggaactgctggcatcactttccccataatattacataaaaatggacagcacattaaataaacattctgttattaatcattaaatatattaacaccaaaaatcatgtataaattaggaaataaatgtacaaactattttgcaaagtgctttttaaaatatatacacaacattcaagatattcttaatgtaagacatttcagattgaagttttggggtaagtgt

SEQ ID NO: 340241 - DNA, 1000 bp, Homo Sapiens
cctggctcaagggctttagtcaataagatatgaaaagtatgcccccaaacagacttttcagataggtctgtcgctgtattcctgtattaggaaaacgatcatgtaagtcagctgttaaaaatattctttaacaaattttatattgatatccacacttcagaaaaagaacaggacatttatagctttttcccctgatagctgtgtgtaggaagtgtgccttaagaaaatgaaatgcctgttttgaattttagaattcaaacctagtgctacatagggctcatttttattggaaagatggagtctagctcttggtgactagcattagaataagcagatggattttaataattagtggcgttgggaagttcagtcaattccatttattgaattgatacagaaattaacttaggcacattaagaaattacatgtgttagtacagatttttggcttaaaaaattagtatctttgctttttgatgctggcagtgggtattctcagagttgtgtgtggatttacaagtttatcagcccactcttttcagaaaggtgattgaaatccctgtcatgctacagaaatgaatataaacgatttcaaactagttcttggtttctagatgggtatggtatcatagtcttctttagctttcctttttccagagagattaattatttttctggttcttaatggtcattttcctctaatcttaaaaatagaaaaaaaatggagtgggtagtggtggtgaagaggataaaaccccatcaaaaaacaaaagctctgacactgtgtaaccaagatccgcagcgttgctgtgatgctgttccgttctagccagttggtaaagaaagcacagatgactaacagtctaatcttcaaacctgtgctgattctgaaacacaaatggacaaaaatgaaagaaaatcttgccttctacaggcaattaaaaagggaggtttttgcttttaaatgagaaaggaaaatacctttttggtactactgtca

SEQ ID NO: 340242 - DNA, 1000 bp, Homo Sapiens
agaagtacaaaagagtaacattttatttatttaaaaatcagaagcaaatatggcaaaatagtatgtgaagggtacaagggcatttatattattatttttctgcatatttgaaatatttttaattaaaaagaattttaatgggcacatatggtataacaatcaaataataacattaattacttgcaccacaaaaatgtatcaaataacaacatattatttaagccacagacacttatgtacatacattggagcatgtgataaaagagtcaaaaataaattttaaaatttgcaatttactttggggttttaaattaataattttgctaatctcatgcaattttaaaatgtccttaagctaaaattttaagggctgtaatccttttagttagagttgtcaacgctgtacagatgtggtattctgaatttcagtcttatcttgtaaagctttttctttagtatataaacagttaacaagctttacaattatacttacaagtcttaaagaaatgtattaagagtcctaagtatgaagaacagttatttaattataactacttaattatagtgtttcaccaagaatctgatgccctaatactaatgtggaaaaacaatgctccattattccattttcttttctgcttggggtttgggccagaagccaagatgtaccaatactggaaaggttttaaacagtcttattataaaaccatttttaaaggaaaagtaataactttcacggggagtaacacaatcctttgggattactatgtcagaaagagacatagaaagatagagaatattttaagaaaagggttaacgaggtagtaaaattttgctatctgtacttcacttactgaccctcagaggctcaaggctagaagacaataaatattttacagtaaaatgtaggaggcaaacaaaactgggcaggacactgcatctataaatataattcgagagatctataactcacacatagtacttcactctcaactataat

SEQ ID NO: 340243 - DNA, 1000 bp, Homo Sapiens
tgttattaaaaggaatttaataattttaattaaaaactcttaacagcgaattctgtcacaggccttggcagctggaagcaactccagggacatgtgccccctttgggatgtggctgagccacagttttggacccaaggcccaccggtgccgcgtggcaaggggctacgtggaagttacctcagtacgatatcaaagatctgcgaagattttttttaaaaaagttttaaatatattagactctcttgattgccatttttacacaaagctgctgatacagtatacagagttttaattttttttcacataaaatacatttttttaagtgttctctgtacaccagtggcttctggtctggtgaattattgcggagggctgggggtctgcagacttttcctgggtgtgcagagccaggccccgcacggtggcacttgcaatgcccatgggaagcaggccctctggccaacaagagagacctgttggggagagggctatagcttctggcacagggggtcacttttgcagagtcatccactgaccattggagcctttgctcttatgtgccctggggcaggggagaccatccccaagttacaaatagcaagagttaaatacagcttttctgggcatcttaaaaggagcacccttcttaaaagtaccccagtatcctgctctaggagagagagcaggtaggtgagagagctcaggatgggaaggtatctgacaccaacaaccacaatggtcttatgttattacaaagccagcaaaccggtggggcaggacaggggacacacccttgttagcttttctaagccccttggaaatggattaaacagtgcagagcagttttacttatgctgtatatttgatggagaattctatcctgaagtctttagtagccctgggcctagagtttattcagcttccccaagctacttgccagaaactcacagtctggtgataaccgccaactttcagttgtttggggcatatgatggtgag

SEQ ID NO: 340244 - DNA, 1000 bp, Homo Sapiens
ataaaaaaatagtaaattcctatttaaattcctgtgtttacacagattaaaaatgcttatcaattaactatatgacacagattgtagcatactttaagctgtaatagagaaaggtaacacgggatatttgaaattcaagctgcacttaccaaaatagttttaacctgagtctttgatgtcttcaaaaatgcatttgatgataatatatgcaagaattttttttttagtagtataaggttactttttttgaattgctcttaatactctttcctcttaaatatttgtgtaaaattacaaatatttattacatttcttgggttcactgaacacaaggcagtatatgaattgaaaggctgttactttgttcctgttacacaagcatataaagatgcttagttcaaaatatcttagatttaatattattttcacattttgacttattttagaacaaatataaagggtcaaaatattaccatagatatttgaatattcccatgaaatatgtcacacccactgaggaattaaacaagttcactaaagaatatcaaattaatcatttcctcctataaatattttctttttatttgggtttagaagttgcaattttaggtactattaacagaaaatacataacaaaagcttcctaacaagtgaaaaaaataattataaatgctggaaaaattggcctcattaacatatttacagacttttacttaatacatacgcctttggaaattaattatctgacatttatacaagcatcaaaatttccaaatcactgagtagtgagcacttcagttctttattgtctatacccaaatttgaaagtcatttagtttctgaaagtagaaatgacaagtaacagaaatggtcaatctgagatactattgacacattgttctgttccttcgcctaaaggtgcttctgttgagtaagtgtccttatgctttcttttctctttgctctgatcttcctgtagcttcagaattatgtttcggat

SEQ ID NO: 340245 - DNA, 1000 bp, Homo Sapiens
cacttcagaaagaaacaaggtttatttgatgaatataaataaggcgatcagcacaaagtacttctcatacacatgacaacaaatttatgaactgtacataccttgtacattgttctactagacacgaggttacaatgactggctaatacatgcccactggtagtttccagggttccttagttttatttatttatttttcatatcgatgtccataatcacatggtcaatatcacaacccacatgccactcacttgaagaaatattacaagaagcactatcaaacgagggtctcggggaattagatacactgaccctgggcagcattcaatcgccactctacacaaaaacattgcagatagagcttacgtcaacacatctgaggtctcgtcataaacactgtttaaaaagtaaattgaaacccactttcaaatgaaagttgacacgctgttaacgtgcatactggatacacaaaaatcattaaatacaaaattgagactgtacatcgaaatcaaatggggtataaagcacaagcctgcttttgcacaaagtaagaccaacttctcctaaatgttagcccaaacttcttttttcaactatgttatgattagaagaaaacctgttaaagtttgcgcaaaggaaatagcttcccaacatcacagtgtttgttgtaaacccagagactattcttaatatgtgaaaaagggatatttttggtaacccccaaacatcagagaatattacacgaaatgggaaaggttgttatgttagagagaatttaatttttaagggactaaattatacgacctcataaaggtaagatcagtaatattttaaccaatgaaagttgggcagaaaatgatccctccaaacaagagctgtgacaaaattggcacatacatagaaatagctagctatacatgggttggttttttttttctgtttcaaggaccctattttccctactggatttcctacttcctacttcaagtattcagttgca

SEQ ID NO: 340246 - DNA, 1000 bp, Homo Sapiens; identical to SEQ ID NO: 159414

SEQ ID NO: 340247 - DNA, 1000 bp, Homo Sapiens
ttttttttttttttttttccaggtctactgatatgtttacgaggatgacctacgctctcacaaaatcaaaacgggagagggaccagggggaaaaaaggctgcaaagtatcttggaggattctgtgcaaccctgaagatggcggacactggacccgcagcagtcgatttcacggccagcgcggtcactctcatcttcagcttctagatggtggaggtccggtcaaccccgtctcccagggcgtgttcggtcatactgaggcacaacgactccagcctgttgttgatgtcaggttcggtcacgggaagctggaattctggctgctggaacatcagcatgttctgtggggaagtgtgcacgggcagcgagcgggtcctctggactgagctgtgggtgcggcttggcatgctattgctgcccccggggttggcaaaccacaggttctgtcttccttgtttcatgatggtgggggtagctgtggtgttgcgctggttggagctgacgaatccactggtgcccaagaggcccaggcgggcggaagggacgttccgagaggggatctggtactggcgcgggttccgtctgcccatgccaccgcccacagagccagccgtcgggagggagttggattgcccaaagcctcgatttctttgctgtcgatatcctgatatgtctagaagggttttccgagggaaagaccgaaagagcttctgcacctgctgtttccatgacaacaatctttttttctgtgtctctgtaaatgcctcatgaattagacacttgtctatgagctgtaaataggaacttatattttcctcatcaggtctggagaccaagagctgtgtgcacactttccccatgacgcgtgtgaactgcccggggaggtccccctctggcaggggggcgacggccagctccccatcgcagctgctcagctggtgcggctggagccccccgctggccccggccgagggggtggccgtggcgccagtggctgcggcc

SEQ ID NO: 340248 - DNA, 1000 bp, Homo Sapiens
aattaattagaaagtaggctgggcacggtggctcatgcctataatcccagcacttggggaggccgaggatctcctctctggtggatcacttgagggcaggagttaagagaccatcctggccaacatgatgaaaccctgtctctactaaaaatacaaaaagtagctgggcgtggtggcatactcttacaatcccagctacttgggaggctgaggcaggagaatcacttgaacctaggaagcagaggttgcagtgggccaagatcacaccactatactctagcctgggcgacagaggtggggaaaaaagtaggacccctgtcctatattcaggtttttctcacatatatgaacccatctaaattctacgttgttaaaggtagcttaggttaattagtctatacttatttaagaccaatatggggtgagatggatttttttttaaaaatcctacagtaaggctttctactttccttctaatgaggaaaaaggtgacaaaaattcaagtgtcaatgtccccttcctgggaagaggtttagaaaaacaacagctcaccttctgaactctaccagttccttttgaagttaacgaagcattaaaatcagatgtaaaaaaagaaaaaaaaaggcagggaaatatttacaaaactggacattctttacagatatacaatcttgctaatactgggagaaccatacaaggatgtataaagagagacagtcaccttagtaatgcaaggatagagaaaaccaggatataatatgtgttttttattgccagaacatggtgaaactaggaggagcagagatgacctgatccctgaagtgaactgctcagctactctgtgtacctcaggaggtctgcaagtgtgtggttaggtaaaaactgagctgtgcaaactcactgtatccaagctcttctcatgagagagcggaacaacctggcaagcttaaaggcaagtgttttcgttcttttaattaaataggctgtgacaaaattaaca

SEQ ID NO: 340249 - DNA, 1000 bp, Homo Sapiens
tttttttttttttttttttttggtaataagatttaattttccagtagcctgcatgaattgttccccacataaaactgtacagttagtgactgaattgtatacttaagtcccagtattttacattagtgagactgaaattagaggtaaatttctttaacaagtgtaaggcttacctatttataaagaattattctgttagtgtttaagaaaaacagatctagagacaatccagtaggctgcattgtaaacattatgattataaatctcttagtactgccattattattgacagttttgtaaagacttgtaaaaagtccagtttctcaggaatatgaaaattatcttcagaaacctggttggggcctttctccaattcctccagccagctgaaatactgccaagctcacttcatgtgcaaggtgatctgcactttcttgtgagtctgcttctgcatatactcggacgacatcttctgtaccagagggccggacaaaagctcgagaaagcttgtacttcttcaccaggtcattgattgcctcctgtaatcctgggggtgtaactgcttgtctttcagcatcggtagtgctaataactctcctgtctgcaacctgaactttaagttgtctgtttggaagatctgtatagagagcatcccactgttgtacagtcaagcccttcagagccaagattgcttcaatcaccagcatgtcagaaatagcatcaccagctgcctggttaaacaagtcaataatgttttcaagcatcttagcagcttttcttttcttatcttccagttgttctgctgattgttttatcttcatttcaacagctgtactaaacagtgcagtgccatgcccatttgcttcaaaataaactccaatgtcaaactcttgagccttgtggtgcaaatgttttacaccagtcttagtgcaatagacaggtaccttcataacttcttcaagataccgtgttgaacttccatttgcatatgcagtttgta

SEQ ID NO: 340250 - DNA, 1000 bp, Homo Sapiens
tttttttttttttttttgagagtataaaccaagaaagtaaatttatttaaattactaaaatagcttttaaagtcatttacagatcagctgctataattatttttcctgaaagacataggtaacatattacttttaaattacttgggtcaatgaaacatttaataaaaacatttgtttctctatataatacgtatgtataaaataagccttttcaaaaactctggttttcataatcctctataaatcagatgatctgacttctaagaggaacaaattacagtaaggggtatacatttatgaatactggtagtactagaggaaagacgttaaaccactctactaccacttgtggaactctcaaagggtaaatgacaaagccaatgactgactctaaaaacaatatttacatttaatggtttgtagacaataaaaaaacaaggtggatagatctagaattgtaacattttaagaaaaccatagcatttgacagatgagaaagctcaattatagatgcaaagttataactaaactactatagtagtaaagaaatacatttcacacccttcatataaattcactatcttggcttgaggcactccataaaatgtatcacgtgcatagtaaatctttatatttgctatggcgttgcactagaggacttggactgcaacaagtggatgcgcggaaaatgaaatcttcttcaatagcccaggacagctggttaacaaatggtttgtcaattcctgaaactcatttcttaattcaaaacaaaagcttcagggtgtgtccaaaataaactgttacgaattgacctacttttttttttttgagacggagtttcatttttgttgcccagactggagggcaataagcatggtctcggcttactgcaacctccgcctcccgggttcaagcaattctcctgcctcagcctcccaagtagctgggatttcaggcatgcaccaccacgcccagctaatttttgtatttttagtagaga

SEQ ID NO: 340251 - DNA, 1000 bp, Homo Sapiens
tttttttttttttttttggaggatgtgaattctttattggggagggggctcgaagggctggggcaggctctgggagtggacattccagagacgggcatgacagtacagaagagcatgggctgcgctaccccctcagctgacagggctgtggggcacactgggtcccagggcccagccccaagggtcccccaccagccacacccctctagcgcgcgcgcgcgcgcgcgcgcgcgcacacacacacacacacacacacacacacacacacacacaggcagccagcttcatacactctcaaaaggccaggcctcacccggggagagggcgccagccaggtgagtggtccggggagaattcagctccacctcttcaccccaatcggacacaggctggtggccgctgggtggtgagaaagggctggaaggcgtgccaggggcctggggctccagcaggggctcctccggactgaaggggactccgtgggcctgctcactgcaggggatcccggtgggggcagcctctggggcttggtggtcttgggctggttcctcctcatcaccttcttccacctcgatctcctcctcttcctcatcctcacttatgtcctcccattcttcatcctcttccccctcattctcttccccctcgtcttcaggaggccggtgggcaggagctgggatctcgggtggctgcatgggtgtctccttgggggaagtctcgggggaagtaggctgtggagtctcaggggctggggatgctgccccttcttttgtctcccagcggtcatcatggtcactgtaggccctgggcgctgccttggcctggggccgactgctctttctccttctgcggctgctggcctcagctttgtgctgggacaggaactccccaaaagtagggggcttcgggggccgggcccaggcctggtcatcatagcggtgggatggttcatgggcagggactgggccatccttgaacatcccatcggtcttctcggcat

SEQ ID NO: 340252 - DNA, 1000 bp, Homo Sapiens; identical to SEQ ID NO: 159416

SEQ ID NO: 340253 - DNA, 1000 bp, Homo Sapiens
ttttttttttttttttcacagtaaatattttattttaataatagcatagaattcttctgaagaaaattgttatacattatagctattattttacagtaacagagagaaaataaaattagagatacaaatattaaaggccaattatcaaaatgaaattaacacagattattattcatatgaacaatgtaaacagaatcatctatttgatttaacatcaaatatatttttggcatataattatttttacaatgagaattattaattattcaaccaattcaaatatactcattcagccaaaagaacaaaataagcctcttagaaattcaagatttatagattgatattaaacattttctcaatacatagaatattctgatctccattgagttaaactgtacaaacactcatatctattgttttatagcttataattaggtatagcttgtcaccagaactccttgtccaaaatatcactattaattgtacgaggcaaagtcctataataaaattactgtaataatggccacatcttttcaaaaacagaatatggaagtttccattttcatgactatgaatctggttttccaaaattgggttcccaaatccagtttctaaatgtttcaacagaggtgagaaagtaaaggaaataaatgatttaatggaactctggaaaaaaaactatcatagatcttagtttgaaaaatacatcaaacatgagagataccatgaatgactcagaattatataataatgcctatatcaaactttattagttagctaaagggcaaagagtaagaggcaagttaaaggtaatacttgcttttaacaaagcagactaagtaatatgttaagtgttagggtgggataggaaagaactcaggcatggcaaaagtctcctcttgggctttctatataaacatctattttagttttggactgttcaccgagaggagctctccctatccatgaaatgcttcccagaccaacaggtcttggtcta

SEQ ID NO: 340254 - DNA, 1000 bp, Homo Sapiens
cccccctaaaaaaacaaaaacaaaaaaccaaatcaaaggacaaaagggtttcatacaacacagtatcaaaaagtaaaaggaacacactaaatgcacaagctggtggcaagtaagtccacagcctattgtgataggtccatccagcatcaatcagatttcttctcatctgttatctcaaggttatttacagatgtgttgactaacaagagtctctcatgggaggatgggcaggcttcaatcattggtttcgggatctgtctgcgccatgtaggcatccaactcagcatccaggtgtccttttgttttcgacatatatgcatccaattggttgtccagctgctccttggtcaatacagggcgagcaagggcacctctccctcgtccacggcctcggcctcggcctccaaagccccctcttccccgacctatcataccccgacctctaccaccgattccgccacgacccatagctccacgccctaggccccctctcccaggacctccacgacctcgaacaccacctcttcttaagcccattcggggagctacggctcgtccacctcggagcaggttttgacctcggagtgacatcccgcccctaagtagggttctggtggcacgtcccccacgtagtcctcctctgggcaagcctctctggattatgggtaggcctcgtcctccgattgctcccctggccagggcccctatgggtcggcctaaccgtgcctggatgttactcttacccaggcgctgctttaagctctgcttaagttttaatgctgcctggacagagggtctattctccatctgctgggccagtcttctgtttctggcactggctagctgctgttgttgctgcatcgaagcccgaatattcactggcgtcggctgtttgttcttcagcatattagtaaagcgctcatttagagacatcttggtggtgctttttagcacaactttcggcgctgactgtgcagccatcttcgaatcccgagaatcg

SEQ ID NO: 340255 - DNA, 1000 bp, Homo Sapiens
tttttttttttttttttgacattttaaataaatagtttatttattcaaaatagttttcttaccttattcacagtttcaagtttgaaatgaaaaaaaggggtagtacctgttcttgatcaactgtcatataaagtcaaaagtgaatcctttcagaacatgcattaaatacagcaaattgcacaacagctcgtctttgaaaaatcctgcactgaagcttatgaagaacacaccttttttctggacaatttaaaaggaaacactgtagatgtacaggaggtctccttaacccacttgaacctgtaatgtcatctggataaaagttctcttgaccaaagtaacattttatccaaaataatcatatcttagacccgtgtagcttgacatacttcaaaaatacgtgaaagtgtaactgcatcacagcaggtctgttaataccgaggtactacatacttctcaaagacataaatagtggaagctttaagtttgattctgatgttagcacttcaagtgaagaagccacagaactcaaccgtaatttgtctgtcacttaaaataactctgtgtttccactgatatacctgttttaaatggatatttccctattatttaatgaaacaaagcaccgaatgaacaaaccggctccgtgttgaaggcactgacagcgtgtctgggacacggctctgtgcagtcactgaacggcattgctgctcgctgcactgccggcggcaagctggcccagcaggtggacgataacgttgattctttccagaagagtcgcggttttatttgcagttgctctcaaaagctgggagtaaatgtgcttgttggttttgagaattgtgtcatcttcgatgttattgcttgttttctttttagttgaagatagcagtttaatggactgaaggagaagaaatgacaaccgagactcaaatatactgaggagtttcatcacttcttctcgattgagactaggagaagcatcagcagctgcagcggcgtc

SEQ ID NO: 340256 - DNA, 1000 bp, Homo Sapiens
ttttttttttttttttttaaggtgccgcatgttctttttagtttccatacatcgtctgtcccagagtgaggagaagttgatctccttcccacatccaccacaggctgcgtgagggaagcctggctccccacaacttgctccttctccagccctgcccctctcaattaaaacaatgctttcttttttcttttcttttttttgagacggagtcttgctctgtcacccgggctggagtgcagtggcgcgatcttggctcactgcaagctccgcctcctgggttcacaccattctccagcctcagcctcccaagctgctgggactacaggcgcccaccaccacgccaagctaattttttgtatttttttagtagagacagggtttcactgtgttagccaggatggtctcaatctcccaaccttgtgatccacccacctcggcctcccaaagtgctgggattacaggcgtgagccactgtgcctggactaaaacaatgctttctaaagcgcattctgcagcctgatgtgcctgtgaggtgagaggtgtgggagggacagaagctttgttcaaagaggtttgggagaggctggatacttagctcccttcttgtaagtttgccacacacattggcatattaaaggttctgagaagtcattcaggtcactgatctgtttaggtgtccccaaataacttggccaccaatcatgtctactcctggacattagttcaataaactagtgtatcgcagatgtgctttgcaaaaagcttcatgaaaaagtacacatgtgattccctccagggctttcctcgaggctcctgggtgacctgtctgaccatggctggagaatcagcacagcactcccctagcctcacctcttcccccatttggctgtggaaatggagaaacacagtcacctctgaacttctaaacctagaaacagaaggagactgtacacaggggaatacagaaggcagtctgggatgatgtcactatagaatgact

SEQ ID NO: 340257 - DNA, 1000 bp, Homo Sapiens; identical to SEQ ID NO: 159419

SEQ ID NO: 340258 - DNA, 1000 bp, Homo Sapiens; identical to SEQ ID NO: 159420

SEQ ID NO: 340259 - DNA, 1000 bp, Homo Sapiens; identical to SEQ ID NO: 159421

SEQ ID NO: 340260 - DNA, 1000 bp, Homo Sapiens
ttttttttttttttttttcattagtgaaataagtcagtttattttatttctaacaaggcctttttctcctataattaagacaaaccattttacactttataataacataacttagtttttagtattttcaaaagggaaagattttgggtggggggaatttaggaagtcaaatattttagaaggagtaactatagaagttactttttcaatcttaatatattaacaggcttgttaccaggtacattacccagcattttttcttacaaggaatctatcaagtactagccaacaaatagtctacatttagaaactgagggtagaaatgtctgtattttaataggaaacaagcatctaaaatacaaatcacatgtctttaacaaggcaatttacataattaggtgtaagtttttaattaactttatgttccttaggatcctagcaaacactcagttgactgtatctcaagttcaaactgcactcacctggctataaaggtaaacatcacaatggaattgggcctgtctgactagggaaaaagatcacttcaatattgcacatttcctttctttaaaaacaaggattaagtcagggccatcttggttctgaatctctccatttttgttgggagaagactaaccatctctttactaagttctagctcaacttctatttcctgggcggcctcaggatgcttttcacagtaatcaacaataaatttgtaatgttccaatgatgttgccaaattttccagctctttcttgggatctgcagtaatgattttgccatagagacgggcaactcgaaacttagctaacatggcagggcgaagaacatcttcccctatatgctcagggaatactttatttgggtctctcagggagtctaagaagagctggtagtacttcagtgctgacttattaagattatttattttttttacaatgtgtgaatcaggatcccttagcctgtcagcaatggcaaccttcaaatccatcatatc

SEQ ID NO: 340261 - DNA, 1000 bp, Homo Sapiens
ttttttttttttttttttgcaatgtccacatcttcatatttatttccacagtgttaacatggaatagacttagcaaccattgcagagaaaaaaaaaatctctcattggtttatgagttaaatcctgtaacaatgaatttcaaccattcgaagtcttctgctgcttaacatttactgaatcaaaggctgaagtaaatggactctcatctaggtctcagaaatcacacagctggcctcgtgatgtatttacgatgggatttaacttctaatacaaggcaagtttgacagttacagccaatgaagtgcacgactctgtacatggatttcttgacctaacattcaaaaggacatttcatagtactagtttaattctgatctctctctagaaggcagaaaccacatcccacactcctatgcaatttgttattttggtattgtaaagtaaatgaataagaaggggtggaggcataaagaaaatctagtttctggctgggcagggtggttcacgcttgtaatcccgcactttgggaggccaaggcgggtggatcacgaggtcaggagattgaggatcatcctggccaacatggtgaaaccccgtttctactaaaaatacaaaaattagccgggcttggtgacatgcgcctgtagtcctagctactcgcgaggctgaggcaggggaatcacttgaactgggaggtggaggttgcagtgagccaagatcgcaccattgcactccagcctgggcaacagggtgagactctgtctcaaaaaaataaaataaaataaaataaaaacaaagaaaaaaaaataaaatctttaggcattcccagacacaaagatctcagagacagacaacagagagcctccgtgttcatctgcccgaggctgtttgtcacagttcccttaaaagatgcctggaaatgctcccaacaacaagggactcaagtatggggctgagtttgttaaaaaagcagctaaatgtgtttaggaaacacacgaag

SEQ ID NO: 340262 - DNA, 1000 bp, Homo Sapiens; identical to SEQ ID NO: 157595

SEQ ID NO: 340263 - DNA, 1000 bp, Homo Sapiens
ttttttttttttttttttaaaagatttttttgtaaagaagggttgtatttagaggccagtagctagagatccaaccagtggacctcttgaagcactaccaggccttaaggccaccatccgagggagactgggaaaactattattcacccaagcctccggaaatgtaatgtaccagcaggcaaaaaacagttcttcatgtagtacaaaatgaaacgaaacaaaaacaaaaacagaaagtaaaaatgaaaccaaaacatttcttaaattctagtgccatagcttttttgtttgtttgttttttgttgttgttttgttttgttcataagaaagagagaaagatactacttatccgtcagacacatgcatcctcatgtggtcgttgaactgctcgatttggtcaaactttgctgggcagacggagcagacgtaagtggtcccctccgtgcaggccaccacgcctggggggccagcgcgggcacctgggggtgtgcctgcagggggggtcccattgctggcactgtgcagggccacgtgtcgctccaggagggtcttgtgagagaacttctttttgcagatgtagcactcgtaggacttctctccccggtggaggcgcatgtgcacgttgagggagctcttctgggtgaagcgcttgttgcagatactacactggtatgccctcactcctgtgtgtgtcaccatgtgcttgataaggtaatcctttaaggagaaggagcgccaacagatgctgcattggtggggcttctcacctgtgtgtacgaacatgtgcttgacgtagttctgtttggcggtgaaagtcttgttgcagagagtgcactcataaggctttttttcgccttgcccactggctgtgctgtggcctgcggatgaggccaggggctgtggcgctggcagctgtgcagtaaaggtcgacagaccgggctgggacactgtcacaaactgggtctgctggcctgccaggggctgtggcaggctgaagagg

SEQ ID NO: 340264 - DNA, 1000 bp, Homo Sapiens; identical to SEQ ID NO: 159422

SEQ ID NO: 340265 - DNA, 1000 bp, Homo Sapiens
tttttttttttttttttttgagggttcttaggtttattgagtgatctctgagaaaagggccggccccaggagcaggagggggtggggaggatccagagaagcagaggaccaggaagagagcaccccaccgtgggctcctggaccagagcaactgggggacttacacttgccagcacagcacactcctctggtcttgggcagaaatccagccactgccccatgctgccagacctgatcgcagacagccactgttcccattccttgccagcagcaggacggagagtgctctaccccacctccctagtcattcacaatattccaggggggccagccctcctggatgacctggttgtcagcctcacaccctccttctaggagtgagagcatgagctcactttgcagtgggcactaagcaaagactggggagctgtgccagtcggagtacaccagaaatccggagaaggtgctgtctgtcttgatgctggcatagatgccaatgtagtcacccacacccacctgcacccacacttggtcctcaggctccagcctcaccatggccccccccgagagcgaggctggcttgggccaccccccgaaaaactggaagaaagaggcaatggattcgccattcttcaccagatcaaactgcaggctggcccggtagacggtggcatggacggcgaagtagtagaccccaggcacctggcaggtgaacttgccggtgacggcgtcgtaatgtccctgctcgttcaccagcacgcggtcgaagggcaagggtgcgtcagacggcggaggcacccggctctcggagcgcttggcgctgaaggcggatcgcggaggcaccgagcactccccggcaggcccggtgggccccgcgggtcccgcctctcctcgcggcccggggtcccctcgaggtcccggcagtcccggcctcccgccctcgcctttctctcccggagccccgggcgcgccgtcgcggccgtcgcggccatcgcggccc

SEQ ID NO: 340266 - DNA, 1000 bp, Homo Sapiens
ttttttttttttttttttttttttttttttttttttttgtttggaagcgctatttataactagccagtattccatctggaaggaggtaagaaaacatggtttttttaatacacttaacatgcttacagttttaaagctctgaaaattagctggataataacattgtaaactgttcattttcttagcaaactggaacttaaaagagtaatgattttctatcttcctttttgcttttaaactgaggtgacttttcatctctgaaacttttgagtgttcaccttctcgaagtcaaattgatactatataccattttctggattttttcttcattcttgaggatgttggccttcacagcacagatcttgtcttgctggtctttgatcagctgctccagctccgcgagctcagcctttaagggctccacggcacagtctgtgatcctctgctcctgctgcagggcctcggcgtgctgcctgttctcgctgtgccacatctgcagctcattctgcatggcatccacgtcttcctggatgtagtccatgatcttccccaggggaagtgcgctcttgcacagggtctggatggacgtgcggagcttctctatctccttggaaacgatgtccttctccttcttccatgccgactcaaagagagatcgctccttctccccaggtttgggtgactgctgcaatttctcataatctttcttcgtctccaaaatttttttcacaagtccaccatgcttctcctcttcttctagttccactgctgttaccatttcaatttctgacatttcagagagctgaggggcagcttccaccacaaattgatcatcctcttcattgtcagaattgtgtgactctgtaatcacatttgaaacggttttaccactccctgacctatccatttgtagcgcctccatgctgtcttgccgtttgacccggggaggggctggtcttgcactcccaggccgaggaattcttctgatgttggatgaaag

SEQ ID NO: 340267 - DNA, 1000 bp, Homo Sapiens; identical to SEQ ID NO: 246513

SEQ ID NO: 340268 - DNA, 1000 bp, Homo Sapiens
tttttttttttttttttttttatctcttgtcccatgggcacataatttagaatacatgctctcaaatgacaaaacatcaaaggtgagaggagggaccaacaatgaacatgatcttttttaaaagggggtaacagaaatagtaatcttttataattataaatcctctgcataccataaaatgatttggtttagctttcaaacatcatctaaacaaacaaacaagacagagagggaagttcactgctggggtttgcaaagaagggcatctgttcgtgggcagatgctgcagggtggctgctgaaaagctccttttatgtgcatgatggtggtcttctcggctacagtacaagtgcttgtgcatcaagtataaaatacaagcctttaatcacatagatcagctttttagcttttgtaaatttaaaaacaaaaaggataaataaggcactgtacttttaaaaacgaaaactgcttggttccaagtttaaaacccaaggaacaaccagaatataatatataacttcccttagcctcagagaaggactctgcaagttcccttctccatctgagatgcattttctgacatctcaaattacggtgttctccattaactgtaaatttgaaaggcttgataagcttataaaagcagatttagttaatgcaaaataaaaggttacttctatagaacagttttactcttggctaccatctttccaatcactttgcatccagccgcctccgtttgctgtgcgaacagtccagctttgccttcagctttcgctttctctgagctgcactgctctctggggttttcgttgagggtctggcccgagtctttccactactctgcttcctattcgtggctttctgaggccttgaagaggattcaccggcccccttctgttttgcaggtttcgtcagtgtttccgaggcaatagactgggaaggccttttgtttgtattctctttttctttcctggagggagggcagctcttcccagcg

SEQ ID NO: 340269 - DNA, 1000 bp, Homo Sapiens; identical to SEQ ID NO: 159424

SEQ ID NO: 340270 - DNA, 1000 bp, Homo Sapiens
ttttttttttttttttttttttttttttttttttttttttttttttttttttttttttttttttttttgtataaagaggactttattttcccagagttctggaggctgggaagttcaacatcaaaacatcagtaggtgcagttgtctgttgagggctcatgtctgtttccaagatgatgccttcatgctgcatcttttggaagggaggagcattgtgtcctcacagagcagaaaatagaagggccacaggacaaactccctctatcaagccttttcataagggcacctgatcccattcgcaaagctctatcttcgtgacttgacttaatcacttcccaaaggtcccacctcctaatacttacactgtttcaacagtaaacagtttatgtagagtttcaacataaattaaggaggggacaaaacatccaaaccaaggaaggctgggagggaagccagagggaaagtgcaagaggaggtttggtggaggtgtcctagattgtttgcagtccaaggaggttggggagagtgtaacaggcctgccttggtatccctgctctgcagtcactggctaagagcagtccttagaaagcacagcctggcacaaatacaacaagaatatgtgctcagtaggaaagagaccacatttccccaatagcccaggtaatgccctcccctcaactggcatctctgttccctaaacattgacctcttttctctgaatctcttggggacacatgggttgaattcaggttctctgtagccctctggattctgtctgcctctgttatatcttcacgaacaagttatgcagcctcaactaaagcttgtaacaaagcaaagttactctcctgagtgtgtcctctgatggatggtgagatataacttcaagatgaagcctcacccacactccctgtacaaaaacgcttctcacgtaagtgtctctttaagtgcttactgtagtatgacttattgctaaactttcgtccacactcttggcatt

SEQ ID NO: 340271 - DNA, 1000 bp, Homo Sapiens; identical to SEQ ID NO: 159426

SEQ ID NO: 340272 - DNA, 1000 bp, Homo Sapiens
gcagtggtgtgatctcggctcactgcaagctccgcctcccaggttcacgccattctcctgcttcagcctcccgagtagctgggactacaggtgaccgccaccacgcctggctaatttttttgtatttttagtagagacggggtttcactgtgttagccaggatggtctcaatctcctgaccttgtgatccaccagcctcggcctcccaaagtgctgggactacaggcatgagccaccgtgcccagaatgttctgtttttgtttgtttgtttgtttgttttttgagacagggtctcgctctgtcactcaggctggagtgcagtggtgcaatcacggctcactgcagccttgacctcccaggctcacatgatcctcccacgacagcctctggagtgtcccctccactttctttcttaggggcccctcagggacatgtcagaggcctgagactacttgggggatgtctatgggccaggcaggctgccagcagctgagctgtccttgccctggggctcctctgcagtcagggagacaccaggcatgggcctggcttggatgcatcagtacttgactgcaaagacttaaaccacagacaggaaaggcgctgctgcagtctcgacggtcaaatgcagggccccctcagctgccatcccactgaggggcgaaggcccatcatctcccttcggctcggtaactgcctggcgtagcacaagggttctctttaaatccccagcaaatggagctgagtggaaattccgccccatattaccaggcacacgtctccttccactcctcactataccctgcccatgccacggccgccttctgagaataacgctgacagttccatggcccacagcccctctagttaacttgctgtgcacacggcagcccagccagaaacacgcagccaggtcggatattgggtgcattcagtcgtgaagcctgaggcttcctggctcccactgagcacagagaagtgttctgaaggacaggaagca

SEQ ID NO: 340273 - DNA, 1000 bp, Homo Sapiens; identical to SEQ ID NO: 159428

SEQ ID NO: 340274 - DNA, 1000 bp, Homo Sapiens
ttttttgaggctttagaaatttattacaaggccctcatagtagaaataaaaatatagatatctatgcttcccatctcgctctcagtggttcgaataacaagtgcaagtaacaaaatagattgtctcttattaattcgcaaactgggagttcatgggtacagagcaacttcagccccagctcccaagtcccaaagtgtggtcttgtcgagggtgcagacaaggaccaaccaagtttcaaccaagtctctcgtatgcagacgctcagctccagtctcaaggagggtggggcttgcagtcagtctcactccacccccgagtggacagtctggaccctccgtgatggggaaggcggcagcggcccctcactcccttctcctctctctctttctcttcagtctccaacgacctgcccccgatggtcctcgtgggttgggttgttttgggggggttgtgctgggggggagggggttcaaatatttattgtattttttgtttgttggcagcaactcaacagattctgctgctgggaagggcctcagcgttcctgaagagagatgtaggggacccactggttgttgccccggctttcttcgcagtagctggccacctccaccaagccgtggctcttccaggcgtccgtgtgagggttctgtaggaagggaagacagtggaggtctcgggcctcggtggtgccctgggtctcggccggctctcccaggagctgcgccaggcgcgcattgcccgacacccgcacgatgttgatgtcgttgtcacagcagaaggactggatgagcgtgaagtggatttgcagggcgatgtcatcctcctcctcctcgtcaatggccaagaggcagaggaccacgctgtctgggtccacattcatcaacttggccgactcgtacacccccactgtgaggcgatcctggcgctgagcggccaccaaaagctcctccaccgcggcggtcaccgtctgcatcttctgcgccgcgttgtcgcacgc

SEQ ID NO: 340275 - DNA, 1000 bp, Homo Sapiens
tttttttttttttttttaacatttaaaaattttatttagagacaagtctaccatgtcaccgtaagtttatgctactgctggaaatgaacaaatgtagccccataaggaagaaaagttgagagatgccatatgtttaaagacatggtagtcagacttctttgtaatcacatttctatgataaatgcatagtataatttttgaaggtataaagacaatttctaaggatttatattctagttaatacctacaactctaaacattacttaatacctcatttaagctgatttctttttctctagtcactttgcaaatggaaatgtaagaattgaaatttgtggctctaccctcaagattctcaaattaaaacacagctaccatatacatggccagatcaaatgcttagcgatgtttgaagtgttcacaagagaactatgagcgtataaactgtatgatattctatgacacagtaagtgtgataaagttagtacaaagtatttaaagatatgtcagtcagctctttttatatagaaaaacaaaatcttttacatacggaatggaaattttgtagaacagaagttttttaaaatttatattaaacattgcttaactagtaaatcctgtcagtgtagaaataatttttttgtaattctcaaagaagaaaatagtatacgctttaattcatggttacgtagttggctggaaaaatgccagtttgacctcgaagttttccttcccaccaatcaaaatgtgaatctgtttttgatataactgtgattctgtctccagcttgaaaattcaaatccccaggctgctgtccttcaaatgaatacagcgctgtcacttctatgggttgattcaaattgccaactctctcatgatagctggaaagtccaggatagagcttatattcatttctgttgctttgagagccagagttcagctggactggtgcagatgactgctgtggtcttgacaatggctttggaggtaattctttagc

SEQ ID NO: 340276 - DNA, 1000 bp, Homo Sapiens
tttttttttttttttttttttgaattctttgcatattttatttttctttttttgatttccaactcacacacatctggcatattttacatctttgcaataaaacatggttacaatagcttaaggaatttatatatccaaaatatttcaccatgatctcaagatgaaatgaacttgtcttccagatgttaagtatcctcccaattctaagctacaaactcaagatattgcttacagcctggtgatgaataacttaatcattacgctgattccccataatttcagaatttcataaatacaaacaacagtgaagaaggaattcagtgctaaaacttactagtacaaggtggataacaaataagtaatcacatcaataaataatgatatgtttctggtgcaaagtgccaatacaaagaacccattatcttgttttatctttttaaataaatgactgcgagtgagtgtaaattctgagaaaattacattcctgtaacatgcctcatagccctaccgacacaatatgtacatctatgacgatacagtcaccaaatatacaaagaagaaacatgaagaaagtgtatatacccctgggtgtataacttgatcagtacaatgtatggaaaatcatttgatagccatcattttatatcataaaagatgaaatgccttaggctaagaatgtggctttcagtgagaatttcacgagaacctaaaagaataacttcagttattgttgtaataaagtttgacttgttattaaagaaactaagctattcaagaaccaaagagaaaaaaaaagttagcatcagattatcctcccctaatgtatacacaccaagccagtgggataactctggaagagatgtccaggtgctgggaagttattactacagaactaacgcccatgactcctatttatacaagaaaaaccaggacctcatccctaagccccctttctgctgtgtcttcaaattatgcagggtagggctgaattttctttgta

SEQ ID NO: 340277 - DNA, 1000 bp, Homo Sapiens
aatttttaattttcgtgggcacatagtttattgagaatttttttttttttgagatggcaggggtctcatatgttccccagactagagtgcagtggctattcacaggcgccgtctagcgcactacaaccttaaactcctgggctcaagcaattctcctgcctcagccttgggagtagctgggattacaagtgcccgccaccacgcctggtctgccaatactttctatcagtctgtcatgtttactgtcttttcctccatacagaagtttttccttctcagttgggtcaagtccattgacctttctgttacagcttgagttttgtgtcttacgtagaaaaggtgcccctgctctcactttctgcacagctatcaggtccagctcatagcagttcttctatttatccatccactgccccaggagctgcctgggcattcactgccccgcacccctctccagccccaaggtagagctcgggccctgggagtcccaggaccatcccggactggggagctgcttggtgtccagccccgggctcaagctcttctccagctctgcagctacctgaggggtagcagcccggatagcatcctggatgttggttaggtcccactgggtcctcaggagggcactgtctagcgtgaagaagccgtcgcgcgtgcgccgcacttgggtgcagacagcagtggtctttagttccaggccgatttcatgaaccaacttccgcagctctttctgcgtctcatgcatgcactgcacctctaagaggaattccggaggtgcaaagtagaggcatcggatgccagttatcagcatcggggacttgttcatgggccggatcaggcctctcacggccatctcataggcctcctgggtcttcaggtcgaggttggagtacatcaccagggccttctgatgggagccttggataacggccagaatgcggtccagcttctctctggtcacgtggtcataggttgtcttctctaccagcctcccgtc

SEQ ID NO: 340278 - DNA, 945 bp, Homo Sapiens; identical to SEQ ID NO: 159430

SEQ ID NO: 340279 - DNA, 1000 bp, Homo Sapiens; identical to SEQ ID NO: 159432

SEQ ID NO: 340280 - DNA, 1000 bp, Homo Sapiens
tttttttttttttttttttttttttttttttttatcatcaagtcttaccatttatttctttatggggttaaacaagagcagagaggcctctgccccacaatgcaacaaaacagaaagcagtacatatacagagactctcaccgaaacacagaggcagggtaagagggagggcagagacaactgaatcatagctgggtaagggaggaagggatgggggactactaggaaaccagtttggagactcagtcataggaactagtgcaagaaagtcctactcatgaagcacagtgtagaaaatggcataagaaagctgcccggctctgctgtctgtgatggagggcaggggcagccggagaggtggtggaagattagggtggtggggtggatgggggcagtcaaatgactttgaggtggagtgaggtgcccctttcccctgccactgggcaaggccttgggctggtctgagccaggggtctcctgggcacttggtgagggggaagagaggatgggagtctccaagggtccattccctggggccatatggtttccctttacttcccagtcccttttccccttctgaggatgcaggagttagaaggcagtacctagggtctctctggagcccaagcacctgcccctttacttatacataagcatgtctggaaaggagccagcacctcttcccctccccagctgaaaagagcactctagggatggggtatgtgaccaggcccaaagtgctgagggccaaacgggagtgtgtaggcagggcacaggggtagggttgggggataggctgtaataaatgagaaaactggcagggaaggactccccagtctcatgtaatcagtctgggacctagccgaggcccatgaatgattccttctccattcatccctaagctgaccaaggccagctctcccttccccatccgcttcttggtttcactctcacgcagctccaggcccgccctcccattcactcactagcatcacatccc

SEQ ID NO: 340281 - DNA, 1000 bp, Homo Sapiens
tttttttttaggattccatatttcatttccattttattacatgttcacattatttcctgaaatcatcttagaaccttttgtttttgcaaaattttagaggtccaggccctgtgatagctatgtgatgttttttccagcacataaagcaaattcatgatgtgaaagaggcaaatgacaatagttaaagtatgtcttattttgtaataggatttttttaataaaaaattattgtggaacaaggtacattaaatttggcttgcaattaggaaatatgggagccggacttgaagagcgtgtgattgagtccccacatctaactgatgaggaaacaggctcagatgggtctattgatgggtccacttgctagaagcaaaactggaactagaaaccacgccctggcttctaggcagcaagcaatagttttgctaattttgttccccagcatcaaaacaaatgcacaaaatgggaaagacaaatggttattagttggttattttataaacacaatatttaaaacttaaattagtacatgtaaagaactggcacaaacagatgaaggttcactttcacggcagcagtagcatctgcacaacatacccccttagccactgccctcagcccttcccccctccgagagaggtggtgctgctggctgcagatttcttcagctctattttcatagactgagtctcagctcgaggctcgaatttggtcagatttcctgctcctggggctgccactactggctttcctgctttcataccttttgacataggaatgcgggtgggtgtaggccgctgggatgacccgtcttgtcctgacactgactgggttcctcgagcagatgacgttgtgaccggtgttatggtgatagtgctcgtcactttgcttgcaccaggccgtgaggagaggtgattcctgggagagcgaaggacagtgccggtggaaacctccttttcggctgtcacgtttactggtcggacagtaataactggactga

SEQ ID NO: 340282 - DNA, 1000 bp, Homo Sapiens
catttttcttacttttaatatctaagataaaaaaaaaaaaacccaaccaccaaaacaacccatttgcatgtcggcgacacgcctggtctcgggctccctttctggggctgtcctcccaggcggctcccaggtcctcatccagggaagagcccagcctcggccagaagccaccgcggcctccagttccgcaccgtgacaacctgggacccagcctttcagaaaggccaccaggaactgtttttaaagaatagggctgcactaggaggaagttttcccttgaggctgagagttatttcttgtggagaaatttcattttattgcctagtcccttcaggaacttattgacaccgctgtgctctccactggggagtgtttccagatactcttgggctcggacctcaaacagacctttggcatcctgccggcgcagctcccgctcctggatgaagccccgaaacatctgagtctccatgaagacctccaggaagtggcggaggctcttggaggagacagctttgcggaaggcctcccgctgcagggttctctcctcacgctcgcccgacgtcaggaacaaagagtagtgtcccacaatctccacgaagaagcggacaaaggcttcagacaccacctcgttcaaggggctggactctggaccgtgcctgccgtctaggggcccttcgtcctgctcacaagccagctcgttcctctgttccagaatgtgttccaggaccacctgaagcttccggggcaggatggagtcctcatcgtccatctgtctgaggaaccggctgttgacgaggtcaaccacaaggacctcttccagcggcagctccctgagcagtggcagcgagctggagagcagcccgatgaggaagggcgtcggcgagcacacgatgtcgaccatggcgggtggcagcaccgggatgtaggtgtgctgccaggcgaaggggtagatcagcgccaccatcgcgtggcagcacttggacaggatgctgagctt

SEQ ID NO: 340283 - DNA, 1000 bp, Homo Sapiens; identical to SEQ ID NO: 159433

SEQ ID NO: 340284 - DNA, 1000 bp, Homo Sapiens; identical to SEQ ID NO: 159434

SEQ ID NO: 340285 - DNA, 1000 bp, Homo Sapiens
atttttcaagaataaacatttcctatattaatctgatataaaaaacacttcacattatttcaaactagtcaataaattaacattatataccaaaatagcaataagttaacaatcccttctttcacattttaatcaagtatattctcaaaagtcttacaatattacattaagatttaatgtatcaaatccaacagcatttcatctcaatatttaacaatattatgttcaatattgaatagtaaaaagaagctaaactttatctctttgtgtattgatttcagcaattctgacagtgtttgatcctccatgcacgtgtttctacgcatcaagaaagcacagctacaaggttaacccaaagaacaatttaaaagctatttcaatggcaatttctgtgactgagtcatgaaaacagacataaagttcttgaggttttggatgaagaaaaagtctccctactacccagtaagccataactggtggtgcttttttctgatcagtccagtttccaggtgaacattcaaacaacacaccatgttctttaacagggttaagagaagacactgactttgcagaatctgaatggtctccactatttagtcctttctttttctcttccaccaatgtctgttggaaaactgcacgaatggaaagacaacactgatggaaattctttattagctgagggtggatagagccacttagctgtgccacctcttcaagggtaggagtaataaagattccttgcactgtttctaaggcaacgtagtggaaaagtgtgttctcaggaccagatgtcagtttcactgtgttatatatttctaattctttttctggaaggtcctttttcaagtttcccaaatgaaatggatttggaagagtagacttctttttagtgaccttaagcaaggtcccactttcttctaaaccatcagagccctgagattctctttgcttccgtactgcatccggtgtagtatgggggctaaagccatcatcttct

SEQ ID NO: 340286 - DNA, 1000 bp, Homo Sapiens
gcccattagaacatttatttctcagagagaaaataagtttcagacagtcatattatagtaggtaaaattaacttttgtattctttacaagcatagatttttctctgtttattacctctcttataccatctgttataaacaattctagaaagcaaataaagtcactctctacaataaatagagcatcatgtgcttcacagcagacgcgacagagacacataggccccgtgccacagcaggatctgagccgtttcccgttctaaaagagcattttaaaaaatgagactcagagagagactaaaatattcagagattgaaaaataaagagagagactaagaagagaaagtgttggggggaagagatagacatagaaagagaggaagtcccaagatcttacaacacaggtttagacaaaggtcacagagtccacagctgaccaactacctggggagaggggaagcactggctcctttaaatcaacgacactgtgtggccacacaatggaggactccagtaatggaaactataggcctgaataatttagaacagtattttacaattatatacaccatgtccttccctagccatatgctgtattgtttttattattatacaaaatccaaaaccccatccttttaagttatagtgttttgttggttcccttttaaactctggctcatgtcccaaatgtataagaagttgtggtggttggttggttgtatttttaaaaagtcaagtgtgtaaaaatggcagtgatctccccagtgactgttttgtccaaaactcccctatgaaaaatttaaaacaattaaaaagaatatcaggttaaaaatcaacatggcaatcagcggcctgcaactggccctgcgactttggtgctcaggaggtgaaaagaaatgtccagagaacagacactgaagcctctgaaagttgtgttggtttgtcagtcagcattccccattcacagtttttttttccttccatttttgagaaggtgaag

SEQ ID NO: 340287 - DNA, 1000 bp, Homo Sapiens; identical to SEQ ID NO: 159435

SEQ ID NO: 340288 - DNA, 1000 bp, Homo Sapiens; identical to SEQ ID NO: 159436
  misc_feature (45)..(45): n is a, c, g, or t

SEQ ID NO: 340289 - DNA, 1000 bp, Homo Sapiens
tttgcttgtggacattttattcactttaaaataaatattgtgctgtaaactgttcagaagtgaaatccatattacagtaggcaagtacaagggatagacagcacagtgttttgttagagtaaaccattctgagtctcagaagcatcaccaactgtctacatcagatagatactctgagagtaaacatactcataagaagaaaaaagtaatagataaaagttctgagagagaagcaacctattataaataagagtttcttgagattaacaagggtgaggacaactcccatgtgagcctctaccatgtgcccagtttctagtttaactacttgcagagagcagttgctatataaaaatctgttgaaaggatttcaggtactagaatttacatattttacatggtctctcatttacacctatcaatttctttcttcatgatctttacttcattagctacttacatatactataatttacataataaatctattatttaaaaactttcaataggtacaacaattatgacatttgattaggctggactctaacttgcttggatgagatttattttggaatcacagtatccaagcaaagaaaaacagtcagtttataagacacaacaaaaatgaaaaaaagcgagacaaatgtctgcctcagaagtttatcaataacctcttatatacacatatgtattcacaaagtggttgagagtcattttataccatcctttagaagaggtccaatggctgagaactctataatgagacacagtgggacagaaattatcatgactttcaatgatcttttctttcccctaactttaatatcctttagttggggagagaaagaagtccattttcatctgctgtatctaagattttacagatcactggagattcaaccccaagaatatattgacaggagtgaggctctagcatatatacagtaacagcatgaggtgaatctgattctttgcactttagttttacagtcacctgtct

SEQ ID NO: 340290 - DNA, 745 bp, Homo Sapiens
agcattgtctacatgcggcctgacggtctccttccctgggaaatttaaaaagccgtcccctggttgttagctctgatgtaaaattataaaatagaaatctggtagggtttgttttgtttaaaaaggaaaagccctggtgaggcagggcggtcccaggcagtcctgttagctctggccgttgggtctgcccacggagctccctcctggaggctggatctgaatggagtccaggaggggccgaagtgcctgtccaaagggcgtggagagaacttcagagggcaggtctgtgatgtaagaaggaatcttccgcccagtcaggaactgtgccacttcgttgctgaaggtgttacaattgtgttcaaagaggttgtaggcctcacctcggaacagggactcccccagggaggagaggtactccagaaagatttcttctgtgacttctgtactccccacatcaaccacagagtctggaggcccaagcaatgtccctcccggggggcagctggagataccaccactgccgaagaagaactcatccttgtgcacaactatggatgtgtgccagatgccttccagttgtttccccagcatgatggggctgagccgccgggccaggcctttggacaggtcgtacacgtagagcttcaccggatagagattcggcggctccattgggacccgtggcgacggcggccacgacggccctcgggcacccggcagcggcttggaccttcccgtacccgac

SEQ ID NO: 340291 - DNA, 1000 bp, Homo Sapiens; identical to SEQ ID NO: 159438

SEQ ID NO: 340292 - DNA, 1000 bp, Homo Sapiens
attctcctttaaaaaaatcgttatacacaataaatacagtacaaaaaaatttatcttacagtactagttttgtctccgagatttcaaaatctggcgcgggcggctggaggcaggaagaacagagggaagactagctggggagaggttcgggggagaggaagaccccagtttcttgttttgctcagatttcaaagtcgaggggtgggcgttcgaaatctctcactcacttgtgcacacacacacacacaggtcacggagctggacgtgcggatgtcacacgggtgcctgcgggcacagcacgctgggaggctggctcccccaccccctctccggttttgtttgacagcctgttgggggcggcggggagaggctgagactgtctggaaggaccctgccagctcccagcaccctccaccatctgagaagccacacagacaagacaggcacccggagcgttggcatcaacccggtggccccatccctggcaaacacatgcgcgtgtcccccggacagaggggcagagtgtgccaggaaatgggaagaaacaggaactgacacagcactttgcccctcctttggcaggggagacgttttacatcacagccccctccctaaatccacgcccaccccccagcaacccagctgaagcaggcggcagggaaggaggcctttgtgactcaaataacttaggcaagaaaaaccgtcaggggatccccggctcgagtccccaggaggctgagggcggacacccgactgtcccggcgtcttcgggaggaggggacggggaaggggaggcggcccggtgttatctggtcaacgtcctggcgccgaggccaccgttgtgactggagggtgggtaggcctcgggcctgtgcaggggcggcggggatgcgggggtgccggccgaggcagcgtgggggtacgagggcgcgggcgtccggccgggggcctgctgcaggttcaggatgctgtcgatggcgctctgcaggtgctcggtgag

SEQ ID NO: 340293 - DNA, 1000 bp, Homo Sapiens; identical to SEQ ID NO: 159439

SEQ ID NO: 340294 - DNA, 1000 bp, Homo Sapiens
ttttttttttttttttttttttttttcacagttcatcagtttattctcagatttgagatgcaaattatgccctatggcctggcggtggggggccgggcttgggctggaatctctcatcatatcccagccttccctaaggaggaagcagatgaaatctacaacaggggggactttcccttttaatacagacccaggtataaatagggcagcaccattaggatcctgattcacccccccaacatcttggtccccaaaccacctggcatggcaaggtgagcctggggaggtgaggggcagggggaggggatttgcagagctgggctgaggcaggaaaagaaacacaacccagtcaagggaagtccctcttccctctgtagtccgacctcagtcctttcaccgtggaagtagaaaggatcaaagggggtgggggtaggggtcccagcctgggatcaggagacatccagtgcttaactctggggaggggtagcaccaaaaggtgtgaagggcagcgacggaggagtgaggaggcaggcattgggggtgggggggcttttgttcatcagctctgagttagaagctcattgcatgggggttcaaggggtggggaggtgaggcttgggtggggagggaggggagaaagagccagactgcagtatgccacctggaatggggtgagaggaggctggacccttgggccagggaaccccagcccccagcaccctggaaaggagaaggaatgactgaccgtgatgagcgaagtcacatcccattggctccatagtcacaggtaacgaaaaatacggtggcttcaaagcctcagcaccaaatgcaccccattctggggctccctcacggtccctcccaccccggacactctcagctgctgaagcagacggggcccagttcaaacccaaacttttggttcgtctggccaaagtcagtggccgccacatcccacaggggcagaaatcccgctcgagaagagctgaattcgaaaagg

SEQ ID NO: 340295 - DNA, 1000 bp, Homo Sapiens; identical to SEQ ID NO: 159442

SEQ ID NO: 340296 - DNA, 1000 bp, Homo Sapiens
tttttttttttttttttttttttttgagatgcgaaagaggagaatttttatgatagtttgtacgttacaaatacccaagaaactattttctttacaccattattgccatgactttttgtggacagtttcacataactgtaaagtccaggctgctcgggtctgacccctacagacctgccatgttgaagcccagctttttcgctcccgcacaggtaagaagctgctgatcttctgcagacccgccatgttggggcccagctccccacgccaagtcagaagctgctcatcttctgcaacagggtttggcgccgttcttcagggccaatgccctcagcaatggactttaagaagcgctgctcgtgtgccctctggagcaaggagctgacagaagggttggtcttgctcaaagtctcatagcaggtgagggtttccaaggctaaaacgtagagtggctcacagacctccgggtggagcatggccatgatgtgcagagcatggcagaacacctgggtgtaaacaaacagggcttcctgggtcaggtcctgctctggtccttgaacccaagggccagctgcctgtatcgccctgactgagtccaggaggcgggtcagactgccacagaggagtttgaccacgtggttccagccttccagaggaagccaattacgacagctatggctgcagagaaactggaaagtcctcaggaagaggacggagagttgcaactcctgggcaaagggcttcaggttgagcaggggaacaaactgaatatattccaggctataagggacatggaggagctgcttctccagcagtctcctggtcagctggtgaaggcgctgccactcctgagggctgcaccaaggcatgacttgcaccagggccaccagaaagcctttgctgaacagtctgacctcctcaggattgcccacgtccaccaccaagagagacagcatcctctccgagatgccgctggagacgcagcagcactccatccagg

SEQ ID NO: 340297 - DNA, 1000 bp, Homo Sapiens; identical to SEQ ID NO: 159443

SEQ ID NO: 340298 - DNA, 1000 bp, Homo Sapiens
tttttagcagtcgggagaagaaaagctttactgggagaaaatacaacaaattccagagtgcatggtttttagcccaccctatcaccccaccagcaataggaacacagaccactcgatcaccacacattccctacctcagggagtaagtacagcagccaacatctggtctcagagctgctgggaaaaggggcaggaggaagaagtatctgggaataccattctctcactcttttcccctccttcctggcctgatttagaagaatctgactgtcccaggatacagaattcttggttggatcttgtggaactgggggcaaaaaaatagcagcaaaagcacttaagggcaagaattcagctgggactttcagactcagtgaccagtgataagacaagtgcccaagctccagccactgtaatcagtccttagattaatgacttattcctcaatcctaaaatatcaagaggtggacaaggtttaagtcaaacccaggaagtctttcccttcactcttctataaagaagggaactggcatgaagttggatggcttaatgatcaagcagctaaaggtaagagagacagagtgagagagtgtgtatgtatgtgtgtggtgtgtgtgtacatgtcttctgtcacaaagtaccacaatagtctgcagtggtggcaccaccctaaagtagttaagttttaaagacaggccagcctctggttagaagagccatccttggaaccccctacaagacttaaggagaggtaggagatctgaggcagagctgagaggaatttcctgtttttcccaacccctacaccaaagcagggaaccaggaagggcagaaatgaggatccttccattctcaagcctcctaaaacctaaagggtaagtcccaatctctagtgaccatacacagaggtaaactgaccccaggtgtcacttccacaccattactcttgttcactcttaagtccctttattgcattcagagaatatataggtatttaaac

SEQ ID NO: 340299 - DNA, 1000 bp, Homo Sapiens
ggcctgtaacagtttatttgcagccagagggcgaaggcacgcggggaggagctcagcctgaagacatgccagaggaccgggagccccgggggacgtcggggtggggtggggatgggcagagtctggggctcgtctgtgttatagcccagccctgaaataaatagtatatacagctagggggccgggcggagcggaggacatgggggtcccgccggggtcacaggtctgagcagcgatcctgcttgctgtagtggtcgaactggttcttccagtgcaccatgtaggagctccagcggtggaactcggccttccactggcgctccgcctcgtcgagcgtgtctgcggccagggcgcccagcgaggcgggaggggaggacggcacgaggaaggtcggggatcggacatttgggcgggttgaagggggggtttcagtgcagggaggacgcacggagaaatgcaggcgaccacgtgggacggtggcaagaggatcaggagaatgtgcgaaagacgagagggaggatgagggcagaggcggggccggagaaggacagcaggaaggagagaggaggagaaaagaatgaccggaagacgggaacagaggggacaggagggggaggttgggggaaaaagaagagacagaaatggttgaccgttatagccccaatggggggtgctaccccgtccggggcctcccacttccccccaatgtcaggctcaggttccaaaagataattttataaaagaatactggcttttccatttccattcaaacaacaaaggcgtgggggtccctgagaagggtgggaggcacggccccctcctcctgccctgtccagtgtgagtctctcggtttgaggaggaagggagcactaggtctgagatccctgagtggggcccttccccacggtccgaccactcattagaggaggggcccctgtggccgtaggggaagaggccgtgttcacagccgccggaggtgggagaggaagaggaggagaag

SEQ ID NO: 340300 - DNA, 1000 bp, Homo Sapiens; identical to SEQ ID NO: 159444

SEQ ID NO: 340301 - DNA, 1000 bp, Homo Sapiens; identical to SEQ ID NO: 336277

SEQ ID NO: 340302 - DNA, 1000 bp, Homo Sapiens; identical to SEQ ID NO: 157622

SEQ ID NO: 340303 - DNA, 1000 bp, Homo Sapiens; identical to SEQ ID NO: 159446

SEQ ID NO: 340304 - DNA, 1000 bp, Homo Sapiens; identical to SEQ ID NO: 159447

SEQ ID NO: 340305 - DNA, 1000 bp, Homo Sapiens
ttttttttttttttttttttgtttcaagtttttattttttgttagcatttaaaaaatgcatttaaaaatctttatatccaaaaaagaagtacaaccatggataaaatggcacaatatctgggactggttgcagaagaatccagagggaagtcagcaggttgaagaataggaaacaagattggccatgagttgatcactgaggaggttgagggatgggcacactgggatccattagaggatcttctctacttttttagaatatcatccaaattcatgacttcttggttcagatcctgaaactctttatactgctctttatgtggttctaatgcaagtaaaagcccattaaaagcatcctctaagcttccatctagaaaggatctgcagccttcagattctccaccaacagaaccctcagagagcagcctgtctgtggccattggcacctctgcagatgtgagcctcttgaccagctgctttgtgatgtttccttccgaagtgtccagttccacaggcttgagctcagaggcctcctcagactcttgcagaagtgcttctgcaacatcattctcaaggaacaggtgctcagccccagcacctgaggactgtcggcggcaagcctcagatggggccgaggcaggttttctgggctcctctgggtcttcctccttcaggtgtgactttggctcttggccttctcccagggagttcctggaagatgctgagctggtgtcatccataccctcattctgggaggccaagctgctgaggttaaactccgcaggggtgatggtaatttctggatttgttgagttggaaggggagcctgttgagtgggaggtgagggcgcagtccccgttgggcaggtcactgaagctgagcgacagtggcattttctcctcggctgcctttccattttcaaagatgtcatcaggtagatttgaaaagaaggagtggtctttgaaggtgggcgtttccggggtaccctggctgtacatgg

SEQ ID NO: 340306 - DNA, 1000 bp, Homo Sapiens
attcagtttcactcttgtcacccaggttggagtgcagtggtgcaatcttagctcactgcagcctcctcctcctgggctcaagtcattttcccacctcagcctcccaagtagctggaactacaggcacccaccaccatgcctggctaatttttgtattttttgtagatacagggtttcaccatgctgcccaggctggtcttgaactcctgggttcaagcaatctgcccgcctgggctccccaaagtgctgggattacaggcgtgagcaccacactcagccctttatttctttttggtggttcaaatgccattgatttctgagagagaatattgtgagtgtgcaaaaaataatgagcttttctaaattaaggaattcaacaacttataaaaataacacccgtaagcattctgacctttgccttcagtctttataagacatcctcaaatgaataaaaaaatatgattttaaagagccctttggaggttggtaacaattctatgcatttgtggcatttacaaaatcaatttaggggttaaagtaaaaatgcctaagctgagtatttcataaatacagtaagtaacttttctttaatatgtaagaacaggttaagccaggaacttctcctattttatctcatttaaaacagatcatttttcataaggaaaaataatctctacctaaaaaatcctttgcaatctctgagaaaagttgcaatacagaataattttgattgacaaaattcctttctccctcttgcagtcctgtcagtctgaaaaaccccaacattgtcccatgagagaatgtcacacacacaagggatagggtgcaggccattgtttgcaggaagtggggactgagctctgctgtcagcttgcacctctgtgatacagattctggctataatggtgtacttgcattgatttaaaaaaaaagccaagctgcttatcacagattctgggttaacttcgattttgtgactgtggattccataggcttaggt

SEQ ID NO: 340307 - DNA, 649 bp, Homo Sapiens
tttttttttttttttttttttttttttttctctttgtccagttcctttattgggggcagggcaccaagaagaggccctccgctccccaaacccagaggcaaaaggggttggcacgctccctcccagcctagtccttgcgtcactgtccatgggcaattcctctgccctgcatcttcaggccatgtcaggtagaggtatccatctcagggacctcagtggacacttccgtgggcactgccagccgcctggggggcacataggatcccatacccgctgccctctccgcctcttcctgactgtagggctcgacgctcagctgcttcagccttttcttgtggtctttggatcggaagtgggtcttcaggttggtggaatcgatgaagtacctcgcgcaggccagacagcggtgcagaccgccccctggcaggtcggggtcgaactcggcgtttgggtcgggctggggtcgtgcggatccctgaggccgcagctcgcggtgaatctcatccaagtccggccgccgccgcttcgccttcatctgccgggctagagagtgcgctcggtgcgcgcctgtccggcgggagcgacccatggccagaaacagcccggccagccaaggggccaggagcaggtcaggtccaccactgacacg

SEQ ID NO: 340308 - DNA, 1000 bp, Homo Sapiens
ttttttgcttctactccccaggagcagctgggacagggaccccacttttacaatacagctgtaaatatatacacaatatatgtatcactccttgggggatcaccccaatttggggagcctctgccccaataccttcttagcttggaattggaatgagggctctgggaggaagggctgatgctgatgccggcaaggctccgtgccccagacccctgctgtgtctgtcctgcgtgctcccactgcttggcatgggtgtccccggccttgtgctgcttcagtctggccctcgtccctctttaagaggactccatggcaccttcagcctggggtgtggtgggtgccccttcctcctcatcgtcatcagggggccccggggtagagaccggggcccaggtgggggctgactgctcccagaatcgagctagagagaggcggaaggtgtccaggtggccattggagaggtcgaggccagcggggaatgcagcagcggtagagggtggtgggtagtggggtggtgcatcgtccttgcggcgccgtcgggtgcgcacctccaggcagttctggcctttgaggtggcgctgcaggtggtcctccttggcgaaagccctgtggcacaggtggcactcatagggccggtcccctgtgtgcaggtgcatgtggttcttgaggtcgtagctgtgcaggaagcgggctgggcagtgcgggcatgagtaggggcgctctcccgtgtgcttccgcatgtggatcttcagcttgtcgttcctggtgaatcgaacaccgcagacctcgcaggcaaagggcttctcgcctgtgtgggtcctcatgtggcgaggcagtttgcctgccccatggatgatcttgtggcagacagggcactcctgaggcatctgggagcggcgtttgcgcaccagcttgtcttggctgtccaggcctggtgccaggttgtcctggtgcagggagcttaggtaggccatcaggtcaggatcgatggcatcctcat

SEQ ID NO: 340309 - DNA, 1000 bp, Homo Sapiens
tttttttttttttttttttttttttttttttttttttatgggctgcctgcttttactgacacgcagaggatgaccaaaagcctctgaggggagtggaagcagggcctccccagcattgtaggtatgttggggtccaggggataggggcagtcgagagggcttgggttcagaagaagcccagctgctttttctcctgccgctgcctccacgtggccatgctgtagaattcctccttggatttcccaaagatatcttggaagtcagagtctgagagatagaactccctgcgggcagggtccacgccctctggcaggtcctcaacagcctggtgcatcagttgttcccggcgcaggcccccgttgatcgtggcgctggtgctgctgacggagctgctggttctgctgccagccgacttggggcttcgcaccagatcattctctgagctgtcctgggagcccttgagggcctgcagggccacggcacctgccctgccattgcccggccatctggatagccgcaagttgttgacttctgctgttatctcagagatggttgatgctgctgccgggctgccatccaccacttccttgtgggacgggtggctagtccacttgtaggggtcccaagtgaagaaccatccaatgaaggtgggaggctcatggccctgcttgaccagcacgatgggtgtggccgggctcctccctgctgggtgagtcttcaggtactcctggccccaggccaccgcctccttccactcacttgcagcttccccaagccacaggaagatctcctgccaggtgtccagtaacatgatgtcatacttgtccaggtcctcctggctgaagaaccccacttctgcgaggaccaggcagcccatgtggctggagcactcaaacagtcgtggctggaagctggggacctcctcagggagcctcttgttgctggggtagggggcccggcctcccagggcctcccagaagtggggaggctcctgaccctc

SEQ ID NO: 340310 - DNA, 1000 bp, Homo Sapiens; identical to SEQ ID NO: 159448

SEQ ID NO: 340311 - DNA, 1000 bp, Homo Sapiens
aaatatagctctagtcttcataaaaatgagaggcagtttattattaaaatccaaacatgaaaatacttcaaaccatttcgttagcagcatagtcccaaatgcaacattccctttatcaatcaagtctaaaccatgtggcttcaatgcatctgtcctgctaaatctgctaaaactcttaaaagagcagtgcaaaagagaaaagacatctttccttttaaatggcagacaatccttataagacattctctagggttctattctgaaggctattcaatttgatttggggcactttttaaacagccatttggcgctttccgtttggagttcttaggcacagtgtgacagagtcagcttggtgagcccttccccatgcattcggtacagcagctgaaactcagcaggcagctggtgggactcctgccacttggtggtaaatttggttccttttttgtcatagtaatggtatggaagatcttcccttgtgttggggtcaaatccaaacggccaaaatccatacaagtggatctcttcacatattgctgatgcaagggtgtacataagaatacctgtgctcagccgtttaggtgacaaatgtttgtttttccagtacctgttgacatgttgcattatatttcccggccaagccagttggacttttaactgacctctgtgttcaacaaaaaagtcaactaatgtcctggtcacagttgctgaagtgtggaagaaaaatgcagggatccaaagaatggccccgtcaagcttttttaaactgaggaaaaagttgttacggtcctgaatagtcaagagattgttgtaatatttttccaggatgctggggttgaaggtggtaagattggttttccttccaacatctctttggaaagcctccgatggggcgaaattgcaacggaaaacaaaatctgatttatctatttctcgtccacactggataaatgtcaggatcccactatttccaaccacagcacaaatattataatgc

SEQ ID NO: 340312 - DNA, 1000 bp, Homo Sapiens
acactttatatttcataccaagtaagaatttcaatggcaatgaatattaccacatagctgtatactgtaactcagggattctgtcagatgagtgcaaacattaccgtgctgtaaccatccagagtcccagggtcacattggcagccaaaagtacactgccacccagcaagatgaaaaaccctattagatctttgacatcattgtctccaatcactgaggtaagggtggcatccaagaaagagtttagaatccattgtccatccaaagcaaagcagggtactgcattaacaatagccagagctcctgagagggaaatcaggtacttgacaaatgtctccacaaccactggcagatctatgcttagaaagttaaaacgtgggataaaactggtgatgctcactgtgtagtgaagatgcagaggatgtcctacgtataacatatcaatctgaggtgggtgttttacttttattaagcgagtgtgagtttccaaagaaggtattatacagaaacttgaacttgagctttttttacagtctttattggttctgcaaacttgagttgcttcaactgctttccgggcaggaagacatgtatgcaaacgcttattaaaattatttctgtaggaaaagcacacatctgtgaggctgtgattgttacagcattcagttgaaccatctagtcgtttgtatgctctaactgggaaacttaactgctgtaaagttgatgcacttatacagtaaccaatttggggctcataggcgatggtatctaaacattcattccaatcttgcacattagtaacaggacaatcctgtagatgggtgacaaggtctcccacaaaaaggcctctgggtccaatggcaggagagtcctcagcaacttcagtgatgagcaccccaactccagtgtagtaaaatggcaagagaattactgggaggagaacaagagctaaaatacccaagagtgcaaggacaaaattatgccagatacctgcacaaaa

SEQ ID NO: 340313 - DNA, 1000 bp, Homo Sapiens
cttcatcattctatttattacatgtatgaatattaacatctcatggtgtccatctaagtcaaaaccaacaaaagaaaaaagttaaccatatctcaagcaaacattcttacagattcccgttacttaaaatagaaatatgttcatctgcattaaatcatttgacaatttgaaaaagtctttaaaaaaaaaatcacctttagtacttaaatatatttgttaattgtttgatggcatcagtgtccaagttcaagaataaaactttgcatcattagatattttcaaaagtgaacatctggatggttctctatacctggagatgtgtttgtgtatatatatatatatatctgcaaaatatgtcctattttatctttaaaattttttcaaaatctggcttttctatttgagaaaagccctacggtgctctctcggaacccccttttgaaggatgaaacctcaaacttgcttctttaatcagtgggaggctactagaaaaaaaatcttatgttgaggttgctgttcaattccatttttacccaataaaaagtacagaaactatttgatggtgtgcataaatattacactccatgaatagcaaaaatattttttatttataatttacagttgcacagtgaaaaatcgtacatttttacacatacaatttcatttcgttaaatttgcacacatctacagaactttcacacaacaagcacctgaaactctgcaggcagtaggaaatgcaaatactaaaatgtatttattaaccaaatgatagctgaaggccctgcctcagccagacaatttatatagatatgtctatatatacataaaaaaattcttcaccttctagatccaacagcagcttttttaaaaaagaaaaacatacctttctcattttatttaaactgactcgactgtgtcattttctgttttaatttcagagggtgttgctatgctttcctctgtacaagctggtggtgtatcaattcgttcttccttaact

SEQ ID NO: 340314 - DNA, 1000 bp, Homo Sapiens
ttaattatactcttttattgaaagaaaaaacaatacaatggactttaaaaagctacatttgttatggttcataaggacagaggtttacacaggttttatatatgtacacactgacaatactatatcacaacatcagaggcaccatttttgccacagaattaggtaatgaataaaacttctccaaattaatctgtttaaaaaatatctaaaatggtacagtatatttgaggattatataaatatgtgagacatatttagatattttttaaaaatagtgtttatatatatgcatcacaatcttctctaattctcaaaatattatggcaccaaaattctgtttgtcaaataaaacacaagatgctgtaatatgtatccaagcaccagcttagcacagtatttaattctcccccaaactgaaagactgctaacaggtacaaactgaactgaatatttcaaacaaccattgaaataatttaggccctcaaattttttttttattagctgattgtttttagagaaaaaagagggagctaaaccatttagattaatgttgctctgtgtgatagaatcaatcctagggctcagagaagaatattcctaggcactggagaaggtgagaggaataagtaagtccattttatgtatactacaggttggagttttgcatgtgatttagttcatagaaaaggttctactgctttaaaataagtttgaaagtatcaatttggaaagtgcttcaaggtaaatcttccttgattatgctaacataatttaagaaatctgtcaaaacagattacaaaagagattacacccagtcaattatatatctaaactgaaggtttaggatgttatctataatagttacacatgatataatcctaagcttttgcatacatttttaaatctagaaagactttgaatggaataatacattagttcaataatatgaccaaataacactaacaaatgataggccaataattaaaggtggagaaataat

SEQ ID NO: 340315 - DNA, 1000 bp, Homo Sapiens
ttttttttttttttttttttttttttttttttgcagtttaatcagatgttgtagcagggactttaacagagagatttcttctggtgttggtgatgtgccgttgctgcgctaagaaagaccgcgcaggagtgcacgcaccagtgtcactgcaggcaccaccgccgctcacaagtctagattccatccccagtttctggaatgctagactcttattataccacgcagaaacaatgagtttttcttcataatcacggaattttgctactttgcattcactctccagaatctcaattcttctctctttctctgccaactgctttcttagtagcattatttcagctgatgctggatttaacttgggatccaaagtttttattacatttctggctttctccaagtacattttatatctttcctccattgctttcatatcttcatctttcttctgaagagcagcttcaagttcattgatcttttgtacattttgatttatatctggctgaagatcttcaatgagttcttgtttcttctgtaattcttcatggacctctgtgagtttttccatatgagcttccaacttctgctttaatttgctggaactttcgccttcagacttggaaccttgttcctgtaaagatttctggaggtcctcaatctgctgctgcaattctctaatacgctctttgctcagcctctgctcagtttccagttcattcattttacggtgtttctgttctagctgctcctgaagttcctcaatacgttcattctcagagccttcttgctgtaagcgaagcatcttattttcatgttgcagtcgaataaacacctccctatattccactggcataatctcagcagcaagattctcataactttttgtagcagatgcatctgtttggtttaggtggtcctgttgtacttgtgaacatcgaagctcttcatttgtttctttcaaagtatcacgctgctcaattagtctctctttttccttaagtaa

SEQ ID NO: 340316 - DNA, 1000 bp, Homo Sapiens
ttttttttttttttttctacaaaaaatgctttatttaaaaatatgatctttttaaaaaggagacttttatacacacttactttagaaacagtcaaaaacacaacagaatcaatccagatttagaaatgatgatttgtaacatacaatattggtatgctgaacaagacagtttaaatgtatgattctttttgtcccttcacatttcaataattcacatttgttaaaactagtggttgggactaaagaaaaggtcatatctgaatcctttccccttcagaaatctgtcacccttctgggcagttacagaaatggcagcagctaggcaatgtttgtatttctttgggtgcctctgtgtcaaaaaatatatctccgcttttattctttttctatgaaatttatatttatgtggctatagggcctggtcgtatgtcccacgccttttaaaatctaaatttctaaaaacagacactccgtaagggcaaggagcatacactgctatgacctcactggactcagagcttaatgctcttaggttatcagcaagagacatgattttgatcttccagttagcactccaagctgctatcaaccaacctttttcagcacggtagtgaaatatttcaaaccatattcaaacatctaatatagatttataataaaacaggaaaaatggcttgccaaattaaagtgctatgagctattacattcaagaggttatcttgattttattttttgaggtggagtctcgctctgtcgcccaggctggagtgcagtggcatgatctcagctcactgcaacctccactcctgggttcaagcaattctccctgcctcagccttctgagtagctggaattacaggcgccagccaccaagcctggctaatttttgtgtttttagtagagacggggtttcactatgttggccaggctggtcttgaactcctgacctcaggtgattcacctgcctcagcctcccaaagtgctgggattacaggcatgt

SEQ ID NO: 340317 - DNA, 1000 bp, Homo Sapiens
tttttttttttttttttttttttttttttttttttggctgcagaggaagagcacgcgctccacaggcgtcactcttatgggtccatctttaattatgttaaatattaataaaagtacagcgtaactgcgattcacttaacataccttacaggactaagggagtacaatttaacacggtcacaacttttgagaacaaaaaggaacttcaataccatgttgtgagaaatgctccaatttgctttggttttgaatggcaggctcgagaaccaccgcccagaacggaacctattctgtcagcaagagccgggcctcgaatgagaggaagcagaggcagccgaagtgccctctggagagaaaggcccctggagggaaaaaccatgtctggatggcattgagtggcacagaagggatgggactgcatatataaaaaagatccgcataataaaccaaataatattggaaataataccttcagtaatacttctgtaagaagcagaattacaccacatgttattcacatgcataggagtgcataagaaaaatcccttgttgtaattatggttggtgtggaatagtaaaatatgtactgaaaatgacaagttaattggcagagaaattaatctataaaagggttgtgtccagagcggaggagcctcattagcaactgaacagaacccactcagaagacgcactcacccacacgtgcgcgtacacacacacacacgcgcgcactgtactgcaaataaatatacacacacactgaagtgatctctccctaaagcatccttgtgctcaggccagatttccctgctggcggctgctcccagtgccggctatagagaaggtggggactgtccctgcaagtgggagttcaggacacacgctccttcagtagcaaaaacagccctggccatcctggcgctcagagccctctgcacaccttcgaacgggctgtgtgtcccttctctgatggcagaaagacaacaccagcagaaagacg

SEQ ID NO: 340318 - DNA, 1000 bp, Homo Sapiens; identical to SEQ ID NO: 159449

SEQ ID NO: 340319 - DNA, 1000 bp, Homo Sapiens
tttttttttttttttttttttttttttttttttttttttttttttttttttttttttttttttttttttttttttttttttttttttttttttttttttcattttacttttttttttaatcccccgataggagagtccagaggtacaggtgccaggagccaggcaaaagggtggaaaaacaaaacgaacgacaataaaaagaaaaagaaaggtcactcctccctctgcgcccgaggctggcccgtgcccctctgcgtggtgagcaccaggaaagtcgagtgtgcggccggggtcagcaggccggcaccaggcccttctggaaggggcagcggcgcttgggccggggcccctcttcgtcctcgtcttcctcctcctcttcctcctcctcctcatcctccgaggacgatgagctgtccagcgtgaggtccaccacatcggcgcccggcttcccattctccatgctgcccaccgggccgccgccacccgtgctgcccagggcaccgctcccgttgacgctgggggcgggcaggagcccattggcgtccgaggggcccagcacgaggatggcgccctgcgggctgcagctgcgctccttttcggcgcggatcgggcaccacgagccgtccaccaggtactcgatctcgtcggcgtcctcacactcgctcaggatcttcgagaggagcccgtcgatgatgagctggtcgtagggggctggcttgtcgcacacggggcacatccaggtgggcttcttctcgttcatctgcaggtagaagacggcgtcgaagcactgcaggtgggcgcaggtctctgcccggcagggcacggagagccgcatcttcaccagcggacagatgagggacacccgcacaccggtggtggcgatctcgctgtcaggatcaaggcgcagcttctccttgaccagtgccttgcacagctccgggtgctttaccccaatggtcttcagcctctgcagcagctccgatgaggtcagctgccgcac

SEQ ID NO: 340320 - DNA, 1000 bp, Homo Sapiens
ttttttttttttttttgattttagagttggttttattgcgagggggtgcatggataggggaaggtggaaagagggctcacccctcagggggcctctctgggagctggggaggggtgtccctggcctgggtgttcaagctccccgctcagccacgacagatggttttctctccagaacagctcgccctgtgacactggggtgtgaacgcagccggggtgctgtcacccagccccaggggagaggggggatcctgagacatttggagggggctgacaggcttaagggggggtgggaagggaagggaaccaaaaccatcccgtagaaacaatatgaaaattgccttcttaaaaagcttccctttaacaatgaaagaaaaagagacgagaagatgtgtgtgtcacagagaagggggtatgggggggtcgggggcagggagacacccccccgccggttgggcattgacaagaagtctcagtgcagcagagcgtctattttcggggtcccatgctagcattgcatatgcaaacggggtgagggcgtcctggcatctggcgacatagtctccccaaccccggcccctgtccgtggcctgtggctcggtcaacaccgggccttgtgggagccagaggttggggggaggcaggtcccagtccccctggattacagtcagtgcctttgagtaaaaagaggggtgcctggggtggggagaggggcggtggttctaaggccctggaggtggggggcccctgtcacccacctcagcagggtaggcgcatccaaggtccagctccttggtggccatgcgggagggacaggcgtgttgggggattggggggtgccggatggggatcggggtgctccggctggaaggcccatccctgagctagggaggaggaaggagagaccccgtggacagaagcgggcgctaagacctcttcacgtcagaaccaaaaaaggggacagaaagggggagcggggggaacacagcacgaacacccca

SEQ ID NO: 340321 - DNA, 1000 bp, Homo Sapiens
ttttttttttttttttttactccatgaagttttatttttaaaaaattgtttaccctgtacatgtttctattgaatcctaagtacgaatgcccaaggagataaagcaagtgcagttaagtatgcatgggaaagctaaaatgggtatgtacataagatcggcaaaggaaaccaagttctgtaaaatgagttctccctcccctccagggtagctgattatgaggaaaataagaaagagctttgcttttctccttagtagtaatggtctacaataagctgcacacacacatccctcatcacacctctctctcaaaaaaaaaaaaaaaaaatgcagggagatgtgtcctgcccaggttaaactacacacaggctatcttcaggtcacaggaaacagtcacacttgcttgtaagttcactggttcaggtaagcagaccatcttttctctgtcattgacaggcaaaagggcagtgcagaacttcccaataatggtagtccggtcttttttccaaactcggttggaagactgaaacttgaatttcacttggtttatctggcattgtggggtggcatgggctatgattcctttcccatagcgttgctgcttaggtatggtgatcttagatgaagaggtgatgttactgctaaggaaggtaacctcgatgttggtgtccttgtttctcagttccttcaagtgaaactccacgaggctgtgatgcatgcagtacggagcactggaagtagtcaggaggtagactttcacttccttggggagcggctctatcttgacaccaccttgttccaccagtcctatccttgggcaggaaagcagaaaagggttaaagcaatccagacagcgtccagcaaggaaggccttgtagctggcacagggaaaggccatcagtggacaggaattctccagggcgctgatgtagaggtgcacagccctcatgtgatcacagatcagataactataacctgcgtaaaagaaggtggggcagccag

SEQ ID NO: 340322 - DNA, 1000 bp, Homo Sapiens
tttttttttttttttttgtggaaatttcttttattttccccaaataaactcttctcccttatggcatcatatatgaatgatgagaaatcctaaatttagtttattccataaagtttaagaaataggtcaggtttggcatctgtttatctccaccaatccctttgttaatcaacacgttgtggatgtgcaaatgccagcaactgttttatttaggaaaacaggcatggcaaagcaatagtcttttccctgggtcacaaactgagcatgtgacagagctgaaaacagcgaaaaagatttactgtctggagtcccattgggattctacttcctcaacagagcctcagggcatctgatttattataaagtactctgagtcataatgacttaattgtgacttttatttaactagcatgttcatgtaactagaatgcacctgtacatgaattttaaaatgtcatactgtgctatttttcttaattctgtaagggtaacaagtaactcagtaatgacttaaaacttgctatatattttcaatactaagataaaagttttaaccaaacttacaacaggcacattttggcagttagtgtaaacacaacattaacaagccatatgccagaagatgtttgcttccaaggccttagagaaaatgactgaacaagggcctacatccaaactaatgcttcccccttccccctgatttttgacagttgacagctcatcagttttcttctcacactggcttttttgattgcccattggtaggaatttcttccattaacactgctgatagaagtgtcttactgtaggctcaccctttgctctgcccttctgaggtccttctgcagcttatcttttgtcacttctcctttgtcaactgatctctagtttgtccctcaggaataccaaggagcgatctaagtgacttgatccgggctaagcaggcagggaagaacaggtctgtttttccacccactccttaatcagttggtgggagatg

SEQ ID NO: 340323 - DNA, 1000 bp, Homo Sapiens; identical to SEQ ID NO: 159450

SEQ ID NO: 340324 - DNA, 1000 bp, Homo Sapiens; identical to SEQ ID NO: 159451

SEQ ID NO: 340325 - DNA, 1000 bp, Homo Sapiens; identical to SEQ ID NO: 159452

SEQ ID NO: 340326 - DNA, 1000 bp, Homo Sapiens
aattttttttttttttacttgctcatcgtttccatacagttttatttgcaatttgttggaaccatggagaacaatcggcagatacacatgttgcttctgggaacagcattcaactccagatgctttttctgctaaggagcagggccacaggtggccctcacacccagtgctgtgctgcgcggagggctgtactgaaggttctgaaggcctggtgagtccccctcacggccagaaggagagacccggcttcggcttcatggccggcctcccgcaggtgtctgcccagctcctctgcatcccagcgcccttgctggaggctagccaagaggtggtcaacaatacgtggatagaagggagtggagacacacttcaccagcagcttggcatccaggagcagggaaagaagttcttggtcacaattggaatcattcaccgtagtgactgccgtgatttgctccagtgccatctcgtgcagatgctcatctcggctctcgaggagaagtttcagagatggaagcaggagggactggttaagcagcagcagacacagctccttcacaccctctgcaggcagcatctgcttggtgttatacaaagagcgacacattttcaaaacttcattccccaatccttccttgttctccatcgtacatctggttagcatcactgtagctagtctcacccatggattattggttatgacatattcacttttcataggtggccaagcttgcaaaagtaaaaccaagtgctgaaattcagcctcgtggtgactagattccaggagttccatgaatagacagtagcggttctcttcattctcaatgtcagctatgtctacctgtctctggggccaggaggctttgagaatggcttcagttctaaagaacacgaggagcttgctgtcctcctcagtcaggtgaaatgattgccccaaaatctgcagcacgtgaatgcggggccgcaccggccaggcgtcatcagcacagaaaggccgcag

SEQ ID NO: 340327 - DNA, 1000 bp, Homo Sapiens; identical to SEQ ID NO: 159453

SEQ ID NO: 340328 - DNA, 1000 bp, Homo Sapiens
tttttttttttttttttttccttttaaagttttattaaagtttaatggtacaatattttatctctttttttgttaatgccagtacaaaaatacagttgatgacttgacaaaatggctacacctagggcttgaaggtttgagtttctccaacagtaacaagggaaagcatgcttccacctggagccgagtccaagcacacagccagtcctgcacacgcatgcgtgcaaacagggaagctcaagcatgagaagaggaaagaggctgtagaaatttgggaagaagcccacaattattcccaggagaaaaaagggaaaaaacaggctgatatccttggtagggggtagaataactgatttacacttaggatttattgttattgttgttgttgttgttttttaatgataagctacttctgcaattttaacgttgtagaaaagatgctactagtctcctttcaccactaaggtgagtaaagtgggaggaaatgggaaaagactcaaatacttaagtgcgaggagtaaacatccaagtggctcaagttttgtgtcagaaggtttcattctttacattcaatgacaagttgacatttaggtgagagggaaaaggagaagaaagtctgccactctccgctggatccacaaacatgcagaccagcttctgttagcagaactcttccacagtgagagcgctccttccagtgtaggtaggaatgaggtttcctggtcggcttaattgttctagatgattcctcaatattcccttccctgctgctttccttccagaacactaactctgatgaaagaaggggcacattcatgttacaattcatcttcaagatgtttctttctgaaggcatcacccgtcagcctttcctgagcttccttcatcccctgaacaacttgctcggcactgacataaaaatacttgtagctggggtttccattctcattgatgatttcaggatgcaccttgccactgggatccagaaaaaggattcgtg

SEQ ID NO: 340329 - DNA, 1000 bp, Homo Sapiens
ttttttttttttttttttagtaagaaaaactttatcaaaaatttaaatatataaaataaggccagaggctgcactggaggccacttcccagtggtgcactgctgcgctgggtgtccctatgcagctagatacatgttaactgcatagagtaccataaaggagcccactggtgagcttcactgtcacctggccctgctggctgggcttccattgtctactgggtctgtccacaccccagattgccttgtggtcctttcccctggccaagaagataacagttttttaaaaatccccttctgatatggatgtgagcaagcagtggggttcagtttgggaccaagtagtgccatttacaaagagcatgggaagcacctccttaggaggggagcagggccatctccacgttgtcaggggccgcgccgttgcctgccagaccctgggcccacttgtgcaggcggctgtagagtgggaggccctggttctcacggtacaagtagacgccggtgatggcattccactgtggccgtggctgcgtgccttccactgggaagttggcaatcagttcctcatcatccttgttgagcgccacaaagccaaagaagcggcgcacattgttggcagcgagcacccgagagtgcacctcggccgtgcgctggaacagctggtcctcattggcgcggtactgcgcccagtaggcctcctggcggtagctgagtggtgagcagtaatgcttgaggcacttggtcaggaacaccaggatggccaccacgccgatgagcagccatccaaagagctgggactcatacctgagcctgcggctgacctcctcccggaagtctgacaggttgtcagggttctccttgcaggggaacctggccaggatttcagtggcgtgggctgatgggaagtgctcttccctggccgtgagtgaggaagggtccacgaactcactgagagcacagacataagcctcaccacgcagcagggagatgacagacca

SEQ ID NO: 340330 - DNA, 1000 bp, Homo Sapiens
tttttttttttttttttttttgcctgatggcattaggtttattttgtgggaaagcagaattggggctctctgaaaggcacttgtgaggcatagaagtaaaggttgccacatggctaatggtggacgtcttcctggcatccttgggggtaggggaaagacagacagctcccagggccacagaaaatacctctatcagatagagaaatccgagtcccagtgccttatggtggagccaagggttaagcagatggcctgctttttttatacgaagagtttgcttcctccgggcaatcttaaagtctggcattcacggctggaggtatagggcccatccacttctctcccagcaggtgcgccagcagctccatccggtcagagccaaataacatgtgggtttggccatccacatgggccacggtgatgggcaacccaaaggctccgtatctgcaggctgcctcagtggtctccttgagctggttcttcacctttggcgttgcgatcttttccagaagtccctgggcttgttctgcagacataccagccttctctgcagccgccaggatgctctgcggctcggtgatgtcttcattccttgaccagacgcgcatccacagctcccgggacgctttctccagcatctctggatgctccaagttcacggcggtgaggaaacgcatggcagacaaacttcctttttcaagcatcacagacaagaaatccttggggaagtggatgggaatctggagatggtgtctcaggagctttaagtcatttgccatgtatagtcctttgcggggaagcagacctggaggcttgtttccactgtctttcatgatccctgttatgaggctgggccgcaactgcaggttgatgttccagatattctgataccggcacaggatctcgaagcccagccaggagtagggggacagcacgtcatagaagagctccacggtgcgcggcaggggccccatgctgcaggctccggaagagcagtggc

SEQ ID NO: 340331 - DNA, 801 bp, Homo Sapiens
tttttgccacggaaaccagatacatttattaaatctactcttagccaagcaataaagatgtctacagagttcacaacctgcaacacttcaccagggaatgctaggtaaaggcaacttcagtttaactgagtactccatttcaagtgggtaatgtctgctggttggcagctatccagtttggaaaactgtggaagatgctgttgctacccagattgttctgttcaacaagtgggcctgaagcctgagcagtgtagccagctgtgtggggagcagaggttcactccattgcttctgcagcctcctcacctgactcctcctcctcctctaataagcagcttcttgtcacagacttctggatagcttcccgctctccttcatcagtgcagttctgcaacaagatcaacagctgtctcctgttgtactgaattaggaacttctgacatgttcttattgtacctcccacatgtaatgtgttgaaaaagcatgggtaacggtgtcctttgttctccaagtatgtgatgaagggaagagctgaccacacaagctgatagaattcttttctgcatcgaagtagcactattccagtataggcattgagatatcgaaccgcgaagccgatggagcaggcggctgcgccgaaagttccgtgcaccctggcgatcgtgtcccgtacgaggctgctcagaactcggtcatcgaggcttaggcggcagcgggggtcgtcagacaccagttcgcagagcaggtacctgtgcttgaaccgcaccatggctgcctccgcgctctccggtccggcgtgca

SEQ ID NO: 340332 - DNA, 835 bp, Homo Sapiens
ttttttttttgacagagtaaaagactttaatgaacctcgggatagttctgctcatcttttgtgacacatttgaagtttctggtttacatactgacagaaaccaagagatggtccaaaaccaagagatggtccaccaagctcccaattgctaagcactaatgaaacccatttaaaaacacaactactgacatactatctaaattttttattccatgtctttcctaccataatatggtatcaataaggaaaaacattttgtagtgctcacagtttacaaccacagcccagaagttactgcccggcagtcattcatagtcactcaaggaatgtatgcatatatgagtccttccaacatttcttcatatataaatgacttccaacatttcttctaacttcaaatccaagtttaagtttgagccaggtcatagagcaaaagagcttttacaagtaaggtatctaaatttccctgtcttcgggttgctgtcgtcattatccaaagctgctcatttctttctataggtgatacatcttgtttgaagggtggatgccccactgacagcaggttcctaaagttctccaccatcacatctcggtacagcttcctctgggcagggcccagcagccccaattcctcctccgtgaaggccacagccacgtccttgaaggtcactgcttccttgaacatattcatttttaattcttccttctggggaagtgcagagtcctaagaagctgaaatggggttctgctgcctcctcctctgtgcagtgctttttgagaagtcagggctgaatcaccaaagccagggaaaagatggctgctacgtcgtcttcct

SEQ ID NO: 340333 - DNA, 1000 bp, Homo Sapiens
ttttttttttttttttttttttagaggtggaatgcgtgtgtttatgtaggtagaaaaagtgcacagaacagtgagggtgcagggagcaaggacgtcctggcctggcctccgattcgctggaattgcaaggaccctcccccagtaagggggctccctcaagggtgggaatagagtggaggcccgcacgggagttcttgtctgtgtgcaatccactttgtgggcgtgtgggtttaggtctggctgggccgtttctgaacttgacccctgagaactcatagtaccttaggggcggggctctccagtgggtggggcctcccgctctgagagcaaggcctcggggtctggaggacccggcttttccgggagggcgcggcctccgggggagagggcgagccgagcgggctgtcagccgaagagcttcaggaagcagggctggcagtagggcttgccggcgcgctcctggaaggaccccttggtgagcgggcgcaggcagaaggtgcatgtgaagtggtccgggtggaagcggcgacccagggccgacacgcagcggccggtcacagggaggccacacgtggcgcacagcgagccgcgtcgtgcgtggaagtggttctcgcacaacgggcggccctcgtgctcgaaaaagctgcctcccgagaagggcgcgaagcattccctgcagacgaaacagtccgggtgccagagcgcgctgagcgccgagatgtagttatccaggatggggccctggcagccctggcagcgcggggcgaacagctgcaggaagtcccggcggcagtaggggcggccctcgcgctcgtggaaaccctcatctccgaagggctccccgcaactgacgcagcagaaatgctctgggtgccagtgagtgcccaaggcggtcaccatcttgtgtcggatgggctggttgcagaagccacatcttggcgagaagcgctcaaagtagcactcggggcagaagggggctccatccttctcgaagaagctg

SEQ ID NO: 340334 - DNA, 1000 bp, Homo Sapiens; identical to SEQ ID NO: 160765

SEQ ID NO: 340335 - DNA, 1000 bp, Homo Sapiens; identical to SEQ ID NO: 159456

SEQ ID NO: 340336 - DNA, 1000 bp, Homo Sapiens; identical to SEQ ID NO: 159457

SEQ ID NO: 340337 - DNA, 1000 bp, Homo Sapiens; identical to SEQ ID NO: 339922

SEQ ID NO: 340338 - DNA, 1000 bp, Homo Sapiens
tatatagaaagacttggtaatgatggtcagttccttttagatttccgaaaatcaaatgatgacctaaatttcccttaatttgcaaatacagtagtaattaaggtacactctctaaagtggagcacttacaccatgcccagcctcacaattccttacactacctctttttcattgttcctcatcactacaaaaaggagagcaggaagggtaagataggaaagcagcatttctttctcttctgaagtataattttaaaaagagattaaccctgaaaatcatggttttctatggtaatcaagctttgtacatcagaaaataaaacatcccattattaaacaaatatttattaaccggcccataaaaataatgaagttactcacactgagtcctagtccattctgtttttctgatttgcataagcaaaggtctaagttctggagccaacccttcagaggtcttgagaatgaatgatgggtaagtttatttggacaaccagaaggacttttcatcacaactgaagccattttataatgtagaaatttctttttcctattttaagtaaggaaagtccattcttgagaatatgttgtccaacaattaaaacactctcaggatttgttacttgttggtgatttatgctgactccgccttctgttatcattcgataccctcggggaccatctggaatggcatttgctttgcggcaagtatctaggacacttgttccaggatcgagaaaaaattcagaaaatggagcttctttaaacaactcttttaactcctgatcagacatgacctccagtgcatctatgctactgtgataaagggcttgtgtacaccttttagcagaatccaatccttctcgtccatgaacaagctttgttacttctgctgccagtcgtttctgaggaccccgcctttctggctctttgacatgcagctgcatgatatgatcaatctctgggaggggcaggaaagtgaacagcttcaggtacctttc

SEQ ID NO: 340339 - DNA, 1000 bp, Homo Sapiens
ttttttttttttttttttttttttttttttgcacttgctcaatctctttatttagtggcacacatggaatgaatgaattagctcttacttgcggcatacttaacaagtctgatcttgcttatagaaattggatcttaatacttcattctcagaatacttcaaaacgtaagccacagtttttctttcaaggatgtgggaagcattcctcattcaaatctgattaatggttttataaagtatgtacctcatttttattagccattatcttcatgctggattctaatattctttttaatggtgatctgttcaatgacagaaacttatagagagaaaattccttctcaatttataaacaaaaattttaaaagcagcatttttgatgtggtaggaagatatttatgacaaaagcagctactgccctaaactggcaaaaacaacaaaagaacaaattgttatttaacctttaaataacgagtctctatttgctataaatctacaaatattttaaatatatttcctcctactgcaataaaaattaagataactctctgtttaacggcttttgaagagttaattttataaggaaataaaaaagattgacttgcctcctgaatgtccagtgataaactgaaccctaatttccctacctcaacaacataaaaatgatgtaaagtggatcaaagtatgtaacaagttaatattaaaaatgcttcttcatatggtctttcactaaaataatcaacgtaaaaataatgtaaaaatgtgtttttgcttgaagatttagtgaacgttcaaggaatcacaatttttgagcttttacatccagagtactatactatgtgaaaatactacagtgcctcatataaaaaagcacagtgataaaattccaaatgtaaaattgccaaaaatcaataacaactacattctccataatctttccttatctaaaacctcaaagctatccatctgttttagtggtttgagtgagcactgaaaacaa

SEQ ID NO: 340340 - DNA, 1000 bp, Homo Sapiens
gacatttgtttcctttaattgaatagtacacaaaaattctagtcactttatttagaacaaagaataagagtattggcaaattaatgcaaaaaagtaccctactaaacctttctatgcacaaaaaagagcagtaaaataaatactcagaactttcccaggttgtcaactattaaaataaaacctcagcatttcaaaaaagcttattccgctgcaggaaagaaggtggacatttttggtaccataataaatcacacactcacacatccatattgcttaggttgaagagaacggaatgaacagaggaaatttcttccatgaattgccctcctttcggtacccgccatgttttagttacgttgtattattccacttagcttaaaatataaagtcttgtagaaacacatttttaggatgttgaagttctcaagatatttgcacagaatatttagaagtacttagaggagttttgttaaatgcagttggtcatactacataccccatggttgcagttttgacagaccaaatgcatctgtgtcagaaatagacaaaaggcatatactcctccttcctagaaacgggtacatagacatgttcttattcttgggatatgaaaaaacaagtagtaatggcatttaaagtttaattactaactgtataatgcctgagaacaaaattcagagcaattctcaaaagggttaagagtcagactctgggcattttcgttttttagctgcaggctcctcagtctcgtgtgattctaaagtgcttgcattagatttgaggctggtgtctgctttaaggttgtccatggcaacggtgaagccggagagaagataacccccacctccactcatcagcagtttaggatgacttcgatctggcaaaacctgataatttctgagccaggtttcagacagcctgaggttgatgacccctcccctctcccgcagttttgtgtagcattccaacagaggctctttgtactgacagtagaccacaa

SEQ ID NO: 340341 - DNA, 1000 bp, Homo Sapiens; identical to SEQ ID NO: 159458

SEQ ID NO: 340342 - DNA, 1000 bp, Homo Sapiens; identical to SEQ ID NO: 159459

SEQ ID NO: 340343 - DNA, 1000 bp, Homo Sapiens; identical to SEQ ID NO: 159460

SEQ ID NO: 340344 - DNA, 1000 bp, Homo Sapiens
tttttttttttttttttttttttagccacataacaagcaaatcacatactttaatctcattttaaaaataaagatgcctcaaggagattattttgacaatccctagcagatcaaagttctaaaaagctaaaaataactgatttaagttaccctctaaatcaaatatgactaatgctaacaacaacaaaccaaaaccaagaatttccttttaacatgattggtttaacaagcctttgaagaaaaatatttaaaacttgtcttcaagtctactaattgtacggcaatcatttaaaatagtaaaactatttaaatctaaaaaaaatgtagtgtgtggaggtggggagaaaagggatcattaaatgcaatgcaagaacaccaagcagaattaaaataaagaaataatgtaaacaggataagatagcaaaagctttttctaaggaaaactgtttcaaagcatgcagtgtgaaattttgcaatctatcccaaacaatatactgcataggcatcgtctttaaatacacacattttctgtttccaagtactacagataactcataattcctataaaaaattacacaatttaatcaagatggtagtacgtggagattatttccttttagtttattgtttaaatacatgtcttgccaatcacaaaatatctagtgtagccaaagacataagaaatccctgtatgaatcaaaaagtgccattcttgcagctttctgtcacaaggatgctgagaaatgtactgtaacagtttaggaaacacaagattgtctcaattttaagtttcaatcattaatcctcttcagaactggaatcaccctcttggtcagaaagttcgggaacagggaagcggagaatggcagctaccccagtcaactggctgagctgttccccagaaacgtgaagactagagaatatcctaacggtgcctgcattctctttcacactgtccaccagcctcacataccggctccgtgtggctacatcctgatgc

SEQ ID NO: 340345 - DNA, 1000 bp, Homo Sapiens
tttttttttttttcgtaaaaggcaaacaactttaatggttattttgctaaagataaaactctgggtggtaaaggaattaaaggcagagtctcaaagagatatttgcacccccgtgtctgtattagcactactcccaatagtcaagaggaagcaagccaagtgttcactgatggaggaacagagtgtggtacgcacatgtaacggaacattccattatatgtataatacaggaaggaaatcctgtcacctgacacaacatggatgaaccttgaggacattatgctaagtgaaataagccagtcacaaaaagacaagtcactgtatgattccacttatatgagatactgagaatagtcaaaaccagagagacagaaagcagaatggtggctgcgggggctgggaggagtgggaattactgtttaatgggtacagtttccattttacaagctgagaagcctatggagatggacggcggtgacggccacacagcattatgaatgtattaacagttaacgttactgaactgtgcacttaaaaatggtgaagacagtatgttttatgagtattttacgacaatttaaaaattaaaagaaaaaaaaccagaacacactaagggttataggcacaaattctccttatgcccaccaccatctcagctggtagtatgacgggtgtagacaccattagaggcaatggtgaatctatggggaaccacccaggaaagtcaccatccaaatgtccacatccctgcttggcaattaaaacgaagacacttttcttcagcacctggtgaagatgtttagtttctagtgctttccaagatccacctcaggagaagtcaatttgtccacaggaagcgtagtttccaaagctgtctacggtgaacctctgagagatgtgaattgaattcagctttagggagccaaagtagaagttctcaaacaactttaaaatatttcggccatcaaatgattctctttccttgaagatatatttgcct

SEQ ID NO: 340346 - DNA, 1000 bp, Homo Sapiens
tttttttttttttttttttttttttttaaagatcacagaataattttatttataatgaatgttattctctccagacttcaactcatcagtttactcttataacagagaatcaatttaaataacaccatcaaaatggaatgaatataaaacaatctgctattacgtatcgatttctttgataggatataattatagccaattagtcttgcaacacatggtccatttccagtgaaattctcaataaactgctaggaattacagtccttcatattgacattttattgtaaagtctgctagacgtggctctcttgattgctttggaagtcagtcaaacaaatgctctgaagaaaaggctgacaccgcaaaacaacttcatatgaaatctgcccacaaatgggatagcaatgcctccagatcctttggtttttatcagtccctttggaaagttaattaattgatgattgttcccttaaaattctattttaaataggacaatcactgtctatacagtctgtgccagcgtccttgactttcttgcttccactgatttgtttatcaaatcatacagtgatggtagtcttattttatccatatttttgctgtaaacattgagaaatataccaaggacaactaacaaaccagaccatacatactgaaacgtgaatggtttagcaaagaatataaacgaaagtacaatggtcattgcttttcttcctgttgtcactgttacagcaataagtgcaccaaaaattttaatcaaagccagaacaaaggagattccaaaatatccagtgagggaaaaaaggaacgcataaccataggtccgaactggattctttgcacaaaatgttactgcagggcctaatccactagtgcatgtcaatcccagtaaaatgtatacaaaaccaattgaatacgaatacaataccatttcagaattagaagcattatgaagtttcatagctttctcttgaacatttccaatgacggcatctgcaca

SEQ ID NO: 340347 - DNA, 1000 bp, Homo Sapiens
ttttttttttttttttttccggtagaaagggtttatttatgcgcaacggttcacacaagccttcctgaaattccactttacagtaaataaagctgtgcgtttccccttcccatgcacaactgcgtatcaatctacaactgtcatttaactgtgaaaaaatagagcgtctccccttttgtcatcgttctggtaacatttggagtagcatctgacagaacggagctgctcactcctggaccggttatttggttaaaacccaaaatgttaggtcgaaagaatcaatcatcacccaatacaaataaatattgcgttatgaaagagacgggcagagtcccacggtatccctttttaaagcggcatttccagcacagcagcgtggcgctcacagagaccagcagggcgcagctctgggatgccacatgggacacagctgcaagtacccgtaggcaccgtcccgccgcacgcgtccctccaccgagcgtgaggatgtggcgcagggcacgtgcactccgtctgcgacggggaccggttcgtcctgactgcagaatgaccccgtgttcaaaaacagccgctcccatttgcagaccacatgggccctggctgggctctcaggtccgagggccagcacctgctttggtgaccgcagctgtgccggacgcccggcaaggagcgtgatgtgcgcagccccccgaggacgggcctcctgtgctgcccatcagccctcccgaaaggacccagaacaaaggagtgggagagggtgacgccgcggtaaggcctgtgctttattgtgggtcaatctcgggggacgcggcggccagcaggggcgacgccccactcttgggtcccagcagcacagtgagcagcagccgcgccaccctgagccgccgcacagaaacagacacgcgccggcatgcggccaccgccagcctcagggccaggagcccccaaggcgaggagccacccaggactcgcctctgaaacgtccctccagccgtcgtcg

SEQ ID NO: 340348 - DNA, 1000 bp, Homo Sapiens
ttttttttttttttttttttgcgcacccaagccggtttatttggtctcccgcacacactcaggcctgcatcaccggccgtgatttctccgcttgcagcttcactccggagcccgcgaagccggtaccgccccgctgcagcacgatgatgtcgcggtctgtgagtttgtctccagtcacagggtccaccatgtccttccgaatcagcttctccacgcattcgagggtgaccacagccccagagggccgcagcacagcgcagggggtggcgttgctcaggctgtcgcgggtcacggcacacacgtagcgctcgctgcgggtgatgagccccacgcggtccacggagctgtctagcggtgtgaagtgcacgggcgtcaggtccgacatgcgcaggggcttccctgacatggggcaggtcaccgtgcgggacggcttctccagcttggtggccttggcttcgggcgtcagcgacgggatccagaagctgggcagcactttgtccttgtccttacttggaggacccacactgggcccaggttggacatcatctgggctggtgcccgagagggccttggctgtgaaagggttgaggggccggctcacgatagccgactccttctccaggaagccccgcacatggtcctgcgaggccgcccgctgaagctccttctgctcctcgcgccgggtgccccgctgcttctcgtaggccttcatctgccgggcaatctccttcttctggtgcagaatgtactccaggatggcctcacgctcatacaggtagccatctggggtgacaacaggatcgtggcaaggctgcagggagagacaacagcagtcgaagtccttcacggcatcccggctcagtcgaatgttctgggtcccatagcccgaggccgctgtgtccttcttcttctcgtggtaggtgtagacggcccctgcggtgcagttcttgccatgccgcgtcatcctgtaatcccagctactcgggaggctgaaatggga

SEQ ID NO: 340349 - DNA, 1000 bp, Homo Sapiens
tttttttttttttttttttttgagttgtgtagccctttattagcaactaaaatagaaggtatctgttgtacaacatgggtagtaattgactataactggagatttattatattctaatacagatcatttataaatgcaatttctttattaaaaagcttccacctttttgtttgtttgtgtacaatttgcaaaactattctgaaagcggaatatatgtgcacaagtctgcaaagagtgcaaatttaggatatggtaaatgctttacaagttactttcaaaaaactgtctgccacaactgagcctttacattgtcatcttttttgatcaaaatattttgatgccagccttccttccactgccctaaactataaagcattttttaatgagttgaaattaaggaaggactacacctactagaaaaaaagagaagaaagttctattagtttgaggtttcagaatccccccaaaccaggaccagtatcgtggtaaaggctaggctgggaccccggacagagtatgagaatgtgcaggtggcatccctgaggattcagagcttcagtggaccgtgagtgctccagctgcataactcactgaactgtcttgccagtttctacactggctcgactgggcataattcaaaaacgaaaaactcatattcattccattcttctggagctctgtgatagcatttaataacaccccaatgggatgtcttccacatatagtattatggtatttcttcaagtaattgctaaaagatacagggtctaattgttctataatactcatacccattttatctagatgttcaatggatctataaatctccccctgggattcatcatagtaactgtaacggaacctttgaccccaatggcagaaatcagaagaaaccacaaagagattactaggatccgctagatatttactgaagagttttccgaattcctgttcttttgactcactcagagctccaaccagtacaggaataatggtaaac

SEQ ID NO: 340350 - DNA, 1000 bp, Homo Sapiens; identical to SEQ ID NO: 159462

SEQ ID NO: 340351 - DNA, 1000 bp, Homo Sapiens
caaaaggaaatcccaatctttttattacggaaagccatcaactgggtgtggggagtatgtcagagggttagtgaaagtccaggggatttctcctccaagtcctaccacacaaaggaaagtctcaagcctctattcaccccttctcaatccccacaaaatagggggttgttcaatattgtcttcaatgataaaaactttgtggttaaaggtttctccttaggactagcgacaaagttaggcttatacttttaatgaagaccataaacgaagccagaagggcttgaggaagcaagagtccttgggggaaaattcttagcgttctataccccagcatcttaccttagggttaaatctaggtctaaccaagctgtgcaggtcaactaagaaggaatgatgaaaccacagagtttcatggagaaaccatggagatgtctgaatagctgataagcagttaacacactgacccaagcttggagggaaaaccattttccccctccgtcctatgagatctctttctttgctccagtgaaacagttggccacaagcatggcaggccttcctgtagggtgcctgacaattccctagatgcctctttaaaatcagaagctgcatgctgccccacccagtcacagccaaagggaaaacataaataaaagctgcacctcaggcttgtggttatggaaagagcctggaattgacaggagaggaagcactgccaaagtgaggatcttatttatccttcttgttttccccatctgacactgtggtgggggttgaagccacaggctgctcctcagggatattgtctccagcctttgatagtttcttggcccgctggtatagctcatttaagttaaattctcggatcacattctcctcagagaaggtccatgagacagcccgtcctttcttgtcaatctgtggccgccgcattgcctccttgccaccttggaacaggatcagggtagggagttgcttggtgaggggtgatgtgctcact

SEQ ID NO: 340352 - DNA, 1000 bp, Homo Sapiens
tttttttaatagtggaaatttttattttacaaatgaaaagtcaaaatactgctttgaattgacccttaagtcacactctgaattcataccatgcagttaaaattttcccagttcatcaattaattccactgaaaacagactaagcttctgtctatggaagaagcacagaccagctttaaccatgatgacaatcactggtaagactaagcaaaggaagtgactgtatctctgtttcaaattctttttcttcttgggcacattctccatggccatgtgaaacttaaaacaaagattgcgactgtcctggccagagaagaaggttaaagctgtgtcatagagaattgcagattatagttctaccttcatcctgtgatatccatgtctctcagagaggtctggctacaccaggatgttctttgcgatagcattcaaagtccttactttggtcacatctgttacctttagggaatattctgagcaagaaagtgaggctcccatggcaacagatgaatttcgaaacttcattcccgagtctctagtagaccgagcagaacagtggaattctgtagcacctgaaccctcaaggatcctttgtagatttctgtctgttataccacctcctggcattaccacaatcctgccttttgcctgctcaatgagtcgatttattaggggtagcccttctaatgctgaactgtcacatccactggtcaacacgcgttcaaatcccaaggttaagagggtctccagagctgccattggatcatgaaccatgtcaaaggctcggtggaaagtgactggcagagggcggcaaatagccataagggacatacacagctctttgtcaatgtgtccatcttcagtcaatgccccaaaaaccaaaccatcagcaccataaggcttggcaagacgaatgtcagccttcatcacctcaatttcacgatctgaatacaaaaaatcacctccccgtggccgaatcatcacaaaaactgggatctga

SEQ ID NO: 340353 - DNA, 1000 bp, Homo Sapiens; identical to SEQ ID NO: 159463

SEQ ID NO: 340354 - DNA, 1000 bp, Homo Sapiens; identical to SEQ ID NO: 159465

SEQ ID NO: 340355 - DNA, 765 bp, Homo Sapiens
ttttttttttttttttgtttttttttttttaattgctattctttattttgccactcaaaataattaccaaaaaaaaaaaatcttaaatgataacaacacaacatcaaggcaaagagaacaggaatggctgactctgcataaattggccgaagattatccattatcttaaggtttgacttcaggttacagcacacagacaaacatgcccaggaggctctcaggaccgctcgatgtcttctgaggaggctgcggcggggagatccaggaggcggtcgagggcaccggcctctttgagatgcaagaaagacagaaactcaatgattgtgcgcatgatattgttttcaggtatggacctgtcaaagcttcctggtttcatgtcatcttcgggccgcagctcccgcttgctggtgaggccattcttgtcgctgaatgacctgtggttgccaacggcatgtgggcccagcaggtagcccgcgctgttcagggtccagcctcgtttttccttggccggcgaccagagccccgcagaggcagaaagggccgcggcgaggaggagggaggcgagaaggagggcgctgcctcgggccatcttgagctgcggctgcgcccgggttcggagcgtcggggtccgggtgcggtggcgggtctgggcggcaggtccgggcgtcgggccgggtcgggtgggctctggcggcctggggcgctcaccgcatggcgcggccggcagcaggggcagaaggcgcgggccgggtcccggacgcgtgg

SEQ ID NO: 340356 - DNA, 1000 bp, Homo Sapiens
ttttttttaaggaatcaaaaacttttattcagaataagcgttaaaaatgaaggtaggtgcctcataaatgcagggccccagagtactcagaaagggattagaaaataattacaaaaatattttgccacatattaacatgaaactacaatcactggctgtaaaatatagtcaaatgcaatcaagctgaaaagaaaaggtggaaatctccaggttatctgcccaggtggcaggaaatcgacagccccgagaacgcaagtgctgctgtgccgccaggccagggctatgatccaaagtgacgggcagactaccggcctgcaccaccccactcaggctgcacacaagacagccagcttaggatctccgtgggctgctacctatgtcacagagggctgattaagggcttgcagtgttcccaaatagggcctccaatgagaggagtggaagctgcattacaagaaattcactggggctgcacttgactcttcaacttggcgagtctcatgaggcactcgtccctccactgcctcctggcagctaagtgctccgggtcatcagggaccttcatgcacatgtcctggttaaccttctcagcagtggccctggaaaactctggaatgggtccaaaagtctgtaggacatgttttatgccttcgctgtatctgtcgcagtagcttaacataccttctgcattgagatgcatggtttccaggggtccaatgaatgcataccgcatgcccaacccttctgacatgacaaggtcccaggtcactaggagacacgaattccttcctccactagccgccaggcctcgctgatgattgcatattgcaggcggttcagaacgaagccggccacctccttctggactcgcatggggcactgtcccaatcttcttcatcagggcgtgggttctgtccactgtcgtaggggccgtctccgggtgggggaccagctcaaccagcgggatgtagtatggcggattcacaggatgagccacgat

SEQ ID NO: 340357 - DNA, 1000 bp, Homo Sapiens
ttttttttttttttttttttttttttttaagctcaaatttttattaaccttggaacaaatgcaataattccttacagtcatatagcattttacaattctgaaagaattttcacatataccaattgaaccctcacaacagccctgtgaggtaggcagggtaggtgttactttcctactgctagtgaggagaacaaggctaagaggtgaagtaaggtcacacagttggtaaatgatggagctaggactagaacctaggccttctgacttgctgcctccctgagaacattcaagtaataatatcctatgctatataatgaatatttatctcctatgatgttgatcaggtctatttttatacattttacctgtttttatattacctttccctaatactgaaaaacactaaaactgatacgagacatttgagacatttcttctctgttactggactttcttagatatatcaaacactatcctaagatgaaacttctgttttgaggatccttggctataaattctcaattatgatacgaacatttattttacaaattctacaaaagtatgttgaacttaagaaaaacaaaacaggtgtgtttatattctcaaaagctttgccatctttcccaatatgactttaatatgtgtataaatggaaaacagggaaaggtgttcagcaacattacagtattattgggaaacctatgcagagtgcacataaatgcaagttacatcacattaatttgttttctttgttggccttatagaggatgaaccattagtgtctttcaggtttgatcctgtcttatatgtgacatcctcagcaacaagctaatatgatctgaattataccaatagcggggctcaagcagcagtgatcaaaacataatatgtatgtggtaaaaaggaacacttgttcttcagtggttttgcctaggtccagtgtaattacttatcaaaacatgttttaagctacagcatctctgttaaatttagaaatgtg

SEQ ID NO: 340358 - DNA, 1000 bp, Homo Sapiens
ttttttttttttttttttttttctcagacacatctatctttatttgtttcctgtcagaaaatttcaagaattacaccaaaaaatacttccgcctctgctacctactgacaaaaatacaccacaaaattataaagcgctcagcggttttgctagggacaacttgttattccgctttgaatgacaaatgaatttacaggtgactcagggtgattggaggttgggggagaagggaggaaaaatcagatgagagcgtttggcaggatagtttgagctatgctagtcttattacccagctgttgcatacgatgatctcagcaacacagcaagccacaaaaaaataccctttacatggcctgtgggagacttgtgaggaagcagtaccacatctcaaataaccaattctcccagctggttctggccctgtgggtcctggagctgacaccctgcagaactggcctccctgaaacatttgtgagaggcaggggaatgcctgatacggttccagggaactgggaggcctggtcaaggctggatgctgcctccttgtcaggagcttctagaactcggttggggagtttggacaaatgtccccttttaacacaacgaagtgggcaaaagacagtcccatttttcagcttcctttagaaacgatttggcattgtggtggccccaaccttcaggtctcttcctggctgtcacttgaggctcctggttggaatcctattgttgttgttattgttatcagcactttgggaaacaacaaacaaacaaaaacttaaaagtcaggtgcctgtgcttatcgcttgtggcctagtgtcacatgcctgtcccgtgccttccttcttgcagccgcaccttccttccctccctctccccctgctgctgtctcgtcaacatgggcagtatccaggtgtggatctagaaaatgcaagcaaaagacaaagaaaatctgcccactcctcagcgtttgctgatgcagaacccaccgtcgcagggtggg

SEQ ID NO: 340359 - DNA, 1000 bp, Homo Sapiens
agagttgtgagtgaattgcatttttatttacgtttaagagtctctctccctccttgtgttctagtctgtgaatggctcacacttggacttagtgtaggctcctatgggaggagcgggcggtagtgagaatcttcatcaaatggagtaacatgacccaaatctctagaggtttcataattttgctcttgcttctaaaaacataatcatctcttatggggtgttatgtgctttgtatcctgaaattttccacttgctgcttcttggtgtgaggcgagaaatgccaccacgtggcactgcaggaggagactggtggaagccacagggctaggccttcacttcccagtgacactgttcccaattccctccaggataagctgagactcctcaggatgtggttctgcagcagatgaggtgcgaacaaagcctgctctgccctgggcacccaggatggcactgagttctaaaaggcaaagggtatgtggtgaggggccaggctgaggccctggtgtggtaccatcatgggcagaagcaccatttgaggccgggtaggagagacgtgcagggcctggccccccaagagaccagcagacaaactgaggcggcagagagagagattccagtgtcaccaggaagactgcagatcataacaacaatggttgctgatttggcatcaaagaggtggcactgtcaaagccgtaattgctgaaaatggcaccaacatgctgcagctggagagagtgggtgaccaacatttgtttgaagaacagatgatgctctttgaatggctcagccaacagcccaaagttttaagggaagacctctctgccagcttctcttggacagtgtctcatgtaaaacctccaaggcacttacatagcatatttttgtgtccactctcttgctagtctgttgtacttctctctgtcggccttgtaggtgtgtgctatctctggcaccagggggtcatcggggttggggtcgcagagcagcgagcagatgg

SEQ ID NO: 340360 - DNA, 1000 bp, Homo Sapiens
tttttttttttttttgtctcagctgtttaagtcaatgccttttatttttagtttttctgaagacaaagctcttataagaatcacagatgaaagatcaggcacaaatcacattttcccccttaataacaaaatacaaatccaataattttagaaaatcagtttttagtgacccagatgcctggagaaaagctgccaggatttttctggtctatcgcagaattttctacatcaatgagaaggatgctgcatatcttggctgtattatttcctactgtgagaaaagagacttagtatatggaacatgcttttttcagaaaattggcagtaactgactttgaaggaaagttggttaagttggacttgcagctggaacttgggaagcactgtcccctccttacccccgaggaaggagacacagaggcacacttccagtaagttcttggttcagtgggtcactcatgtcttcaacagccagatctcattgcgccgtccgtagggcttcatgggagggtcataacccgtgcagaagtagatgtccccccggtaggtggctgtgccctccagggcagcacgcagacgggtggcttgtgctacgtagtctgcttccttggcataaccaccaaactgcatggaatagacagtgatgccttcccgttcctcaatcttaacgcttttgtcactgggagctggtgggtcgctttgaaattggtttggaatccggaaccagacttttaatttcttctgcagagagccatcttcattggggaacacagcaaaggaaatagggactgtcatccccatcccaattcccttgtcattggtgccccccgcatactttgcgaccttgggcattgcttcccgtagagcctcatccacaggcttatctgtcacttctactgtggcaaatttgccgccttcacaggccctttcttcataggcaacttcttccttgtcccctttgcttaggacctgccaaggccacgtctctacgcttccgaac

SEQ ID NO: 340361 - DNA, 1000 bp, Homo Sapiens
ttttgcagttgaaattttaactttattattttcctattacaaaagcaacacatattcattacataataaaagggagggagctcaaaagatataaagaagtctatgttttttttgtttgtttgtttttttaaaggagtctgttttaaaattgcctattatcctattccagggaaaactattaacattttgccatatttcattttatcagtcttttcctatgtatttttgaacacagctcaaatattactctatataaagacttgtattcagctttttcaacataaattacattaaagttatttttatgtcaataaaaattatctttgtaaacaaaattttaatggcaaaataacatttcatcatatagacatactgtaatttatttaaacactctcctaaaatcaaatatttagttaggagaaagttagtaggtcaaagcatataaacattgcgcaggtcactgtggcctaaaaaggctgttcttttttattttttttggaacagagtctcgtactgttgcccagcctggagtgcaggggtgcaatctcggctcactgcaacctctgccccctgggttcaagcaattctgccccaacctcctgagtagctgggtttacaggcacaggccaccatgctcggctaatttttgtatttttagtagagacagggtttcaccttattggccaggctggtctcgaactcctgacctcaagtgatccacccgcctcggcctcccaaagtgctgggattacaggcgtgagccactgcacccggcctcaaaggctgggagggaatgcagtgactctgcgggtgaggggtggtatcaaggccggcagcaagacagagaaggctcacaggtcctggcctagccgctccagctcgttgaggaggaagtccatatcagcacaggtcagtgcagagttggccacaaccacacggaagaagttgccccgggtcccgtggggctggtagccaatcatcatggagccctccttcacca

SEQ ID NO: 340362 - DNA, 967 bp, Homo Sapiens
ttttttttttttttttttcagcagacacagacacagatgtttattccaggaagaggtctaagaaacgagcttcttagagcatgtgtcacggggcagccagtcctggggctctcagagccagccccctcccttcagcagctgaagcaatagcgcccccattttacaggcggagcatggaagccagagaggtgggtgggggagggggtccttccctggctcaggcagatgggaagatgaggaagccgctgaagacgctgtcggcctcagagccctggtaaatgtgaccctttttggggtctttttcaacccagacctggtcaccctgctgcagctgaagcaccatgccccctgacaccacctggaagagccccttgttggtggtgtcacagaagcccagggagcgtcggacctggccccttgaggaggagacgatggacaggcagatttcccactgggacagcacctggaaggtgaagtagtagtagccgggtacagtgcagacgaatcggccggagtggttctggtacggttcttcctggttggtgatgaccgtgtcgaagatgaccacgttgccccccattggggggttccgccgaatggcggagaaggctggcctcggctggtccttgatgtttcctgggctgcccttggtgcctttaattcccgggatgccacgggccccgagggggccgctgggccctgggtagcccaccttgccggggtttccagagggcccaggttccccctggtctcctttaaggccttggatgcctgtccggatgccaggggcccccggctccccttgctcccccttgaggcctggccgcccccgtctgccaggtcttcctgcctcccctttcttcccgtctggtgctcggcacaagtcctcggtcaccatagaggccagcgatatggccagcacacagagcaccagccatccccggggaccctccatgatgcctctgcc

SEQ ID NO: 340363 - DNA, 1000 bp, Homo Sapiens; identical to SEQ ID NO: 159471

SEQ ID NO: 340364 - DNA, 1000 bp, Homo Sapiens
tagggtataaaaagacagatgcaaccatacatttaatttttaaaaatggaatgtatcttacataaggattttgtgaaaaatcttatacctatctgagtattacagaagatgcatataccttccagagctcatggaggaaagagtgtataaacaattttgataaggagttgaaaaacaatttgaaaatagtttacaaagagagaatcaggaggcagaaaaagcttcaagaggcatggtcttcagaaattgttctggaatgctgtttcacttgtatcgatgtcatgttcctggttcaatttcttgaactccaccacttggaagaagacgtgctcaaggatatgtttggcatcctgttggtcctttggtagtttactggttactccaagaatatcaccacacttcctgacataaaattccaggtcttcttcagtacacttattggtaatctgagccagccgtgccttctcagaggagaacgtttcatctaaatcaaatagctccagaggaggaggtggtaactcccggaaactgggaggaaaaaccgcaggctgaagggttggcagcggcgtctcaaactgaggctggatgagctggagtggttcatgtttcacatttagctgctcgtgagcctcgatgacgctgtggaaggaggtggtatccagctggaagatggacaggtcgaagagggtggtaaagtcccttgggatctcatcactctcctggagacactctcgattccgctttgatagggtggctgtgtagggcagcatcatgtagtcagaaatctctgggtcctcagcatcaatctggtttaggtggatgtctcctgtcgtgagccactggaaaacaacatccatgattttgctgttttcttctttgtccaaatattgatcactgaacatgtgacatgaaccaagcactgccagcttcccaccttggttctttgagtgatagaaagccaaaatgggtctgttaagtgggaagcagacagaacctgtag

SEQ ID NO: 340365 - DNA, 1000 bp, Homo Sapiens
tttttttttttttttttttttttttttttttttttttttttttttttttttttttttttttttttttttttttttttttttttttttttttttttttttttttttttttcagagggacaaataaccttttatttaaaggtattatatttagagacttgtatatttcaattttgtgtaggagaaaggaaagccattcttctagaaggcactaactggtttaaatgtgtgagtgaattcctaaagaaaacatgtgcaaagtatagtcaagaaggctgcctggttgtgtgttgtattcactactcttcatcacagactatgaattattgctgaacaactatatcagtcaccaggttttcccatcagagcttcagtgtgttcagtccacagtgtcgcagatctcctttactttctggttgaattcttctggttgatctgcatatacataatgtcctgccccaagaatagctattgtcttcacatatgaatgtggtcgtaaggactggatgctggtgccagaattgccatctatgcaggatcgggcgccaaagatcactgaaactggaatgtcagggtgcattttaccaattcgctggagcattggcctttttgcccatccataaggaatagtcatattcttgaaagctgtctcaccacttggagtctgcacattacagtggtagatgtattctgtcacagtatcgtcttcgaacattgaagaatactttcgtttgaaatcaggccttaaacgctgcactagacttaaaccaaagggtcctgcaatccttaggccagctaaagggttaaagggagtcaatgctgctcccaaggctctgatccaaactggaattggtctgtcttgatcagcaaggtctggtcgttcagggaaaccccaaggctccactaaaatgagatgattaacccttgatgggtacttcagcgagtaagcagcagccaagaatccacctaggttgtgcccaagcaagatcattttgtccaatcc

SEQ ID NO: 340366 - DNA, 1000 bp, Homo Sapiens
tttttggggtatcaaatatttattatatacagtatatgtacacatataaacatacacacattatatagccaaaagattacacttcaaaattaactggaaatggtatttcgagtatttttagcacaaactaactagaggatgtgctctagctgtccaagcagcaataatcataaactctgaacttggcttttttttttttttgagattctattcatagaatcattcttcgaatgccacattcacagcaaaatttggcccattctacagggtatttagtcccacactcatggcagaattttggtaagtttccaggtgaatgtccttcaatgcctttaatatttccaccattaagggaagatgcacagtccccatctggcctggctatgtagctctcagtatatgtttttcttttgtttgtaagcacacctggggcaggatttcttgccaaactaggtggtgtggaatttcggggtttgacattagctcctgcatgaggggctgctatccctttatgagagggagacaaggtctgaagtttgtttcccaaagagctgctacttgaagacactttacctgaaggaacacctacaacagttttgccagcgccacttggctgcggtaatcgtgaagatcctgatgatgcagttccaggagaatttgactttttaagtgcgggtggcttatacacctgtgtccgagaagatggttttcctttggtatctgtagaaaattccccttcattactaatacgtgctgcctgttctttacagaaatttatatgtctatcagctgcattttcattgaatctcctctgacaatatggacattgaatataatcaggatcataagaaggtggaggaggaggaggaagtttgccaccctctttgagggcctgatcaaggcctttagctgctcttatggtagcaatgaattcttcatgtttccttctccaattagatggtttctttggtggttctggcctcggtttgagaggttttac

SEQ ID NO: 340367 - DNA, 1000 bp, Homo Sapiens; identical to SEQ ID NO: 159473

SEQ ID NO: 340368 - DNA, 1000 bp, Homo Sapiens
ttttttttttttttttttacaggcactacttttttactttgatatgtaaatttaagcaattaccccacaataccacctctgctaaagcttttcatttatcagtaagatctttcacaaagttaaagtatgacaagtaaatacacaggatgatattttctgtctgttgatctttggcacatttgtcaagttggagaatctcaaaaggcaataaaaatttctgactgttttgcacattcttttaatctttacatcaaaatataaggccgcaaaaaggcaagctgaaattttaggatatgtggaatagttttaatacagagttttacatacagtacccttacatatagaacaatgtgtttgcaaatttaaataatatctgaatgtacagtggcatgtattcttatcaaagataaattcaagtttactgtctatcagttctaaaatgcatttatacagattgcgagaactgataaacagaatgaggcataaaatattcaagtgttatgtcatcaaatagcctcctcttaacagtctttctccccttttaaaaaaatttcaaaacctatacatacatttttaatttttaaaaacagtctgttaaaaggtaacatttcatgttaaccaccaattcgtatagtctatagtaataaaactagatatgtgatataaatatgtgtagattatgtacatatgtacgttgagtgtttgtttaaaacaagcatacacacttacgcatacctgcgtatgtagcactgggggcacatacaactcacatgagtactggcagacagtaggacctaggctcaaaatccagcaagagctaacacagcaacttagttgcctttggtttcagaaatttgtccacttgtgatcaaagctaaaagttttgagtgtgcatgtattttttaaaaataaaattcatcttcagaaatgaagcttttccagtattccactactagcagttaaaaaaatccacagccacaaattattttgatattctgtc

SEQ ID NO: 340369 - DNA, 1000 bp, Homo Sapiens
ttttggttacatatactgtttttatttgggtttgttgaatgagaataaaaacaccccagtttcttctgcaggtcgagcccttctctataacggtcattacaaacaaccctgaagtggctggaatatagtcagcaaggggcccacatgaacagctcatctggaatctttgcaagtacgtatttatgtcctttggtgccttgcacagtaaggcactgttaatgacgtaacagaatagaggaaatgcccacagcaaatagttctagtgacaatttactagacaagttacagtttaataatggtggtggtgattgtttctttcattttattattattatttttttacaataagggtgtagcctttatactccacacacacaaaataaaacaagtgcttattacgaaaagagtccctgcccccaccccctagaacatcctgaacatagcaattcaacagaacagaaaaatcaagacgtttgatttcaaaatttcaataaaaaagcaaaagtatgtaatgcaacagctgttcaacttccaactctaaataggcaccattaaacaaaaaaccccagtattttaaatttctccagcacacattccaggatcaatgctctgaactgtaatcagctagtaattcataacgggaatacagccttagaatggaagctatattgcttccctgccccctttctcttacaattggagagtgtaggtattaagggatacaaagtcagaggaagaataattaaaaagaaaaatgcccaaagctgcagctgtttggactaggaagacagcattttacaaacgttcaaaaaatcccaaggcaagtaacacaatttgttcactagcactcttacttgaaagaataaagagatcagcatcttattatataaaactgtactttcagaactgtattacaggttcaccagaaactatggatgtagttttaggcatcatcaaggaaaacaggttcagttcagatcaagttagatactgtacatct

SEQ ID NO: 340370 - DNA, 1000 bp, Homo Sapiens
ttttttcttatttgatgatatttattttctctgccaagctgtatagtaaaaggaaaataagtcacatctggtcattggcatttgtatcgtcattctgtaaagacaaaagagtacctatataagaagctccacgtaggcaaatcgacatctggtaggctgctcgcccccaggcagcagctagagtctgtaattctctgcgtcatcctcttctttttcttcatttttgctttttcttcgcttgagttcttctctgaaattatatgcaaagagttgtgggtcttcatcacacatttttctgtatacatcacagaggctcttaaagtgtgagatggagagctggcggggccgaagagtagggtctatgtctgccaactctaacagcctgcccgtgctttccaagcgctgcgcttcagggaataacattctgagccctcgatggcagtatttccttcggaactgaaatacattctgaaccactttttccaccagcttgaatggctgctctatcttgggctgtatcaagggagtgaagtgcaccacgcccacgtccacctctggtttggggacaaaagcttgtcctggaattgtaaagatgtgtcgaacattgcagaggtactgagccataacagagaggcgactacgctgtttgcttcctgtattggctgcaagtctctctgccacttccttttgaaaagtcaaagtcatctgagttctgccataaacaaaaggtccatctctacaggaaatattttcaagccacttgataatcagtggagttgaaacactaaaaggcagatttccaataatatgtacatttggaggatcatcttcccagggtcttttaagactttctgaaaaagccttttctaccttaaatgtcaagacatctccatgaacaattctcagtttcccaggtgctgcatcagaaagcatctgtaatccaggaataaatcgagtgtccttttcaaccaccagaagttcagcgacgtcggcattaaga

SEQ ID NO: 340371 - DNA, 1000 bp, Homo Sapiens
ttttttacaaattcttttttattagtcaaaatcacaatcaccttgattaaaaggatgggacactccaccctcagcagaaaatgatacagtttatagaaaacctccccgcccctcccacaccccaattaaaaactacaaaaaaatctcccctccttccctacgatgtcatggtagtctgactcctccagtggcactgcagctctggagtggccagctcaccacagcaccctccacttcaccttggggagaggagggatgctggtggttaaggaggttaaaaccattagttccagtaatgccagttcccaaacatgcacttccttcctttcccccaaggtctgggaccaaggagaaagggaccgaaatgagcccagccatgaggagcaactcgaggagagaaaatatagcccaaggaggttagaagagttccaatatacctcctccctccccccacctcaaaaaagaaaaaaaggcagtttagggtatttatcacaccaaaaatggttccccctcaggcctgagaaaaagaccaagatgtccagtcttgagggagtactgagaaactcagagctcatctatccttgagcctccattaatttcatctccagggcaatggctaaactaggtcccttttcttggcaacctgcactgtccagaactggagatggagaaatacagggcgaggacatcaggagggcaccccaggcccaggggtcccccctaggttccctcagtcctcgggtgggatgcgcagggcagaatacaccatcacccgactgtcctcctgccgtcggcctgcagaggggaagggaggtgagtcttgggcagggtgagagcagagcactgacacagggggagtcctggacacaacaagggggtccccaggtggtggggataagtgcagattcaaacccaccagtcactgactggctgaacccaggctgctcctggtaaagcttagagactaacggtcacaaaaggacaaagcaaaaccctggag

SEQ ID NO: 340372 - DNA, 1000 bp, Homo Sapiens
ttttttttttttttttttttttttttgatttaattcattcattttttattctttttttggcaaacatcacataatataagcaaaactatgcgttcactatagttacacacattcttttttgctttatacaagttgtaaacaaatttaagtgaataaaattcttggctaaagacatattccagaactctgacatatacttttcagagttaggacaaaagaaagcatatgtaacttccattagaccatcatcatatgaaaaagtaaattagcatatgctgcttttaaattaacatctgtcattttatttaaacacttttttaggttatagctaaaatgatatttatctgaagttttaggaaagaacagaagctgaccatacaaatcttgttcataaccacattggccacttaaattaaaaatataacaaaattgaaaaatagacatataaccaaaaagattctaaatcttgtaaggaaaaaaagaataaagatgccaataagttattttaaaatactttagatgtagataacatttataatactgggtttcataatatcttgttttatggcttcctaatgttgacattttaaagtaacagattacttcaaaataaacccaaagcatttagtgttttacaatttcaatttcattcttttgtaaatttcagacaccaaaaaattcacatcaagggttacaaaacaggcatcttcagaatataatttgtttggcaggcagaatggcttgtaatcttttgaactggaaagccttcaggaagtacttacttgctatcaatgaccctgccagcttcccacattgttacctgctgggcgtgtgaaaagactgacaccccatttttcatataaacccaatatttacttataaaaattagttgtactcatggagcaaaaattcaaatgttataaacgatactaaatcttactagttttatctctagtttgggaaacacacatcaaactaaaaaagtctcattttcataata

SEQ ID NO: 340373 - DNA, 1000 bp, Homo Sapiens
gtgtaattccatttttatgaaagatccagaataggcaaacccataaacaggaagtccactggtggttgctagggacagggaggagggaggaaacggggagctcttgtttaatggctacagggtttcattttgggatgataaaaaaatgttttggaactagacagaggcaatggttacacaacactgtggatgttcagtaccaaatgccactgaattgttccctttaaaatggttaactttatgttatgtgaatttcacctaaatacaaataaataataaatacattgcaaggaaaaaatgtggaaagaggcatatcgaacaaaaaagttttaatgaaaaagaaaagacattaaaaagttctgcaaacaggaaggtttgggcatggagctggctgattttaaaaatcctatcccattcgttcacatcaagctgtccaaacctagtaactggaaaggtcccaagatgctgggctataaacatctaacacgaagactagaattctagaattatctagtattttccctttcctgaaaattccatcttcaactggggtctatgggttcaagagccatatttatgaaccaaagttcaggatacatactctggtacagggacaatggatggtgcaaacaatatccaggatatctagctgttgaaactgcagccctcccaatgactctaaatagtcaagggattaaaagaatccagccccagaagttttagatacaaaaatagtaaccacccaactgaatttgactgcatttaaaaaacataattatttccaaatctactgtgcagctgaagtcttcagtgacgccaacggtcactgggattcgaagaactcccctcccgggagcgtcgggcccttttatgcctatgggatttatctcggctcctacttctacttctataactacgcccttcagaacgcccattataccagctagaatgtgcatctgaagccgccctctgtccctaatcctggtcttttcttctcttg

SEQ ID NO: 340374 - DNA, 1000 bp, Homo Sapiens
tttttttttttttttttttgtttttggtgcagacaaggcagctttattgtactttgggggagaaaaacatgattccatttacggggaaaaaagccattgacactcagtaagcaacactgccatctagtggaatggtgacacaccaccaagaatttcaagacccgataggaaatgtgagtggatttggtttcaattttcaccacaaaacagcacttttaataagctggttttcagagaacttcagatttttttgagaaactactttttatctttaaaatgcataaatgtatgtgttttctctgttttgggggggtggttaagaatgagttgtatttttcttattagagcataaagttctctacttgaaagttagaaaacactttggggcaacctgcctccttgaacatccatcacttctgcttgacagtctaacagcaacccctgattttaacagacagtttataaagaagcaaaactcaactgtacaagaacgacattaagttttctcatttcctctttctatttttacaatctatggtgctaagtatttgtacttcacttacttgaattcctggaaaaaaatcattagaacacaccaataacaattttgcataaatcacataacccaactcttattatgactgcacagtaacagtggaagatattggtgtgaggatgtgggaatgcagttcttaatgaataataaagtaattcttcaggttttaattcgcctttatacccaggtgttggagtgaatgtgttgatctgatgacttctatgagcatataaatgagaatacttaatgaaacacctggatgaaaaaagaaataaagtagtgaggataacatattgttaataaccacaatctcatattgacatttctgttattactgagatttcagattctgggttaaatgctctgctctttggaatatccacgatggttattgatcttgctaatgggttcctctatggcagcatttctgggtttatggttgga

SEQ ID NO: 340375 - DNA, 1000 bp, Homo Sapiens; identical to SEQ ID NO: 159475

SEQ ID NO: 340376 - DNA, 1000 bp, Homo Sapiens; identical to SEQ ID NO: 159477

SEQ ID NO: 340377 - DNA, 1000 bp, Homo Sapiens
ttttttttttttttttttgcattagacacagtttaatcgccttcaaatagatgaaaagttctggtttacactcccccaccgcataagtcatccagacaggaccctggcttagaaagaggaaaacacaggtgctctaggaaatatagccacatataatacataaatcttcttccctgaaatagagcaggtcctgagcagagctgactgggggccacagcccacccccagggtgaagtggctctgggactctgccggtggaagtgctggaagagcggggcttggaggaagcccccagtgtggttaccatagccagaggtgggccgaggccttagggtgagttacccgagagggcagcagtgctgggctttccctcactcagccgaggcttaatggaagaactggttagcatttttttttttttgagggtacatcgggggagaggagaggagaggagagcctctctgtgccttggtttcccatttgtgcattcagggcctctgcaggcctcacacagggagtctgaggggatagtgtttaagtgagcactcaggcttcctctgaggaaaagaaatgaccaaagtgcagacttttattactgccattcctgctcctaatgggagcaggagtcaaaaggaaaaacaaattaaaaggggctaatgagaaaggaggagagatgagacagagagtgtgaagggctatgccgctggcatctcataaattcttattgagaatggcacaggtattaaaaaagtttctgggtagtctacgagaaatgtcaattattatctctactacaactacttacatatatctaatgggaaaagagtggggcttaggtgtcagagtggatgggagacaaaggagaagctacactaataaatacaacaagtggaaggtacctgtcccattcctaaaaggatttgtgggcaatgctggcacttggtggccaggagaatcttctgaccccactctccctcctcttcagtcctgaagaccccaa

SEQ ID NO: 340378 - DNA, 1000 bp, Homo Sapiens
tttgacctgatgggagcctttattcacacactcgcctccccctccacttctctcttctcaggcttttggaattgggtgtagccctcactcctgtgaggacacccagcctggcccccagcaaacctggctggctgggaggagttgcaacaggagcactgcacaatcccagcatgagcccagacgactgatactgttcatgcatggttctccttgggtagctgctggtccccctgggaatgccactgtactgcttgctccctgcggggttcgtcctcaaggccactcagcagtggttatgacaaattatgataaatgttgtccaagggtcagtgttcaaagaagaggaacaaaggtagtcaagggagccctctgcctccaagggaagcaggggatgggggaggtaggccaggccccgctggctcaggagctcaggccaagccctggacgtgcatgggtggtgctgtaatgcccagctcctcccgcagagccctcagggactgctcccagcgccgctcatagtacaggttgaggacacaatgggctctgcgcccgttctgaacggcccatgggatcaactccgagaccagcacttgcaggctctgagcgccaagtcggatcggtccaaagaatgcacccaggatgcacatgggcaggccagtctggacagcctcaaaccatttcaccacgatctcccccaggatgttggtgggcatccccagcagggtgtgaagcatgtcgtgcacctcccggtaccgctgaattacatacgctagctcctcatcatccacgaagcgggtgggtgctcgggtgtctggggagaccctgttcacatccaggaaacggagatactcgcgaccgagggagccttccggcaggctctggagcttgcccaggtcgagggtggatgtcgaaatccggggacgctcctgcaggatctgggcaccctctggatccctcctcatctggtccctgaggaccttcagggtgcggtgtcctgtgg

SEQ ID NO: 340379 - DNA, 1000 bp, Homo Sapiens
tttcacaatccaaaaacaattacagaagggagggagatttaatgttgtccatagaaagacattaaatgtcagactgacaatttagttatggttacaaaccggaaaaccatgccatttggagtaatggaatttgaagttactagaaaacgacaacagatttttgatacagaatgacaaggcttatctataacacgtcaacgttttcgacgactctgaaatttataaatagctggggagttcaccgtttctttcttcaccttcactttctgagttttatccataagatctttgcgtgtttgaattttctgagcaataacgaacaatttcttctctcgttcaatccgctgtgtcaggcagttatactgcttttgcctttctttagctattcgcttaagtccagtctgattggtaactcctttcactttttctttctgcaaggtctctatcctgggcctattaaagactctgtcgactagctccggggctgtttgcaggtgagttgcgacatcaaactgttcaacttcctttttggtgtcaaaaaagaacacatgcttgttctgttgcttcccctggaaatccagcagatggagctctgattttagtctttcgattttcttagcttctgcaaccctcttcatttctatatatttgacgtcctgagttctcatcagctttagttgttctggggttacttcttccttagtctccttaataatatgtactccatcctggagtttaacccgagtcattttgtagtagaattcatctggatttttttcaagagccttcttccgaagagctttgaggtattcttgttttttacggtagtcatctgcacgaagtttgtaatctttctttttctccagcaggcccagatgttttcgaaagccaggctcgcttcgctctctgtgttcccgctgccgggacttagccgccttccgaaaagccgccgccatgtctgtacagccttggaaaagatcagtggagaacgccggatccg

SEQ ID NO: 340380 - DNA, 1000 bp, Homo Sapiens
aataaacataagagtggttttattgattacatacaattttagctatattaatatatattataaactttaagaattagaaataagtgacttttattttttaaccaagaataatctaagttatggcagcatgttcaatgaaaggtaagtccggcacaatttttctatatctgtttctcagataatcaggaacatcatccaagctttacattacgataccataatgaccctcagaacacaagttccattaagtagaaatgaagcatcatatgttttcttttttaggaaagacccccccttttgttgtatagacatacccctaataatcttactctactgtacaaataacttttcacccacaagagctgcctcaagtaactttcattttggaaagctatcaaggcatgagacagagtagcaaaatgccactctggactttgcatcttggagtttcaattttgctttaggatttagaccccagtttataattaaaaccaaatcattcccacattattatacttatgtaggaaagccttgctgtgtccactgttaacacaaagatagaaaatgtcaaatagtttaagcaagtatttggcagaccacagacatgaaacagtgccgtcggaaacggaaacactttagtgttttagaggtgaagagattgatgggtgtcattcaaatttctcatctccttcttctacatctttcagattgagtacttccaaagaacctttgcctttagtttccttttttattagctcatcaatttctcggaagcagcccgggtcaatcagacatacgatttctaactgttggccataatcttcactttctatgaccttgatcagtggcttgagcttttctttcagcttcttgccttcattgactggaaggatgaaccgaagcctcatgtgagcacgttctatcttcattttctcttttaactgctttatcacttccaaagcctgctgttttgtactcttgttggttttcaccgaatagt

SEQ ID NO: 340381 - DNA, 1000 bp, Homo Sapiens
tcttttttttttttttctttgataatttttattatatacatatcagtactcacaatacgttgcttatttaagatggctgtttataagtataaagcagtttgagcaacactgattgtgcattattgtacttcagatgaaaaatccttacatgcggaatcaatgtcttttaaaatttcagataaagaattttcatttgagtagacatacaactgtaagtgctcattttttgtcaattttaagacaccattatgtgtaagaaggattaattttaccataaaattacaaacaccctccatgtcttgacattcacatgaaagaacagcataacattaatcatccaaatgcatatcagagcaaactctaggccttagtgtgaggtgaacacggtaactgctacattatggaaatcggttgggccttagttaaatattgtagtatttttaaaatttgtatatttaaaaagacaaaatgagctgttaagtgataaacagcttactcaatttagcataactttaatttagaaatggaatagtgaaattaaaaaaagcatatgaagcagataaacagtatgtctttagaaatattaaagatttttactctgtttacaagttttgcttttttggttatgcctcttaaatatctgtctttttactttgtctataaaaataattgtccttagtattcctaaattcttttccaaataaagcaattatcgtttttatatggtaagaagttactgaatcataggtttaagatcagtggcacaaatcatacatgtagaagattatgtaacaaattcattgttaggtaaggagtcagagagtacagtacagtaacagccatacaggagaggtagaattcttaatcacagttttatagaaaagatgcagtagtttatatctgtaccctgctttattagttatggtactgtaaatttgcttctcattgcaaatttaacagcgcaaaagggaggggtattcataggcaaggatcttattga

SEQ ID NO: 340382 - DNA, 1000 bp, Homo Sapiens
tttgctgctttgacctgacgaatttattgaagagagctctgtccttctcccttctaccgagaagaggcggcttgcagggctggcacctgtccacacctgtcactgggcctttccctgggctaggctgagtgggagcagatgccctcatcctatgtgcagggcctgtgcaggagccatcacaccaccttgttgatgatgacacctagttcttcaatctcacactggacttcatcccccttcttgagaaagacaggaggtttcctgaatacaccgacacctgggggggtcccagttaggatgacatcccctgggtaaaaggtaacaaactgggagacccaggctatcaggtcctctgtcttgaataccatctggttggtgttgccgctctggaccacttccccattcactcggcagcagatctttaagttgtgtggatctgctacactgtccttggtcaccaaggcagggcccagagggcagaaggtgtcgaaggtttttcccagcagccattgtttcccattacgtctcatttgccagtcacgagcactcacgtcatgagccacagtgaagccgcccacgtgggccatagcatctgtggccttgatgtgcttgcctttctttccaatgaccacggccagctccacttcccaatctacctcctggctctgtggtgggaggaccacctcatcatagggccccacgatggagctggcaaacttgctgaagatgatgggctccttgggcacgggcacgttctgttctttgcagtggtccacataattcatgcccacacacaccaccttatctggtcgtgtgactggagccaggaaggttacctccgaccgtggtaggactggcaactgggcagccagggctcttcttgccactgagagggtggcctctccctgctctaggaactgcgtcatcgtcttcgggagtgtggggtcaaaggcattgaggttgataacccctccaccattccctgtctccaggcccaagt

SEQ ID NO: 340383 - DNA, 840 bp, Homo Sapiens
ttttttttttgggtaagaaaggatgtttattcaggcctgatgcctcgatacagctagatgtacaaaaatatatcattcaaagtcatgaaaaccatcatcatattggtgtgacctccttcctccccttgggcacagcttttgcaactacctcctttgaaatctgggagttggtggggcaagggtcacttcttggcagcttcttcttgggcagccaaatctgcctccttctgagcagccaggaagatggctcgttccttctggaaagctgcaagctcttctgaactgaggtccttcaccacgcgaatgcccagagaacgggcagacccgatgatggagcggacaacagacgacaggggtacatcctgcagggcaaatgcctcatcctgagctttgatgcgggcaatctcatacacatgcttcaaggtcaccaggcctgccacctctttccctgtttgccgggcccccttttcaatcccagctgctgccttcaggaagtaggaaacagtgggctgtccaatcttaatttcaaatgtcctgtcaggcttcactaaaatcttggtaggcagaggaatgccttccttgatgtcctttgtcctctcattgaactccttgcaaaactggttgatggaaacgcctctctgacccagcactgggcctagtgggggcccgggcatggccaggcctgcccgcacgatcgcccggatcacaccgccgacctcgggcttcctgaggccccgggcggcccggccgagctttgacatgatgcggggctgctggcttcagttcacctcaggggagcagcaagagcgaagctctgggcgccaccatcttgggccagag

SEQ ID NO: 340384 - DNA, 1000 bp, Homo Sapiens
tttttttttttttttttttttttttttttataattttaaattttattatataggttttctcaataacttcccaacacaaagcaaaaaacaccaaccattcccaaaaactacagatacatagttgagtctataagttagaaggcagaaaaatattaacttcaaagagtttaatgatgaattagtactgtatttctgaaaacattggtgatactgaaataatacaccaatagacatgaccaatatgatcctggcaaaatgcacatctcgctggtcaagcagaaatatatccttttacaaatgttctgaggaacaatgcttaaaattatacaagggtttaaaatataattttaatgaagtatatataaagtgtacatgaaaaggggaaatatgaaatctggcaaaagtcttttggctttcttacaaatggtatccttataattccccaactatcagaggatgacatatttttctagaaaaaataaaacgactgcaattgtatttcctatgatgctttatgtatcagagtcacttgcagattctggtctgctgtcatctggcccatcactttccttgtcccagtctttcatagatgctcccatcatgaaatcatcacgtaggatcgtccaacctgggccttcttctgatttcacttcagtctgtttggcttttggtttcttcctgcttgaagcagtctcatttgtacttccatccatccctctcaaaacactgatgaaatctttcttggaaacagttgatatcaacttagcacgctttctcatagaacttccagcttccttaaccttttcatcaacattcttttgatgtttctgaacagcattaaataattgcaccacaccccttgttgcaattctctgaagatttctctctgtctctttgtcttggacaacatctggctttactctgcacatcatttcccactccagcctcttatcacgctgttttattttctctagtctttcttgctttaacttttcttttt

SEQ ID NO: 340385 - DNA, 1000 bp, Homo Sapiens; identical to SEQ ID NO: 159480

SEQ ID NO: 340386 - DNA, 1000 bp, Homo Sapiens; identical to SEQ ID NO: 159481

SEQ ID NO: 340387 - DNA, 1000 bp, Homo Sapiens
tttttttttttttttttttgaaatcgcacactgaaatatccttttattgcaactcaaattttcaaaaaccagaaaatcaaattattatgctctagccaaattatgtaatgttttctttttcttttctctgtcacccaggctggactgtagtggaacaatcacagttcactgcagcatcggcctcctgggctcaagtgatcttactgcctcagcttcccgagtagctggaactatgggtgagcaacaccacagccagctaattttttaagtttttgtagagacggggtcttgctgtgttgcacaggctggtctcaaactctggcttcaagtgatccttccacctcagcctcccaaagtgctgagattacaggtgtgagccactgccccaatggtatctttatattatttttccttacaagttacttcaaattcttgatgttgaatttcatctcactgacttcaggcttttaaaacacatgggaatacttgagacctaagaatggttgtgagtcaaataaaaaagtagaactaaagtatactgaagttattcaaatacattcaaactataaagatcccttatagattactggcatcaaggtaggaaggaaaagatacaagaagtaaaatgcaacactcattacaggttgtcaacattattggtatacagtttatcctaacacagagcagccttcttaacctgctccataaaattaccagcaagaaagaaaagtacaagaataaggttcacagctgaattggcttggtgtcctaattccctattccagtattctcagaaggatcccatctatgatatatgcagaaatcacagccacatttgaatggttcaatcttgattcatactgaactcccttaagcccagcagtttctcattcttaaaaggtaggttattagagccccaaagcaattttcataacaaatctacctttgtatatttaagaatatgcattaaggctaggagtggtggctcacgccagtaatc

SEQ ID NO: 340388 - DNA, 1000 bp, Homo Sapiens
gggataggccagtggaactcagaactgatacatatatacatgtatgtctatcatattcaatgtctattaggtgtaaatcatctcttcatgtaaaagacactactggtttgaggatagactcgtctaggaatattttgtccttctgtgacagcaccactatccatcccaatgtaacatttctacaaagggaagatatcttaaccaggcatacttatatttgctagttggaaaatcattctgaacagttttaattccattctattgaatggattattgtatgagctatttggggatcagatataaatgacaatcacacagaaccacttttattcaacatagataaaatgtgatgagtgttaacattttaaataagcaatctgcttaatggacattggtatgaaggggaagtgtcattctttacctcactcctcaaacacttttctatccaaaggttggtttgagtcagtattggcatcatacaaccacttactgtaaaataagtttattagtggtaacgtgatagaatttattcccgatatctgatgttacaaactttagggtccttgagatatgcaggatccttgtatgtaactggcataaaccccattatttgagctctcttaattgcttttgtgatttctttctgtttcttcccacaaagacctgtaatgtgccttccataaatgcatccagtaaatggagaaacaaactgggacaaaagctgtacattcttataatctacatgctttccacacaagatacatttcttaagaggttctttataaggattttccattgaaatgggcaggtcctcattgctggatacctgttgtgaacaacctcttctccaaagcaccgtgtgagtcccgggatgtgtaaggctgacagcagccgttaccaagtgtgtcaacttcttcctccctagaccaccgcaaacagcaaccacagcggccatggttccgcgtttcttccacttcctttcgttccaaatcgttccgaa

SEQ ID NO: 340389 - DNA, 527 bp, Homo Sapiens
tttttttttttttttttgcagaaaagaaatttattaccaagctataaattagaggcggcggggtgggcggggggagccgagcagtcacgtatggggcatctgccctttttctctgtcctcctgggcctggattttgagttcctcatccaggcgctcctttgcgcggaccacctttgactgcaggtagaaggagccacccacggatttatcattcaccttaaataagtgttcatagttcttctggacctcctcagggctcagcttggacacgttgagaatctgctgtgcctcctggaggctgaggccggagaggttggaagcggctgcagaccggtgtccagcgcgtcctcgggcatcagctgcggcccggctggctgcaaactcctgccgcaaggcccgtgcaaaggccctgcccaccacctgcacgcccatcacaatgatctgggccaggtacttggccatggcagccgctctgcctccggggctcaaactccgacttcctggccccgcggccggggatcaagcgt

SEQ ID NO: 340390 - DNA, 1000 bp, Homo Sapiens
ttttttttttttttttttttgatagaaaagtacccttttattgagaggtaagacaagtatatttacaatattcaattgttagataatataatctgacagtgggactttttaaagcagcagtatttcaggaattacaatttataaggggaaaagaaaaacattccaaatatgtttctgttacagaaaatacacttgaacaatgacagaaacacttaaggctatgtagtattagaccttttcctccatctctataaagtacatttttgttacagacagaaggctgattttggaaagaaagaaacaataggatgtatagtgctttctatcagcagactagtatgtttaaaaatagtctcatcaagggttctgaataagaaatataaatgttgccaggcagtcccaaactcacatttgatattaactgcagactcatttaaaactgaaaactgctccagcctctctcaatctttactaaggactgggagattatcaaaccctttcaagtctaataatgcttttgaattaagattattgaaaaaaggaatctctgttacagtgcaaagaacattttgatagaaattcatgtctacaaaggagttaaatacagatgtcccttacattagcagatactattcttgctctaaaaaggtagaattatcaagacattgtaaataatatgggtcaaaaatatgtgtaacagagttctacagggcaccttatataaagtcaatcctcaaagtatgtatttgacactctccaagtgaggatattacttttttgaagaacattagacacaacagtagcctcttattattccattaactattgaggtaggagtctccatttgtcaatatcatcccattttcacagatacatcgtaagtcaaatgcaagtaccaaaaatgtcttaatccttaagactaaaccatcacactatacaccaagtctttccttatttagatgagcaagattgggagttctctgtgtattaagagatttaa

SEQ ID NO: 340391 - DNA, 1000 bp, Homo Sapiens; identical to SEQ ID NO: 159482

SEQ ID NO: 340392 - DNA, 812 bp, Homo Sapiens
tttagtgtaatttcttttaatgtataggattgtttccaactcatcaggtctggtgcaattctgtcacgatttaacatggaacatccgggctgcccttcctgaatagtccagggcaagagcagtagtgagtgattcttctcttttctcgggttcactttgacctgaagcaagttgctatcttcggagagtatgtatggaccccaacagaatggggcccaggggtcttcatcccttacaaatcctggactgtatcaaagggaaggcctcggtaattcgtgctcacccagcccattcggatcctgggtcctccctctcttggggttcagggggttcctagagttttcttgttcccacccaggcatggggggctagtgtccagctgagagttctctctccactgggcgggggtccgtgcctggatggccagcgcatggaccggacctcccagctcctcggccagcgctgcgtggaccagccggtgtcgttgtagggggctcagtccctcgaaacgagagctcaccacagccacgcggaagtgagtctcactgccaggcgggaccgcgtggccaccgctctcgttgcgaagctctagcacctcggggctcagggcctcctccaacttcgtgcgaatggcggcctccaccggaccgatggccccggatcccgcgctgccctggcacaaacaaacgcggccagccatggagaccagacccaggaccagccgcccactcagcatggtacgccagagactcagacgccaggagtgagggtcggggcgatccgcctgccgctccagcctcggccactgcgcc

SEQ ID NO: 340393 - DNA, 1000 bp, Homo Sapiens; identical to SEQ ID NO: 159483

SEQ ID NO: 340394 - DNA, 1000 bp, Homo Sapiens; identical to SEQ ID NO: 159484

SEQ ID NO: 340395 - DNA, 1000 bp, Homo Sapiens; identical to SEQ ID NO: 159485

SEQ ID NO: 340396 - DNA, 1000 bp, Homo Sapiens; identical to SEQ ID NO: 159486

SEQ ID NO: 340397 - DNA, 1000 bp, Homo Sapiens
tttaagaattgtaacactcaccgtgagggtccacggcttcattcttgaagtcagcaagaccaagaacccaccaattccagacacattagggtggtaggccaggcatgggggagatcctacattccaggtacccctagcccttcccctaagcaggctaaccttggggattccctggagatcaaccacttccagtgagagggagtggacaaaagcctctggaccagccattccttctctctctccaagtcctttttcctctctagcatcaaaaccaagcctaagtattttgaggttacatgaacatctctccccttcttttctgtggcagagtcccttagcaaatagaggcactggggcctgagtggatagctctccaaggtacactcattgacacagggtatcaggtagggctagccccagcccaagggagtaaggcaaactgtcagaacctgggccatatgggctggagtgtgaggagagacaaatggctaaaggccctggcaccattcctggatgtaatttagccacccgagcatggctaaaacactgggtactgagattggaggatttaagaggagctgtgtttaaaatacccttaaacctggtattggaaggctgatgatgcagcattgctagatccctgtcattgaaggccaaggtggcgtggctatgtttaagtcctgagtctgaagaacttttagagtgtggttaaagaatcttggatttgggactggagggttaggaaggggacctggtaaaggtgtccctcagattgtagggctggagactgaactctgagtaaaatctaaaggtggggtaggagaggaaacagcaaaggctagagatgtagaaaaaaataaagcaggagagtgtcatggaagctaatggaagaacacagttgcagaaggaagtagtcagatgcaaagaccattcctccaaggggaccgtcacttgacacctctggtgcttaatgagctctgacttttcacgaaagcctcgc

SEQ ID NO: 340398 - DNA, 1000 bp, Homo Sapiens
ttttttttttttttttttttttttttttttttttttttttttttttttttttttttttttttttttttttttttttttttttttttttttttttttttttttttttttttccttttatattttcagtatattaaaaaggaacagtacaaatgctgtggtattaaaaaggatccttatttttcaacaaatgaacttttataaacaattctgtaatgaaatgaaaacagtatcttaatacaagcttttgttaaacaagattttaaaattttaaaattagaaaacgttaagattaaactctttcaaaggttcaaacaaaaaaacaacctgtacaatctccattacatgtgtctttgtacacagtctgggcactttgaaaatgttaaagtttttaacgtttgactgacagaagcagcacttaaaggcttcatgaatctattttccaaaaaagtatgctttcagtaaaacattttaccattttatctaactatgcactgacatttttgttcttcctgaaaaggggatttatgctaacactgtatttttaatgtaaaaatatacgtgtagagatattttaacttcctgagtgacttatacctcaaatgggatttaatgaacaatttctaaattttagaatgaaacagtatgtgtaaatctacacatgtatgttcaactagggtaaagctcaagagcatgtcacagaatttatacctaaattatataagaagttaagcaatgcctttatccccaaactttaccaataagccttctcaaatagaatgttagtaaagtgaatcactgaaaagtttcatttttgaattaactaaaataccagtagccattttagactgtcaacctggatgttttcttgattcactagcaagaaatttcttgcaatacaaaaagataacaaataattaaaatatctgctttatcatacaacttcaccccctcctaaagtgtctaaaatgattaggaattgtagcactttcttttgcataaa

SEQ ID NO: 340399 - DNA, 1000 bp, Homo Sapiens; identical to SEQ ID NO: 159487

SEQ ID NO: 340400 - DNA, 1000 bp, Homo Sapiens
ttttttttttttttttttagtagtattacattgtgaattttattttcaaatttgatcaataaagatgaaaataataaaattaagcagtcaaaagaagtagcaaaaacaagatagtcattcatatatacagaacatatagattcatttctagttgattcaatcctatttatgtatttaaaatacaaaataatggccatctggctagttccaacggtagagcatgagactcttaaaatacaaaatacatcttaatgtgtcaagaagaccacagttagcaccaggaaaggaactttactttagcttctgattacttttttatttttatttttactttattattattattattatttttgagatggagtctcactctgtcacccaggctggagtgcagtggcacaatctcagctcactgcaacctccacctcccaggttcaagcgattctcctgcctcagcctcctgagtagctgggactctgatagatgcgtgccaccacacctggctaattttttatatttttagtagagatggggtttcaccatgttagccaggaaggtctcaatctcctgacctcatgatttgcccacctcggcctcccaaagtgctgggataactggcatgagccactgcacccagcttagcttctgattatgacctcagtatcttggaatagatactgaggaatactatgtatttatcatcatgaattaataaaaaattaattttgaaaagtaattgctgtatatcatcaattcataagtgattcaaatgaattaaaaccttaaaactggtactacttgatgttgcgaacaactctcctacagtgatttgtcttcatctcttccaatgcttgttccagttgttgaaccaaatggagcagggtggctgggtctgtctgcagaactttggtgttgtgatctccattttgattaaggtgtagctttatagtcactgctggtttaatctgttgcctgagacttctacttgcaagctgtacat

SEQ ID NO: 340401 - DNA, 1000 bp, Homo Sapiens
tttttttttgagttgggtccatttttattgtggatcagggcttagaggataagcaccggtcagcattgttggctgcaccatctgccatccttctctgtgagccacctctgtgagagagtctaaattcagcccaagaaatcaggatcaagaaggggtaaaaagccgtggaccacatggccactcctgctgtatctacacctaccagtcactgaacacctgcccaagtgtgacggcttccatgcaggagacccaagtggctctgctagggagaatgacttatttacctaaggcttttttatttctcaaaagtggggggaaaaagggctggtttctagaaacagatgtggaattgaagaatgtcccagggagctaagttttaaggactaatcacaaacttgtttctccaacaacatcctgaatccattccttgcaccatcacacatttttcatgcatcagaagtgtttctagagctccagaaccacgagtacctcatcacatcctgagcgctcacatcccccagcaagccgcctgcaccaggcctttctctagaagtcctgagactgagtactctccagaggctggaggttcgtgcggagtttgtacatgtggttgagcgcttgtgtgaggaaagtcccgctggtgttgatctccatcaaggtcaagttatccagcttggcatgtgcctcctgctgtctcacaaagctgtcagcagacactcggagtttggctatacgagtgtcccacatatccttgaccagggtccggatttcgtctgccttcgggatgttgtctgaagcatgatttaacaggagcttcgtaagttccatgtagtaagggctgggcattggggtaaaagtttcttcctttcgttcatgatccctcatcttctccaacttttctacatccatccactctggagggagcaggcgacatttctgtctttgtttcaggttaatcgccagccacaggggcacttccacgggtaaaccagggttaaaa

SEQ ID NO: 340402 - DNA, 1000 bp, Homo Sapiens
ttttttttttttttttctttaatatcttctttaataagacattacagcacacaactgagcccccagtgtgtcagttaaacatggggatgtatatccatgtgaagagaatggaaacaagtttaatcttaaccccattccttttggcaagtaatagaaatacagcatacaaatggaccaattctctctcagtgttattttatcaagtctttgaagacaccataacagttttataatgaactttgctgcaatctgttaaagaatcttcaaattaaattacagggatgtttggtttttaactcaaacacagtaaaatggggattgtactaataatcccctcatgaagtataaggatgattatgctcatgtaagatcaatgcagctatttccctatcactgagatatagtgttaaatatggtgtcttcagctgctcataaaaaagggttaaatacaagaacaaaaaaactttcatcctgaattagtcactaaaacaaacgaaaaaaaaaaaccaaaacttgtgaatggttttatatgatttgtcactaaacatatacatatgctcaaagcacttttaaaaacttttaagttgtgatttaaccagaacttctgcaatatccacaagaaattaggtaaaattctaacgttctggtaatcgacatgttaggaagcaacagatattacatctgaaacttaggaaataaaatacacaaaataaaaggactattttaaagtaagggcataagaataggaattgctaagaaactatcagccctgaagcttttccttggaaacgtcttaaacttacagggaagacaaggtgggcaaaatatgcagagctacaaaacaaagcaatgataagctacagcagaagagggaatgcattctgtaatccacaggatcagataaatggctctaagcagttaccagtaagtattttagtgttctttctattatattaatttaaaaatttaaaccgagttaacagcagttttacaagttaag

SEQ ID NO: 340403 - DNA, 1000 bp, Homo Sapiens; identical to SEQ ID NO: 159488

SEQ ID NO: 340404 - DNA, 988 bp, Homo Sapiens
tttttttttttttttttttttttttttttaacaaatatttaaatcatttattgccattaagttacagcatctcaatatatacactgcatggaaatacacaggtaacatttttaaacagtggggacaaaattttaagtacgtggccagctgttggttgtcttgtggtcattaaagacaatgttaagaatcaggagtacttaagtgctagtggttacaaattttgttctcttcagtttttcattaagtaaattctaatagatgatatacatattactgcagataaaacatcatcagaaattattaaattaattgcatattttgagctactctttatggaaagaagtaaaatatttaatacttgtaaggcagcagagagttggtttagaaactctcagctatttctataaaaatagaatggttagtaaaaatagcattcagtgtattttccttagggaggctatttataatgaaatctgtgactcagcagcagctggcaatgctgtcccttcaagaccttgttcttccttttcccattgttatgcagatgccgttttagtcatctcgtgtttgataagccgccctccctggatgagctgggctacttcatttgttgcgtggcatgcaaacagaagccagttccgaggctgtaccttgtaggcaaatctcatgaatgtcaaagaatagcaacagagggcaaatgtcatccgcccactgataatctctggagactttttcatatcattgatggcagcaatgggaagaccccagttggctactgggccccagaagtgcgtactcatgaggtagtcccggaaatccttgcttcggacatagtccgccgctttccgcaccaacgcgcccgccatggctgtgccgacaccagaccccgagtggtccctgcctctgctgccgcttcccagagccaatgacacccaggccaaccccccggcagccgacggcgagccagcccgaaggcccgcctcacgac

SEQ ID NO: 340405 - DNA, 1000 bp, Homo Sapiens
ttcttgaggcagggtcttactctgttgcccgggctggagtgcagtgggacgatctcagctcactgcaacctccacctccagggttcaagcaattcttgtgcttcagcttctgcatagctgggatgcccagctaatttttgtattttttttagtatagattttggccaggctggtctcaaactcctgacctcaagcaatcagcctgccttggcctcccaaagtactgggattacaatctgatttagttttacaaatgactaacaaacttcagaaaacattcatagagtcaataatgtattatacatcttagatttatacatttcatatatgcttttaaagcttcaattaacagttcaatacaaaatttaaaaacaaatatatgcagcagtggttctcaggcacagaactgaggaggagactggagcaagtcttttccctagcatacatacagtgaatactatgaaccatgagagtggtatgtttccttctgacctagctgcctttttgattgaattttgttacaatgaacagctttaataggtatgatattgctaactggaaacaatgagatttaaaataaattgataacctgtattttcttgaagtctttaagacctaaaatgattacttttctcctaatagagctccagaatcatccaatgaaaataatattgtccataaagcatctagagtatctgcctaagaaccactgcccagggttattcaatgtcttcaggcctcacaggatgaggtaatggtatgatggatttcttctcagtatccctggaaagtgctttcctcatatcataagcgtcctcatcaggctccccgttgctggccgaatagtactctatgaccgtcctatatacactgtagcccaactgcttgtacatgttaactgcaacttggttagatactcttacaaagagatccacaaaaaatccaccctttctttctgaaatctcctctagtaactccataagtttagcagccaaaccaa

SEQ ID NO: 340406 - DNA, 1000 bp, Homo Sapiens; identical to SEQ ID NO: 246514

SEQ ID NO: 340407 - DNA, 1000 bp, Homo Sapiens; identical to SEQ ID NO: 159489

SEQ ID NO: 340408 - DNA, 1000 bp, Homo Sapiens; identical to SEQ ID NO: 159490

SEQ ID NO: 340409 - DNA, 1000 bp, Homo Sapiens; identical to SEQ ID NO: 159492

SEQ ID NO: 340410 - DNA, 1000 bp, Homo Sapiens; identical to SEQ ID NO: 159493

SEQ ID NO: 340411 - DNA, 1000 bp, Homo Sapiens
cgctgacagatggatgcatgtctttatttaattcgttcattccaggttcatcccacatcttcacatctcaccctcccaccgtcaaaacaggtcccatgtaacaacagggggccaaaaacaacaggcttgcccacagtctccatcaccccctaccccacggaacactgtggggacaacggtaccttgcttgaaagccacaggtttcaaacacttttaggggcacaactctcttcaaactggaaaccacgagccactacgtagaacaggctgtcagggagtttcaacctgggcaacatttggggtacgtccctggagccccaagttccctcagagcaggtgaaaactcctgcttcagagcccttctttctatccaatcacttgaaacgttccatagaaagaagaaagaaaaaagaactcccttcttgaaatgcgaataccaagatttcgcacgaccaacacttccacctgttgaaataaacagtccacaaaattaaggcatttgggggcaattagagggaagtaaagcatttactaaagttacaatatcatatcaaaagtgttcattatgcttttgaaggctcttaactaggcacaagggcagaaacagtcacggtcccggccactgcaggcaaacacgtgttgattaccaaagcagaaagggaaacagagagctggtggtgagcattctcttcagcaggtccccaggcaccaggcccccctccaagtcatgcctcacatgcccaacagcaaagagaagcagtgggagctgagcagacactgcagggcagggcagggcactgctggctaaattacagcagcaactgtacacacgaaacagcttcttcataaacaccattctcaaactggatttatgcacattcatacactacctagtatatctaagagatcttgaaatcaaagcaacataaaaaagagagactcgcctgcaatccaggcactgagcaacgacatgtcaaggcaacagaaatccccctcctgc

SEQ ID NO: 340412 - DNA, 1000 bp, Homo Sapiens; identical to SEQ ID NO: 160790

SEQ ID NO: 340413 - DNA, 1000 bp, Homo Sapiens
ttttagtataatccaaatttattatatctaagaggctatcatgggctgtaagtagaatcaaaggttaagaacattttatgcacttattccacaaacatttactgagcatactaggtgctgggagtgtgacagtgagcaaaaaacacaagagtgtgcaaagagtgatcaaaatgtcaaccagtaagaacagggaagagctgctgaggccaagaggagacgactagttctaaagatgtgtggatttcacagcctggtctctggttttgagcctgattgcaatttgacatgactcttggcttaggaaatggtaatccctaataagacagggatgatattgatgtagaacttgacataagatctctattttcttgaaaagagcacaaggtttgttttaagtcctgaagtagctcaatctcttccttcaactgctgccacctttgttgagatgcatgaatttttttctctattgctgcttgaaaatttacaaatgtgtcttcgaacaatctacagtcaaaaagtgcactcccgatttcttcatagtctgattctgaagtaagtctcatccatgagtttttctggaattgaatgaactttgtctaatatttcttcaagtaagtaattaagaagtcctgcttcccttgcatttcttaagaaaaggaactttcacagttgcatctgtgtgtctgccatgctcttctttcacttgtcttatgaatgtattacatttcattgtttcgggtggctgtacatgattgcctgagaggggtttcttccttcctctttttcttttcactcctgaaaatttagcactttgagcgatgatcgggaattgagcatgttgctggcaaagcagtttataaattcctcgaactccatcagactgtggaactgcgtcgtccttcttggcacagaaaaagtggtaattcttgttacagttttttaaatcacatcccacggtggctcctcttttatgacaaaatttgcatttcaacttccttcc

SEQ ID NO: 340414 - DNA, 1000 bp, Homo Sapiens
tcatttttgaggagcagacttgtaaatttaacttgtgctaggtagtagtggtttgtttttcttaaaccaaaactctgccaaacttgctgatcttctgcttcatctactcaggtagaataccaggtcaagctgctgctgtggctgctctcaccatatgaaaccagtttgtgtctgcattattactgtcttcaggaaaactttaaattcttcagttttctttactcctcccatatttcacttcctgcctaaatccaagttaaattatacaatttccactggtcttcaacacggtttaattctgcactgtcctttcctttgcatgtcacagtagctgttcacacattaaatattatagatatgttctgctcttgacatctacacacttacaaaagcagctttgtactttgtttggtgtgtttgttactatgttggctcacaaaaagcagttttctcagttctaagcatggtactttacaatttttaatgcattcatacaacagtgcattggaaaagtactgagcctctacaaaatagctttacatttttaaacaaatgaatgtgattttttttcacttacacaagcataggctttttaatatttccacaagataaatatctcaattaaactataagctcactctacagtgtgccacagtgatgggcttaggagacagttatacacttagaagatcctaaccttagtgttatttacactgacatgtccagtatcaccaagtctgaaaggtgaacaaacaatactcagaatgtggctgaatttgtgttaactaataactgggaatgatatagctttaatcacttatgaaacacatactgtaacttagtctaaactggtaatttcctttgctcctctcttatggtgtgggaaaatttaaagatcaacatgaaaaaggagccattgctaaggcagatcttttaagataacaaaggaaaaattgacaagtgtatatgataaattatcagtaacagtgatgctaccaat

SEQ ID NO: 340415 - DNA, 1000 bp, Homo Sapiens; identical to SEQ ID NO: 159494

SEQ ID NO: 340416 - DNA, 1000 bp, Homo Sapiens
ttttaaaggcttaatgggacccatttatttatttatttatttatgatggagtctcactctgtcacccaggctggagtgcagtggcacgatctcagctcactgcaacctctacctccctggttccagctagtctcctgcctcagcctcccaagcagctgggactacaggtgtccaccaccacgctcgtctaatttttgtatttttagtagagacggggtttcaccatgttggccaggccggtcttgaactcttgacctcaggtgatctgcctgcctcggcctcccaaagtgctgggatttacaggtatgagccaccacatccagccaatgtgacccattatctcacagttctatatattagaagtccagcacagaacagatagattctcatactgaggatcatgcaaagctgaaatccaggtgtcagcccaggctgtggttatcatctgaagcttggagtactcttctaagctgactcagatttttggcagaattcagttccttgtggttgcaactgaggtcccaatttttttttcctgcttgctgacaactggaaggtaggtctcatctcctagaggccacctttaggttttagccaatgtggccctctcacatacttcttcaaggcttacaaggagaattcttcttgcaaggggttcacttggattaggtcaggccctttcaacagtctcaaagtgagttgtttaggaaccttaactgcatctgccaaattccttcaactttgtcatgtaacataatctaataatggacatatcattatggcagtatcatcaagggatattttatttgtggttaaatgattgctgtgaacacaatctataaatatatgactaataggattttgtaactggctctataaactttaaattttgtatcattttacaatttacaaagtgcttgtatatattttgcatcatttgattttcatgactacctgtcagagaagcacagcagatattagcccaatgttattagtggct

SEQ ID NO: 340417 - DNA, 598 bp, Homo Sapiens; identical to SEQ ID NO: 159495

SEQ ID NO: 340418 - DNA, 1000 bp, Homo Sapiens; identical to SEQ ID NO: 159497

SEQ ID NO: 340419 - DNA, 1000 bp, Homo Sapiens; identical to SEQ ID NO: 159498

SEQ ID NO: 340420 - DNA, 1000 bp, Homo Sapiens
tttttttttttttttttttttttttttttttttttttttttttttcagctaccattgtttttattgttactgaggctgtcagtgccgcctggaagcactaacactttttcccatttcctgcctcagcccatttcacaggtgaggaaatctgaggctcagtgagggacttcattcccttcatctggtaaattccatttacaggggtggggctgggtgctctatcggtgcctggcttcctctcccaggggtgcagtaggggagagtccattcccctgtacctcatttagccccaggattgccctgcccaaaagatgacactcctgcccccagtgtcctggatgggaggcctcccagccttcccaagcaatggctgtaatcctgtgggtacagagtctggctggggatcctgctgctctgctgggaggaggagtctgccttcatgggagactcggtccctgccccatcggtaccgggtgcctggagtccacctgcccctcacggagagatttctggcctcttgtccttgaactctattctgtcctgctcctggctctccagcggctccaggtggctgtgcttgtcctggaccatctttcccggagtctttagaaatctgaacaggagtttctgccccggttccttcttaatgatattaagcttataatagtggcgcagggcacgagacatcttctcgtaggtcatgttcacccggttcttgtgatttccccagagtctggcgagcccatttggatccacaactcggaagatcttggcgtccttgtcttcccacttgatgtagggctcatatcgggtatcaaggagcagctgatacacgtaatcccacagcaggcggcagtcagcgatcctgccgtcaatgggggcctgcggcatcgcggggaaggaacagaccccctgggtcctgcagccgagctctgcacagtgacataagttgagggactcctccttgccaggggtccaccttgccaggccagggtcatcc

SEQ ID NO: 340421 - DNA, 1000 bp, Homo Sapiens; identical to SEQ ID NO: 159499

SEQ ID NO: 340422 - DNA, 1000 bp, Homo Sapiens
ttttttttttttttttgaacctgaatgcagagaataaatactttattaactgattacagttgaaagtcacaaacaaaaaagggggtatattaaggcaaagcgatatatatatatatatgtatagacaaatccaaagattgttacttctttacattttaataacctctgcatttttcttttacacatttaggcagtgtgctttcttttctcctcagttaaagcaacaccttggccaatatttctaaatcatattttgatgacaacttacaggatcagtgattgagacaatgactagtgtatcaaacgctatctgatagttttcttagcatattccgtgtgtggtggtacatttattgtggtgtgcaaaatctgacaactgacgatttttctctgtcagcaaaactaacaaatttttaaaaatgattttaatagttataactaaaataagcttagacttccaagtcagtcaatgcccaaactgcatgttttctgccgtccccaaatccttttacatgttttaaatagcctttagaatatgatcgatcacatggctgtatttcagatctaaaagttttgagattttcaaaatcaaaaattactttcttatgcaaaatggcaatgcaaacagcaatcctacataatgtagaataatttttcttctgtacggctccttctaaaaaatgggtaaccacacacacacacacacacacacacgacataaatttagtccatctgaagaagcactccagctttctaattcccacttttgaaggaaaaggcagaggcatgtttacattatcccagaaaacagaataaatggctttatttggtatcttcaagaagcttctccttccgtaggagatgtaggtgttgtgggagaaactgtaactggttttcgtgtaattctgtctagttctgcatgaacatctaagacaggcttctggcctgactttttggtggatggtggtaaaccactgcttccacctccagccccacctgc

SEQ ID NO: 340423 - DNA, 1000 bp, Homo Sapiens; identical to SEQ ID NO: 161089

SEQ ID NO: 340424 - DNA, 1000 bp, Homo Sapiens; identical to SEQ ID NO: 159500

SEQ ID NO: 340425 - DNA, 1000 bp, Homo Sapiens; identical to SEQ ID NO: 159502

SEQ ID NO: 340426 - DNA, 1000 bp, Homo Sapiens
ggccttggaagatgagggcagggcgcagtttgaacagagtccctggcccggggagagaatgacagtcaggggtcagaggtcaagaggccagcaggctcaagagttctgtggacggggctggtccgtccaggccagccatcacctctccaggaagaatttgagagcccggtcgatgttcatgcggtggcccaccctggtcacacctagatcgacgtagtcctccttggtcaaggcgggcaggtgggagccatcgatctcgtggtccaggaactgggctcggtgctccgccaaacccagccactccagccaatcagccacgtcgaacttggtccagaaccccagaggtttagcgccaaacggcttgtccgggggcagcgagagcaggcgggtcggtgagagggagcgcgaggcccctgacaaggctcccccgagccccccggatatccccgggtgtggcggcacaaagactggggcgaaggggtcagccgagcctcctgcccctccagttggggagccacggatgtcaaagaggcctgggtagaggggtccggaaggcaggatgggcagggacgagggcctgggcgcagggctgaccttgtgctccgaggcgggcagcagcgaggggctgggggcccggcggagcagagggggccgcatctcgaactccacgccctggaggtggcgggtggacgtggaggaggaggaggctgagggtgaggtggcccctggggccgcagcggctgtaggggagacccctgttccggtggggagtggcggcagaggtggtttgggccagttctgaaacaggctgctgacaggcttggagaggagtgaggactgggagtcgtcggagagtctctgccgctgcagggaggaggtcctctcggggacatagctggctcccccgtggtggctgtctccgcctcccccactgcctcctcgggcccagggcagagcgccgccagctgccgaggagcccccaaactgctgaagcttggag

SEQ ID NO: 340427 - DNA, 1000 bp, Homo Sapiens; identical to SEQ ID NO: 159503

SEQ ID NO: 340428 - DNA, 1000 bp, Homo Sapiens
aaaataaatatattttattctttgccaggagagtccatggaaaaaggtaaacagtatatgaacatagaaagcattgttaaacaaacaatctcaatgtacaaacagagccagtgaaagtacatcacagacttgctaatatatcaaaaaaaaaaattccagtagtgcttaaatgagaactaagaaactgacacttgtatctgttaaccactctaccacagctttcactctgcttcatagtgattgaacaaggtcaaaggaggcagattctatgcctgtttctttgggatgtaatataattagcccttggcatcaagaagggctggaaaaaaatcccaatatcaggcatgaatcaggaaggacactagagttacatggtccagtggtagaccagcctgctaattatcccatgaaatttccctaatggcttgtgaacaagtaaacaaaaacttaacactgaaaagtgtttctgccttggaggctatcattactgtaaaaaaattttttttaactaactgtgtagttatgtcattaaacaagtaataaaccacttttaatttaaagtgacattaacaattgaacaaatgacatttgattaactgaactggcagttacactgatacagaattctcttctgctagtgcagggaatttgtatacttttactgggcaacatgaaataaaagatgcagtttgagagcatcagaaagagcaaagacaagcttccatactaactaaagtagaatatcttcagccttatcttgtcatactgtacaatagtcctgtcaatagtcctgtttccttaccttgatgtcttgactattccatgaaagcaagacagttatctttttgaacctaggtagacgtgtacagtagtctatttcataaccttggtgtcatggttattttgagtatgcaagacaaaaggaaagcaccaaacatacagtatagaaagaacagagccatacttctgtatgtacaaagtcttcagaaacttaaccagg

SEQ ID NO: 340429 - DNA, 1000 bp, Homo Sapiens; identical to SEQ ID NO: 159504

SEQ ID NO: 340430 - DNA, 1000 bp, Homo Sapiens
tttttttttttttttttttacaaagcagggagaggtcatgttggtctggaacgcgtcacaggggggacgtgccgcggcaccatgtggggggctcgtctgtggggagggctgccccactggggacctggggacggaggccctgtgggccggcgggagcaccaggcagcagtgtgggtggggttggtggcgccggcacagagaggggtgggcccccagcccgagatgctccctccagggccggaggaggctggcggcggtgcggcctgactgggcacccttctggagcggccacccctcggctcgtcagtcaacacagtccctcactaggggacagctccgtccttgccacctgagcctgcccagccctggcgggccgtgccctctgctggccttccggtgccagggtggcccgtcctcatcccgcgccagcacctcccccagggactccggcacagtccttgccctctgtggccaggctgtcccaccgcctctgtcctctcatgggctcgcgctgtgtgtcatagcgtcagggcctgggccgctgtccacagggcgcctggtgacagtggcggcagcagcagcagcatggtggcagccaccagtgggcctggggcccccgggggagaggatgccccagaggtgcatgagcagacctcgtaaccgtcctccgagcggctctggtcatgttgtcctggaggggcgcggggcccctctgccgcgtccacgcccgcagccacagatccatcggcctgtgagtctccacacaccagccagtcccgggccgtggactgtgggtacccgggtgccacctccagctcgccatccagcactttccagtactcctggccacggaagaagtaggaggcaccgtcggaccagcgcatggcgtcgtccagcgtgctggggacacccctccacagggggctctgggcggggtagccggggtccatgtgcctcgtgtggtcatcgtagcgccagtacagctggtccttaaagaaat

SEQ ID NO: 340431 - DNA, 1000 bp, Homo Sapiens
ttttttttttttttttttttttttttttttttttttttttttttttttttccatttccacactgcagcagcagcaaacgagtgttagctttatttgttacctggacccagctccccagtcactgacccctctgggcctttaatcaggtccctgtaagtcctgggacagtgcttgcgatagagattttccaccagtgtgttgcttcctctaatcacagcccgcccctcctggttcatgtggttccacaaatgcagggcataagagacattgaagcttggctctgtatcccacacttcatagtagcgcctccactctcgataggagatggggtaaaatctttgggggtgtaagaaggatatgttcagacacctgaggtcgctcacctcctggaagtcttcaagtttacaccataccctcaacatccttgtcatcaactcagggccttggttgccccaaatggctgaattatagtgttcaacaaagttttccatgcattcccacaaaaaggggtggtgggggaggaacccaaatattccattactagagtaccgagaagcctgcgcagccaaaaagttctcctcagggatgggcctgatggagatgacatcggtgtccatgtagatgccaccgtatttccagatgatggccaggcgggatgcatccgagctgatgtggagccagtttctctctgcgctggcgttgatttgattgtaccatgaaaacaatggtgtgtcttcaagcagccttttcatatccaaagggaagaggaaaacgttgtctattgctgacaggaaggaaaaagctgggtatgtggagtttgagggcatcggtgtggaatcagtaagacccttcataaagaacaccacaggccactcaggataaatcttggcagcagactctacggaacaggagaccaaatggggtggctccattctctctgaggtctctagaaacacaatgccacgtctgtggctcaggagggcttccagcccctggtggg

SEQ ID NO: 340432 - DNA, 1000 bp, Homo Sapiens
ttttttttttttttttttttttttttttaaacaagtgttttatcacacaggcagtcttagatttatatacaaaagtaaaactgaaaatatagttttgttctctgtacatttcttttaattttttccctaaaaaaaggaaaaaaaacacgcttgtatacttttctaaacagagtaaggtaaaacagagcacaaagttctcttctttctgccaagttcattcgatctggggtggggatgggagcagcagggcctgggaatcagtccaatgaaataatgtctggtatgatgccaaagatggatgccgtgtccgtgctgctcctgtttgtgacggtgtggctatggctttcccttaggctgttggaagaaaccaggctgctgttactgccactactgcttccattggtggttggcagagaagtactgcctcctgcacttaactgatcaagaaacatctgtgaggaggtatacgggaaaaaccgagacgagtgtaggaggtcttgatcatctgaaactgctgctgctgcagcggcaagcaaggaggtgttgtaatgctgattgtctcctgataagaaaggaaagaaatctaatccttgtaagtcgtaaggcatgggtgtcatgtggaaaggatgcctatagtcttggatgagggaggtattaatgtagcttgtgtctacagcaggaaggcttggggtgcgggatactggagatgcttgatgtggaagacttaaaatgcctttattatttagtggtgatgtgggagatagggaaggacaggtcctcttggcagatggctcttcttcctcttcatcagatgaactgtctatggttaggtcaatcacttctactttcttgtttttatttgaggactggtggtgagacgctacctgatgctccaatgtggagctcaagcatccatcgactccattgtaagaggcagaaacttcctgtacttccttttttgatctcatcggtgcccaagtgccatcctccttaaattgta

SEQ ID NO: 340433 - DNA, 1000 bp, Homo Sapiens; identical to SEQ ID NO: 159505

SEQ ID NO: 340434 - DNA, 1000 bp, Homo Sapiens; identical to SEQ ID NO: 246515

SEQ ID NO: 340435 - DNA, 1000 bp, Homo Sapiens; identical to SEQ ID NO: 159506

SEQ ID NO: 340436 - DNA, 1000 bp, Homo Sapiens
ttttttttttttttttttttttttttttttgaagctgaccaaaaaaggcaactatatttaaagtaaatgtatgtgattcttgtcacaacaaatatttgcattttctcagcggcagctgcgggacctgggtggctccgacacgccaggcccgggaaggacccggcaccctcccctgaacttcctggctactcatttccagcgaagtttaatctatttttaataatcgttcagttttcaaggaaatggaggagctgttttttcccacggagcggcggccctgggaggggccgggcccagaggttccggccgcgatgccgtcagcgccttcggcagagtgactgaagcgagatttcgttctcagaagtgagatgccacgatttcgagggaccagggaggaggcggcgccgcggggccacagcccagccccgcgccccgaccgcgtcacagccaaagccccgccggggtgcgcgctgcagaggggacacgccgctcatcaactggggcagccgcggtcggtcggccggtggcgggcggcagggaagaggtggggtccgggacagccacggagcccggagtcacccgcgaggccgccccggtggtgcgtggggggcggcgcggggcgcggccgggcgctcaaaactcctcgtgcacgctgcgcgcgtagtccaccagcttgctgcccgtgaagaactcgctgtacttgagcacctcctcgggctccaggtggtggttctggttctcgtcggcgacggcgatcatctgcttggcctcgttcagcgcgttgtactcgttcatggggtccatgtagctctccagctcctcggcggtcacgatgccgtcgtggttggagtcaatgagctcctcaaactccttttttctgtctttcacccagttgtcgtcaatgtcctggccctgctggttctccacggtgcccacgggcagggagatgaactcgggcacagagagctgcttgtcaccgtcctggtccaggtcccggacg

SEQ ID NO: 340437 - DNA, 887 bp, Homo Sapiens
ggatggcactaccctttattcctaggatggaaagtgtcctgaatcacatcccgggcccctgattccatgtgtcaaggcttccagcccctcaaagcgttggaataagcatgttcaaggaggctcactgggcaggtggccaacatccctttcaaggggatacaccataaagatgacattgtccaagggagggagggcagggtgatctggtctgaccacctcaaagcccatgtagctgaaggcccgcagcagggcacctctgtcgttccgatcattctggaagttcacaaacacagagtccacatttgtcttctcttccacgtactccagggttgcagtcaaactttcccggttgccttgatccaaggcctgatatgggatatccaggaagagtcgacggtcacagagaaggccgtgccaatgggcagaggtctgggaggtaaggcggaagtgaaagtctaactgtactgggtcctggtggagcagggggtcagtagccagcaccgtcaagttcccagccgaatacagttctttaagctggtcgtggttaccctgctcggtgcttttgccctcctggaggcctactagggactcaggagcactggaggcaggaacggggctggagtgtcaagtcctcctcttccttataagtgatgcttttataacaacgaggcagcatcttctcccggagagtgatccggtacttgtaacagtaaaggtaataggcgtatggtgaccagatcgggtagaggtagttacgtgtttttcccctcttgatataagaaagggagtagacagaggggcgacacctcttacaaggcagtttttcagttcagtgcctccctgtggcaaagtgaagttcacaggtgggtggcagaggtttaggcaac

SEQ ID NO: 340438 - DNA, 1000 bp, Homo Sapiens
ttttttttttttttttttctgaggttagggtcattgtctctttattgacctaatccacatatctaacaaagagagcgacaaagcaacagcctatcagtgccaccgcagacgctgtgatcaccacgacgacaacggtcccggctgtgttgaccagaaagcccaggccacctccgaccaggatctgagccagctgcaccatgcatgtgagggtggcgcagtccatgcccttccctctcacgctgttgtctgggtcccctcctggggcctgctgcctctccttttcttcctcgcggtggtactcagtaatgaggttaaagggcacagtgtacagggtgctggacattacaccaaacaggctgcacaggaccagggtggagtagacattcgggaagagcccaataaatcccgtccccaggccaaacagcaaatatcccgtgaagtaaagaccctttaatccaatgtaggataccaaaactttctgaaagtaagaataaagtgaggaaaacacggagttgatgcagaagccccaacatccaacctcgactcctctttcgtagatgagaaactctgtggagttgtgtgcactatagggatccccgcggtacacaatctggcccatgaaatctgtgaagaacagcatgttggacaggaaggccgtccatccaatgaggtggctgatgcaaaggtagcggtagtgaggaggcatgttcaccagtgctctcagcagtgactttaatgtcattgccctgcgagtctgttcagcatgatttttgttttttgctccctgcattgccagctctggatttacgtaaccatttttaactttctcgatagaaccatactcgtacattccatctgatgacaatggagggtcctgaggggtttgctgtgggggaatgccctttgcaacctctgtaagtggggcttcagagatactgcacagatgaacagtaaaacacaaagtgagcaccaatgcagagaagaagaacatgacctggaa

SEQ ID NO: 340439 - DNA, 1000 bp, Homo Sapiens
ttttttttttttttttaaaaaatatgtatcaatttaatgcttttgtagtagtcctcccttatccatggttttgctttctgcagtctcagttaaccatggtcaaccatggtccaaaaacattaaatgaaaaattccagaaataaacaatctaaaagtcttaagcagcatgccattctgagtagtgggatggaatcttgcattgtcctgctctgtcccacccaggatgtgaattctccccttgcccaatgtctccacactgtctatgctcctcgcccatgagtcacttagtagccttctctataatcagtttgactgttatggtattgcagtgcttgcattcaagtaactcattttacttaatgttgttattattgttaatctcttactgtgcctaatttataaattaaactttatcataggtatgtatgtgtaggaaaaaatatatataaggttcagcactgtccaccgtttcaggcatctgctgggggtctttgaatgtatccccctcagataagtggggactactgtatttatttgagaacaccctaaactagttaagaacaaaaggaacactctcccctgccatccattgctggtatcctgtgtgtgtttgatacctcagattcagcatctactacacgcgaagtgcttatgcgtgtcctgaattataggagagtcggattcaccaccctgcccagaaacagaagcattccagaggtttcttcatagatcatgaaatgaaatggccggtccactttgatgacaggaggcatggaataagcagtaatttctgacaagattcctgccactgcctcagtgcccctttcatcaacttcaatcactgttctttgtaaaaccctggatacttggagatttcttccagtagctgagagttcactaaggtcagcaaagggtgagaagattcttctgattcccatctgcctaagcagctcatgcatctcatacttctgatctagcttgaacttcggaaagaaaactt

SEQ ID NO: 340440 - DNA, 1000 bp, Homo Sapiens
ccagcggcttaaggttttattgatgcattagggtagatggggcaatagagagatgtcagagataaaaatagtcctgaaaccccccacaagatgaggacaattcagtacaaaggggtgacttgctctgagtcttcctgctcctgagagggtctgcaccgcaaagcaggtaagaaagaagagttcaggatagaaagctccttgcagaaattatctcattgagaaagacctaaaagggaagctgcataatgaagagctgatgtccagggatgcacccactggattggccatgcaggacaagccaaactctctccagctgtcttcttccagtactggacattggagtcggggaagtcatggcttggtgcttctcaagtaggaatacagctctctagctgtgatgcctcgcttctcttctgactgggctgcatcctggccctgtgctgaggaaacactggtatgcaagttgccctggtccagcctgaggatcactgtctcccttgagtggtcatcaacccattcctcaccaaccactgtgggctgtctgtctccctgcccttctgtcacacagcgccttgggtgagtgctgctccactcctgccttcctgactcagtgcttgccccagtctgggcctgtcctcccggtactgtctctcctgcctcagggttgctcacttgcatccatctttgaccactgcctggctgcgtctgggtctgtccctgttctctagcccctccgtggcttacagtttggcttctgtcctgctccacagtctcggtgtgtgaccctgcctgtatctgagtgtgtcctcctgtcacagcctggctggtctggctcctgccttgaccgtggatctcagtccctctgttctggccattggtggactcctgtgtctgggtgctggtgcttcctgtctggtggctgctgtcctgctccacggtctgggtgggtgtctgggtgtgtgtccctgcctgtatctgagcatgtcctcctgtcacagcc

SEQ ID NO: 340441 - DNA, 1000 bp, Homo Sapiens
tttttttctcatcactgagtatttattatatataacaaatacatgggaaagaaaaaactatattgtgtgatataaatagtttatttacattacagaaaaaacatcaagacaatgtatactatttcaaatatatccatacataatcaaatatagctgtagtacatgttttcattggtgtagattaccacaaatgcaaggcaacatgtgtagatctcttgtcttattcttttgtctataatactgtattgtgtagtccaagctctcggtagtccagccactgtgaaacatgctccctttagattaacctcgtggacgctcttgttgtattgtctgaactgtagtgccctgtattttgcttctgtctgtgaattctgttgcttctggggcatttccttgtgatgcagaggaccaccacacagatgacagcaatctgaattgttccaatcacagctgcgattaagacatactgaaatcgtacaggaccgggaacaacgtatagaacactgtagtcctttttttcacagtgttgtccagtataaccagcatcacacctgcaagatggctcctgcatattgatagaatgctcacacttcccatgcatgcagaagccattgtaatgttccggacaaggtatgtggtgttctctggcactttcttctaatttgttagcattctctgcataatctgttcttgcataatgcccatcttcagacttagtagttgtagttgtgttatcttgacatcgacccaaagacatgacttcaattttctcctgtttctgacacgatgcttctttgatttggcatgcattatcataagatttcccatcagaagcgcagaggggattgaagttggtttgagaacagtcaatattacacacacaccagacatcctcggcatcttcgtcacattctgcaccaaactggcaaatatcacaggtggatgtctccttttgactagtttctccagagccttcatggactccatctccagatcctga

SEQ ID NO: 340442 - DNA, 1000 bp, Homo Sapiens
tttttttttgacaaagactgcatgttctcatttatttatgggatctaaaaataaaatcaattgacctcatgggcatacagagtagaagaatggttaccagtggctggtaagggtactgacggttgcagggggaggtggggatggttaatgggtacaaaaacaaataagataaaaagaatgatctactatctgatagcacaatagagtgactataatcaataataacttacttgtatatttttaaatgatctaaagaatgtaattggattatctgtaattcaaaggaaaaatgcttgaggggatggatacctcattctccatgatacacgtatttcacattgcatgcctgtgtcaaaacatctcacataccccgtaaatatatacatgtactatgtacccacaaaatgtttacaaaataagtgagacattctaattaaagacttgagatcttttctaaataatgtatatacatgttttgtgatctgtacacacttattctccaaatcctagctataatccaaacagatatgtaaaatcagttgtataacagataaagtaaaaaaaattcataagacattgttaaatataagtaaaccaaatacctgacctattacatcctgtatagcaaaataaatgagaataacagcctctttcctaggatcttcactgatccaatgtctgagataatagggaaatacagtttgaaagaagctattataaaaaagccttataaaaatatacaaattttgactcatttattgaattaaaattatactatgtataaaacagcaatctatatgcagagtgatttaatgcataatatatacatttatatttacaatacaggatgcaagttccaatgactatgactataaaatttatattaaacatttccataagtgatttatttggctgtttttgttcgaagtcgtcgtttgataatctggtgatcactctccttcattttctggtccattaaaatcacttggcctgatatatc

SEQ ID NO: 340443 - DNA, 1000 bp, Homo Sapiens; identical to SEQ ID NO: 159507

SEQ ID NO: 340444 - DNA, 1000 bp, Homo Sapiens
gagaatggctttctttaattttgaattggagcaatatgctttcctgagcatcaggaaagagtggtgatgtcacagcaaaggagggaggcggtggctaagaacatgcacattcttgaatgtcctctgcatggtgcctggccttctggatggtttcggacaaaactttatgtgctaggtgggagtgggaaaaggagtgggggaaggataaagccatctttggacacccactcccactgtggataaccacagcgtgtggccgaacaaagctgattagaacacagccctacctcgggaggctgccatctgccaggccctccttcccctcccagccttcaagaaatgttatctatgaaaggggaaaaatgccagccacatcctcattccaactctatccttaatgcagcttcacaaaattcctaaattctatcttgggtccttgaagagattggactatgacttgggtggccccccaaaatcctcaccctttcccttccctcagtgcaaagtctcacctgtgcaaagacatcacttttaattatttttttttaattaaaatactgttatacccagtggaatgcggcagcaatcctggtacagggtggcataacaaaacagccatgtttacattttaaatatttacgataacttaaacatacagacacacatcatggtctttggcagaaaatgttcacagcacaaaaaatactttaaaagaaataccaaatattaatccaaaatatattaagttgttttttttctttcacaatattttttgcctttttttcctcttttttctttttgctttgtaaacaatgcacatgaaccaaatgtatttttcagctttaaacaggggtaggggaattttttaaaaaaaattgcaattgtccagcaaatgcaaatgtttaaaaaggaaacttgaggaaccatggaaataaaacaacacataccaaacctaaaaacgataaaggaagaaaacaaagaatcaaggagaactaaaaac

SEQ ID NO: 340445 - DNA, 1000 bp, Homo Sapiens
tttttttttttttttggagtgcggaatgtttattgagcaaagggtcgggggcgtgggcggaaggggggtagatacagaaatgaaccagaccgtgcccgtgctctttatcatctcttccccgcagacaaccaccggttcaccgctccagagagcagaaaaccaaggtttagagaggtcatgtcacttgcacaggctcacacagcacagctggactggaacccagttccgactggttcccaggcccagggaggggcaacgactttggtctacatcacacagctagaaagggggtaaggaaggaatgatgctcctccctttggaaggtggggaaactgaggcccagggtaaggcagtaacctcagcagagccagggggtgtgtgtgggagtgagtgacgctgtgtgggtcagacttggtggccctgagacgggcagggcagcacaggccgggtctcgagcttagtggaggcgcacgtgctgcgccagctccgcggcgtcctggaagcggcgtgggcagagcgggcaggtgtgcggcggcccggcgcgggcgcggtgcgtggcgcgatgccgcgacaggtggctggagcgcttgaaggccttgccgcaggcgccgcacgtgaagggcttgaggtccgagtgcgacacgcggtggctctgcagccgcagagggctggcaaagacacgggcgcactccgggcagctgtagcccttgcgagggccgggctctcctgggggcgcctcgcgctggggcgggccccggggctcctcctccagctgcaccgtgtatgtgtaggggaccccattggcgtcgatgaggaggtggcggcccagccgcgggggtcggggccccgccgccgaggaaggagtggaggaggggccttccgccttggggaaagggggagccttggggggcggtgggtccatggcctccggagaggaggaccgagggtggggtggccgcggcggcagcagcagcatctggagcggcagctgggagcggcg

SEQ ID NO: 340446 - DNA, 1000 bp, Homo Sapiens; identical to SEQ ID NO: 159509

SEQ ID NO: 340447 - DNA, 1000 bp, Homo Sapiens
cgggtctctaaattggaagccatgcccctccaactgggttgtgggaaataacatacaatgatgggtgtgacacgcggcctgctccttccctctactccccaagggttttggagcgagctggcctcctccacctctctaacttccatcagtctctgcagtgacctgcccgcctgtgctcctctggctcactgctgttgttttctgctgactatggattatttttccccctgtctccttttcatcacctccttgcatcccaacaaccctcccaggctttcctgttgtgctcaaatccccatttccttagccttccctggcagttgagctcagcggtgtatgctttgggtggggtgtggggagggagagcaggctccctttcctcctccaggctggcatgcagattgaatcagtccttgttgtgcccaggggcatgcaggacctctcatgtggagcccctttggcctgcctccccagccccgcaggcagatactacctgcacccacactctgccacgctcatgccctcgtaatggtacttgagggtgggcacccccatgtcatccttgtagaggacggagatggggctcagtttggtgggcacacagcaggccttgcccacctttgtggggaacttgagatgcaccagggtctgcacgatagcgtgtttcgtcggcgtcacatcgtcagccaaggggaagaagcagccgcccttacactcgtaggcttcatactccttgggtgcaatgatccagctgtcccagccgatgtcctcgaagtttacccgcagggaggtcttttgacagtggctgccagccccggcgctccttttccgcctggctaaagtcgaccccgcagccacgtggccatccgtgtcctcctcgtgactgctctcacctgcctctgtggagccgtccttggacagcttcttgagcacgctctcttgttcatggctgatcatctccctcagctccagcctggtctccttggtcccactgctgtgg

SEQ ID NO: 340448 - DNA, 1000 bp, Homo Sapiens; identical to SEQ ID NO: 246516

SEQ ID NO: 340449 - DNA, 1000 bp, Homo Sapiens
tttttttttttttttttttttttttttttttttttttttttttttttttttttttttttttttttttttttttttttttttttttttttttttttttttttttttttttttttttcccagagaaacgaatgcattttattttaggtaacaaaagtagagtcaagtattttttcaaagttcatatacaggcacagtctcagtgaactggcgtcagggcctcgtacagtctctgtgcagccagctccaccatttctcggagggattcatcgtcttcacttccctcttcacattctacagtccgtgtctccaagttaaggttggcagttttcccgtccactgtgacgctaagaatagagtcatcctttacacttacacagtcttctccaaatatgtcctggagcatgatctccaacctcttgctgtaaacgtgcatttctaattttttagaaaccttctgtactgcaccttttcttattttgggatttgactgaacttccaatatcacagttgttactgtatctgcatacatatcattagaagggtttgccagccattctaataccaccatgcctggttcttgtattacagtaatatttttgaacactttcagagcaggtttttcttgaatttctaattcttccacatcacctgtcaatttctgcagctggtaacagagcaaattaaagggaccagtatatggaatggcttgggtctgcttcaccgtgctcatggccaggtcagtataattggacaggtcgcaaggagaaagtatgtgataattaaagtttcttttaacaagtattcctgagacccgctggccttgttctggttttttgtctgctaaaaatcccataaccttggctagtttttctcctctgaagtttaaggtcactgcttctgtattccgaggattatgaacctctatgtgaacttcatcgttatcttcatattctcgaatcagtgctgctttcaatctggccatttcattctgttctccatg

SEQ ID NO: 340450 - DNA, 1000 bp, Homo Sapiens
tttttttttttttttttaaacatcttcattacatctttaatgctctcacgtggagctgctctgggttaaattacagctgtatgcatcctgaattcctggcagcctccagtcgactcaagtgctaacgtatttatagcatttagaggagggaataaatccagaaccttccccatgggggcttcctaggcctttccctcctgacacatggcatttgcccagtggaaggtctgcatacactacccctgcatcccctccagccagcagcggacagtgacggtggagaggctgggcacgggacatgcctctgtgcatgcttgtgtgcatatgtatgcccagcgtaaaaaaatgccctgctcttgtggtctgtctctgcccaatggcttgccaggacccctggtatcagccctgaccctccaaggcttatggagaggccaagtgcagggacccatctccccactctctaaacactgaacggctcttcccatagatgggatggaggtggggaattcaaacatagactaagttttttagatgtttttctgaagtgcaatccctcacccactttcaggcagtcataactgccccctctagcctgcagcctgtgattactgccctcagaccaacagcctctcccaaccccagatcctcattagagcccaagacagggagccgttttcagaagcaggtgagcccagtgaaacaatgcagtggagagaggaaccgtgctgtgcgtgcttccctcttccctgcagtccctgaagattgaaggcagagaagatagcctaccctgatgctccactacataccatggggtagaggtcgacttggagggtggggccagtgtggacaatctcattctgcccgctgtgctgggacaggcacatgtctgcccatgggcacactcatgcacatgcatgaggcctctcggcaggtctgggggggctgcatccttccacttccattcccctacttccttccccctcagctcccatcctagctt

SEQ ID NO: 340451 - DNA, 1000 bp, Homo Sapiens
ttttttttttttttttttagaatttttaaacaggtttttataaataatgtgttcaaagatttcgaccccattacataaagtaggaatcccactccttaagaaaaatatacagattttggtaagagtttaagttctgagatattcaagcctgacgccaagcctttaggtttctactacttcaattccaaaggaccagtagatagcaattttagtacacaaaactccactatgctgtatagttccttttctcctgggtcagacagctttattctgcttcattaaccccttctttgctccttgatggatcttggaatccaatttccagatttttggatttcctttaataggaaacttcacaaccatttcctgaggatttttgcagatgaaaacaaatggagaatcagactcttgactgatgtctggaaactgctccttaaattgcttctgggacaagcagtcaattaggtccacacagcccagaagacaacctgacggatagtcattaggaaattccacatctttcccacgaagaagacgatatgtagcctggagttctgagacttcttgaggggagggttttttagctgtggctgctatccaaagtcgtcctctgtggggggtgtaccaggatctgccctccacccttttaatccctctgacaagcagagaagcccagggctgatgtacagagaggcaccagccaccatcaaagccttcctgaaattcttgatcctggattcgcaactggtgctgaaatgagttgaactctagtccaaatcctgaagaacggaaagccttcttctgtgaggctgcacctgtgtggtcaacccactggggaggggactggtacatgttgggatttaccagaactcccaaaggctcttcagaagatctatccaatttggtcagtggctggttcaaggttccattggcaatggcctgtattgtctcatctagtctgctatgatactctgctagtgaattttcttcttccaggatc

SEQ ID NO: 340452 - DNA, 1000 bp, Homo Sapiens
ttttttttttttttttttgtttagtattcagagtagtttatttcctgaaatcttatataccatcttcaatttcaatttttatttgacagatattaaaagctgatcaggaaaaatatttataataaatgaaaagaaagcatacatcataatatatacaaagacttgattttataaaacaaaatataatatagccatattgtatacatcaaaatgtttacagtgataacaagtccttggaggcaaaaatccttgtcttactcatctttatggtcccatattatagcagagtgcttggcacagagtagatgttaagtaagtgtttattgtaaaaatggaagtgaataatgtatgtcttcaaaaaaaaagatacccagtcaagtaaatatatgaaactttaatatgtttgcatctgaaacatacaaaagcctaaagataaagtcaatatctaactaaaattctctaatgtatcttcattattataaagttaagtctttagtcaaaaattcagctctaaaaatacagtctcaaaaaatcacatatctacatataatactaagacaagtaaattgtcggccaggcacagtggctcacgcctgtaatcccagcactttagaaggccaagacaggtggatcgcctgaggtcaggagttggagaccagcctggccaacatggtgaaaccctgtcattactaaaaatgcaaaaattagccgggtgtggtggcgggcacctgtagtcccacctacttgggaggctgaggcaggagaattgcttgaacctgggaggcggaggttgcggtgagccgagatcacgccattgcactccagtctaggtgacaagagtgaaactccatctcaaaaaagcaaaacaaacacaaaaacaaaacaagtaaatcatcttaagctgcatcatcatcatcatcatccactgcagcgtaaatggcttgattcctcctcttaattttctttctttgttcaggttcatgttcatcactcagcctct

SEQ ID NO: 340453 - DNA, 1000 bp, Homo Sapiens
tacaatgttagtttctggaattttattatttttaatacatacatttcacaaacagaaaccctctaaaaccacacacaattccacaaccaaatgtttcaattttatcaacattctttaactatttacactgtctttcctcaacaaaagtgcaatccaagacatcttgacaagaaatctttactgacaagaatttatttttgagctggttttaatggagcccatccattatattttctttcaattacccggaatattcagtgaacaggacatagagatgaactgggttaggcagcatcctattataggaaataaaacactaaacaagaacactttctcctcacttccttcccaacctccaatgaaagttactcaacagctgctaccaggacacaaaacagaaaagcaaactggagttcctgacctagacacaggagaacagactgtgtattaagcatcagtcttgcaggactaaacaaaagacttagcaaattagttctggtgctctaataaggtacatatctgtcttatctgttagttttagagttcaaatacctaataagattctttttagatgagttaattttcccccaacatatatgaaaataccttttactcagaaaatgaacttcttgaacaaaacctagaagttaaagggcatttaaggaaagctcctctgtaactagaatgggataattcacccaactccccaacttcatggcaccatgtctatcttttaaagtataaacccattatatcaactgcttcaaatgtaacaagagaatgaagaggtgagatggcctgaagagaaaacaatcaatcagaaattgtcctctcactaaagcagatcattgtatctgctcaaggtataaaactcttaaaaataaataattaaaaaatattaagaatagacgaaaaatcactttgaaattattagtcactcttaagactgcttcattttactgaacactattcatcagaaaaacaaattggatctcttggg

SEQ ID NO: 340454 - DNA, 1000 bp, Homo Sapiens
agtaacagaaaatggcttccaacttcatgttgcaattaaataataactattattatattattgagacagagtctcgctcttcaggctggagtacagtggcaagatcttggctgactgcagctttgacctcccaggttcaagtagttctcctgcctcagccatctgagtagctgggattacaggcgtgtgccaccaagcctggctaattttttttttttttttatcgttttagtagagacagggtctcaccatgttggcgaggctggtctcaaactcctgacctcaagtgatctgcccattcggcctcccaaagggctggcattacaggtgtgagccattgtgcctggcctaactaattattttttgagaagaactcattgatagcacaaaagtacttggagaaactacttaagctaactactattaagctgtcttctttcacaaatattaataaaagtactgatagaaatgtaactaagatacataatgtgttttaatacacattaatcttttgaattacacattttctcttgaggattataataaaatgatggtacaatttatccttctttatagatttgtggaaagtaccaacataattgacaagaaatgaaatactgccatttaaaagtcctgtattaaaataaaactactttgaatcatcttagactaaatattttaaaaactgattcaagtgcttattcataagataatggaattttaaataagaaaagccaaattaaaaattatattttaggcaaaaaccattttaacacagataatactgtgatatttattttcctgaagaaaccacttatgctagttacattaatactcttcatagaacttaagataaattttaattatgaatgctcatgaagtatttaaagacactaggatcaatgccaacaaagtagttaagtgctgaaaaattcttatgataatataggcatgtgtgaatctttgagagcccttacaaatgtttttatattcagtataa

SEQ ID NO: 340455 - DNA, 1000 bp, Homo Sapiens
gcggttagagcaaatcaacttttatctccaccgaaaagacccattccactggaggggcccgtgagctagacggacttgccgtccagccctccaagccccctgcggggcggccaggaggatccctgagtccagcttgtaaacaccagagccagccctggagcctcaggcctctggagtcacggcagcccctccagacccttggattggggacatctgaggcttcacgagcccgggcagagctgcaccctgggctgtccactcggtcaccccagtaccagggaccacctcgaagcccccctctggtcggcccacagagacctgctcaggcttcagcaatcgtgagtcatgattcgtgtcttctggaggaagcaggcggaggctccagcggcccagcccaccccgcatcacaccaagactgacggcctcacttgtcctcacggtgtcctgattaaagcagagacgaggaggagcccagagccagttcagagcctgggccacttggcggttgccggtgctacgtgggcccttggaaaatgccacagacccagcaaggtgcctctgcccacccgaagtccccacaccagcagccatccaccctaggcaggggtccagataggcagagggtgggcttcggtgttgaacacgtaggcatccaggctgagcaggtttgggtcatcggagaagagcaagaacagatacttgagcgtctcccccaggaagaagctctccatcttgtccctaggctcgggcttctgaggatcctggacattgttgatggaagaatagccacccgaggggacccgtgtgaatcggctgaagctctgcagaatctcccagccccagtcctggtatttgcggtcccctgtgacgcggtacaggtagaacaggctctccacggtctctggccgcagcaggttgtgcctgtctgctggcttgacctccacgtcccgacggcccggctgggggtaaaggttgaagtgcacgatctcgggactcagcc

SEQ ID NO: 340456 - DNA, 1000 bp, Homo Sapiens; identical to SEQ ID NO: 159512

SEQ ID NO: 340457 - DNA, 1000 bp, Homo Sapiens; identical to SEQ ID NO: 159513

SEQ ID NO: 340458 - DNA, 1000 bp, Homo Sapiens
tagtttgttagcttgttcatttttatttttcaagtattatgtaaacaaaaagaaccttggtctgccagaattttcaaagaaaattggcaaaacaagatttcccatagtaacaaccatacatatagctatgttcagtgactaaatggtgtttatgtgtttcttaagcaatggagttcattttgaccaattgtctgttaagaagtgcctaagaaaaccgcttattcattttccacatcctgtttggcaaagtgtgacacatagcagtagaaaacaataatataatcttgggatgcatatgcaatcagtgcacagagagctgtcgtatcagccttcagaagagcatttaaacactgccacacgctgtccgtctgtttgtcctgcaaccaggttctccccttggtctcaatggaagcctgaatcacaagcactgccacgttcacaaagctgttaattcttcaaaacaccaaatggtattcaaaaagggaagtataggctgggcacggtggctcacacctgtaatcccagcactttgggaggccgaggcaggctgatcatgaggccaagagatcctggtgaaactatcctagccaacatggtgaaaccctgtcaagtaaaaatgcaaaaattagctgggtgtggtagtgcgcacttgtaatcccagctactcgggaggctgaggcaggagaattgcttgaacctgggaggcggaggttgcagtgagccgagattgcggcactgcactccagcctggtgacagagtgagactccgtttcaaaaaaaaaaagtataaaaatctgaagactctagtggtataatctaattaagtttctatgaagcacatgattgcagtcatgtcaaagcagtttctatgagcacactgttatctgttaaaaaagcaaacaaggctgggcacagtggctcaggcctgtggttccagcactttgggaggccgaggcgggcagatcacttgaggtcaggagtttgagatcagcctggccaa

SEQ ID NO: 340459 - DNA, 1000 bp, Homo Sapiens
aataaagacaagtgttcagatttatttggaaattcacagtttctaatggcactacagctccgtagttacatattgaaaattctcttcccacaacacacagatcacataatttctcactgtatctctgctctcatctggacctcttttcaaggggcttctataaaatcaggccctcttgctctgaatagctaattgtgcagacaggaaagaaatttaaatcttctaaaacacgctgttaacctaaagcagcaacttaaacaaacaaagaaggcgttaaataagtcacattacaaacaatacccaagaaaggtattaggcaagtttaaaaacagttatcactactaaaagtgctcaataagttataacttaaacatcacaacaataaatggtcaattctctccctttcaaaaagaaacatgttccactttcattcattactgtacaatcatactaagaaatcattttattcaaatacagttgctgccaattattttttaaagacaaaaaaaaagacagagacatcgacatcacatatgtattacctctgcacatttgtagccaatacaaagcaaacatcaaggaataataatctctttagacttaaccaattagattaagcttgacaaactcactaactggatctgtgcatatgtatgcaggctgtgattatatcatgagacttgtactaattggccaaaccttcaaattttatattcatactaataaaaacagtgaaagtttggaggattagtgtttattgtgtatgtttaaaatgtaagctaaagaaaaccttcacaaatcggttaacgtcgtgtttaaaaggtgaatttgtcaaaaatttgtctgcatatatcagttgtttgcaaaaaaagatcctgtagggattttttcctcattgagttagtaactaagtaagaagtaatccagcctgaataagtgaaaataacaagagcatcaccatctacctaacagaacagacttaaaaattccattaagtgtt

SEQ ID NO: 340460 - DNA, 1000 bp, Homo Sapiens
tctgctttgtacttgagtttatttcacaaaaccacggagaaagatactgaaatggagctctttccagcctccaagcaaggaggccccagcagccagtctccagccccttgagccctttttgttaggcccacacccaaaagaggagaaccagtgtgtgcgcgaaggtacatggcaaggcacttttgaaaacatcccagtttaccgtggtgaaattgaacttactctgaaacagatgaaaagggacatgcaaaattgctgagcacgtggaggtgttagtaggtgaaaatcatgtcctgggtataacccagcttctccaggttagggtgagccgccgtctggattagtggtggcgggccacacaccaggatgagcgtggacttcgctggaggaggaaggtgctccttgatcatgtcggcagtaacgaagcctgagctgtacttccagccaatgggaggcctgtccagggtgtaccacaggttgaactggtctgggtgagtcctggcaatttcttcaagctcttttctgaccaagatatcctcctctgtctggttggcaaagatgagggacatcctggtcctgtcactggggtccttggtgatgtggcgaatgagctgcaacatgggtgtgatgcctgtgcccccagcaatcattcccaggtgatcggccagtgtttttttaggctcactcgtctggtctggtctgattccaagattccctggcccatggtaaaacaagcgtccccttggccctcgaaaaaagatggtctccccgattttcatgttctccaaatactgagtcatcttcccaccttcaggatattgggggtgtacatttttgaagtagatctttataattaggtccacaaagcctctgtcatcatcactggagacaggggtgtaagccctgaccaccaattcattatcgatttttgccaagagctggacatagttacctacaggaagccctaagacatggtccggcgaaggcagtccaaagcgga

SEQ ID NO: 340461 - DNA, 1000 bp, Homo Sapiens
ttttttttttttttttgcatggaaacatgatcgaagtgatcatttactttatcatgtcataaaacacaagtgcttattgtagaacagtgatataatttaaatggcaaggaaatttgtgattcataacaaagaatcctgtatgtatttgttgccatgattaactttccaggtcaaatatcagtagtaaaataagttgtggtacaaaagaaagccaagaagttacctgtactgaaggaacatttgatttcatttaagaaactgaaggctggattctagttaaccttttgttatgtacaaaaatgttctcttaaaaaaccctaagcaatcacaaatttagataaactagttgaataaaggacaatgacagctcttcattatgctgtaaaactatggatctcatttttggaaaagttgagatcatgcagcaaccttactccttgttctgtaaatggcactggtccacaaatgcagacgagaactttggatttgtccaaatttcttttcaaaaattcagaaagaagagctggtgaaatatgtccctgtttgccattccattcagaaataggtgctgagagaacaaattcaacatccagtcttttatctttaaatgctaatttctccaattggcttctccaaattatatcatcttctgttttattgaagaacatcagcttcactttcctgagactgggtatatcagtcaaagcataattcagtattttaaccattggtgtgaagcctgttccagctgccaacaaaaagagatcttctaattcttggaacttggatattttaaaattgccctcaggactgcttacagaaacaaaatctccaatctgaagacgatcaagctctggtgtgaagagtccagtgggatagatttttatcaaaaagtagatgtatttattgttgggaagaactggttccttgaactctgagagtaaggaaccagatacaggtgtatatggctttactatttctgtacctgtaataggtagct

SEQ ID NO: 340462 - DNA, 1000 bp, Homo Sapiens
ttttttttttttttttcaaatgtcacatttaatgttttcaccactgtacttcaaatctacattgtacaaagtgaccagaaagtgtgccacggtaattgaccaacctctgagattgtacctttcacaccagtgtcttcttgggctcttttgatactaaacacgtttctcattcaagtgaattgaaatgcttcagttgggttgattctcaggagcctcataaaaaaaaaacaaagatattgcaccatctttgtttagtaattcaatgtttgtttctttcacagcaaataattacttcattgaagttaaaacttccaaacataacttattaatagtcttcaaattcagctcagatcactcaagttgaaaatactctgctaaatacagataacttacaataactttaacagttaattgtccataacacacaccaaggttttttcctagaccaattttaagacgatccattagtattccttgtacaggtgaaaaatgatcttcaattttcttgtctttttatttttaatataaaagttggaagggacattcaagtttcaagtctccacactgaactcaaaaaaaaaaatagtcatcatcagcatgtggaggtaaacaagccaagttgtataactccaggaggtagaggccttcgatttgtattcatatgtacatatgcacagaagaattcagtgttccaacagaaaaaaagaacttgtcaaaaagtaataagttatttactactgtgacatttcaagactcccacagctttgcctaaggacacaaacacatttgacataattccctatgtgcctttttttgtggcttaaatttttttttaaatttgtttttgtcttttattatttttttactgtccagtgcaggaaaagtctcacaaaatttcacagacctaaaatgtgcaagctagttctctttctatacagcaatattgggattcttttgaaattagcccagaaatgaattatttacacacatgaaagatgca

SEQ ID NO: 340463 - DNA, 1000 bp, Homo Sapiens
gaggcctgaatccctttaatattcctgctcctcacacttcagtgcaggggcataagccagctaggagaagtcaggaaagcttcaaactcagatgcctttgcacatcacagcaggcactattgcttctgggcagccaagggagtcaaactagaggcctttctgggaattttgcttggcacaggcatttggtacctcacgtgcttccagaatttagaattcagggaccttttattggcaatgtggtcctccctccacttgatggtcccctgtactttcataagatgctggagggagtcctgaagcgcctcagcctgcagcatgtccagctcgctcagagcctccatctcaataagtatcaccttggcgtcgttctggatgagggcacagtgcagggcaacctcctgctcgtaggcaaactccttattgtgagtgatctgaggggtcaggatgaaaatgtgccgcctgctctttcgtatgttggtttccactgcagtgactacatcttctccaggtagcatatctctcccataaatgcataaggtatagccacatttattttcaagaacatcaggcagaatctggtgaacaaagtgctctacacgactggccccatctgtactggatttgtagttccgtgggtagacaacataagcatcatagagctttccatcattcctagtcttgtaaggtttagctatgtctctccagagcagagtggcctcaatccagaacatttttaggatgataaccaggacattgattagcattaaaaatacactacatactgcaattatgcagtagatgctatgatgatcaattggatttttcctacttagtcttacggtgtgccttctcaagccatgcaaattcagggccagacagtcgtactgcagcaataaatcctcttccttcacgtcagctattcttaaaaccatgtctagacaagccagcccattgctgaaactttgattttgcccttcctcttgttgaattcttggtt

SEQ ID NO: 340464 - DNA, 1000 bp, Homo Sapiens
tttttttttttttttttttttttgagaaatatcaaaaggtttattgaaacatactcagctcagacgtactggcttatgaagcggtcagtcctcccccggcccccaaacactaacctttttcatttttctttaaaggttaaaggcttatgggtagttttatagaaaaagcaatgtagtgattagagtatctgcagaaggacccaccctcatttatacattccatgccgtcaggttaaaactctgctttgaatcgatgctagaggttatgctggccaaacagtgcagagaacatgggggctttgaatggccgagatgttcgaaatgctaaataacaaaggaatgacttgctcaggacagatggaaaccatgacagaaacaatgggcttggaaaagggctgttttcatggaacctgcagaaaaaccaaaacaaaatatcccccacaccctccaaaagcaacaagaaaccctcatgtgatccattccatccaggaattttcaccatagcaacggaaaggacccgaggtgtcactgcttgtgaggcagcgagaggtcatctctgcatcctagtgggaacccctgaagccctgctaggtgacatcatcgcggaaaacctgccgtggtgcctgccttccaacctgcctcccggaggggctttcagctggagaccccattggagctcttgaaatgaataagggaataaaattgggagaggatttggagatacacccgtaagtgtaggaacagggcgagatgatcaagggaagaagggactgctgccccaagccagaatatttctatggctctacaagggaaggggcggggcctgtgttctcaccatagacattagagcaagagccccatagaaggaacagtggttgatcactttccaaatgtgatggtcacttcatcacccagagggcctcttctttggcacatgccagggtccctccacctctactggctataaagctcaccccacgattcagttgggcctcacctt

SEQ ID NO: 340465 - DNA, 1000 bp, Homo Sapiens
ttttttttttttttatcaacattcactcgtttattttttcattcatatgacaaatattttttaagtgcttactctctgttaggcatcctcctaggttctggaagatacagcagggaataaacatgattttctctggaatgtttatcctgctgtcttccatctattcttagcaaactcctactcatctttcaaaactcaatgctaatgtcccattttccaagaaggcttttcccaaacttctcccttgtaccactctcaaacttgtgtggcccatcaagtgatgggggtctggggttggggatacccaaggagtgggggatggtctgttcataggcagtgaatcaggggcctaaggtaactccaactcctgcctcctccctcaggcttgttttccggccacttagcaactccatggagaaatggctgccaggcacaccttttgtttgcacagaaataaccaaagaccagaaatccaggctgactggcagcacaaggaggggccccttaggaggacatgtaagggctagggtgtggagttggagcagattccaacatcagaccctgagtaaaccaaaggcagaggccagttcatctgggcaactggtgtggggcttctgtgtcataggcaggagttaggggcagggtctgcaatgggtacatggcaggaggcctcatggtcctgccttctgctccactgcacagtgggccagacttttgaaagttcctcctgctatctgatccaagtttgcatgctgccattccatcccagttcaggatgggtcttcttgtgttcttggggatttgagttgctcctcctgcctcctcttagtgtcctccaaggctctggccccttacaggggtcattgatcctgagaggttcagtgatttctctgaggccacacagtgagtcttctggcagaaggtactggagggctgggggctgggtcagagcagggtgatctcgctggggggcaatgtgagccgcttctcatgggcactg

SEQ ID NO: 340466 - DNA, 1000 bp, Homo Sapiens
actcctggaaatagctctttactgagtcagtaatactatgcagaatggtattatcatatgtggacaggagagttacatggccgtggggtgtgcagtgcaaaccagttgcacatccaggacagtcaggagggtgcggaaaggctttgagcagggaagggctgctctctgggtccgtgttgggaaggagacaactctatgccctaaccttgcgggcggtggagggggtggtgcctgaatctgtttgaacatgaaggcaaagcagctttagagtgtagccaacaggagacctccaccctgtggggtgatttcccagcgcccctctctgccagtgtgtgcaggaagttggtgggtgccaaggagtgatgacagagggggcctctgtgagtgtccaggcccttcccactcctagtccagctggctgcccatgcaaagagggctcgggccattgtgggtcccggtgggacaaggtcggcatgcagctgtgatcaggagagccgtgtgcgggaggcgagagctgccctgttgcaaggggttggcccttctgcagcctaatcctccccaccactccagaggagcccccttggggaatggggcaggccagcctcagggagagcaagggaggcagctgtgcagagagaaccttctggcctgcctctgtctcccatctccactcaggcccaatgttccagggcctgcagagtgcccccatgcagatgaaactcctgcttggattccttccaggctgctcctgaagggcagaggcaaggatgaattgaggaattttctggacacgtgaagaaataaatgttgaacttctcagggggcactgtgtgcaaggccagagaatgtcagcctcgtggccccactgtgctgtgacagacagggacagctcccgggtatgctggtcccctgcttatggggagggtcttgtggttgccaggtccactttgcctctggagttttggcagtaacgccccacccgcaaaggtttccttggggc

SEQ ID NO: 340467 - DNA, 1000 bp, Homo Sapiens
tttttttttttttttttttttttttttttaagtgtgatccatttattattgctgccatttgtgggtacattctctcaattctccttaaatcccagtgatgcttttatacttgcaacacgtgtatccacctctagcttccctgtgcagaaatgtttggcattggaatgtgaggtatctctcaggaaacagagtggcaatgggtaggatgaaacctacccattgagagttcatgatattcattgtgaaataccactagatatagtccttcattttatttagagagcttgaagtttctgattttatgtagaacagaaaaagaaacacaaattatacaaaatttaagtgcaatcaaaaataaaaatatatgttaaataaacggttatggtacaaattttgcaaagccttcaggtgagccacaaataatcttggaaattattttaataaagtcattttggttctttttcttcattttccttaaagtcacctctaaaggtatttctctgtttatatcatatgtaatcagcttttggctaaagaacaagtggtagtaaatgaagactgccaaagcctcaaaaatgatattgaagaaatggggataattagaaaaaacagaagttcaaacattaaaattctggcactattagatgacatcaacctaaacctggtaaatcagttttcagaaaactaggtgcttattgcgctttcattttatatccaataactgcatcaaacttaacactgatttttcgttttaaaactgccaggaaacgctcaggaaggatcctttccaatgttgttaaaaaagctatagaagatggaataaaaatcatcttctgctcagtcagaatcccatgcatcagcctgtttaccacttcctcaggttccagagtgggtcccaaacttgtacttggatttttgatgaagccagtgtttacgaaattaggacacagacatgttgttttgactccagttatttgtaaggcagccagttcatctgtca

SEQ ID NO: 340468 - DNA, 1000 bp, Homo Sapiens; identical to SEQ ID NO: 159515

SEQ ID NO: 340469 - DNA, 1000 bp, Homo Sapiens
ccaggtatttcttaaatttattgaagaactcttagctgggagaagaaagatcacaggcttaaacaattgtaagataaaagaacaattaattgcaaataattacaaaagtaatttctgaaattttttgagccactgctgaaacaaaactttagtgcatctcaaagttcgtattttgttaagtgaacatattaaattactgaaaagcaaaaaagagttactgttacacagtacaagatcttaatatagtaactgagcacagccaaataaacagctataattattccaagctgcttttgctatgtatctggtatattaaacaagaaagtggattacttttaacactgcacaagtaaccaaaggtagcaaatccagcaatattaaaaccggatattaaatagtattcaaacattacaacaaaaacaaaataagaacttctagaactagaactctaccctatgaaaggaatgtacacagatggttaaaaaaaaaccaataaataaataaagtgacaagagtgactaattctgtatccacatcttcagagcaggaatacagtaaatgagtaaatgcttagaggagtcttgctgaaaatgagaaaaaatgcatctcactttagtataatttttctaaattctcactgaagctctaattctcttgtgctggtgacaggtggacagggtttttaaatgcaaagtattctccctacaccctgagtatggatgcatcagttgtttaaaattctgtggaaagtttccttagaaaaacataaaatttaaagtgatatactgatgggaaattgaatatattaattgtggaagaatatcagctaactaattaactaagtagacatttaaatctggactctgttgaagaatcaaggttaaactctgcattatgtgcactaatgtcagccatctaatatcaaagtcagataagtaaactatctttcactttatacatagtgcatttagtaaataaattctcttaccagcaacataaa

SEQ ID NO: 340470 - DNA, 1000 bp, Homo Sapiens
tttttttttttttttttttttttttttttagtggggctttcttttattaagatttaatttctgctactttcttcaacaagctaagcaaagccaggtatatataattttcaagaacaaaagaataagcaggacaaggaaatgaaactactgaccacccttcaattttgttccactatttaactgctgagttattgcacattgtaaaaaaaaaaaaaaatgcctattacaataccacactaccctgttacagatcacaaaataagggagaaggtatttccatttttttaacaaaatatcaaactgttactcttaaaccagataaagagcaatacatgtgcgactaatattcataaattaacactctgaagctaactacctgctattcaaaggaaaagcatttagaaaatactgaaaaacaggtaaatctctacatcacccatatgggacagaaatgcaaagaacactacgttcctcgagccccacctggccctccactacctagaacctaaactgccctgttcaaacacaaggggaagaaactatcctagacttcactcagaaaaggagacgttgctggacatgacactgaggctttcactggccatgacagtggcatcatctgcggtatcaattgtggcctggactctctcttccacatctttcaaagcatccttgtaccaggatggaaaggaactaggaacagtgttgttcagcttggctaaaaactctagtactttcttcttgatgctttctgaatgggctcttggaccccacaggaattcataatatggaggagaactgtggggcacctcccgatactccaggtaatgtccctgcacccaaactttagtgaggagctccctaggctccccatagacgaagtgctccctcccagcatatacccctactgcattcagcacttcccagatgacctcctcagaggcacagttgccctttatgaagatcacactcagaataataatcaggaggctgttctcgg

SEQ ID NO: 340471 - DNA, 1000 bp, Homo Sapiens; identical to SEQ ID NO: 159516

SEQ ID NO: 340472 - DNA, 1000 bp, Homo Sapiens
ttttttttttttttttttttttttgcatcgatgactaagtatttattgagacaaataatacaaattggtggcatacaaattattaaaaatagaatgctgaattttatttataggtgggccatcagatactgtttacaggttaagccttactataatgaactgcaaagaagtatgtatactgtttgaaatgaggaactttatccaggcaaacatgggatgtcaagagtggcctgtggtactggagacaaggaatatcaagtaattgacatgttacttgtctgtcagattttaagaatactgttatttaggcatattcaaagaaacaactgcctgttttaatagggataagtatataacgaaaacatttaatatccatacccccctcaaaaagccctttattcccaagtagcaactagtgtaaattaattttcaattcctttctacccttcctttgctagaaatacttatgcataactaaaacactcaagtcactgaagggaacaaatccttttaccgtcacttgaatctaaaaacactcattttgtaattcgggcgaagtgagctctcaaatataatgcatttttttctatcctatatatatacttgggtaaaatcggaaggtgagtgcttaggcagaaataagtaactattaaaccagtgggagcaaagttcagttgggcaatactctttatgatactgacaagtgaaggcttattagttccaaaagtgctggctttatttctgtagtcacagagtagtctaaaggtaaggcttacccagctcttggctcccaagttaatgttacttattcagtatgccagatttttctcaaggtgcattagctactcaggataattttactggtgggaactgagattttctagacgcctaaattaactgccaattctggtttatcttagggacatgtccattgaaccagtattctcactcagcttgaatactaaattttgttcccttattgttaaagtgatgaatatgt

SEQ ID NO: 340473 - DNA, 1000 bp, Homo Sapiens
acttaagcataagcatttattaccaaaatcctcatatttatttttaaatagctgcttagagtggaaacttgccctgttacagaatattcaaaatacatgttcacactgtagcatttgacaacatctccctcctgtggttcaaagcattcatttcaaacatgaatatattaagtacagaattacaattccttagcttgaaattatgctgtgaaagtttggttcatgctttgtgagttgtttttggagttgttttggagtaaagatttaggaacatgtagacaaagagaatattctcttttcttggctagttccagagtcccaacatttcagcaaagtgtttccccaaagttctttataaaagcaccatttttttttcttacaaatgaaataccaagtgaatgttttcattgaaaacatgcgattctccattttaaaaagttttcttccttttctgtgggcatagtatgcagaatagactcagcattctacgtggttactttaacagaatggaactttgaaaacatttttttttttttttttttttgagacggagtctcgctctgtcgcccaggctggagtgcagtggcgcgatctcggctcactgcaagctccgcctcctgggttcacgtcattctcctgcctcagcctcccgagtagctgggactacaggcacccgccaccgcgcctggctaattttttgtattttctggtagagacggtgtttcaccgtgttagccaggatggagaactttgaaaactttacagagaaaatagtattgaaaatattttagtccagaaatgccttaaggtatacttttcccattgttcaagatcagagattacagtaactggcaacaacctgctctaatgacgtgaaactgtctaaaaagtcctcttcttcgattccaaattttgtgtactgatgaatgtaggcttttgaagcaaacatattccatgccttcccaacaatcatatcaagtggttttactaagaactggct

SEQ ID NO: 340474 - DNA, 1000 bp, Homo Sapiens; identical to SEQ ID NO: 159517

SEQ ID NO: 340475 - DNA, 1000 bp, Homo Sapiens
aagacggtagattttgtattttaccacaataaacaaaacaaaacaaaaccaaaccaaacccaacaaacatccagaaacctcctgccctgccctgcccctcctctggctgggcccggccttgggtgggggcggagcctgcaccctggtctccgcttcccctgcccttgtcaggtccccacagatacgaccctgcctttcccatctggacacgcacccaggagctccactccctcggggtaggtgcccaagtcctccctgaggcccacaaggccctgcacgccctgccctcctctcctcactctgttcctcccgcataccaggtgccgtcctgccccagggcctttgcatggctgtgccctttgcctctcacccaggcgtccctgccttctccagccctggctgaaatgccaggcttgtggtgagcctctgatccaaggccgcccttccccaaggccccctccccacccttgtgacgccacctcctcacttcctcataagcttctctgtctctgggctgtgtcccccatgccagctccacatgggccaggtctgctcggtttcatcatctccaatgcccaggatggggcctgccccagctccttcaccctcttctcaggcaccgcgcaagagcgagcctcaaaaccacctggggcctcctggctgccaggacccccacagcctcccctgcagcccccggccccccggcctcctggctccctcagccacttcccagccattcctcctgttctctccgcccagaccccggggaggcaccagcaccccctgggccaggctcctgcctcctgcacctctcatcgcagaacctatggcagcctgagtttttcaattctctttccctctcactgcaccagctacattccaggatcaacagaaaagttgcagcccgccctgcggggcccttggtcagcctccccctccatctgggcgtctcccaaccactgccagggtcgccccaggaagcgatggccccactggcctt

SEQ ID NO: 340476 - DNA, 1000 bp, Homo Sapiens
tttttttttttttttttttgcaactaccctccagtatgaactttcatatcaactttgaaaatcgttaaaattgaaaaactttcgatatttacatttatagtttctattcagcgtgcactttcttcacatggtattgtaaggatgcacgccaaatgaaggcgttgccacaatccttacatttataaggtttctctccagtgtgcattctcatgtgcactcgaaagcctgtaaggaaactgaagggttttccacattctttacattcatagggtttctctccagtatgaattcgttcatgtatatgaatataactggaactactgaaggctttaccacactgtttacattcataaggtttctctccagtgtgggttctttcatgtatctggaaacctgcaagagtaatgtatgttttcccacattttttacattcatactgtttctttgcagtgtgcatcctttcatgtcttcgggcagaactgcaacaataaaaggctttcccacattccttacatttgtagggtttctctccagtatgagtcctttcatgtctttgagctgagtagtagtatctaaatgcttttccacattttttacactcaaagggtttatctccagtgtgagtactttcatgtgcttgaaaacctaaaggagacaagtaagttttcccacacagtttacattcatagtgtttctgtgcagtgtgattcctctcatgtttttgagcagtacagtggtaactgaaggctttcccacattccttgcatttgtagggtttctctccagtatgagtcttttcatgtctttgagcagagttgtgatatacgaacactttcccacattttttacattcatagggtttttctccagtgtgagttctttcatgtgcttgaaaacctacagaagatatgtaggtttttccacattgtttacattcatagcgtttctgtacagtgtgattcctttcatgtgctcgagcagaatggcggtaaatgaaggg

SEQ ID NO: 340477 - DNA, 1000 bp, Homo Sapiens
ggtttccattctgtgagtcttcagattatgagtccaacacacaaggggatgtccacactaacctgtgtgaactctctgatgtacaaggtgtttgacttcaggcaggagtttctgattcactatactgaaagggttctctgatataaaatgaggtctgacttcagagaagccttcccacatctattacattcatattgcctctcctatgaattctctgatggctgttgaatgctgatttgtggtagaatttttttccacattcagtacactcatagggtttctctcctgaatgagttctataatgtacagtgaggtatgacatccgagagaaggcttttccacactcattacattcaaagggtttctctcctgaatgaattcgatgatgtatagtgagataggacatctgagagaagcacttcccacattcataacattcgtaggctttctctcctgtgtgtgttctctgatgtcgattaagggctgaattctggcagaaggttttcccacattcactacattcatagggcttctctcctgaatgaattctatgatgtatagtgaggtatgacatctgagagaagaattttccacatatatagcattcatagggcttctctcctttgtgtattctccgatgtctacaaagggctgagttctggtagaaggttttcccacattcactacattcatagggttttactcctgaatgagttctatgatggatagtgaggtatgacaactgggagaataactttccacattcattacattcgtaaggtttctctcctgtgtgcactctctgatgtctcatgagggctgaattcaggtagaaggtttttccacattcattacattcatagggtttctctcctgaatgagttctataatgtacagtgagatatgacaaccgagagaagaattttccacactcattacattcatacggtttctctcctgtgtgggtcctcaggtgggtcgtgagagtagacttgcggca

SEQ ID NO: 340478 - DNA, 1000 bp, Homo Sapiens
ttttttttttgaaggctattatgtatcatgcttttaatacaaacttaaaaaaatctggaacaatagaaactgtacagatttgatcaatctttttgttttgtttttaaactaaaatctctaaacacaccaatgtcccattccaaaatattgcacaacattctgaatacaaaacccttgattgtattcctccttcactaaagaaaaaagttcatgaccctgctccccgggctcctctccaggcttgcctcaatgcccccttcccatccctagggagaaaactagagaatctataactcactgcattgagaaaaacacatcattctggactaacagtttccattcttcagaagataatccaccttttgatttgttcctgggaaagagggatagatagaggatggggaaaggggagaaaaggttttatttctcctcttttttttttaaagtttgtttttcctgaaaaaatatgtttctctcatctttttaagaaaaaatcttgaaaagaaaaaaattatgttttttacgttagaaatatacatatattatatacctcttacattttacaaatgtagcaaattattcaatacaaacggacaccaaaaaatgtaaaaaataaaaaaaagttttcctacgaaaccaggtaaattagtgcagatttctgtttttgtattcttaaaaaaaataaaattgaagcaaaaatgcctagatttgagacaagacagactgaactgggcccaagagcgcagcactggagtcatgctcctgaacacacatttttcttcgtatttcaaaagacacaaaggggttggtctcccctctctccctacatgtgagaaacaagccgacctggtgtgggtgggtgcctgtgtgtgtggatgggaggagggctagaaggggatgtaaggcagcatccaacctttcccagagagaagctatctgctgggtctgtcacctgtgtgggagccgaggatgagggaaacaaagggtggcccagactggg

SEQ ID NO: 340479 - DNA, 1000 bp, Homo Sapiens; identical to SEQ ID NO: 159519

SEQ ID NO: 340480 - DNA, 1000 bp, Homo Sapiens
ttttttttttttttttttttgtagagacagggtatcactttgttgccctggctggtctcaaactcctgggctcaagcaatccttctcatttggtctcccaaattgcagggattacaggcatgagccaccacaccaggctaatgctccttcttgacttaagtctggtcaatgggcaactgttgcttataaccaatgaattcttaaaaaattctcaaaaattctaaaaattcttggcatccccattttctctcctcctatgtaccggccctttaaatttggatgctttccccaaacaagctttcaaatctaccgaaatcctccatgccactggctccagtgggcgatcctcagcctaggtctggattcctatcgatcacctcttcctttggctttcaaccactctccagatgatgacaaaatccttgccagggtcctgtgcagggtggcccctcccaacgtcccctctgtcagtactcgccgtgctccgcctgttctgcctgctctggccccatcggctctgtctctgtctctccctcccgattgggatgcgtcctcctgccacagcacgcgcatgtgctgctcccactccctggacgttccttgctcctgactcattagtcacttttccaagcaagccttccctggtaacctcgtccagccccaggactcaatgctttctttagattctgctgtggcagcaagtacctcaccttcactgctcttgtcataggtgacactttctagttgtgtgattctgtagctattcatctattcctacattatagcaagaagcttggggaggtgttagatgtctgactagaatgcagagccacatagggcccatgcagtgtctatgtcccctccacacggacatctggctttgagccaaaggatgacgtctgcccatttcttgtttttgccttcacttagtcacctagttttgttgtgtgaacaaatgaatcaatgagtgaattctccaggaaccaaccctggttatcag

SEQ ID NO: 340481 - DNA, 1000 bp, Homo Sapiens
tttttttttttttttttttttttttgtgatgaacacttttatttacaaatataattaaaagctctgacagttatcatgctcttccttggaacctgaaaaatgttttgttttgtttttaaagtgcatgcaaaagaagtaaagcctttttttttttcatcattttttattgtaagaaaatacacagtttgaaagtgtgaataatgcaatatttatgaccaagaaatgggacttaggaaggggaagggagataaagaaaaagatccagatgatctgattgagagacagtgttgaactccaaatactgaactggaaaaggaaggaggtggggaagaacacgaagaagaagttaaaaaatttgatccgagaaacagttaaaatacaatatgaaaataagtaatacctctccttaaattcctctatacacaaaatacccatttgccaaagcccaattgtgctactgggatctgtgagcccctaagtgtatccctcctctgcacagcagaaatgattatgatacatcagatatgctgagacaagttaactctgcagcagtctaaaatcacaagatctcttcaccccacccacccccgtccccaaaaaagtaataatatgtcaccactgatatgtacatcacaattagtttctgtaaaatgtatcaaattttcaatctttaataaaactttgttttttttattcctgatgaataaataccaaaaaaataaaataaaataaaataatgcagcagctagttaaggtgtaaggctgcggatattgtgtctctctcccccttggcatttattattattattttttgctttactttcacagattggtggtaatgagtgattgcttaaagcaatatacatccactttttttgttgttggtttattggttttgttaaaactgtctccaaagttttcactgaaacattttgaatcacatcaatactgtgacgtgtactgtgaatagaagagacggccaggttttggccagcactga

SEQ ID NO: 340482 - DNA, 1000 bp, Homo Sapiens
actgttttaagatcatttattagaacagtcattcagaagccattgagacatcaggcagcagaaaggaaggtgggatggagcaggccctgtgaaggaccaagaacaaagtaatagccacagttatgaaatttcattttattctgataaagactaatatatgcttgataacctagtgataatccataagtttggtatttcacaacattttttagaaagcacataagattaacattcaaataaggcattatagaaagttttataaagaatgaagtgtttcctatatttcttttaaaaaaccttggttcatcttgaaagatcgatgaattttttaaatatcagaagaaaagggaaataaaattttccccccaaaacacataagaaccacttactggcacttgtattttaagtacctgggaaaaaaacggaacagatttttaaaggcaataacgacttgtaagacggcttgtttcatttgatttggcacgaagtaaagtaagagtaaatatgccatggaagacataatcaagtttttcctccatctctcatatttccccacttctaccagaccacacagtacatcagcaaccatcctttagattccaatttttaaatggctgctcagacgacaccaatagagttctttctccttaaaatatggtggcagtgaatgctaacaggtatcaatttctttgatcaggaacaaagaactccttcaggaaactcactttcctggtccttgttaacctatcatgtaaattctttttattggtacacctgtttactaattataattgattgctatttatgccaagggagcatttcccaggcatgcctcatctatttactaacaacaaagtatgcttactttatttacatagtgccacgggtttctcttttttcttctcttttttattggcgggggagatggtactataacttgttatttatcagggcagatcacacatttggatcaaaaagaaaaaccagcaagtagatccta

SEQ ID NO: 340483 - DNA, 1000 bp, Homo Sapiens; identical to SEQ ID NO: 159520

SEQ ID NO: 340484 - DNA, 1000 bp, Homo Sapiens
ttttttttttcaatcatttaggttcaattctaggtacaaggttgactgatagaaaagcagctattttcaataaacgagggctgaaatctaaccctgcggtccaggtaaaaggacagagaaaagattcatttaaaaataacatatgagtactacttttcaaaggatgaacatattattttccaaatttaaatcttccaaaaagctattctgtaatttcctatcaaaacaagataacaatactttgccatatttcccttgactttgtgtaataataatgatgatgataatcaaatagtgacattcaaaaataacaatttttttttttttgcagagttcaggagaagggtgcaggaggtattagaaaagatgcacataggtcttatatctcatcaaagcatgaatttccaactcattaaaacactccattctctgccctaatctcccaaagagcattcagctgaatgaaaagctgctgacattcgtgccagttcacagctagaatgacatggctgggggacaggagatgctgcagtttccattatccattgaacaccttggcaattcttaattcatcctgtgaatgtgatacttactcttgtactgctctggctatggaaagggccgtagatccagtttcattaacgctatctaaggtcacatttggcaggtcatcatcatcactgtcacttttactttgtctgggagataggcctcgggggtccatttgtgctttgccatggcctctcccatcctccaaaagcggcacgacaatagtgttgttcacatttccaggtgaccttacagctgtgtagacaacaggcaccgactgtaccaccacggggatgcggtgaacatgactcagtttgttagactgtaaattcatgggacttgaaggcggtacgggatggataatgtgcaaaaactgctggcctccaacaccagatgcagaggccacaaggggccctggagttaatactgttgacgaagatgacgctgaaga

SEQ ID NO: 340485 - DNA, 829 bp, Homo Sapiens
tgggcagcagaatcaggtttattggagggattgggggtaggatgagcacggcatggggcttgaggtgtgtggagggagctcagcaggcccagaagcccccttccaccggcaaagtggaacccgtggtcatgccacttcggtcactcagcagaaagaggatggcgttcaccacgtgctctacctcagcaaacttgccaagtgggattcggttcagcatagtcttggccttgtgggggtcactccaggtggcctggcccatggacgtcatcaccactgtggggtttactgcattcactcggatcttgtggggcccgagctctagggccatcaccttggtcagcatgtccagggcacccttggtggagcagtagacgctatggttagttactgcccgctgggagcactggctggagacattcacgatggcccctgggactccccgggctattaagcccctggccacaatctgcgacacctggatgaccgcacgcaggttcacctcaaaggatctgtcaaaggcctccttggtgacctccaggaagggctgcagcagggcgacagcggcgttgttcaccagcaggtccacggggcccacgctgcccagcgcccgctcggtggcctcccagtcacccaggtccacgcacacgggttctatccccgggcactcgcggacaaggctgtcaagatccgcctgagtccggctcacagccaccacccgcgcgcccgtcgcgtgcagcgcctggaccgtgccgcgccctatacctttgcctgccccggtgaccagcacccggcggcccgcgaggaacagctccatgtcggcgcagtctcc

SEQ ID NO: 340486 - DNA, 1000 bp, Homo Sapiens
atatctcaaaaaggaagccacttgcttgatatcaaaagtgcttagaaaataagattttgaatttcatcatgatacccttttttcctataaaatttactttttcactctgaaagacttcttcatggtggatttgcccttgcccggcaattttacttcctttcttgcactggttgcaggcttctttgaggagccaccactaggtttcttgatgactgtggatgagggtctggtcttcttggcaggcgttttggccttaggaggtgctttcttaggcaagggcctagctttcccccgctgggcagctgagactttaggtgcaggtttggaccctctctgcttcacagatgcggccttccctggggacttggctggggttttcttctgcaaccttctcttaggtggcggctcttcatcctcagagtcttcttctgatgactcatcttcatcttcatcctcatctctagaatcatctggctctttcttcggaaacagaactcctgggctgggataatagggaaaacagagctggaaggtgccactgaaccctttcccagagatctgttccatccacccattcttttcgcatttctgcagggtttttttcagcaaatgcatttgatagttagaattggttcctgggtgattctctaggacatacttcttcagagcagtggtagagcaggtcttcggctcattcatggcagcaatggcagacaagattgcatattccatcaggcttccaccaagcaggggtttctcccctgatttcttcagctggaatgtccccgaagcacctttgccagttatctgttctaactggcccctctctactgctctctgcagagcgttcttcaacagctgaggcctgatgtccactctaagcttaggataatactgagacacatatttcctgatgagactgtaggaagcttctttaggttcacaaaggcgagtaaaggccagtgggaggacatcctccaattttacttgtggttctgga

SEQ ID NO: 340487 - DNA, 1000 bp, Homo Sapiens
ttttttttttttttttttttttttttttttttttttttttttttgtttctccaaaattttattttaatttaaattacagggccagccagatattctgataagaaattcacttttccttaggagaaagaaaatgctttcatggcattgttaacaaatgtatacatctccacttttttaagggttaaaaatcacattaagtaactgccttatgtaaaattaaacctttataacacaaaaaccacttccagtataatagtcttggtaatatgaatatattaaatgatcataacttcaaatgcaacatttcaaacttaaatgttttcacattgttttgcttaaaaacaaaacccacgaagtctgaactaccttcagattccaatgtaagagtaacatgaatgttgtgtctgacacgctgcaccctcacttcttccacctaaaaggctacgacctcactgccaaagtggaagctgttctagatgtgtaagttctaagaatgagcttggcaagaagacgtttcttccacttggtgtaatccatgtttttacactaactccatacacacagcactacaccacaaagccaggacaccacatcacggccaagtcttccttcctaaacatccaagagatttttttttcaaggagactagattgccttatttcacacagattctggtaaagacagtcttgagaaatgccaattatgatgtagactgccattttaataaaaataaaatatatctatattttctggagctattttcctaactggtgttcctgaaggtttaaaacctgctgaaacagcaattgggaggcccattttactggccagtatataattccattagtaagagaggctagcaaagaataatcatatcaatttcttaatcagctgcagccatgctgaatttgaactggcaaactctgatttgtcagttgttagttgtgatcttcatatcactaaaatgaacagataccattctaataactttacatagata

SEQ ID NO: 340488 - DNA, 1000 bp, Homo Sapiens
tttttttttttttttcgggttaagaaatacctttaaatttaggtaaataaagctcaaggaggtggggctgtcatctgtggtgtcagtccttctggccccctggctgtcagtgtcgctccagggccttgacaagcagctcattcaagcggcccaccatggccctagggtcgtcaacaagtccagcagcaatcatggcgttctcgtatatctgatccaccagcagctgagccaggccaggctcgcttgcgcgcagctgattcagcttcttgatgagcgcgtgcctggggttgatctccagcgtgggctgcaggagctgtgcgcgctcctcctgggtcttggccagctgctgcatgcgcaggaagtggcgggcagcccccatctccagcacggtgaccatggcagggtgggtgtccagtcggagggtcaccttcacgttggtgacacgcgaccccagcacatttctcatccaggccatgagctcctccgtctccttctctgataggcactcggcggctggggacctgtcctcaaacttctcctccttgtagtgatccacgactatgtccgtctccacagagatcagcttcttcttgtcaaactcacgaaggtgcagcagggtgagctcatcaaactgctcaaagcagaagagaacctctgtgtctttcttcttcatggcctcatagtagggtgagtgctctgccaggtgacggttgggggcgcacaggtagtagatgttgcgggtgccggcccgcatgcggctggcgtattctgagaggctggttagctgcccggagggcagcgccgaggactcgtagcgcagcagctttgctatgtcctccttgacctcctgctcggtggcggtcacaatgccctcccgcatgaacaggccgtaatcttcaaaaaactttgcatacttctcagcatcttttttactctggtcaatgaagaatttgatcagcctctgctgtaaaacgtcccggagtttcctgatgagtgcgct

SEQ ID NO: 340489 - DNA, 1000 bp, Homo Sapiens
ttttttttttttttttttagtcagaatcagactttatttaacaatctgaaaatgtgttcttccggctttaagtcttgcaaaatgggtcgtaagtcaaagacagatttgttcactatcctctgagtgtgtgtggttatgtctctgtataggcaagtgtctgtgtctatagatacttttgctttttatagtgattaaagctccactttagttaatgtataaagtcttattctaataatgctaaaaccagaattaaatattccctgagtctaatgttctcttctccccagcctgcctccctccatccctcccgtaaggctgctcctccgcctccattaatgccaggtctttagacagcaccagcattcctactgagaacccagggatggatgctggctcttatatccctctgacctataccctctggttgaagagcttctctggcgaggtttggggcaggaggagtcttggtagtttctcttcagagttgtggattttcacttgtggatacctcttcttgaggttcaggtgctgtgaggttgttgttttctggtaccatggagacttgaagctggtcttggccctccgaggagttagctgagataagcttattatccttttccttgtcttccatcttctttgcctctccaggctctgaagcaacctgagatgtcattaaggtgggggaagtacaaagttcttcagggttctgattgtggatgttttcattttctttggcctcaggagttcttactggcttctctggtggttctggattaggagagacctctagggaggtcctaggacttgcagtcccagtccccaaggaggccctagggctggtgggtgaaccccctccagaggctgtagggctggaaggtatgttccctgaggagggcctggggcttgcagtggctctgggtggaggaggcctactagggggtgctgaggtcctctggatagaggctctcttctttggttgttcagatccttcacttgcggt

SEQ ID NO: 340490 - DNA, 1000 bp, Homo Sapiens; identical to SEQ ID NO: 159521

SEQ ID NO: 340491 - DNA, 1000 bp, Homo Sapiens
ttttttttttttttttttttttttttttttggtgttcttatgaatattcactgtttgttaccaaaaacagcagtatcatccatttttgtcagactgaaagcatgaccagaaatatggatgggtaggagcaatttcagggaaccgttatgttcacatgtcttcctctccaagaccccaatggggtacccaagtgctgtctaggagctggtgactggcgccataggaactgcagtgggccttgtctggactttgccaaaggtgtgatctccctgggctgccctgtgcattctggcatgacgctgaggttggcattagtgtattgaggtcatttcagatagcacagggtggcccagggccatggctatgttctgcctaactcagaacataattttcagaagaaaaaatcttgacccttaagtcattattaaaatgttacaaagtaagttggtgactttttgtcctaatgttctccataaatatggtgtctcctttggactcccgatttatcaaggctttcctgctgtatgttgccaagattctagcaacagactctgtgatcccatttctgcccctcatgttttggcctgtggtgtcttcaaggctgccatgctcagccaggggctctcctatgtcaggctgtgttaggactaccctggcctagaggcagtagaataaccaaaatgagccctggacttgaccgtcaaaacagacccagctccagagcctccagctttgttcccttcaccctgcgttccctggggagtcccatcctgcatttcctgtcccataaatttgaaagtgctttgtgaactaaaaagcccatgtaaaagcacaggcctgtactggttatggaatttcgtgctctctcatcacttaagaaattgggcccatcttccaaatggcctcaaattacttattttcttctcagaccaatctattttagaaagaaagaaaaaagaaaagaaaagaaaagaaaaaaggaaacaagtcatcaatgtgg

SEQ ID NO: 340492 - DNA, 1000 bp, Homo Sapiens
ttttttttttttttttttttttttttttttttttttttttttttttttttttttttttttttttttttttttttttacttgttatctaggtccaagaatcattaaaaacctttgtttcttttatatatacacatacatatctcaaaacatagttatttttactttttaagttatataaataatatacattttcaatataggaaaatgggaagatacagataagcagtggtcttatatatatccttgcagctttttcccttcggacatacatattttgttacagtaattcctgcatctcaaaaataatacaaaaagtgaaaataagtttagaccagccttaaccttagctcaggtgctaatttatatataaatctatgtgcattcatttcaattttgacttacaaaatctaaagtgatgctgttataatactaaaagattccactttaaacagcagcagtttcagaataattaaaaatttgattcaggcatgaggctgataaagaacgaagttttactttttttcattaaaataagtagctttctactattgcatcctttgaagagaagaatgttctgctggtttggccacaagctctttagatggttacttttagtaaactcttcattcatcctggcattcttgaaaatattcgtcaaacatagaggaagactcatcttcacgttcctttggttctttaaattctaggtcttctccatattgaatggcaaaatcaatatgctgcaatgcaatgttcatgctttcttcatctgactgatcgtaaggtaaaaatcgaaccatgctgtagtcatcaatcagtccacatatagctttagtcagtttcttgaattttttgcttcttaagtcacttgtagaatcttctaataaagaatacatgtctggatctaaaaatttctcaatttccttttttgcttttttactcagcagatccatttttgtcatgatgttgacttgcggaatttctagagagatcatggcac

SEQ ID NO: 340493 - DNA, 1000 bp, Homo Sapiens
ttttttttttttttttactttttaaatggttttattttatgtacaaataatgaacatacgttgtacccataaattctactttccaaaaacaggagctttttaaaagaaaaccacataacaacttttaaaaggcgctgggattcctctgcttctagatcaatgctgggctagaaaagtaaagtctgttctatcaggaatcacaagttggaactgagtattctccaaagtggaaattctagagtgtagtgtcactccaggcaaagattattcagttctcatccccagcatccacaactacctatcagaagggttaaaccaggtcaaaacagtccagcataattaggcttcatcaaacaatgtcattatgctcttctaagatgcaaataaaccaaaacaggaaatactaaaataaaaatatctgacactgccatacaaattgttagttcctttttgtatccccccttctataacattaacaaagggaatattttactgcaaagaatattttattttatacatcactagccatgaatttttgccattagttactatacaaatgctgcctagtgccattatccaaatagcacaaccattttacgtccacaattcacttctatagttacaagtagaattttcatgatttacttaagtacatctatcagtaaagatttaacactgagatgcaatctaacatccgtaatatctgatattatgtagatggcaatgcaggaaagatgtcttttaatcgcttttcatttaagtgaccttatgtaaaaaataaaataatttagcagttccaagtatccaaagggcattttcaaatgtacataaaagaaatggttacagagatttttaaggagcatcttccatgtccacatcctcttgtaactgctgtaccattttctcttccaactgtttccctttgcctgcaagaggggctcggataagatggatgttttgcttgacttctttgatatcctgaactttctgtagctcttta

SEQ ID NO: 340494 - DNA, 1000 bp, Homo Sapiens
ttttttttttttttttttttggggcttaaaaaaatggttttatttcttaaagacaaaagctttttggttttaatacacaaactaaatgaggtccttggcaggctcttccaccttccggcccaacccctccaagggttgtgggctgcagtctctggtggccaaggacagaagagctgggcccggctgcaggggcctcaacagcctcgtgggctcgggagtccaggctggacagacgggccaggagagctcatccaggagaaggtcacttcctgggcgtctgcccccttttctattgctgtccacccagggaggcgtctgggtcctggtgggactggacttcagttcaccgtaggcacctggctgtggtgcaggctgaactccttggccttgagacggaggctggcgatgctgttggccatgttgacccctggggttgcggggcctgagctcccagggctgtagggtggcactgtgctgtagggggacgaggctgtccaggagagataatctggactcagggcggtgggccggggagccacgggctgctcgatggcggcctcctggctgtaggacttgagcagcgaggcagagcggctggccagcatggccctttcattcctgcggaacttggcgcggcggttctgaaaccagacctgaacgcgcgcctcgctgaggttgacgcgccgggcaagctcctcgcgcacaaaggcgtcggggtagtgcgtgcgctcgaacacgcgctccagcgcctgcagttggctgctgttgaacgtggtgcggttccgccgctgcttcttcttccgcttggcggcgctaccgcgccccgggctgggacactcaccatcctgcggcgccgcctcgctgccgctgctgcccccggacggctcccgtgctgcgccctcccgcgcctcggccctggccccggggcgcgccgccagccgcccggccgccgccacctcttccaggtccaggaggtggctcaccgagaagttcttgcgcg

SEQ ID NO: 340495 - DNA, 796 bp, Homo Sapiens
aaatgaaatattcagaattttgattaaaataaataataaattacacaagtttacaagtaacagttaaatatttagggacatgtactaagttttacaaacagtacaaatatttaagagtgttgattgggagtaagggaatgtcaactgccaataaagtggaagatgaaagaataggactttacacagagcatatttagttatgggtctctgtctcctccccacacagaaaaactcccagacattcatgacttcatccaccctgcctggcagataggccatatttcctgaccccctggctcttcacctcaaaaggtttatctttccaccacactagcaaagaccctcaggacacacaactcatactgccagctaagcatctaccccgagggacaaggcaagcacacactagggcagctgggccatcctggccctaatccctccagcggtgtccacactgagcattgcagcacttgtagaaggtggtcatcggctcatctgcagagcgggtctgaagctgcatgaagtaagcacgaggatgttcgcatttgggacacgactctgcagtagagtcaacattctcccaggcagctgctccaccaagcacatcatccacttctttcagttttgggtacttccgatttgttaccttgcgggtgatgttgtgcacgtaggggcacgtgttgcaggcgaagcggtggcagcgttgtccctcctccacgatcagcccgttcccgcagccggggcagaacagcagcatggtctcgaactccgcaggctccaactcccggcagctccc

SEQ ID NO: 340496 - DNA, 1000 bp, Homo Sapiens
ttttttttttttttttttggtgtagaacatttatttatttttcccacaaatcactgaaagtttaggtcagtgggaaataattttaatcaaataattgtacatattcttcccacatatcctgccttgtattaggaaatgacattgtgatccatttcattacaagtaaaatattacaaaatatttacaggaaaatattaaaaataactcaaacacaaaaggcaagatgaaataaactgtttttttttctccagaaatctctactccagtgcccacagcacacaagagtcaaaacaaataagcaactaagatcccccgatcacaaatttccaaagaactggaggaggggaagaaacagggtgaaaatggtggtatgaaagggaatggatgttagcagcactgcttcaataactgatctattctggatgaaatacccttttttatgtgcagtaaattctgaacaaggctaaattttaggatattccttgaactgaaattagaaaataccctgacaatggaagcagctctttcatctaagtttaataagagcctctttctccatgggccactgttgtgaacagaagccttttctggcatcaaaagctgtcacagtagcccttccatctctttcatgaaagcctcatagacatcatccttagtttgtactgagacaggaacagaaggaccagatttgggtgctgctttggcaagaggcacagcagaatcatcctctgactttctttggggagcagcagtagcccctttattctcccgacgtactctcagtgcagtgggcacaaatcgagtaatctctgccttgggattagtgatctgtggcttggcactgatggttgctgtggctttcttctcaatggtggctgcacttgtatcatccgccttgggtcgctgaatcaagttgggtggggcacttaaaaccccagggtttggcaagggagctggtgggaacagcccagggggggcaggtccaaggggaggcaccaaa

SEQ ID NO: 340497 - DNA, 1000 bp, Homo Sapiens
ttttttttttttttttttttttttttttttttttttttttttttttttttttttttttttttttttttttttttttgtagatagatttctcatagatttatttctgcgtcatattatatatagatatatgcatatatacctttttttttttaatacaatctatatacccttcccttccccaccaaactcacaaaaggagattaaacccttccaggattgccatcaagcttcccgagatggccagggccaagaaagaatcatctctcaacatgttaagaaacggctgccattcttaggctctggggttgaagcagcagcattcccaggacccaagggccagagagaggaaaagaaatgactgtagtgtgacaggattctaggatgaacatgtccagtgactcctggcatggcagactggctcccagaattctcagggtgtgagtaaaggtgggggccctatggctcttcagaggctgctcaataggtcaggggtagggtataggaactggggatcaggcatgcagggatggggtggcagaaaaaacgcctgtgggttatgctccagacagagcgacccccatcagggctacccacctactcaatgacatgtaatgaacagggacagatgctgagctcttaaggaaacaagggagagagcatggcagcggggagcaatggaacacatgaagtcacaaaaaacagaaagtaccaacaaaaacatgacctacatttgactcctccctagagaaggtgtgatctatgtttggggttaggggaggtgaagggtcatgaacctaggattatcagctggccaggggcacagaaggctctctgaggactcctaagaggcaggcaggcagctgggaccccacatccccagggaggaaacgacagttctttcaattcgacttggaccaaatcttggcgctccctcggagccccttgccctttgaggctttcttgctgggctggcgctggttggtgccaggagctggttccc

SEQ ID NO: 340498 - DNA, 1000 bp, Homo Sapiens
tttttttttttttttttttttttttttttttttttttttttttttttttttttttttttttttttttttttttttttttttttttttttttttttttttttaggggatatattgagatttattgcaaggaattgacttcagtgattgtaggagctggctagtcatgtctaaactctgtgaggcaggctatcagaagggcagactgtcaggaactctcgccaagcactgggctgctgtcctcaggcagaatttcttcctcagggaaacccttagctctgttctttaggccttctgactaatcaggtcaggctgacccagattatctgagataatctcacttacttagtcaattgggaatggacttctgtcacatctacaaaataccttcacagaaatacctagattagtgtctgattgaattactggtgactgtggcctagctaagctgacacatccaaagaccatccgacccaccacagccttgctgtaggctcagggtctctggatcagccctcaccctcttcccactggtgtacgggatggacagcatcatctgcctaacctcaaatccacctgcacaagcagtacctgggcatttttttttttagttgaggtaaaatttacataacaaacattctgaagtatacaaattcagtggcatttagtacattcacctctacctagtccccaaacatttccaataccccagaagtaagcagccccttacccattaagaagtcactccccatgccactctccccctgcctgggaattttaaaaccaacctggacaatgttattggggagaacctggacatgttaagcctgccacacttgctaatccactggggcagaggtgtcttcctcaccccaaggcaggcactgaagccggctactctttcacgatggtggggctgtagttggacttgacagcttcggcgagctcccgtgcgtacatctcatacctgcccgtcatcttgaagttccagacatcattcacc

SEQ ID NO: 340499 - DNA, 1000 bp, Homo Sapiens
tttttttttttttttttttttttacttatttaaaaaggccttggtggcaggaatatagtgtaaaaatcattggaaaaactaaaaggcatcgatacatatccgaatatacattttgtacataaattacatttcctttagtctttctgagtgaggtcctgattcagtactgaggtctagtaattaagaggtcccgggagctgcacgttcaggccggcatagtccaccatgtacattggccattgcacgagtgagatctggttggccgatgccactgaatccgggttagaggacgaggaagaggaagacgaggaggaagaggagacggaatttccttccgagacccgctttctcttgcgcttgggaatgctgctgtctttggctggcaccttggcatcattgcagatttctgcaaagggttggagctggttaatgatgaccatgcggacatgctctcgggccttcaggatcttctccagccggtggatgtcgtacgtgttggggttccggaaggggatgtcatcaggcagacccgtgacctccacggcgtctgggctgtcccggattagtttataagggaccagcaccggccggttcaggcccagggcctcaccgtatttctcgttgaagagttccttcacctgctcccgcaggatcaccttctccccgagtctgttggcgtcatcttcatcaggctttgggatgagtccttggaaaggcctggtgactgtgaacttgatcttgtcagccacagcaagaatcctctccaggttctgggagccgaaggtacagggctttcggaacgggattcctgggggcagcccctcgatgatcacggagccggggttactcttgatccgcttgtaggggacctggaccgggtacttgatgcccaaggcttccccgtatttcttattgaaaaggtcctggacctgctcccttagtgtgttggcgatgtcgatccgtgagagcctcgcgtcataattttcttgaaagccctgtc

SEQ ID NO: 340500 - DNA, 1000 bp, Homo Sapiens
gctaatttatcattttattaataaatgttgtaagttatacattttcatgccagcaacccctatctcccagatcttcctaactttaaatacttcagtgggttttctgtcaatgaacaatttgacatcagaaatttgggcaagagtcaggcataatggctcatgcctataatcccagtgatttggaaggccaaggtgggaggattgcttgagtccaggagtttgagactggcctgggcaacatagcgagatctcatctctacaagaaatttaaaaacttagcgggcatggtgccacatgcctgtagtcctagctatgcaggagggtgaagtgggaggattgctcgagcctgggagactacggcccgggagctatgatcaaccactgcactccatcctggacaacagaacgagaccatctctaagaaaaaaatattaagtctgtgaatgaatttatggttcctcaacagaaaatgaaacatcaagttatgaatgagttatgatatagttattttttattgtgtaagcccttattagttcctccctcatcccatcttaaaatattcaacaatagatagtggctcaaaaatttttttttaaaaaaacagactgccatgaaaaccaaatcttttcttcctgtaatagtggcttcctagtgttatttctcattaatgggagtatccgtggacttaactgtatattgcattttagttctggtcgtgtaataatttaatgacttcacacataaaaaactaatcttgtcttgagttttaaaaagttactagcacccatggttaaggaaggaaaactgtagctcacttcttcaatacatttgtttcttttcaattcatgaaatcagagaatatggaagaaacaggatgacagtcaccaagagtggttgaaactacaaactatcacgcaattgaaaataccacattaaagatatatttatatacagaaaatggagcaatgccaataaaattttataatttaaaaaagttact

SEQ ID NO: 340501 - DNA, 1000 bp, Homo Sapiens; identical to SEQ ID NO: 159527

SEQ ID NO: 340502 - DNA, 1000 bp, Homo Sapiens; identical to SEQ ID NO: 159528

SEQ ID NO: 340503 - DNA, 1000 bp, Homo Sapiens
ttttttttttttgcggacagtaaaccgtttattactgtgtggacacagacaccgtggtgcatgacagacagtttcaacaccatgagcgctggggacggagctgtgcctggacagctctgcggtgtgtggtggcgccacgctgggccggctgtcaccgccagctgaggcgctaacagcgtcacctgggagaaaacctggaaaccgtctaatgaagcaggtgacttaggggcgtctctagaaacccaaagaaatgtaccttaaataagcaaatataaaacacaaaaaagacgagcagacctggtgttccgtgtcaggcagaatctaaaaaaacccaggagttgcacttggtttcctcactgtcatgtgtgatcacaggtcaggacgtttcacagcagcgcgcccaggctcctgtgcgtgctctggtgcactggagtctggggctggctgggcttctggctgtcctctgtcgccggatgggctcgacgaatcagcgcagcgaggccggccccttacgtggtgctgatcccactcagctcctgcctgatggcgtcgatgatctcctccttcaccttgtggagctctctcaccacctcctctaggatctcctgcttcatccggtccaagtcgaaggcatccagggccatgtcattcacgctcccagcaggcttcatcctagagtgaggctgcgactgaagggggctcttagcttcggggctctttgccacagacggggttctggacagaatcgaggacacaggcttctccaccgagttgctccgctcccagggcttccggccagcctctgaggagttaggtggctggctggctgctcgggtccccggagagggggaggtactaggatcttccatttggctttcatcttccttcttctcggctggcttgtctgactgggaggctgcttttctcctcttggccagcagtttgttcatttcctccatgaggcctcctccgccacccccgctgcttgcccggttggcat

SEQ ID NO: 340504 - DNA, 1000 bp, Homo Sapiens
tttttttttttttttttttttttttttttttttttttttgaggtatctttggaaaatttaatttggaccatattttcttcctctttctgaaaacatcaaatatccccatacagtttgggttccacagcttacaaaggggcagtgggtttcccgcagttacatactgtacccaactttctatagaaagataaaacattttccaaccttgcttttgagtatttcctaaaaaatgctttaaagtttccttacaataaatggcaagtaaaacaaagtaaggctttttttttctccttttcccctttttatgtactgcatgttcgaggaataaggaaggaagactagttccatcagagtactagtaatcctagtaccctggggattactgctggatcctcccaggtatacccctattattgaggccctgatgcacccctgcactgaggaacctgagaagggtaagtactaaacagtctgtcatagccacgtgggactgtcacagcacaggtgggactgggagtcgcccagttcttctcggtgctcacaggagtaacaaaggaactaggactaaaccataaccagaggtctcccacgtggtactacagtaccacacgttcacttttgtggcccttacaaatgcacatttatagacccaatgtatttactggaaaaaaaaagaaaaaaatgcctttactaatttctgtatcaaattattagaatgaaaataaaagcatttgtctgataaaacacactttctatgttagatgaaaataactcccttgcaagataagcttggtaatgtgtatttgtcactatttatatatttttgcttagtacacacatttctttaatagcatcatctgaacagctttgtcatttttcaaacctgtagtttcattagcttaaaaaaaggataaggcagccaaatttaatgaattttggttgcagaaaaacatctcaggtattaactctcatcttcaaatattaagagcacataattaaa

SEQ ID NO: 340505 - DNA, 1000 bp, Homo Sapiens
tttttttttttttttttttgggaaattacagaagtttattaaaatttcacttgcttttacattaaaaaaactgaaaaaattaaccttactatatataaaatatatttaattggcaaaaatgtgaaaaatctgcctcatccagtaaacagccactgaaattttaattaagagtgccatacccatgaggctggaaaagtatgtcctctcaagggctaaaaactgagaaccaagagacaatcatttctgtaactccagctcctctttctcccacaaaatgttactgcagccagctgagagctgcagggtatgtcaggtcagacacaacctggtgctatgagatgtgggggaggcatgctgcagaacactgcataaagtcaaattcgtcttcattattacaacacccatgataagaatttctttaaaaaaagtattccatacttgagttatgagagattttagttttgggtttctatagaccagaactctctagaacccagtctctatttgttggatctatactttcagttacaattcgatgcagcataactttcacttaaggaagaatttgtatacatgtcatttaacatcaaaatttcattctgtggaaattagggttcccaccctcctccccaaactactccctcccatttcccaaaggactgacaagaaaccctgtggcagcttcatttggccttccacaccatgaccagcaggttcctaacacctcaactgcaaagggcttcctatttctctcaaactgagacctacattgtattggtgctacagatcaagtcacatctctgtgtagatcaagcatatcacctctgtaaagatgacttctgtttggtcagaccagagacaattttatgacctcaaacatgaatatcagctaacaagagctctcaaatacaaacaaaaccacaacaattcaaataataagttatttttcaaatatacaagaatatccttggtattggcagacaatttcaatttgtccttc

SEQ ID NO: 340506 - DNA, 1000 bp, Homo Sapiens
ttttttttttttttttttttcagtgtccataaataaagttttattggaatacagccacgttcgttcatgtatgtgttgtctatggctgcttttgcactacaatggcagaattgggtggttgcaacatattttatggcccccagccctaaaatatttactgtttggccctttacagacaagcttgctgacccttgctctaagtcaattcgtgacgatttttccaactgctgacatttataaaatggcagtcccctgggcttcattcatcagtaaattggttggtggcaactagccctgtgccattttgcttctcctcagcatggatctcacatgtgtgaaggcttcagttcagaaatcatcaatttccagtttaagtctgatgaaaataattatattttttccaccatgttcactctttaacttcttgcttaaagatctccacctgggttaaacatgctgcccttagtcactgtcggtaatccattgtgtcactggagacaagccacccacaggtttctcctccttggtttggatactttctgaggtcaagagctgagaaggtgatgtaagtcctcggggctgtttagttgacttggtgagcttcttgagttcacttgcgaaagaaatgcctttctttttatcttctcgagatgcctgcacctgctcctttagcttaaggatgaattttcctgcacctttccacttgctttgggcttgaaacacacactcctgatccagaaggacccgctgagaggactttggtgtggtagtcttcttgttggtagtgtctttcaccacctcttccaaaagcacatagtcgcttggattggggttgctcaggatgctgtaggaatatttggctttgcataaggtctgctgaatgacatcctgtgcagtgctgacgcggggtgctttgatgactgttcgaggttgctctggagaaacatcatgcacttggacaaagaaactctcctcctctgagctcaagatcacctctttg

SEQ ID NO: 340507 - DNA, 1000 bp, Homo Sapiens
ttttttttttttttttttttttacagaaaacgaaggcgactattttattagaaaacaaaggctatatgttaatccatcaccagatacgacaatgcttaccaaagaactgtaaaaaattggtctaaaaacagaaaaaagcacaacgacagacgcatggtatagcacacctctaggaagcctgcagccctcactggaaataaacacatacccacacacacatatgtacaggtttcataagcaaagatgtctaaaacagattgtaagagaaagataaacactcctacatgtatatgtgtgcacattttccttaaaaacacataacatgcttttccttcattttactcagctctgagaaattcccgatacaaaactattccatgcctcatactacagatagaatatcataaagcaaaagtctacattttcctaggagctgttaattagaagaataaaatgtgttttgcatttttttagtgtaaaacccacatacaaacagagattgtgatatagtgcttgtcattttaattgtaacatattaccaaaaagctttatatacatagctttatactatttacattgcagtagaggaatggcaatgctaacaggtgatcagtgcttccaaactttttcaatacctacacatgggagatctaaagagtacaatatatttaagacttctaaggaattgttttctcctcactaataaagcatgccctgactaaagagaagtcctgtaggcacagccttatctattcaatgactggcacctcccaggggtactgacacacaaagtgccttcactggaccttacagttctcactgccgttggactccagtccagctttggggctggggacaagtcggcctcgcttgaccctcaggccctctctggggctgtcagtcggacttctctcaggaagattattgactgggacggatttcgtggtgggttctcggaggatggtgcctgaatctactgggctccgctgagcaactttga

SEQ ID NO: 340508 - DNA, 1000 bp, Homo Sapiens; identical to SEQ ID NO: 159531

SEQ ID NO: 340509 - DNA, 1000 bp, Homo Sapiens
ttttttttttttttaaaattttaaaaatgttacatatatacaattgtccttgtatgctaatataaatatgaaaagtaaaaaacaaaacaaaaataaaaatacatgtttaaagttagcctatgggatattggcctttcaaagctttaaagtcctgcagaaaaatcctatatgccttagccctgcatgctcatttctattatgggatgttgtttccttaaatatggaaaacaataaacagaagcttcatgcatatagcattactgtttacagtgaggatgtgcctcagaacgtcaagttctgaatccactattgtaccttaggaaacttgctacatttgggtcatgtgagttaactttatgaatatttctacatattatctgtcatgcggattatccattaacataccagtacctttattgttccatgttatagtgtaatatttcagtagttcttttcatggttagttaaatcctaagccaatgacaaaaagaaaatggtaaccagatgtgaaactccgcttcctctcctctgtagcatctcagagggtcttcgtattgtctgaagagcagatagatttgcagtgattccatgagcctgggtttctataaaagttgaagtaaacagttttcgatgtatcacatgtaaacagttgatcttaaatggatgtctcccatagcctggcactttgtcggttcactttcttgtcctcatcaggaagtggaggcattgggtaagggtattttctgctggaggcaatagacccagttgatgaagaaggagacttggcaggagataaagtctcagttgaattagaccgaggtctaaatcttttgcctctgattttctttttgttgcctcccaggttaccttgccaagagttacttcgaggtcgcccattttcacagatgtctgaaatatgttttgtgtctggaatcctttcactccaagaatgagagagcccatttgacctctgttctcgatagtttttataaccccacgc

SEQ ID NO: 340510 - DNA, 1000 bp, Homo Sapiens
tttttttttttttttttcacattgaatatttattggcttataagcacacaccagatgctgtacaaatcctaggcaggaggttaagatttacagacatgtttggtaaaagcaaaaaaacaaaaacaaaacaacaacaaaaggacagatggtacgtgctgaggtgaaatgaaacaagaggcagctggttgatgaattcttgctctacttaggaacttgtggtccaggatacaaaatagacagacacacacacacaaacacacacacacacacacacacacacacacacacacacacaaaccaggacaaggaaacacaggatacaccacagcacaaatgggaatgtgccagggcagtgagattatccaggccagatgagtgatttaggacctgtaagatgaggcctagatctttgaagtgagttcaaaaggcaaagaggaggtaagcccattaggacagatggggataatttcaccatcctgcaatttagatggtcacttcacccagccttcctgggcacagtacctacagtgacacagatcccctcccgccatcctggtcacactgaataacaaagggaagagaggagtaagaactgtagtatctagaaattctcagcacagtgaaggaaagtgatcttctactttgtattcaggcctaaaaaaggaggggacgggcccggcacagtggctcacacctgtaatcccagcactctgggaggccaaggagggcagatcacctgaggttgggagtttgagaccagcctgaccaacatggagaaaccctgtctctactaaaaacacaaaattagccaggcatggtggcatgcgcctataaaccaagctactcaagaggctgaggcaggagaattgcttgaacccaggaggcagaggttgtggtgagccaagatcgagccatcacactccagcctgggcaacaagagcaaaactctgtctcaaaaaaaaaaaaacaggagaggagggagggagagaccttcactgat

SEQ ID NO: 340511 - DNA, 1000 bp, Homo Sapiens
ttttttttttttttttcggtttcaaccactttattagggtatattaggagtgaattcatggatatgaacttcattgaatgcatcatgattatattcagatgcaactgttctttaatatatctttgaaataacaatcctcttccctacataatagcaaataactaacgtatatgaagcattggtacactatttttaatgcaaaatttcttaaatcttgattcctatatagtaaaatctataaaagcaagaaaaatcaaaattatcagtttaatggacaataaggacagttgaagtatgtgtcttcaagttcgagttaagccattaaattttttaaagtaaatacttaaaggtaaattttatataaatatgtacaaaatgtagatctatttatttagcactttgttcactcagataaatttatattgcatatctaatgagatatgcaatcatctccaaagattataactcctataattcaaaacaaaacaaaacaaccctttaaaggttattcactatatgaaaacagaaagggaacaattacaacaatgaaattgttttaactttttcaaatctgattctaatgtgtattgacatatatttaattatataaaagactgtgggaaaggggcattaacagtactctagaagagtaaaggataaaaatccctctttttcccctagcttccagtttgacaagagggaatacttaatcgaatcctgtccacaaaaacagctaacagtactgtgctttgaaaaaaaaaaaaaaaaaaacaaacctgacttcatataattcttaatacatcctgtgctgctgttggtttttttaagacttctagcagtagctataggttccggtctggcactttaggtatttttaaaaatgaccaaaacgtgctctaaaacgaaagttaaaatgttatcatattttctgagatttcttgaagcagattgtcagatgaaactcttcagcataatacaaatctgtgaaagactgcagata

SEQ ID NO: 340512 - DNA, 1000 bp, Homo Sapiens
tttttttttttttttttcaaattttaattaaaatctttattgaataaaaatgtttcagactaggtaagactaagaaagcagaatgttttacatctctaaaaaatattaaagctaaatctctataaatgcagtacaaagaaaagcctacagcttaagacacctctccctcccatccatacaatttggaatatcaactgtgtacaacaaatgtactcaagtttataatgtccccaaaccttaagactagaaaatcatcccaagaaaaaggcctatagttggtttaatttcaccctgagaatactgtgataaaaatcaatatatttcagagctagtaagtatttaaaaattagtgtctcaaaaaggggacatcataagggaaatacagggtttagaggtctgagctcaagtggtgtaagacagttctttcttcttcctcctttaaactcttcactttgctctaacacggaagatgggggacagtgatcccgaaggtattactaaaatattgcagctttcagtaattatgagaagcacagatatcaccagaaaagaaagcaatcatttggagtacagtaaattcactggcagatacaaaagcttatttgggagacagcagatctctctaagcaccgaagagtgtaggttggtttttcaattgcctcaaaaagtgctctgttgtattatacctcaggacgtcgagttcaggatgtagtttagagagcaggacataaagtagtaaattcctcatatatatcacagcaagaaaattaacctaaaaaatttaaagactaaataatctcttaacaggtaaatactaaaaaattaaattggtattcatttaaaaatatacaaactgtgccctttatactaaagtgcattcagtcgtaatgtttaagcccctaaattccttctgtatgttctctaattccaaaatagtgtgtaacaatatactactaatcatctatctaccttaatattgccttttgggaatacagtagaa

SEQ ID NO: 340513 - DNA, 1000 bp, Homo Sapiens; identical to SEQ ID NO: 159532

SEQ ID NO: 340514 - DNA, 1000 bp, Homo Sapiens; identical to SEQ ID NO: 159533

SEQ ID NO: 340515 - DNA, 518 bp, Homo Sapiens; identical to SEQ ID NO: 159534

SEQ ID NO: 340516 - DNA, 1000 bp, Homo Sapiens
ttttaaaacaatttttacttctttattttaagtagagatggggtctcactatgttgcccaggctggtcttgaactcctgggctcaagcgatcctcctgccttggcctcccacagtgctaggattacagacatgatccactgcacttggcccagtggtacagttttacactcattagatggtcaagaaatgcctaaacgctataataaatatagaactttaccttgagaagacctaacatttccttcagaaagtaaatatgagaggggtggagacggtgcattatcttatttttatgattttaaaaatgtatacataattgtacatatttatggggtggacagcaatattgcagtacatgtatacaacgtgctatgatcaaatcagggtaattgacatattcatccctgtattttttgagacaaggtcaggcttcgtcacccgagctagagtgcagtggtgtgatctcagctcactgcaacctctgcctcccaggctcaagccattctcccacctcagccccccgagttgctgggagtatagggatgcaccaccacacctggctaatttttgtgtttttttgttttgttggtagagatgaggtttcaccatgttgcacaggctgatcttgttttctaatgtgaagggaagcgggcaacgtgctagttttacactaaggaaaatgaatgacatacccaaactgcctgcaagacccgttctgagagacgaaaggagatttgttagaccgcagtgggagatggagtgagggtgagagtttctggggaaaaccagacaagagcacagagggccaaagggaagcacaggaggattttgcacagaggatggaacagagtcaaccctgagagctgggaaccttagagatccgtctggagcccatattagagaggttgaagaaagaggccagtatgtggtccagccagggtaccatgtcatccacagtgtgcagggaggaggatggggtctccacagattccttccatc

SEQ ID NO: 340517 - DNA, 1000 bp, Homo Sapiens
tttttttttttttttttttttttttttgagggctgagtggcagcgcctttatttgtgggggccttcaaggtagggtcgtggggggcagcggggaggaagagccgagaaactgtgtgaccggggcctcaggtggtgggcattgggggctcctcttgcagatgcccattggcatcaccggtgcagccattggtggcagcgggtaccggtcctttcttgttcaacatagggtaggtggcagccacgggtccaactcgcttgaggctgggccctgggcgctccattttgtgttccaggagcatgtggttctgtggcgggagccccacgcaggccctgaggatgttctcgatgcagctgcgctggcggaaaagcgcattgaccaccgggctgccgggcggcactagtggcgccttgaagaggaagctgagcagggacagcacggggtggaaggtctgcggctcggggtccatgtcagtgcagaagctcacgcgctggcacagctcggtcagcagcgctaggtccagcatgatgggtgcggccagcagcgagtcctcacacgtgttgtgcagcaccagtgtgttggttccgcccagcatcagctccgaggtatactcatccagcgcgcgcttgctgtcacccacgtacggcacatacttgatgaccacgcagtggtcaggctcttcgccgggcgtatagagcactgggttgctctgcaccatgtcgtccaccacgttgctcttggacacctccttagagcggaactgcaatggcgccgataggttctccccatcgttgttgcccaggtggttgtaactcacgatggacatggtcttgaggccggagccaatgaggaagtccacaagcacggacttgactttggtctggcctgacttgaagtcatctccgcccacaaaaacccggtgctgccacgcgagctcaagagctccgggcaccagggtgttctgcggagacccattgaggaaggcacagccctccaggatgc

SEQ ID NO: 340518 - DNA, 1000 bp, Homo Sapiens; identical to SEQ ID NO: 159535

SEQ ID NO: 340519 - DNA, 1000 bp, Homo Sapiens
ttttttttttttttttttttttcaagggaaaacaatatgtttattaagagccatgaaaatgcataaactcatttgtaaataaatgtagtataatttacccagtgaaaaaatagctaaaatccatgagtaaactggattttatatttgaaatgattttacatatttgatctccagtgatttcccctccatcatgatctactccatcaatgactatagaaaaagttgttaccaacaatcatcataccggggaagtttttcaagatgctctttcaaacagaagcagtgcaaacaagttcagatggcaagggatacgataagacctggagcttatcttcggacacgtaaaaaataaaaatcccaaacatgtattccttaagaaatgaaaaagcagaacaacattttgatcagtgaaaaatattataaggatatataaaacattcttaaccagtgatcgcaataattacatttataaatgttcattcaagtactattgttcaataaacattcaaattctcattaaaagtaacactagatgtagacacacctggacaacgcttcttttgatttagcaacaattgtgtcaacaggaggcaagtgacccttaaaatactgttgttggctctgttttattctgtttgtgaatgatttgttcacagtctgtatgtttttttctgcaaggacccgagaaatatctcacaacagctaattaagaaatcatttctataaaataactctcaatattacagaaacagatattctaaaacacaagtgtagctcaaaaaataattgggcagaatcaattttctttggcaagaaattgctaattcctcaccaaatgttggtttgctgttgtgcagacactatcagaaacttctttggtgtttaccaaagagctacttaataagctgaaaagatttcataagctatgttgtcacaatcgcaatgtagagcttatgtcaaagttgtgctgaaatcaacgtcatttgctgaattactgttg

SEQ ID NO: 340520 - DNA, 1000 bp, Homo Sapiens; identical to SEQ ID NO: 159536

SEQ ID NO: 340521 - DNA, 1000 bp, Homo Sapiens
ttgtttttttttttttttttttaaaactaaaacttttattgaataaccaaacaaactgcagttaacatatcttgtgtttttaammmmataactcccagtacatttaaatttctgtgtttcttttgctagggtagacagacctaccctaacagttttataaggcaacagtgaatatataaatgtattcaaaatatattcagaaggttagcattacatctatgcatagaatatatcctctcatatggtctgatttgaggaaagcagaaaagttcagctgcccaaagatacatctaccatttgtctgctaaggactctctgaggatggcttaggaaggagacacaaaagagatattcattatcatagattatatattatcaatttggcagttagttgttagattagcttacctaccaggttggaatgtccaaggggcactggacactaagtcaagttggaacgtccaagggggacaggacactaagtcaaaatattctaattgtggggaaggcccaataggaaaggctgagtacatacggctcttccagggaaagcagacctaccgggaacaacttaatgggacatcttgggtaactggatgatagcttagaggacatcaagttgaaacaatattgatactatgtatgtattacctccattctaatatttatgtctttgtcccaatatacatgtttcaacaaatacatatttagccattagaatatagatatatgcttttctatttccacagaattcaacacattgttctgatgattaagtagttattgtatttttacctgttgagtatctctgatgtctttctgattggccatgagatctccctgactgatttatgagatctctctcagtggccacgagatctctctgagtgactatgagatctctctgagtggctatgagatctctctgagtggctatgagatctttctgagtggctatgagatctctctgagtggctatgagatcactctgagtgtccac

SEQ ID NO: 340522 - DNA, 1000 bp, Homo Sapiens; identical to SEQ ID NO: 159537

SEQ ID NO: 340523 - DNA, 1000 bp, Homo Sapiens; identical to SEQ ID NO: 159539

SEQ ID NO: 340524 - DNA, 1000 bp, Homo Sapiens; identical to SEQ ID NO: 159540

SEQ ID NO: 340525 - DNA, 1000 bp, Homo Sapiens
ccttgcctgagtccacttttaaccagccttccattagagttgacattagtcttgctttttttaatccaccaagcaattagctgaaaagaaccaaatcctcaactgtaagaactgtcagtacattgtagggataaagcactttttgaaaaaaaaatctctggcatgtattagacagactgaacatgagatagggttggggtgggctgagccttttggtgtcattaactgaatacacaagaatgaacctctcatcagatatcaggaatccatgtcatgcaagtactacaataagataacagtaaattcaggaatgttactggggaaaaggaagatagcctcactgagaatttaatcatttaacattaaaaaaacttttacattggttcaagaaggtaaaactgtaagaatcagattaggctcaaactggcaagaagccatctaaatctttctttttagtggatctttttcttttttttccatagcgccgtctgcgctgtttataaaggtgacgaaaatttatgtataaacctaaaaatatcattataagataaatctgaagaaaaaaggaaaatctaactttgattttcactggatatggcaatgtgaaactgaatcgtccggtctcattgaatattggaatggactgaatcactgagacagcttccaccaaacatcccagtggatataagggaatccacagagtgtaacgaagccatgtgagcaccttccaatccatgtcaatgcacgtcagcatgtagaaagagtacctgaaaatttcaattgcactccacaaataaaacacaaagaaaaccacagctttgttctgcatttcttccatggtgccaaagatgataaacaaaataaaatttcttccaagaagctggatcagagaaggcagcaccggtgacgtagtgactccaattgctgcattgatagtttccacaactgccagcatctggcagaaatacatcatgtcagccacagtatggaatgtgtcata

SEQ ID NO: 340526 - DNA, 1000 bp, Homo Sapiens
ttttttttttttttttttttttttttttttttatcagttgtccacctttaatttccaatactgtactttcttaacaagcatacaaaatatcaaacttctctttagaaaaagtgccgttctttgacatcctttacacaaaaacagtctgagcctgtgactggttaatgcagttgagaggcaaagcatacgaacttttacaaattctaccttccataaaaagcctcccgaaaaggagattacacgccactataaaaatatcaacctcttgtggtagctgcattagagaaccaaggcttgaagactattttcatatagcatagaaaaaccactatgagagcatattaactgcattggtggcttgggagtgtactgcgccacaggattatgcatagctactgttaggtaccaagactgttatacagttttaaattgattgtaactgagagcataacagaggtactaccagcccatgcaaaataactagaaaatactgagtcactgtgctgaatacttcattcctggagaaaaccaaaggcagcagtaactaaatcaagccaaacaggtgaccaaactttctcctcaaagattgtgagcacagtgaagtctgaggtatacctttatccattaaatctgtgtgccattgcaagatattaccatttgagatatacgccatcacaatggtttaaatcttttgtatattagtcattcatatattcttatctacccagtctcttgatttttgaaaagatttcacctacagtagaatattacagaaacaaaatataaatgcatgtctttctaaatgaaacttacatagactaaaagtagagaatatttttaaacaaatatacaatgtgcaggcagacaaagcaggaaaacggccattcaaatgtataataaaaaactaaaaattgactatctccagaaaactatgaagcgcctcaactaaaaggaatgcataatgaaattctaatctaatacaggtcaaaaatgtaaaaag

SEQ ID NO: 340527 - DNA, 1000 bp, Homo Sapiens; identical to SEQ ID NO: 159541

SEQ ID NO: 340528 - DNA, 1000 bp, Homo Sapiens
ttttttttttttttttttttgagatggagtttcactctttcccccaggctggagtacagtagtacagtagtgtgatctcagctcactgcaacctctgctttccaatttcaagcgattcctgcctcagcctccagaatagctgggattataggcgcccaccaccatgcccagctaatttttctattttcagtggagacggggtttcacatgttggccaggctggtcttgaattcctgacctcgtgatctacctgcctcgacctcccaaagtgctgggattagaggcgtgagccacagcacccagccaaattatttttttttaatcactcaaaatcaagcatgttgtaggtaccaaaattctaactcaaggtggcctatgaactgggttcataacctacatctatctatatatatagtggctcctaggcaggtagctggccttttagatattcataagctgtcttggagacacatgccatttgagtacagtaactctgctgagactccagatgtaccttgaatactgttgagagctagtcagatgaatgagactggcctgccacctagcatctgcacatgaggtattcttctacactgatttttcatacaggtgtgctagattttaatgggtcacttaaattcagttagtctccaacatataaattctccacaacataggatatagtatacactctacttgacccaagatgataaaactgaaaaagacaaaaaaaaattttattgccataaattaatccagtaggtatatttgagaaagcacgcatcagttggttagggcaataagcgcctctaccacgttgcccatgtgttcccgcaaactgcgttctgctgctgctcgagatatctccatctcagtcattattagctccagatcttccttcttgatagtgacttttgccagttctttctcccgctcctgtttggctttctgctcccgggaccttctgtctccaatcacagacatggccgtctccagattg

SEQ ID NO: 340529 - DNA, 1000 bp, Homo Sapiens
tttttttttttttttttttttttttttttttatttagattaaaaatatttattacaggcagatttgcttttcccaggaaaacatatcactggaaacatttggagaatgcaaactgggttaaacctattcccaagtccattatcaagtaaggtatcactaaagaaaaagataggagtttaaaactggggaagcccacacacaatttagacaggggaaaagaaaaaaaaactcataaaaaaagtcagaatgatcctttacgttttacagtctttaattaagcacataaaactgtactatttaatatatttctccatgaactttttgtgaaattcagatcgcagtgtgtcatttacaaatcttttgtctttcttctggtcatctacaccttttgcacagttcttgaagacaacgtcatcatcccaccttcttttaactttgaagttggcctgaggctgggatgggccagtgagattaaggagagggtttccgctcagaatgttttccatacgaatcctctcttcttcagctttttgttcttggtccttcctggcctgctcttcagctctttcttttttaattttttccagttctgcaagaagagctgcagtatcatcatcatcactttcttcttcaaaatcttcatcttcctcatctgttagagggtcatctgcatcaaggttggcggcaggaatctggtctaaccgtggcttttttgacactgaagaggaggttgtatgttctcgggttggacgatccctatttttctctcttgcagcagctctctctctttcttccaactctctcctgaagtcacggttacgaacctcttcaggggcatcctgagtagtctgtctgtattttatctttgtatgagagggtaggtctctgcttgaatactgctttgaaagttggctcaaatcaccttctccttttccccttccacctctggcaggttcaaaggttggcctggctgctgttgtcatcttttatgactggccga

SEQ ID NO: 340530 - DNA, 1000 bp, Homo Sapiens
ttttttttttttttttttttttttttttttaccagaggaagcagcttttattgatgggttatctccagaaaccagaaagactatatgtactcactttcagttacccccgtgcctccagaatcgcatgttgctccacctgggggcggatataaattacctctagattgtccaaagcccagtctttcccttccctgtgcagccttagaaactaagtagcagtactgtttggtgtgtgtttgtttcttccccagcaatgcctactgcagctacttagtaacaactagaggtggagggtgtccggggaagcagttagatgagttaagtgtgatgcacaggaaaatagtatcgtagcctatcaaaggtccctctgccctgcctcagtggcttgattcttcattggttgcatttctctttgtggtggatgacgcccttctgaatcagatcagggatttccactgccagccatggacccagccccagagccatgagatgagctagtccaaatttgggcacattcctggcccacaaaggtttgaaatgatccgtcaggcatattttgccacccctgtacatctttgctgtctttccatccagctcaggaactgcaatttctggggcagtagtaggatatgtgataggaatgtcaaactcgatgtcaaactcatatttcaggaggtcatggatataccagcattttccaaaccaccgagttccttccttgttggactccagtcggaaccaatcgttgtcagcattcttgttgttctccacataccggataagggactgatattcctccttcagtcgctgcacccacaactcacgatctcggggtccggcgttagtcttcagcaccgggatctcagacacaacacgtcgcgtggcttcatccgccatcttggaccagggcgcaagagaaacgcggaagtggtgttgcctgtagcttacctcaaggcgccgtcatctttactatgggaagatgagacgttgggttgctgta

SEQ ID NO: 340531 - DNA, 1000 bp, Homo Sapiens
tttttttttttttttttttttttttttgatttttttttttttccttttgaaaaatatttattgagtataaataaatgtcctatacattaaatatcaagaaatattcataattgattacaagtcaagatgtaatactgagggaaccatagaatcaaaatacccactcatgatacagtagtgataattccattccaataatggacacagtaacgacttgttcacaagacacaacaaaacccatcaaaaaggccatcactttaaccaacctataataccacaatagaaaatgattctgaatcataatatgaacagccccaataatctcatctttgtcttatcaatttatcaggtcattttgagactgtagagttacactgtcatagacttttaagattccatttccttagttttatttcaaattattattaatgaatgaaaacaagtcatacgagctaaaaatacttttaaactgagttcgtttttcataagaaaaaaaggaatcaaattttagtacgaagaaagcatttcccaagcaatgagtctcttaatggaaaaaataaaagagcaatgtaattaaactttccttcaaagaaaggaaagaaacctaaatctgttatggcaaatttggaaagataaatatttcctagtcccataatatgtgtttgttttacaagatatgcttgaatgatgcaaatctatgaagcagggatctgtggcaatccaaattcatccaccagaactccatccttgttttttgtatcagtgggaacaccttctggaattgcaggtgcagatgctgcctcatccaaataagaactgtcttcatcagccagaagctcatcacctagtgcatccaactctgcttctaaatcatcttcatccagttctggggtgccataactgcgactcagtgcttcttggatttcatttgcatcttccatcatatcctctagctggtcttgtaaatcctcaatctggtcgatcttcacttgcttgtatg

SEQ ID NO: 340532 - DNA, 1000 bp, Homo Sapiens; identical to SEQ ID NO: 159545

SEQ ID NO: 340533 - DNA, 1000 bp, Homo Sapiens; identical to SEQ ID NO: 159546

SEQ ID NO: 340534 - DNA, 1000 bp, Homo Sapiens; identical to SEQ ID NO: 159547

SEQ ID NO: 340535 - DNA, 914 bp, Homo Sapiens; identical to SEQ ID NO: 159549

SEQ ID NO: 340536 - DNA, 875 bp, Homo Sapiens
atgggaatgcaatattgtatttattctattcattaacaatacttgaacatttacaatattcattgaacataatctaagagaaggtcaacttacattttttacttctctattaataagagagatggtcaaattaatttatggtcaaaattataatggcaaaaacttataaataaatacgtgcttggtgttactatggttacacacagttcagtttttggtgtaaagttctttggctgcaagaaagaacatttggtttacttcactaatagaaatatctcttaaggctggaatggcctcctcttggtatttcttctgctgttgattttttgcatagttatctgtgattgtatggatggagtcgagtggagaggtactcatcatgttaatcccaaacaagagcacgtagccaattactatagcaataaggaggtagacaggtaatgcaactgcccaatatttttgaggccaataggttaaacctaaagagtttagccaagattcaggaataaaggcccacacgaggtaaagtaccatctgtctcctccacaagaccacgacctccttaagggcagggaccaggctttatccactttgccatcgcgtctggtgctgtataaatatttgtagagactaaaacctcctaggctagtgctggcacacggaacactcagcaaacacgagatcccttcagatttttgaagccaaattgggagcttaagaaaagaacaaagccataaatcgctctttctggcaatggcgacggtgaattttccaccatttttcctggggctttagacaatctcagcgctgagttctccgcgcaagcgccgactggggagccgcagtggggaagaggaaaacctgagggaaaggcc

SEQ ID NO: 340537 - DNA, 1000 bp, Homo Sapiens; identical to SEQ ID NO: 159550

SEQ ID NO: 340538 - DNA, 1000 bp, Homo Sapiens
ttttttttttttttttatttttatttttttgagatggagtcttgcagttgtcgcccgagctggagtgcaatagcgcaatctcggctcacttcaacctccgcctcccaggttccagcacctctcctgcttcagcctcccaagtagctgagattacaggcgtccgccaccacgcccagctaatttttgtacttttagtagagacggggtttcaccctgttggccaggctggtctcgaactcctgacctcaggtgatccacctgcctcggcctcccaaagtgctgggattacagacgtgagccactgcacccagctgatagtgcacatatttctaaatggtaacagcaatgtttgcaaataacggtttccagtgctccaacatagggttaattcaccttgacccaggaattgggaatggagcccctcaacatggctttaaattagggaagcacaatgaggttataagaacttggggagtcttctctgcttccctaagaacaaaagtcacaatgaatgaaaggagattacttcctttaccaaaaatttaaacaataatcccaataatggccagttggcaaaattagggcaattcagtttctgcttacatcgttgaacaagacatgaaattgactaccttaaaagttacagcttccacagatgtgattaaaactcaaatgtattttcagaaaagaaaaatcagtaatctaataatacaacaatcatcacgcctcacaggtgtggctacagaaagccatcctgtttcttcccttttcagactgcatgacagaactcttacaatgcagctgtctgaacgtgcatgccatgcacgcctgtgcatttcttcccacgccagaaacaccaacgttagcagtgagaaacagcctcttgtagaggaatcgtcgttttgttatagatgttatagccacgtgtattctctctgatggacagctatagcagatcagcttatacttgtcctataattcattatatatcaaatggtga

SEQ ID NO: 340539 - DNA, 1000 bp, Homo Sapiens
ttttttttttttttttttttatactgacaaccaagctttattactttattagagctgaacaagcatattaaaagttagggcatggaagggaggaagcaggaccagctcacgggctggagatgaaccaagaagggttgtccatgaggtgaagctgggtcagagggagcaggcatggtcgaggctgtggttaccatctagaaggagaaggagtagtggggagggaaatcactgctcctgggtgccccaggaaatgtagtctggctgggtggccgcatggtactcatcaatgagctcctgaacaacctccctagacctgtccatctcatcaaagttgtccttgaacatgtcctccttacggaactgctcgaggaaggcatcccgcttccgcagcttgtcaaactgctggcaggaactttcaaagagcgaggagatgctggtgtggttggccatcatgagcccgctgacccggtgggccgagggcaggtagggagacttcctcgacagggccacctggatgctggcggggccccacgggatgaagttggccaacttccgttcccggatcctctgcaggctcttgtggacctgggtggggtccacctctccctggatgatgttgaggatggcgatgtagcagtggttggtctggcggtctcggcctgtggacaccatcacgttcttgggctgcagcagccgcctcatgacatccaggaccgtggtcttcctcacgctggccactgactggtctgtagtgagcggggtgtagccggtcatgagaaagtggagccgtggggtgggaatgagcgaggcgatgaggccgatgaggtcattgttcatgtagccggggtagcgcagggtggtggtgctggccgacatgatggtggacaccagctggttgatctgggagaaggacgggttctggatgtgcaggcggtctgtggcaatccggttcagggctgtgttgtccagcaccaccacacaatctgcgttctgcgtcagc

SEQ ID NO: 340540 - DNA, 654 bp, Homo Sapiens
ttttttttttttttttttttttttttttttgtttttcctcaaaactgctttattaggaatgtaccagggattgagttaggggagttggacagccccggctcctataggagtcctacttctctccagcatcctgtgccatcctcttgacgtaatcgctgtacattgtgtacacagcacctagcatgattgcacccactgcacaggcctgcgctgccactcgggtgtgaatcaggtgtatggacatcttggtggaaccacgagacctcagccggtaaatcctgtatgctgctaccaccaagcagcctcctaagcctataggcaccagtggagattcccgagtcttcctcaggagcttctcagacacacagtcttcgtcgtcaggtggtacccaccagcgtctgttagcagacataatcctggacctggatgtaagcagctgagactcctatgctgcagccccgtcctagagagaggcactccacaatcagaactctgattcctcagtctggagaggaaaggaaggttacctgctaagaccctctctcaccatgccccaacacagcctctacttgaaaagatgtccctcccaggtatcccatctcaggtggctgggccattagtgccatttctccgtctccatttcctaccatctgc

SEQ ID NO: 340541 - DNA, 1000 bp, Homo Sapiens
ttttttttttttttttttgatttcaactcaaaatgtttatttcctgccaagaatcaagttgcagataattctcttacagcttttttgaagaaaacaaaaacaaactgtagaactatgatgcactccaagtgccatatatctattttattcttcaggaaattatatttttcttttacaagagcacaacaggaaccaaagtaaaagagtaatagatacagcactcaggataaatcatatctttaaaataataataaaaaaatttacaccttgtcctatatcctgttagtattttcataatatggccatgattgaaaaaacaaaaagcaagcatctacaattttttttgataaagactttttatgccaggaatggattaattaccaacaaaatttatactaatcaggctgatgtcaatctatttttgtaatgtatcattaacaaatttattttggaaaagataaaaatattgccccttgataataaatctttttttcctttgatgcaaacagctagaacacctttttctttttctttttgatattctaagacaaaaaaatggttaatcttcagattaataaattaggtcattataataataaattaattttttttaaagttcagcaacctctgtccaagtatttacaacaatacttgaaagttcctttacaaaacagaacacattttcttttcacgttaagcatactgggtatctgtgtctttcacaacaagcatttttaaaagaaaactcaatgcacaaatgggttaattagtataaaagtgctaagggctgtttgaaaagttaccactatagtatacagtcagttatatttgaggcatactacaacaaacttccagcttattgtggacaatattccagtagttgtttcaaaccattgtttgaaaaaaaaaaaaaaaaaatccaggagctgattagtgatgcagataagaactgccatcaatgtctctggccagtgagcaaattgaaaaccaactgaaagca

SEQ ID NO: 340542 - DNA, 1000 bp, Homo Sapiens; identical to SEQ ID NO: 159552

SEQ ID NO: 340543 - DNA, 1000 bp, Homo Sapiens
tttttttttttttttttttttggaggcccaaacttactttattaagttgcaaacagttttgttcatttactccaatgtgtcttacaaaaatgaccattatctatgcatgacagtttgggaagcactgctgtctctgtctgtagaagacacagtgaaggcacagacattcccaaaccctcggagaacgtggtggaaatacagactgtgacccaccaccatgcacaagcacccagtgataagatgcagacaccaccgcataccgtggagaagaacatggtgaaggtgtagactgcagcttccagcacatatcgactccgaatggccaggaccacaggtggcagaaacatgaggttgctcaggcagagcaggagtgtggacagcagctggaatccataggtgagcgcatctgcactgtcggtgcagccccagcctctccacccggccttgcactcgcaggctgcgtacagataattgtgtgtgcgcagcagcttgcactggccgtagggcccgcagtcgtccacgcatggggacaggaaggtgcgcatccgcacctcggccgtcgcgttgcggcaccgcacgaaccgaggccccaccccgcacagggagcggagggccaggaaccaggtccccgtctgcgggaatgggattcgcagcctggcaaccctggtggtggcactgacagagaggaggaagccggccagggactctttggaacaggtcactgctgcatcccccaggctcaagggcacctcgtgagtcaagcatccaaacaccgtcacgttttcctggcgcacggagctcgcattgagctggagctccaggctgaggacgcctccactgtccagcactggcaacagcctcatggcgaacacggctgggcgctcagggggaagggccacacttgggccaaagaagatgtagaagtggacagagaaggtgtccagctcgttgcgcagagtcgggcgcactggccagcagtgctcgggtggggacgtggtcc

SEQ ID NO: 340544 - DNA, 1000 bp, Homo Sapiens; identical to SEQ ID NO: 159554

SEQ ID NO: 340545 - DNA, 1000 bp, Homo Sapiens
gttttttttttttttttttttttttttttttttttttgagtggcagagctttaatgggggcaggtgagaggagatcctggaggcgggagacgcccggcacccaagccacagcaggagaccataggggacgctccagttttagggtgtggagtgaggcattgtgaattgccaagaagacaagctaagctccttcaccagggcttgacgggcctgggagggcccatcagtgagcaggggccagccctcaggatcccaatgcaagaggtggcagtgaggtcaggtcagctcaggaagggaagtgtggcaagagccaccatgacagcctgtggggcttggcagccacataactggcaggtgagggatgcacataggtccaggggagaagcacgtaaggcgcctgggcctatagtgggctctaccacaggggcagagggtggctgggggagaagcttgggcagggactaggctgcaggcacatctggaggctcttggcagaggtaagaaggccagggaggagtggcccaggctcaaggaagctgaccagggagacggcctagctagagaggccaatgagagcacccactcaatctgagactgggaaacaggaagacttagggagctgacaagggttgagggcagggtcctggagcataggtcaagcagggaggcacagtcctagaaagaccccaggatctacgtatggctgggtcagccctttgaggccaggtctcagggaacagggagctgagagctgcagggagtgaggctgacaaagcagcacttgtacctatgcgcccacctctgcccagactctgcagtgccctggggattgggaggcttcagctggctccttggggcttgcagtggttttctgtccagtccccacgccgtgcccaggaagagtcttctcatggctccctggccatccgcctgccacctccaccttctgcacaggcagccgagtcacggtgcctacctcacagtactgctctgcacaacc

SEQ ID NO: 340546 - DNA, 1000 bp, Homo Sapiens
tttttttttttttttttttttttttttttttttttttttttttttcgtgacacaaacatgcattcgttttattcacaaaacagcctggtttcctaaaacaatacaaacagcatgttcatcagcaggaagctggccgtgggcaggggggcccaggccgcagggggccccctggggacccacccccaccagcaggggaccacgcaaagaagccctttcttctgttgccattagcaaggccagaaaaaaaggacttattttctctaagaaaagtagccaggattggaaatatcgagatggggctccccagatcgcaatggataaacgaacagaactttcatttttttttccaaaatcactgttggggtgggggatcccagtctcgggactgtgggtgcagctcagctggcctggtgctccctccccttctgtgagctccctgctggcagctctgcacgcgtggatggatacagagcggcttctacacggcgccatcaacattctctttatgaacgtgagtggattctccaggcaaactatgcactatttcatggtcggaaagaatcaaaggaagtttaaatgagggtggagttaaactgtgctaaattacagtagtgcttattagtaactagatttcaaaaggttacagaaaatttacattctctacacaaaaactgcatctcctgcacagacaacatcgacatcgacacaggaaggaaactgattgtccattctttgcccaggaagtctcggtactttatagattcgtctttacctcttttttgttgttgttcttccgaaaaagcagtttaaatttttttctttttctttttatgctagggacgtggagatgttaaaacgacaacaaaaaatatatatataaaaacaggaatgaaatctgtgagagaatatttttggttctaaagacgggtgcatccgtttgtcttcgcccgaatcccttgctggagaccacacgagcagtgacattgcacggagagggcag

SEQ ID NO: 340547 - DNA, 1000 bp, Homo Sapiens
ttttttttttttttttttttttttttttttaggaacaagaattcaatttattctctatttataaaacatttttttaaagtgccttgggtataaaaatctaaatgtctgcggtgtgatcagtcaggagcacgtaactatcactcttcgcatcctttggtcactgggagatcctttgggggctgggaggtccttctgtcccaggctaaaggaaaagcttcacaagggtaagagccacagaaccctcggcaagaaaggccggtcagggagaatgaatggtacagagaggaaaggaaggaaagggggtggaacagaggtagaaggcaaggaagggatgccgcactggagaccgatggggacactctaattgtgcaagagggaggatcttccttcttgaatgctgaacacagctagtctgaaccttccttggaaagtccagctgtttgcccatgcatagggccaactctccctgcaaagcagcaaatgtggcttctatcaggaaggaaaagtatccatcagtgtgacaagaggtcaccttcgaacttgcatgaactccttgcgcagccacaaagagtcctggtagaagtgaggatcgcctagtcttacggctgtccgtttatagaagtagcagtacaacactgctgctagtctctggaatacaaacagcatttgaagtccatctgtccatatgaagctgttggagtttttccagcgtaagttcatgacccagacatgaagggagatgctgagggcaaagtacacagctgtcaggatgatggtccctttgaacttatggaataggaggttgaccaggccagcctggaagacgaaggtgttgaagaacatgaggaaaatgatgatgatgttgaagaggactgcaatatcctggatgatgaagagcacaagctggatgacaggagtcttttggagcagttctgagaaggaattgacaaagaggtcataggacagcagcaggaactgcagagagagcaccaggctgtag

SEQ ID NO: 340548 - DNA, 1000 bp, Homo Sapiens
tagagggcaggccagctagtttattcaaattgaatctaaaccttagatctctggcttaacaataacaagagaaacctttatagacacaatatatcttgcattaaatcagagacggtttaaatcagtcttgtaacttctaatattctgggctggcaactacagcatgacaaatgtttagtgcagttacaaaatcacattttactttccttggctagcaaaccttaaacaaatctgaaaaatgcactgttttacaaaggcttttaccatatacccactgctgccagtctcaagtaattatggtttcttcatcccccaggaacatttctaaataagggggatttttctttgatctgctcgccttgaagtgtatgtaagaactcaagagagtaagttgaaagaatgaagattaactgagatgccaagaaaagtttttattgcaagcacagtgagcagaaagagatgtcttctcacacaaagtggccacaaggtctgccattaactaaatctctttgacaagccttcattggtttaaagcatatgaattagcttcttgctatcaggtgtacatcatttctgccatgtgggacattttcttgggaatatacaagtaatactccatgtagcctgacaggtcctcaatggtcacatcatccacgaagactcgagcttgctcagaacaggatcggggagagccagacagagttctggcgtgcagcgactgagagtagtcctcaagtgtggatcttcgttctggagccaagggagggacactctgcaggcctgaaaaggaatacacttccatatcatgccatctcttacactggcattccttgcctatgcatgtgcatggcttgccctggtttagcttggaaactgattgaaagtcagagagatcactggctttgagacttgcttgggggacttgggtagcgtcagaggagtcttccttcttactctctgatgggagccttggaacagaagttctcaaaggctcaacgac

SEQ ID NO: 340549 - DNA, 1000 bp, Homo Sapiens
tttttttttttttttttggtttttatgtgtatttattaaaaaaagcaattacccgattaggctgacagaatgattaggctgaccattaaaaggactggcaactttatcctcagagtttagaggtaagtttgtaagaattcaggatgtttgtctaagattgcttgatactagggcaacaagactgagagcagagggcactaaaaagactgtctaggggttagacatcaattgtgtttaagtctgagatctgccccttaggtaccatatgaccctgcacaagtcatcgacccctccacactccagtgtgtcatctgtaatgaggatggggcactcccttccacactgcagcactgcgggaaccgagacaatgccatcgcagaggacctgcaggggacaggctacttcactcactcctctccttcccactcttcagagaacaaggacttgtgctactgtattctcacagcactcactggcctgggaaccagctgtgggagccctatgggcctggtcatcaactctcaactgcttgtgtgcagctgtaggaaccctctgaggtgtggcaggtagaggatggggtgggtgcccaggcacactgctgactttctggagccctgcccacccccaaccctctccttattactaatgacacgggaacccacctgctccactgtgcagccccaagtctgatccaagtcaggctcctgaatgtgaggaagccgagcatgggggcgacagggaggtgggatgcactgaaaagctctaaccattgccgctaaggcacatcagtctctgaccaggtccagcagcctccacgtacgtcccagtccttcaacacacatttactgaatgcccactgcacacaggagtgtaggtaatagcatggtatgacagtaaaattaagtaaacaactcccacttctacctttctggactacgaagagctcctcctggtcttccttatcatttcctatgtgattacttccgggtcctcttggaga

SEQ ID NO: 340550 - DNA, 1000 bp, Homo Sapiens
tttttttttttttttttttttttttttttgtaattttatgtaggtaagctttttattattgttttctttacaggaacaataatccaaacaaatcttgaaccaatctataaacagaaaacctgttatataaattattatctatttttgcaatacatcaaaatactgtattgatgaaaataaatagataacaaaaaacaatatacatcatttctatgtttgctatcagaccccacaagtatgtttgtttttacaattcattataggtgaaaaacaaactgaaacacaacaggtacgtacaattacgccactgttaaggactgcagattacacgtgttaaagcttttcttaataaaatgggaacacattgctaggtacacagaaacatgattttgccctaaagaacagctgaactgttgagagaagcgagggcttcctagcggccttccagtgtagcagataatattaccctgtgtaacagagtattacagagttttgcattttccaagtctgtaagtctaaccataaacaaaacaaagacaaacccaaacattaagatatactgacaatcttgttcccatatatgatagaatagttctcatacactgttaagattgatttacttttttattaggagcacttctcaggtttttggcatttcacatgtctacactcagtgtccattggctccttctgagagtatccttgaaggttcggtaaattttgcagtgaacaagtaaaaaagggctggtgtaggtaccaaagccaaaaggggcaaatcttgctcaagtttatccactctggaaatggagattattccataggcatgaagtaaccagtggctgaagagaacaataagtcttttctttctgaccagaagatcatagcagttctctatttcagaagcagacatgtacacagccagagtaaccaaagataacactaatataatgtatgggaaggcgtaatataaaaggcctccaccaactgcctgaagcacggt

SEQ ID NO: 340551 - DNA, 1000 bp, Homo Sapiens
ttttttttttttttttttttttttttttttttgagaatcttagcaaatattttattaatacacactgtcatagtcctaggatagaagagtcctcagaacactgctccacattgaagatgctgaaatgggtggtcaggtccttagtcttccttctagtctgttaatcccacactcctttaacagaaccatgcttgctgcccttaccctgtccacatccctgaaaggaaacgggtctctctcagccagatgcagatagttgacactcactgcctttgctatggcagggggctccttatgattaacccagaacaggaaaaacttagtgtcagctgaccgaaaggaactcagccttaatttttcaaaaagtcactctcattccagctatctccaggaaggcgctggagtatcttcagcatgagcacagagattcccactgccgaaatattcggaatactttccttgatttctcagagagactcatggagtccgtttcagctggctggctagactgtttgtgcgccaagaggatggtcagcactgctttccagcctggctctgctggggcgctggcatctggttcagttccaccattctccctgctttctttgccaagtgtgatattcacccaagggcaccagtctctatgctgagaggtgggatcaaagaagcttcgggaagatgtgtccgaactgctggaggagcagaggcgagctcgcttggctttccgcagagggctagatggtacctccaggccaggggtgtctcctgttcccatgcttcgggtcactgggcgagttctggtggtggggctagcagcctctggctcaggacggtcaacaggactggaagagtcccagctccgagttcgagagacaatgggaccagggctcttttcagcctgctctgagcctggggagaaagtggcatcctggctccgggtcatcatcctccgaggagattcaggcaccagaggtaagcgctctggtcgcccctcaaggcc

SEQ ID NO: 340552 - DNA, 1000 bp, Homo Sapiens
ttttttttttttttttttgctcagttctactattatttatttttttaaatatttttgaaaaaatataatttttttacaatattttcaacttaaacactattcacactgaacacgtatggcagcttaacctacccaaatatgaagtttaagaagccaaaactgttctagctttgttaaaagttgtgctgcagactctcgtgatggttaacaaagcaaggaaaagcaccactcaaatcatgttacagtatctttgttcagctggattatgggttggtattggtcatatgttagactccatacaggcatagctatgatgcagtgaatcccttagaagttacaattctcaaattacatacttcctcagatgtaacattagaactcaatatttctaacaataacataccagaaaaggctggactggcactcatctgctgactaacttgtagcctcagtaatatgacatacttgcctttaacaaattatctcaaattaactaacagaccttcagaaaatggagattctttttgatggggacataatcaaatttaagtctgagaaatatgcttaacagttggaactcaaattaaatgtactgattttaaagtttagacattaacaagtgatagattagcctcaaaaaaagacaatttggtaaggtttaggtcttttaatttggtgcttgttcacaacttgactggtgcttctttccttgctgtcttcacatcaagccatggggccaattctattttcagtaaatgtttgacagctttttacttagtaacagtctcagcacttttattaagcatgcaagactaacaaaaactttggcaatgcataagtgtaacacagtgacaagagagcttttacaattaagtcttctaatactgccttcacagtgtggaaattgtgctacatccaccaaaagagggccccgtctactcaaatatttccgtacttcaccccaggaacaaactcctttgcatttggattcagattgctc

SEQ ID NO: 340553 - DNA, 1000 bp, Homo Sapiens
ttttttttttttttttttcaccttttgattctttaatatcaacagatcaaaaagcatttggtgatttctctgtattttatatctctctgctaagtttattaatgtatacgtttttcaaataaacattttgaacagcccaaatcaatcaaagccatgagatcacaaagtgttgcttctcgacacaacattagcttgttcagaaaatccaaaagccacatccaaagatcaatgatgctaccttaaagacatgagggaggctccttaagaccctagagacaccaaggaccccacagggccagtcatatgaacaggctcagaagccggcttgatcctcagcacctctgcaaagccatcaccaaaccagcaagtgacatgcgctatgtctacagtaaagtagaaaaggcggtcctggcaaagcttccggcggtacacagaccgaggatccgctgacagcacagcctcaatggcacgctttgcttcctctgctgactgaaaatatttaaatgacgcctgatcaacatcttgtgaactgagctgcccaaggtccatctcggcatgaggagtaaaccgcacttctaaagtggccacaggagcctctgtcacccaggcaggaaccacgctgcggggagctccatcagcccttccagcagggcagtgaggggccatgggctgtgtctctgccctgcttccttgcaagactgctgctccttccactctttctagcttcttgtctgtacctttctctgaaaagctcttctctgggcaatatgggccaatttgttcttctgccacgctggaactctgatcacgtcttgattccaaaccaaaatccactgctatctccctgtgcataggaaatgcttgctgaattctggctgtgtcactgtgtgtcaggtagttttcttctgaagttctgtcttcaggacatttaggtttcctcttagtgctatggtggggttgtggctcatcacaccctgagagctgtcgctggtcacagctg

SEQ ID NO: 340554 - DNA, 1000 bp, Homo Sapiens
atttttttttttttttttttttttcattttgaaatttaataattctaatagtaataagaaacatagtttatgctttttttttaatgaaaacaaacaagtaattttgtaaaagtcagaaaacaccagtatccttctgatctcatcctggatttttctgtcagctggaggatgcatttctgaccccatcccagacacgtgaaagcagaagacatgatgcatctataataatgaaagcacaatctaaagagtattatcacaccgtgaacagcttcttcctgacccagagcaaatattaagagaaagacaatatatttacaaacaagatttaataatgctcacaagaatagagtttgcccccaaatggaaaattacacattattttgtttcaaaaagttataaatttagtgcttgaaaaatccagcaggtaagtagaaggactaacagggtctgtttctggaactgtccgccagcaaatgagcatgctctgtcctggaagccatttcttttctttgtgtggtagtttttttttttgagacagagttttttgctcgttgcccaggctggagtacaaaggtgcaatctcggctcaccacaacctccgcctcttgggttcaagcaattctcctgcctcagcctcctgagcagctgggattacaggcatgtgccaccacgcctggctaacttttctgtattttcagtagagactgggtttctccatgttggtcaggctggtctcaaactcccgacctcaggtgatccgcccacctcggcctcccaaagtgctgggattacaggcaggagccaccacgcccggccaggaagccatttttcatgggagggatatagggagaggaaggcgatatttacatcccactctgcacaactcagtaccgcctattcattttcttgaacttctcataatgatagtcatcagttgccttctcgttagcaggacgcttgcggttaggaggggaccgctcaggctctggcttctccgtgt

SEQ ID NO: 340555 - DNA, 1000 bp, Homo Sapiens
tttttttttttttttttttagaggtgggtctcactatgttgcctagagaggtcttgaattcccagccacaagcaatcctcctacctcagcctcccgagtagctggagccatcgcttttatattaaacttatctaaaaaatatgaaaaactgggctgagcacggtggattggtaactaaagatctaggaacatggcagaatgttatttggggctggggtgaagaaaagggagaagtcagcagttagcactactcaacttacaagttggaaactgtgaaccaatttcttactgctgcctcagaaaggaaatgcatctaagccccttccttagtttatgttccagatcaaagaatgtgggaaaggagaagagagaattatattactactgtcccctgcagagaaatgctcaaagctcctaggggaacgggcagtttctttcagtgcccctcactctatgccatttcttagttatactgtggttaaagttccttggccttgctaatgttctggtcagacatcacaggtagttgcgaggaaggtatagtattgctctgttccttccagtggctcctctctttggaagagctttttcttccctcgatagcattttacatccaatcggtaacattcaaaagtcacaccaatatttcttcagcattgtgttttactttttgggagagaggctaggaggaggaaggggtgaaaacagcgtctcactggagtctcaaaagtgtatgaatcttctggtagtgcaaggatgggataagatggccagggaagtcagatggaaaatccccaagattctttttgctactgatttctataattaaaatatgacatatgtaagggactagtgcatgatattcaataaatgtcagttgtctttcctaactaggttcctcacaggctaggttatgcctagatatcatcatcctcctttcagggaatgaagctcacctagaaaactagggaactaaaagtgcaatatggtttgggtaatg

SEQ ID NO: 340556 - DNA, 1000 bp, Homo Sapiens; identical to SEQ ID NO: 159563

SEQ ID NO: 340557 - DNA, 1000 bp, Homo Sapiens
acttaaatgtggttgctttattttgcacttttaattcacaaaaagctttacaatatctacattccacctgttgataaccaaggctttatatggcaagacaatgaaaattttatcacatcaactgggcatatgcaaaaacaacggataatttacaaacaagtctttttaatcaagaacattatgtaaaatacacactctggtaaacatctgaattcatccatcctaaaattagactttaagaggcaaaaaaaaaaaaaaaaatcaaatagattttaacactaacaagcctaccagaataatgctgatggcaagccataaacagctttaaatgctgactgtaatttggggaaggggagaaaaagaaattatttgttgtacctatatttaaatacatctgttagtgagacttctctaatttaatggatttcaacaaagtggacaactcctgagcctttggtagtttctcaagttttgtttttaaacttgtgacatcttgactaaaggaactgaaccctcggaccagaatacttatggtaaggaaaaaccccagggaagcggggagaaggagaaacaagactagaactttcttagtctatctaaggtgggtaacaaataaaatcactgctcatatgagggaagaataccagagttgttatgtgggatttagcttggcttatgttttataaaagctaaataagtataaacatctaaatggcaaaaataaaaatccaaggtggtctcatttaggaaattaaaaaaaaattgtcctcaattagcttttaaatttgcggaatggcacaatacatattttgaggcacccattatagaatctgttaaaattatgcatactgctacttcctcttttaatataatttttatgtactctagggtaggtattatcagtagaggccactaaaaataatgccagaattcaagtgagagagaatagaaatggaaagaggaagggaggataatgaaattgggtagtaagtaataacaa

SEQ ID NO: 340558 - DNA, 1000 bp, Homo Sapiens
ttttttttttttttttttttttttttttttttttgcaacgcaagggctctttattgtcagcgagagcagcaggccaaacgggcactgaggctccacggggcccaggccctcttccgtggaagagaggcaagaggggtttcaggattcagaggggtcctccgctcacgcagcaccatgcaaatatagagctaaaaactttctgaatgtctctggcttgaaaccaactggcccaacaggttccacaaccactctctttttgatcactgggagacaccaaaaatgctgatagaggagctggtctgagtccacccaggccaaattcttgacaccctcgttacagtccaggtctgtggtattcagttgaaacactaggaaatggaagacacgtccatccgtgcccacgctctgcaccaccacgggctgctccaagaccttggcatcattcccatagaggagccgggcctgagccagggcactgccaaaagcaaacaggatcatcttggcccgcagctgatctggttgaaggcggtgtggtcgtaaattggctttgtccagtaagtacagggtatggggataggggtaaggatagccttcctggaatcctgtgtcatttttcacatcataaatattgcattcatgaagatcgatgatgggtgatatggggtagaaggtctctagaacatgattcttagtagcttcaatctcctctctggaggcgatggtgggcagaggatccttagtgctcagtcgggctccaccagaaccacggacttgaaggagaagagactctcggttccaggtagcagaaaacgtggagttttggacacagatcctcctggccagagaaggatgcttgagaatctgagatttacacagctgtattaggttgtccacgatgaccgggcagtaggtctctctcttggggatttcctcagtggtctgccagagacgggcgtgagagatcacattcagaacgcactcgtcttggttctctatgtgg

SEQ ID NO: 340559 - DNA, 847 bp, Homo Sapiens
tttttttttttttttttttgattataaagcaagtttattctgaagagggattgtcttatgtttacgcacagggaagaaataagaggaaaccctcttttcaacctcttttccccctcacagaaccgagtccccaagttctcagcaacatcatgcagtgcttcagcgcctttactggggaccaaagatgttaggatcgtgaagggtcagactggtcaccagctgttcaaagtcacccaggctccagggtgcaggtgacagattttcggggccaagagatgacctgttgtcaggggggggctgattgaaggtaagcaagagatcagtctggtactggggcagcctcagcaaggcctgatgaagtgtcacgtcctttgctacctgctggttttccttagctatctgctgcttgccagagaggacccaggcttcttgacagcggcccctcagggccaggttctccaaactgagaggctgaacagactccacatggacagccctagccccctgcacgccaccaacatcctcaaagtggtaccgcgcagccgcttcgccccgtacgtgggcctgcagctcgagaagttccactatcaggctctggtccgtcacgggatggcagaaaacttcttgattgtccgggaccggtcggaggtcgcttacgtcaatggcccccatggggaggatggcggaaaaggcgcccccgaacagcgggcagtctctcgtgggctccatgggtctgaggctgggttatgggcattagaaaggtttaaaagaagtccacattgggtcacgtggcatcggctccctgggtttcgcagctgccaccgccacccgggtctggcttagctcc

SEQ ID NO: 340560 - DNA, 716 bp, Homo Sapiens; identical to SEQ ID NO: 159564

SEQ ID NO: 340561 - DNA, 1000 bp, Homo Sapiens
tttttttttttttttttttttttttcaattaaataattttattgggggaaaaaaaccactttgagcaccaaagcaagaaaagtgtattattcaatcagtttcccagatcacatgccaagaacacaatgctcactgtggtgcctggcagacggtccacaaccagcgggtgcgttcagcttgaatggaccggggtcccacagtgtttgtgccacaagtcaatggccttgctcacgatcgcgtctgagctgtcctggggaatattttccagaaactttgttatcttctctgcactgttcagtgccataacttttattttaaaggttaataaaatttcgacagctacaaaaactaggatcttacaggatccactcacaactttatcccaaaccctctgtaaactggattcaggcaaacatcccgcaaagcacctcttgaaccagagatcataaggaagtttgggcgccgcggaacacatcctcagatgagtcagcagtctgccatcttccagattcaagtattgttcaaacgcttttggcaactggggcaaggaatcccggtacttggtatttaattggttcacaaagcgtcgggtgatccagtaacagtcgacactatcttccaccatttcctccatggctttagctatggcaagaaacacttcatcatctggctccagtggaaaagagggacttcgaggtaacttcccagactccagctgatacatgcggagatagacttcagcctgaggtgtggcatcactaacaaagcgaacgactttcagggcatgaaggacatccaagtactgctccttacgatacatcatcaccttggcatgggactcgtggtgtggaggcaagattcctagaagcaccttccataccaatgcacggtacatggacgggagagggaacctctgactaaaagtacaaagtttctcagtatccagacggtcatcttttaggagaatttctaatgatttcttttcttcaactccacgaaa

SEQ ID NO: 340562 - DNA, 1000 bp, Homo Sapiens; identical to SEQ ID NO: 159566

SEQ ID NO: 340563 - DNA, 1000 bp, Homo Sapiens
ttttttttttttttttttttttttttttttttttttttttttttttttttttttttttttttttttgaatttcctttcctttatttcaaaaaaagtaaagaattatcccaggttcttgggcatctcaacgattttttccaaacaaatgcctcaaagagagagaaacagcgagagcgagcaagcgagacagacagagagagagagagagagagagagagagagaaagagagagagagagcacacatcagcaaaaaaggaaagagactgggtaaagtctacctacttgcccaagaatgccacgttctacaacctgctttatgtgcagggagaagggcgtatcttttgtcaaagtggagtaaactttaaggatgagtaatttatttggaaaaaaagtatgttcaagatgctcaatggggaaaaagtgttcacttaaaagcaaaatgtgagatggtggagaggaaagaaacatttattcaaatcagccaggccactctgtttcccttatagcaaaagccaaagagcagctcaaattttgtgaacactattctctttaaaggaaaaaaacccaaaacacctaaattaaaattcaaaagaaagaaaccacacacaaccccccaccccaaaactttaaaaatcaaagagcctctcctgagccatctcaatactgaaactgttctttctctcttccgaccagtaagtgcaggcaatgaactaataaaacatttacttttcaatgtaatgatcctctccatattctctacttgtatctactaaggtagagttgaagtaaatgttctggctatagcccatccagggggaactggtgccaacatcattatttcctaagtcgcctgctagtagcaagtgagcaaggaatacaacggacagctttgcagtagccaaatgcagatgattacctcgctctggcaaatgatttcattaaagattcagagaactggatggaaggatggataggaaaggaatctttcaggacactgaa

SEQ ID NO: 340564 - DNA, 1000 bp, Homo Sapiens
tttttttttttttggcccattatacagctttaatttcaatatattttcttcaagttcagtttacatacagacactatgaacacgattctttgaaataccattatacaggaatgttgtattatttaggtttcttctctgttacagctcacctcacactggggtgaaagagatttgaactgagatttgcagccatcaaattactgttagttagattgatgggtggcattgtcacagaacctccgcaatgtggattttctttcaagccattacagttagtgctgggattgatagggtttggtggttcaatggttacaagttttgtatctggagacataggatgaacattttcatttgcatcctgttgaccaagtccaccttcatactctttcttttttggttctgagatatctcctcttcctcctttgactttaataactctgactttgatctccttgggctttttctctttttctatttcctctcccaaaactgaactacttagcagtgtattggtataaactgtttttctttcatctttcctgagttcattttctttagaactctcttttggctttattaatgaattgacttttgcttcctgcagtaatttagctttcagttctggcatgaatttttcaataaatccatctctagtaaaatactcatgatgcaaaagatcactagatgatatcctgtcagcaggatcaatttgtaaacaagcatgaactatatctgccaacaatccattaagctttggatatttttttcttgcatttttggggtgttgaacttgaggaagaactaccccagcaaaaatggggctcttggaaaagatattctgcaagtgaggtgacaaattgcccactttcaaaacaattttatggagtaaatccaaatcagaactactaggaagatagggatttccagtggccatctcaatgatcatacagcccaaagcccagatatccacaggttttccataagaagtatcttttaatac

SEQ ID NO: 340565 - DNA, 1000 bp, Homo Sapiens; identical to SEQ ID NO: 159567

SEQ ID NO: 340566 - DNA, 1000 bp, Homo Sapiens; identical to SEQ ID NO: 246517

SEQ ID NO: 340567 - DNA, 1000 bp, Homo Sapiens; identical to SEQ ID NO: 159568

SEQ ID NO: 340568 - DNA, 1000 bp, Homo Sapiens
gcacaaaaggagagcattttattttcatggatgtggatgaagtacaatttcttcagtaaactcaggaaaaactgttaaggggcaacaatgaactctgcatttaaagaaaaatagaaaatgaaaacacaaaatcctaaaaagtaaataaagattctgtgtcagcacactggtatcaaaacacacatcaacagcacgtcttaatcatacgggaaacaatccttgcttatcagaggtgcatatctaaattctatagcttaccaatatcttcttgggagtaggcaaaaaagaaacagaaaacctcacattaaaaaaaaaaaaaaagtttcttttccctaaatgttttcctgaagctgaatcttaaggcgagaggacgtcagtcatcctcgtcattctcactgaggtcgtcatcgttgttgtcctcctcctcttcctcctcgactgctggggtctccaccctggagccactgtactgagatccaccggagcttgtggccagcatcccaatcgcaatgttggtcaggtcactggcagaaagccacgtgccattagacctggaacctgccgtcgtgaacacacctccaaaagttccctgagccatttctgtcacgtacggctccagagcctttgggaccaaatttctggccattttaaggtcttcggcagagcagctcccggactctagcccaaaagtcatgcccatccacatcagcacttctgtgtcatcgtggatttcaaaggagctgttaaacttaaacagatattctgatttgtcgtcggagatgctgcagttgatgacggtcttcttgctactgctgatgatgatgaagggcacgtggatgactgagttgggcagcggccgctggctgacctgctcctccacatactggtttctcagcaccaggttcttgaaagcaatttgctgtagaataagttgttgaagttcagactgtttctgctttattctttcaagtctcttctgtctttccacccgtaagttctg

SEQ ID NO: 340569 - DNA, 1000 bp, Homo Sapiens; identical to SEQ ID NO: 159569

SEQ ID NO: 340570 - DNA, 1000 bp, Homo Sapiens
ttttttaagaaaacattcaggatgtttattgtagctgagtgaagagtagcaaaagcctggaaacaaagttaattctctttgacaaaagggtaaaaaatgtataaacccacattataattcaaccattagaaatataagaaattttgtttaggaccttattaagaatttaaaacgcaagatacagaaaaacaggcataatttgatcacatttggcataaaataagcgacgaataaaaatcctggatatgatcacatgaagtcacattggtttatactatcacgtaaaaattttgaagtgtacattttagtttgttaacaggggttactctgaggctagaccagtgtcgatgatggagggagaagggagaagagattttggcatttaattgcactttaaaatcttacacctggagattaatattagaaactaataggccaaaaatagtgatcattgattatttcactgtgaattttgtcaaactctaatactgacaaatccatttgaaaacactgctgcaggtttcagagaaaattttgctttccttaatggcagcacagctgttttctttagctggtccctttatgaagaatatctttgaatctattggagaaccatccacccaagtccatgtcattttcaaggaggtaaagttaagcccaatccatacgtagtttaattgtcttaggtttttctgtataaaagccatttcaagttggtcatgtatgattagtagatgagattttctttccaaacaatacacataactgtcactccagcttttcatctcattagagaaccaataacacttcccttggtatttgagccattctgattggcatagtactgtctggtctgcagatctcgaagcacaaaggtccttattacttatatttcttcttgtgccattattcacttttagatctccagtgtcctcatactgagtggcatttgaacaacttcctttttggcattttagcaatactccctgagaaaccaaca

SEQ ID NO: 340571 - DNA, 1000 bp, Homo Sapiens; identical to SEQ ID NO: 159571

SEQ ID NO: 340572 - DNA, 1000 bp, Homo Sapiens
ttttttttttttttttagttcttcatgaggttatgtttactacaaatttttattgttaatgtttctcatcctgaaattatgggatacagcctagcagtttgtcctcacttggcagagtaggtaaccctggctctcacactgagcccccaagagtccttttggttttactggtgtcagggattacagtcagcaaaccccactcatttacagggtcaggtgtacagggctgagctggagggttagggtcagggcccctcaggaaactctggtctggcacagcagcagcagggatgccactctccctttgtggaatccttcttaatacaagagtgagaagcagaagagcaaaccacaaaggaattccagctcagaccccaaagtacctgggagagctgcaaacagccatggagataagagaggcggggagggaacacagtgactgagtctgagagacagcaaagcacctctccagcgaaagccactccgagatgcagcctaacttcctagtttgcatcagcaagatgagcaggcaccaccatggaaagagcacctggggtgtagctggttaccacagctcagccacattccccagaaacggaggtcagccctccatggcccaggaaaacatgggggatgaagggttggcacctgcagtgaccagatggagatacaatgcaggcagctgctaccatgcttggtgaccagggtacaagcccctgatgagcttgccatggcagccaaggacactggtgccggaggaacgacaggggcctgcaaagggacatccgaggagggggaagcaagctgggagcaagaccagcccagctaggtttcagggcaacagcaaagccccagagacatggaggcagatgagtcaaccttgctgggtgagaagtgagcttgcactgcatagggcaagaagaaggtggaccccactcctccaggaggctgacagtctcagccaggtacaatggagggtccaggtcacaaggaagggggc

SEQ ID NO: 340573 - DNA, 1000 bp, Homo Sapiens; identical to SEQ ID NO: 159572

SEQ ID NO: 340574 - DNA, 1000 bp, Homo Sapiens
ttttttttttttttttttttaaaagccacgctaataattacccctgcacaatgtaacagtcacaaaacagccagccatggcctgctggaagccaggggacaattcttcatacacaggcttgcgggggagagtatgcaacacagagcaactggagtaaccctcagtcccaggacacaggatggcaggacaagcactgagcaggctcccagaggtgtcttctcctgggaaaagggctgccgagtgaccatggcggaggcaagtgctggatgtggggacaggccatgtccccaaagcccctagagggtgttctctgaagaaccccagggccagatcctccaaaatgtcttgagctggttctcccttctgcctgcccccactctgaggtcccggggggtccagggggggcccgtcgtcaatggctcctgacaagggtggcacagacgcacctcacctgccaaggaccaccctggaaaagtctgtggccacagctccttgaccacttgtcaccccttcctcagatggcagggtggaggcatgggactcaagctaccaacggaagcgaacctggatccttcccagttctctctgtcaggatctggaacttccatgcagtcagactccatgccgtgagtagggaggaaggttgtgctggccgaaggaccctcatcaacctgctcataaccatggcgtaagagcctggctagaggggcccctccattctgcccactgagtcagactgcttttgctgaaagcagaaatcccagaccctctgctcactcctcacggggacaagctatgagatgccaagactcctggaatccagcactgcttgcaccagtctatgtagcctgtacaaatgtgagcatctcccctcccagacagcctgaggcccaggacggcacgacaagaatgcaggcctgtgccaaatggggcatgtgcctggcaggactacttgggcaagactagaagagggggtaggaatccagaaatgagacgcaga

SEQ ID NO: 340575 - DNA, 1000 bp, Homo Sapiens
ttttttttttttggatttgaagaaacctttatagatatagattccattttacaagaagggaaaattgaggcctggagcagaaggaagcagtggggtagagtcagaaccagcatccttaagccgggcagacttggccttagacagacatgccttacttaggtccagcagatgctaccaggaaggtatggctggcagtacctgcgtctgagctcaggacttcagaccaagatggaagtcccttagaccaataacataaaaatcactttttaactcaggtgctgtgggtagggagcaagggcagctatactgtcctttcagaagctctcctgggctgtggaaagtgcccacgagcctggcagatcacggaggaaggaggcagaagttccaggcccagaacctgggtcccaggctgcattcagagaggattccttgaggccctggcagccaggaaccctgttttatgtgccccgaaggctgtaatgaaaacattgatgaccacagtgaagaagaccaagatggtggctgcgttgttgagctggttgagtcgccactgcttttctacctcattcaggttcagccgtgcaatgaccacgagcaggacaccgatgaccacctgcaggagcagagagaggctgatgagggtgaccagggtggtgtagtagtgagaggatggtccctgctccagcaccgccttcagccgcatggcgttggacatgaacagggccacgtccagcatgctctccgccacgctcttcttggtggcgtaatggttcaggttgatgggctggctcctggggtcggagcttccaggttgaaggtcgatgttttctcttgctgattccatctcgctgccctcaagtcccttcacacgcaccgggtgccgggaacagactgcgtgggctcctccaggctccgccgtctgagtctctgctgctttcttcgggtgggagagagcacacagctggcgggacagacctgccattcatccctctgatgtggg

SEQ ID NO: 340576 - DNA, 1000 bp, Homo Sapiens
aaacggtcaacacaagtttatttattctcacataacaatactgagtggatatttaggtcagtaaggcacagttctcctccacttaggaatctcccatcttcaggccttgccttctccagagcctggtcaccatctgcttccagttggcagaaggagtaacagcacaggggagcacctgttggaggtctgtatgggccaggcctggaaactgcacacctcttctggtcactttccgctggggagagcataggcacagagccacacttaaattttactttgaggaatgcagtgtaggtgtatgtccgacaaagaaaacaataattcggtagacaaataagtctccactccaatattcaattacttacttaacttatgctctggtatgtctcaaattaacctagatagaaatgaactctgaatcttccacttccatcaagtttttcactcactcaatggcatcattatccatccagttgcttaaccatacatttgaaagttatccttggtctgtttcttatccttcccttccacatctaatccttcaggaagtcctgacaatgttacctccaaaatatgtcttaaatccatcttctcagccaggcacggtggctcacgcctgtaatcccagtactttgggaggccaagggaggtgaatcacttgaactcaggggttggagagcagccggggcaatgtggagagacccaatctctcagcatcctgtttatgttcttcttagcatcagactcgggctttttcctgtttattacctacttcgttttcctgaaagatccatgtgccggtaccatgtgttgttcctactgtttctccaatgtctagtagatttggcacatactgatgtgcaattaatacgtgaatgaagaaccattgacagacgattagtcaaaagctcttgcaaagccctttgataggttatcggtggagagtagggagcacaaacctggggtcccattctagcttgaccacttctcggctgtgcac

SEQ ID NO: 340577 - DNA, 1000 bp, Homo Sapiens
ttttttttttttttttttgaaaccaaaaaagataatgtattagaagacaagagataacactgcatatagaaaaggtaagtatttcttggtaacatttgtttttctatgaacagctttgtatacagtaacccaattttgaggtcttgagttctgtgcaccagatgcttggaatcatagaagaactgtaggcattgattgattgctgctccaatatattattctaactcaccttcactcactgaacaccattaacctcttctcaccatcattaatttctgaccatcagccctcattcaacaacattctaattaacaagttcaaattatttaaagctgtttttatctgtcatttgcgtccattatgtactaatgtattacatttattgtcactatagtatctgttccttaaagcatagaaggaaagcataattcatgtattatatttttcaaaatcactgcatgcacaaacatatctggtaattaactgttaactggcttttgagtgttttacattattcagaaatccctgatagaggtcatttaggtggcttaaattaagttgaattcaaattaaatttggttaggattttttaatggactgaaaacatactgtttttcctatttaaaataatggggccaaataaaaataatacaaaccaaaaataaaataatggggccagatgtggtggctcacatttgtaatcccagcacttctggaggctgaggcaggtagatgcttgagcctagaagtttaagaccagatgaggaaacatagtgagaccccatctctaaaaaaatttttttttaaatgagctaggcatggtgatgaacagctatggtgacagctacttggcaggctgaggttggaggatagcttgagcctaggaggtcaaggctgcagtgagctgtgattgtgccactgtactccagcctgaacaaggagagcaagaccctgtctcaaaaaaaaagaaaaaaaagacaaaaagaccaaaaaatggaat

SEQ ID NO: 340578 - DNA, 1000 bp, Homo Sapiens
tttttgccagtgcagaaacgtttaatagaaataaaaaggtctgcatagagccgaggctcggagccacccctctgccgcacatccagtacagagaggattctataaagttcacactttttcattaagtagtagtagaaatacggtgaggccctgagactggcctggtgagcgaggaaaggccgctgggcgcttccactctgcaggccggggctgaaataacccgagttccgttctcacagaaaggtgcggctgccacctcttgacacagaggccggatgggcaggtgtcctcgatggccaggccgtatcagggtacaaccgcagcagtgcaaggggcttcctcaaggacaaatggctaaaaatgtcacggtgaaaatgtcatccccaaagagttcgttctccctagacccgtgggggcaacccagccttcaccgtgacactggccatctgcaaagtgccaactgttcttcatcgagcacgtgattacgtcactttcttcctttttgtgcgttttgtgcagcccctgccaaaccagccccctaggatgggggccgagctaagcggtgcaccccggtccccaggcggggcctcctctctgcttctgcacagcgacttccgactgtggctgccttcttcaccagcacgcaggggagtcgccagtgagaaaatgggatcctgccacctgctataggcggggatctccaagcccagctcggccatgaggagccgcatgacgtcatcacacttcccatgtagcttcagggcagcccagtcatccttcggggtccactgcaggttcacgatgtaaagcttcggccgccggctagggggcttggtcatgcaccagaggcgtgggtacttctttagaaccttcaggctggaccctagacacaggatggtgtctgctctgctggcagcctcggtcgccgcttcccagttcagaggctgccccaacgtccccctctccccaaagtgcacaatggtgtcccgcagctgggtcc

SEQ ID NO: 340579 - DNA, 1000 bp, Homo Sapiens; identical to SEQ ID NO: 159574

SEQ ID NO: 340580 - DNA, 1000 bp, Homo Sapiens
ccacaaacctgaagtaaattttattgagatgagcaatttacaataaaacactttacagcacattggaaaaactcaagtttcacaaattttacattcacaaaaagaagtcactttttgctcaaagtcacacacggacctcggggaagggacagatctaatgagccatcagtgggttctccccagagtaaaagggttttctctgggacttggcagtactgaaggtcccggactaacaatgattcaacttaggatttttaaaaattttatgatgatgggaaagcaatacacattcagtagaaaccatacttcgcatatccatacaaccattctggttttcaccttcagtacagtattcaataaattacatgagatattccatacttcattagaagataggctttgtgttaaatgatttttcccagctgtaggctaatataagtgttctcagagcatttaaggtaggcttggctaagctacgatgttcagtaggttgggtgtattcaatgcattttcaacttccaatattttggacttacgatgggtttattgagatgtaagtcaaggagcttctgtattcctagacaccctcagagaggagtgaagtacaacatcctccatgcttcccagagcaggacaaaccttctgtatgcctgctgccttgtctcattctggttcacagaatttctatggcagctttcagatgaaaccattagctacttcttgacacaccacagagacaataagtacaggcacatgagccatttgtcctgaaaaatccatctggggatccctgtgggcttagaagactctgtctgcccaatgaaagtcatggttttgcccataattcagtgagttttcaaaatcttgtgtcttgaaaattttcaaccatcttcataaatagaaactaggataaagaaccctcatagttcattacagggaagcagatgatgtgagcaagttcagtttcagttaacagccaagaggtctaagtgacaaactc

SEQ ID NO: 340581 - DNA, 1000 bp, Homo Sapiens
tttttttgactgtgaaatttaaatatttattttcaaaacccctaaaacactggagtatgcttcacctagaaacagattacaggacgaatagctataatgaataagcaatacaatttgtatttgggatgcaattgtgttgtaaagtttcaaataatcaatttataaatttgttgcttttacttttacaaaaatattcatttaacccataacatgagttgcaaaattatctccagacttctacagatgattataaactgtaattgtgcttcagttacacagcaggtgaaaaatttaactgaaccgttacttcaaaatacaatgcattaaaaataattgttacaatataggcaccaataaaaagaattttcttggcatacaacaccacaacaactttctcaagtatctgtattatgtaaattaaaaagaggatgtaatggccactttgactaaaaactgtattccttacaggaagaatatctttcttttaatatttgacaattactcagatttttttaaatgacttttgtgcaaaaaccaaactgtgcagatccaaacaattaaacattagctatcaaaactaaatatcaataattctacaactactgaaatacagccccagttcagaacttaggcaggcataatatatgtactgggcttaaaagaaaaaggcatcacccacataatagtaccataaatataagtgaaaattaactgtgcaatctaatttaacctttgtgtggacagaaatcatcctgtactatggttattttcatatgaactagaaaatgctcacttaaatatccttttaaaaacaacaaactgatgcttattagtgataattatgaagaacaaaaatatataaatagtttataggacaatttattaccatggcaaaaatatgctgatttaagttatattcatacctgttgatcagatatttaatcacatgacaatcagctttattttttggctctccaaatccaagcagatagtatgggat

SEQ ID NO: 340582 - DNA, 1000 bp, Homo Sapiens
ttttttttttttttttcacgttacaatctcactatattcggaatctaaagtagtcatccttagagaagtacagaggagaatggtgggtaccagaggccagggcggggagtgtggaccgattggatggggaaagggagagtttggtcatcaggcatgcattttcagttagacaagaggaataagttctgatgtcttgttgcacagcattgagggctgctaattctactggaatcagcctcagactcctttgctggaggggtcgtgaaccctcaaacaagcccgagcctctgcattttcttacttggggatcttgatctctgagtactcattgttggtggcttcttgtcctgataggtcctgaggctcccccttatgaaagctgaggggtgcatactggatctctctttcctcccctgaggagtgggcagccaggccatggtgtcgggggttatcatctgcccaggactcagtcaggttaccctgagagctgagcccctgatggtgtttgcatccttcatgcctatgtctcccacgtccgctgctggccttgccgatttcttcctgcaggacctcactacaatgaagatgacacagaaggagaggaagaccagggctgtggctccagctcccccgaccgcccccagcaacactcctgatacaggcctcattttgcctgtgtactcctgttgcagggagaggttcagggaaacgtgctgggaacccagagagttctgagctcgacaggtgaattccccttcatcccccaggtgcacttgcagctccagtaccagagggtttgagggctgtgaggggtacagggtcagactcctccaggtccagctcagcctggcagggggattgctgtcaacagcacagaccaagcgcagagactggccctctaggactgaaagagatgagctgttccccagagctgtggatgctgtgccttctccttggaagacagtcacagtcaagttctgaggagggtctgtcacgttca

SEQ ID NO: 340583 - DNA, 1000 bp, Homo Sapiens; identical to SEQ ID NO: 159575

SEQ ID NO: 340584 - DNA, 1000 bp, Homo Sapiens; identical to SEQ ID NO: 159576

SEQ ID NO: 340585 - DNA, 1000 bp, Homo Sapiens
tttttttttttttttatatttaaagtaaatgtttgtgattcttgtcacaaaaaatatttggattttctcagaggcagctgcgggacctgggtggttccgacacgccaggccccgggaaggaccccggaccctcccctgaacttcctggctactcatttccagcgaagtttatctatttttaataatcgttcagtttccaaggaaatggaggagctgttttttcccacggagcggcggccctgggaggggccgggcccagaggttccggccgcgatgccgtcagcgccttcggcagagtgactgaagcgagatttcgttctcagaagtgagatgccacgatttcgagggaccagggaggaggcgcgccgcggggccacagaccagccccgcgccccgaccgcgtcacagccaaagccccgccggggtgcgcgctgcagaggggacacgccgctcatcaactggggaagccgcggtcggtcggccggtggtgggcggcagagaagaggtggggtccgggacagccacggaggccggagtcacccgcgaggcccccccggtggtgcgtggggggcggcgcggggcgcggccgggcgctcaaaactcctcgtgcacgctgcgcgcgtagtccaccagcttgctgcccgtgaagaactcgctgtacttgagcacctcctcgggctccaggtggtggttctggttctcgtcggcgacggcgatcatctgcttggcctcgttcagcgcgttgtactcgttcatggggtccatgtagctctgcgggcgagcggggcacaggtcagcgtcgcctttccccctccgagctccgcggccagccgcacgaagtggctatttaaggtgcctattggctgcagcgggagtgtgggcacgttctccagctcctcggcggtcacgatgccgtcgtggttggagtcaatgagctcctcaaactccttttttctgtctttcacccagttgtcgtcaatgtcctggccctgctggttct

SEQ ID NO: 340586 - DNA, 1000 bp, Homo Sapiens
aatttctcgagacagggtctctgtcacccaagctggagtgcagtgacacaatcaaggctcactgtagcctcaatcttcagggctccagggatcctcccatctcagtctccttgggagctgggagtaggcatgtgccaccatgcctggctaattttttaattttttttgtagagatggggtcttgtcatgttgcccatgtcggtctcaaactcctgggctcaagcgatactcccaccttggcttcccagtattgggattacaggtgtgagccaccatgtctggcttgcttctctttttgtattctaaaattcaaaggcctaagtatcaaatccctaaatctccaaatactgtcacagataaagactcaataataaactccctccgaaagtttagacaggctcaggtgagagacttgtttcaaggggttataaaaagaaacaccagttttttttttttttttgcagtttttaatttttttaatgtatctatttaatggaataagttgatcatagatttgtaaaccaaaaggtaatttctcaagtatttggaaataagaaaaagcctccctaccaccaaccttttggtcatctttctcattctcttacaatcatcctaatcccctagtacacccttaccatatatcaataagggcaccataatattatgcaaagaacagatatatatgcctgatctcttattagacttgcaccagagactgttgaaccactccaggcatgaactccaaagctgaggcacactgaccaagcccctgggcatctacagaagcaaaggcgttctctctccagctggctgctccttctggaagagccctttaatctgggttaatcggccatagagcctctctctcaatggaggaatgtggtagctagggtccagaatgtttgtcactcggcgctctctctcttgcttccataacttgtatgggtggggagggaagaacggtcgtcctctctctcttcgaatctgtaacgtaattcca

SEQ ID NO: 340587 - DNA, 1000 bp, Homo Sapiens
attggaaattttttatttttctaaataccaatgcagttttgctacggttacaattttgaaatattaactgagcctcaaaatcaccctttctgtcaagcatatcttggcctctcccatgtctcagtgttgcctgcatttctcccaggacttgggggtggggtgaaaagcgtacaaaagatacttaaaagggctcctggggtacacaagcccagcaggtcctgagtgaagccgtgggccctccaaatgctcgttttatagcaacctctctctaccctagttctccaaattcacttctgccttcctcaggtttgatatctggcaggtttgactatccagaggaaattaaatatttttatataaaattaaattataataaatattgccaaatgctttcctttagcattgttccaagtctaaatgttaacctcaagctactgcaatttagacaatgaaatgcgtggggtctacccccagccaccagccctcatcctctctacccagtgctctggtttatgcttgtctcctgactgctctgctaaagtgaaaagtaagaggaacaacaacaaaagccaaccaaaaacaaggtagccagtgcaagacatctcactcttctgacatcctgcagtccccaccagtcctgaccgtgggcccctcaggggtctgggagtgtgacgttgtaatcttcatccgtctctatcccaacttcctcaaagaactgcttcttgctcttggggtatccttcaagtattgcatcagacagctctgtagccatcctcttcctcttcctccactccttacagtacttctgcctctctctgtacacctgctctttctcttctggagtcacatgattggtagctgctttaatgttcttcaatctctctctgtagccagcgcattccttctttaactcctggatttctttctgcatctctggtgtggtcagggcactagataattccttgagctcagcctccatgtagcggcagctctgctgcaa

SEQ ID NO: 340588 - DNA, 1000 bp, Homo Sapiens
gttgttgttgttttattttttgtgggtagctataatcatgagcgggatgagctattattatcaaagaacataaataaaaagttgttaggattagctactgtggggaaggttctagacgaaggaaggagaccaggtaaagaagaatgggataacttctatacctgacattgggaaaattatattctgattagcattttgcaaaaaatgttcctaattctttaaaaaatgtatctttcaaaataatcaccaagccccaaacacatacaaaacactgtggagaactaagtggaattcaaccaattaaaacaccactgctaatagaaaattcccaatacttgctaaatgttcaaagagccaaagaggcatgcatctttcatatgaaatcactggcattcagtgagatttggtttgaaagtgttgctcttctatcacttagaatgcaaggggatgaacagtgcagattattatgaaactaagaaaacataatttttaggaaaaaatgttatttatcactcttaagaaatattatttaaaatatttatggtttaaaaggaatattggtgtgcagggcaaagccagtaaagtatgacacttaagcaagttaatttgaactcaatagaaatcacgataccatcaaactttcttcctgcagagaatgcatgaagagacagtaccttgtgtcttacttatgttcatacagacccagaaagcacgtgaatgaaaagatctgtttgccatatttacgccttatgtcatcgtatctgctttaagaaaaacacttcttcaaaatcctacactatgaaaaactgtcttcaggaattgtttatttggtccgttgatctagtgaggctgagttcttaaatctttcacccccaagttaaaaattggagcaacaaaacaaaactccagcaaggcataaataagatattaaagtgcatatatacaataccagaaaagtttagattgggaacagcaaaaatttctagtgcaaaaactgctt

SEQ ID NO: 340589 - DNA, 1000 bp, Homo Sapiens
tttttttttttttttttaagacagagtctccctctgtcacccaggctgaagtgcagtggtgcagtctccctccctgcaacctccgcctcctgggttcaggcgatttccaattccaagtagctgggattacaggtatgtgccatcacacttggctaatttttgtatttttagtagagatgaggtttcaccatgttggccaagctggtcttgaagtcctggcttcaagtgatccgcctgcctcacccacccaaagtgctgggattacaggggtgaggtatcaccaaaacaattctgaataacatgaaggccactaaatctaatgggaactgcccgacatccctctcaatctctccattcagagaaagggatccagaccttcaatgatttccataaagcaaaacaaaagcccagtgactacaagtctaaccatcattctaggctcaaactgaatcctttgagttttactctgaatcctagcaactcttcaataagacagaattgttgattgaattttgggttttcttcggtattttttatgtgcaactctctatgcctatgacagaatcttatccttgttttcctaaacttgacttagaggacaggccaggccccaataaacctggtctcaggctctgagatccggatcctctgtcagtcactgaggttggggaggggactgatgtggcacccttctgatgtcacccacaccatgtccactgaggaccctgagtcttgccagccgttggggactgagcctcctaatccctgtgaagaaagtggctgggtgggaaaggctgctgctgtgtcagccaaacagacaatcctccctgtgcggatgtcagtccttgctcgtgccacccacaggctgaaggggaaaagacatggttggagcttttgatatacaaagcaacaccttgttttactgaaggttgaaaataagaagtccgctccctgcctcacccttcttaagcatcaaagctcagacgtcagcgggacttga

SEQ ID NO: 340590 - DNA, 1000 bp, Homo Sapiens
tagttggctccagcaatttaattacctctctatttattccagagattgatttgggaatttgtgacccttattgattaaatgtacgttggaaataattcatatagtgtgtactcacaggtaaagtaaagcctttggcattgccacacgtgaggaaaatacgacatcgccaatctaaggcttgaacacatgcacgctgttttccaaatggcacaaacacctttgtagatcacttcttccatgaaataaagcaaattggtcaggtttcaatctttgaactcatgaatttatacccagctgaaagtacaggcatcttaagaatgtcttggttctttctgttgtttttgaatctgatagctgaagttcaaaactgaagctttctcaatgtgaaggtctataaactttggtttcttctcccatcctccagcaaaaaatgaaaggaatccatataattggcattcaaataattgtcatctctgataaaactataaataaatacacactcttggagtcctcctttagggtttaccatcaaaaccatctaacgttgctgtatcaagtgtgcagatacttacaaatatatggcattagttaacaaaacagtttgaaagatattggatgaggaaattttactttggatacagtactttgcagtgcagataaaaacatttaagcaggtaaattatcaaaggtagagaatatcactttgtataaaggcagatcatttaaatatttttctatttgtaggtggaccatatgcatttatggtaaggatgtgtctttctttcttactgtttccctatggaacccagaagcaggcccaaggaaaaagagcaggaagcactgaagcagcaaccacctgtgtggtgcccacactcaatctgcacagaatggggccctggatgacacggaagcaattggttaagaagctgactgagtttttttgtgtttttttttttttgttcttttgagacagtctagctctgttgcccgggctgcattg

SEQ ID NO: 340591 - DNA, 1000 bp, Homo Sapiens
ccccagccctccttcatcctttcacctctttaccgcccggggaaggccaccttgccccgacggcgcgccctgggcctgaggcctgcgtcagtaggcagagctgctgggcagcaggtcgtagcgccccccgctgtagaccacgacgccaggtgggtagtagagcaggtccggctccgcggccgcgtggggcggcgccggggcctgcagcccctgatcctcgtgctccggcttggtagtggcggtgaaggggcgcatgctggtgatcgaaggagacgcgatgcgccacagcaggctcttgagcgccttgcggaactcgcggcgcacgaggcagtagaggacggggttgaggcagctgttggagtgcgctaggcacacgctcacagggaacgcgtatacctggcacaggaaatactcctggctgaagggcaccgcgttgaacttgatgaggatgctccaggtggtgagcgcctggttgggcagccaacacaggaagaaggacaggacaacgatggtcactgatttggtgaccttcgacagtctccgggcgctggctccggtcgggcgtcctccggctaccgcggcccctcctttggtccccgccgcgcggcggtcggcgatgaagcgcaccagcagcaggtagcacaagataatgatgcccagcggcagcacgaagcccaacagcaccttctgcgagtggtagaggcccagccagaactgcctgtcgcggcccagcaacttgtccgggaaacgcaccaggcacagctcctcgcccatcaccttgaccgtggtggagaaaatggcactgggcagcgaggccagcgcggccaaagcccagatccacacacacagcgccttggccgagaagcagcagctgtcccccaggctccggccgcagcagtcgccccggccgtgtcctcgggtccggtggctcttcagagccgaggccaccgaatggtagcgcgtcacactcatggcagtgaggaagaacacgctggcgtac

SEQ ID NO: 340592 - DNA, 1000 bp, Homo Sapiens; identical to SEQ ID NO: 159579

SEQ ID NO: 340593 - DNA, 1000 bp, Homo Sapiens; identical to SEQ ID NO: 159580

SEQ ID NO: 340594 - DNA, 1000 bp, Homo Sapiens
ttttttttttttttttttttttttttttttttttttttttttttttttttttttttttttttttttttttttttttttttttttttttttttttttttttttttttttttttttttttttttttttttttttttttttttttttttttttttttttttttttttttttttttttttgagaattaggacagtttattgtttgaccaacatgctgagtcttttccacattttacacagtttaatgtgaaatcaacatggcggctatgtcttctgagcccataacagatggaattgccaccctctgtgctcctcacagccaatcactttaaagggatgggtgaggggaaagtgaggggagaagtggacacacaccgcgagatgcaggctggccttcaatgctatggaggcttcccacctcctgaaggaaccatctaaacccctgctgcaaggatttcctgatgaaaccacacactgctgggagtgccaaccagacaggggtctggagtccaaggagtttgcacattgagatcccaaggttttggaacacctaaatagttcatgtcaaacaaaaattcaaagggtgtcctgatctgtgtgggtgcccatgacaatcaatcagagtagacttggggactggcccttgtgcagtagaggagcccaaaataccaccaatattctcactcatatgctgggaagaacctagtgtcctaaccaaaaagagtagagatggtctgaggaacacacccacacacagcagtccttgctgtgtaataaatatggagtcacatttgttcacacacagggcagcaatggatgaaaaatggaaacttcactggttctgatcactcctaacttgctgggtgatcttaataagcaagttgcccttctccatcctggttttcctgcctgtagacaggaaaagttgtgacagctctgcttcacatagctgtaacaaggtgacaatgcctcacattctttggggagaggcagttcggaaacga

SEQ ID NO: 340595 - DNA, 1000 bp, Homo Sapiens
tttttgcttttcagatgattttatttttttttaaacaagaaactctgctataacaaaaatttaggttaattatgatggtactttcactgtctcttctttattaagtgtggttatctccaatagtaaacaagttcatttcacaaaggctgttactaaatgacttatgtatgatgttatctacaattctcaaactgtaacagtacagacttgaacttttaaattgtctgtaaatcatcatctatgccatgaatgtttaaatataatatatatttaatatgaaaaagctaaagcacaagtgctttcacccacccctaaattctgttttgggccctcacagattcggaatgcattttcatccaccctttttcacaaagtcaggagagctcaggaaatataaagtcaaaaatatacaaatctttgttgttattataataagatttttttccatgaatgaaattaccaaggaccatgaacctggaaaaagaaaatcaaaaggaatttacagcaattatttatcttcaaagttcagaactggtcacttcacagaaagacttcaggatttgttgaaatttttcttctaaaagtcattctgtagtggagttttctaggaaaaattaaacagcttttaataactggcccgctggtgtgagagctaccgtggaataaattagcacaaaaatggaaaaaaagtcttataactgttcactgttacagacataatcaacaaggtcagtcactctcaaaagctcatcttcctcctcttctggtgctcctgcctcctgcccaccacttgtcccattggaggctaggcttgcactggctgtgctgttgtccttgggggtctgagacttctcagtaggcttgccaatcaagttctcaatggctttgccagggctctgtccattggttgaaggtaagtccactaagctatagtccaatgggctccccactttgcctacattttcaaagtcctcttcctcatcactttctatccggtagg

SEQ ID NO: 340596 - DNA, 1000 bp, Homo Sapiens
ttttttttttgaggatgtgaagcaactttaatcgccaccctcagacggggcagcaggagtgtcttaagcacagggccgttctaccccctgggagctgcctggggccagcccctcagttctggctgtggcaggttccccatcctagctccccggatctccatagggagtgtccagggaccctcaatctccagggccacttctgcaggagctcgggttcgaggttccacgtggccagaagagctcaggtctctgagggctggtgtgcccgggtacccatccgcatcactgctctcctcctgtccggctacgcccagggctgagtgacggtggtggcaagtgcttgtcctcagggcagcgaggtcttctgttctgacagcagcagggactccttcatggccaccagtaaccccagtgggcggaggcgctcctgggctcggagccaggacaaaaggaggagggtggcggtgaccaggcttgcactgagcaccgcagcagctgcaataaccccataggcagttgggcttccagactggtctccggcagaggaggatgtggcattcccgacagaggggacactctccagggtcacagggggccccatggttgtggcattcctgagagaggtgacactctccagggtcacagggggccccatggttgtggcatccccttccgggaggatctcattggttccacagccgagctcgtcgctggagtcgggacagtctgggtggccgtcgcagcgccacgtgagtggaatgcagtcatcgctcagcgtgcaacggagctcgcctgctaggcaggccaggcggctgcagttgcgcagtttcttgtcagttcccccagagcagtcactgacgccggtgcaggggcaggggaggccagggggcggtgggcattgccctttctgggtacatggctcaatcctgcactcctcctcatcgctgccatcgctgcagtccaagtccctgtcgcagcgccaggtgaggggcacgcataa

SEQ ID NO: 340597 - DNA, 1000 bp, Homo Sapiens
ttttttttttttttttttcaaacaataacttttattttatacttctctatactttgtagcaaatctttttttgctgaatttaatttataataaactttttaaattacatctctctctcttttttttttaaaatcaaggctcttttatgtcaaaatctttttttagctatattttagattaacatttaacatcccccccttgtgatctataccgttggatattcaggtattactgtgtgtgtaacagctaaaacaagagggaggagggaaaataaaggcagtgaacttggacggatgcatcaacaacagcagataaagctaacccctcagtgaccatagcagcatgtcttctggaagcctttactcttaccccagagatttcctcagccccttccctctctccctcctatcctccaaacacaaagccaacagtctgtcctttcgcttttcttgaggagaaatgtgcagtggaaatgatcaaaacaagatactgtggaagaacgacgtgagcgtgaattattcaccgtatgtttcgtccgtggacatctctcttgaattcattcccctggccttctcctctcctcgccttcctattaggaggagcccatcatttttcatgttactagcatgattaatatagtaggtggcccagggccgttcctgagattcttttgccaacaaaaaaaattaataataataaaattaaaaaatggggtgggtttgccgttttcttatttgtgtgtgaagacggactaaagctgaggtccgattttggctgtgcttgcttgctcactgattggtaacatttggcaaataaaacacaagaaatcaaacgaaataaaaaagagaatcaggatttcccacaatcctatatgagtgttttcagcatcacagagaatcacaacgtccccaaagaactaatggatcttcctctcgatttccgggagcatggagtgagtgtgggtgggcgcgcggggggagctggccccacgctcagaagg

SEQ ID NO: 340598 - DNA, 1000 bp, Homo Sapiens
tcattgggtggttttctcaagtgtgggttttagaaaatatccttaatgaatattcttgctgtgtccttaggaaaattagcttttttctctctggaactaagctgagaaaaagactgcaagaaacttagagcttttatcaccttaaatctggattccagttggacagttgccagagaagaaaaaattttaaatgactatacaaattaatttagaaagctgtcatatttcacacaaccttttcaagaaagtttagtgactcttagcttgatagttccacacaacagaattataatgattccatagaaagtattccattgtaaagaaacttgtctagaatgataacttatgaattgaggacttaggcttaatgttctggtgtgtgacacttggagctattggtcagttcttatttttaatcagtaaatgcattttaaagaaacagttgaactaaaaaggaggccattcatgatactgttttgtaacatgataaaaatgttgtataaatcccttcgctcctctttaggtactacctgtcccaacccacatcctcacccccttccttaactttcatacattataaatgccccccaacagtctcctcaaccctgaattgaccaagtaatgcaccaaaaggcagattatgctttggcaagcaggaaattggactattctttgagatttttctgaggtagtgagtctttcctcctctgctctgatggttaaggaatgtcttgaaagctgagttaagagacaagtggagtgttggtcacagtacttaaacactactctgaaatgggtggtttatatgatcagacgattaccacaaacttcaaaagcttcttcagtagaatcctgactgttatgtggagaacttaaagataccgaggttgctatgatgaggataagccgcagtctctaaaaaagtgcctgtcatatagttaggtgctcaataatgtttgatgactgactgaatgtttaagatctctgatttggctcagtg

SEQ ID NO: 340599 - DNA, 727 bp, Homo Sapiens
tttttttttttttttttttttttttaagttttttaaaatttattatttattatttctttttgctcttgtttcgtttctcttccttgagcttctttttggagactttgggtctattggcctttctgtataggtgatacccaatgaggcccaggagggctggcaccatggccatccctaccagaggcaaaatgcccttcaccagctttagccagtagttggctcggattagtgcaatcagctccacgtcatactgcaccactgcatccgctgggacagatggtggaaatccccgttttccataggccaagtgagaaggaatgattgcccttcgcttctctcccacacacatgtcgagaagactctgctccagacctggaatcacctgcttttggccaagttctataaccagagggtctctggtcagggaggtgtcaataatacgtccatctaccaagcttcccgtgtagtgtatgtgaagcgtgtctccaaaagcagcgggctcggcacatggttctgggggctccaccagggtctccacttggagggtccggacgggactttcggtttcgagcccagcctcagcccggcacaccgccgcactgagcagcagcagcagcagcagatggagcgggaggagtgaggggcgcagggtcatgactgggcgcggggcagggagccggggcaccaggacaggctgttcgggtggcggcagctaggaccctcgttc

SEQ ID NO: 340600 - DNA, 1000 bp, Homo Sapiens; identical to SEQ ID NO: 159583

SEQ ID NO: 340601 - DNA, 1000 bp, Homo Sapiens
ttttttttttttttttcatttccatgttatcaatttaatgtggcaaggcacagaggtagtccctttaggtccctgcctctttctcagtgttcccccacctactcccctttcccacgaccctcagcctgccccctcctctagattcgcagccctagttgtcccaggagagactgtgggtctccgtgggagctgagcaggaagaaaggcggggccggcgggggcagccgcggcggggttgaggccctgagggcgagctcccaccccgtagcagcctccgcaggtcctggcggaagcgcaggcccaggaaggcgtagagaacgggattgaggccacagcgggcgagggccaagccgctggtcaccagcagtgcgacatccttgcgtttgctggcagggcagctccgctcgcgcgcagccagtagatcggcagtatccagcagcagggcgaggctgtagggcagctgcagcaccacgaaggccgccaccagagccaccacgacgcgcagcgcacgccggcgctcgggccccctggcggccagcagcgtgcggcccagaagcgcgtagcaggctaccatgacgcccagcggcagcgcgaagcccagggccacctgcgccacggcgctcgcccccttcaccgtctgcgtgaggccctcggggaagatgaggcgacagcgtcgttggccttcccgctgcccatcctggctgaagagcagcgcaggcagcgccaggagcagtgacagcagccacacgatgacggagaccaagtgtgcgcggccgggagtggagggccgcggcccggctgggagcgctcgcgcgatggccacgtagcggtcggcgctgatacaggccaggaagaggaagccggcgtggaaggaggccgagtagaggccagagatggtgcggcaggtggcacttcccagactccagccctgaagagcccctgctgccgcgaagggcagagtcagggccagcaagaggtcggccagggccagctggagcag

SEQ ID NO: 340602 - DNA, 1000 bp, Homo Sapiens
ttttttagaactttcaagttcttttattataaaagtctgtacaatgaagtgccagacacagcaatgccattatactggtggacatatatatctatatattatttgtatatagatatacagtttttatttgtaccaaagtaaaactatcaccaactgcctaattctaccagctactgctcaactatgacacacaatactgtcacagagcataagtgctgccatgccacttttacatattctactcacagccaaacattaacattgaataacatattgaagcagctgttaattctaaaatgaaaccagtcagaccactgacttataaaaatatggtactcatatagatttagcattataaagaaggaatatattatttaaaacatttaaatagtgcatatggacatttttgcatgtggtataaaaaataaaacattcatataagatacacagtgcacataaaattagatgtttggatacactcctatctggagactgaaggaaattatctgaaatgtacactgcatgatggattcaaataaaaatgatacatcttttggtattttcaatttcacttttctaggtatacattatgaataacctagttgtatcaaaaggaaaccacacaaaaagggcaggatttagtgcttttctttattccccaactacacattcactaccaggttttccctcaccccccaccccccagaaaaaggcattgcacacacgggtgaaatgtgaagtactagaactgctatttattatcaaactacttcatgtgcttactatgtaatagtgccagaagtctgaggttcatgcttccctcaccttattaaaggatgttgcaaaattccatttttatatggaataaattgttaatattagctagttaagaaaaccatgcatgagtcattgcatgcaaaacatgggtatagtcaaagtgagacagtcatcaatccaaaaaagcaccagaaaaaaaagttaacacttagattaagcctga

SEQ ID NO: 340603 - DNA, 1000 bp, Homo Sapiens; identical to SEQ ID NO: 159584

SEQ ID NO: 340604 - DNA, 1000 bp, Homo Sapiens
tttttgcttgggaaaatggattattctaataaaactttattttttcaaacacagccacagaggcagaacctcatgtttaacacacacagacttatggatttttcttttaatataaaacaaagtttacgaaaatttttttccactttttgtatttgtaatcccattagcacagggactttggcagcaggtgggagtgaagggcagctgagctgccactgggcagtcactgggcacaggaggagagcaccagcctggggagtggcttcactcacacacacagggatactcacctactggccaaccacactacacacacagcacagatgcagacattgacccagtgtcagccacatgccctggaggtgtgctccactctgggtaagcccaatatgtgaaaattcaaatagtcaaaacagctaaagtggagggaggttgcttgctttacaaaaagaagcaatcataggctgcttttaaatggtcagcagtccaaatgcattgaaaaatagcatttggtttacacagaactgttggaacagatctactgtgtaaagcaaaatgaaccaattcttgaaaagtgttccagggccacaggttcttagattgggaagcaagatgacagttctgactagcttagttttccagactgaaagtaatggaattaaaataatgataactgtagaccttctcccttaaggatggtgccctggggctttggggaaaccaggatggaggcagaatcactgcctcacttcttcagcttagggcctacagaaactcactggcattgccagtaacctgttggaagctggcacagccaatctacagcagagagccctgggatgaggatgccccaggaggaaaagaaattggcaccagggaaattatggcctgaagagggagaagagccaggggaggaatgaaaccatagatgggcaactcctgggctcacagtttccctggattctctagagggcctctctcaggcccctagagacctggt

SEQ ID NO: 340605 - DNA, 1000 bp, Homo Sapiens
ttttttttttctgctgcttaaaacacaactttattgatgaaacacaagtcttagaataacaaatataaactaatataaaagtgtagcttatgcatgatgtataaccaattcattgtcagtttaggtagaggaaagattaaaaaatctcaatctaggtaataagatcaaatcaataaattctttctgtgtacaaatactaatatttcatttggcatccttaaaatggttcatcctaaacccaaccattacaaccaacatcagtcactgttatgatatatgatagtcattattccaaaatagcagctgaaaagatctctttaccatatacgcacaatgaaaaacaaagaatttacaaatcacatcgtaccaactgcaaatatctcaatattgtttgggacagactccaaattagagtttggttaatactttcaggacttttactttcaccaccagatcattgtgatttgctagtgctttgattttcttaacacaaactccagactctttgaataagaaaaaaagtgaacttctgctgaattctttcctggatgatgcgagcccttcattttttatgttgtcatttatattctcaaatagggtaaggatattaagaagaatctctctatcccattctttattaaagagggaaatcaattctgatggtactttacaactgaccagctctcttgtcatggctggattttcagtaaagtttataattagtttcataatctgtatcttggtgaagtgatttcccaggaataacaaagcaaaaaagtctggaaaagaataggaaagcaaatgttggtaatgattagtcacagtcatgttggttaacagtcttagcccagccatctgcacagctgagtccaagcgacagaccatggtgtcatcacacacttgactgatgtacgtcttaatcttgccctgattttctgcgttcacactcaagttattaagggcattgtaagtcttttccctaattatggggtcttttgtt

SEQ ID NO: 340606 - DNA, 1000 bp, Homo Sapiens
aaaactgtgggccagcaaatgtgttgttttaaaccactaagttttgggataatttgttacatagcaatagataactaatacagaaatgtcattcctttgcatctttattatggcgcgaaatcatgacttaacgtcagttagtattgcttaatggaatcgacatacatattgttataccgtgaatcattttcagtcaagaccacatttctcagagtttgccaaaacaagccttctgccttcgggttgtcaggccactggaggatggagctcttacagatccgctgccgtagcctcaaatactgagaatgctgtaacactggctccagcaggataaatataatcacatccatgttctcatccattagcctctgcaaagccaagtaaaaagctgttttaaagttccagctttttgcatattttttggttaaaacaaatactgttttcttgctttggttgatgctctgcatgaggttgtcgatgatggccaatcccggatcccaatccctctcctctagacaaaggagaacgtttttgtctcggctctcttcaaggtggtagcgcagctcatttatcacccagtcagtaacagaggcatctttggtgtcataagaaatgtaagcatcatagaaagtttgggatgtggaaagagacctgtagccttttaccttagctaaacacacattatatataaaccaaacatcccagtaaaacaaatggtgagccagggcagccaacataaccatggtggtgataaagaacgtgaagaaaaataatatcactgcagtgacatctgaaacacaagttgttagctccagactcacaatactcttccctctttgatccccaggactggcacaaatgacatctaccagtctgggaattttgacattcagatgttcatccatccatcttcggaaatctccaatgtcacaggtgcattcaaaggggtttccgtgtagttccaacatagataatttggtggtggtcttagtttcaagtg

SEQ ID NO: 340607 - DNA, 1000 bp, Homo Sapiens
ttttttttttttttttttttactgttttcagtcactgcaaattttcttccctcctctgggatctaaggatccagggaggaggctgccacagtgaagcagaaaagctacattctgcccagggaggaagagaaaaagcaatttctcgctccccttcccaagtccttcctgtccaccaccacctcggatgtccccgcacacagccttccggtgagcggccgtgccgtcccctcctctctctaaggcattggggagcagagggcccataggcagcaccctgcaaaaaaaaaaatgatctacgtgtgaggagagggcaaggggctggatgcaggcagagaatgactttaagaaaagattctatgatcccttcctttagtatggagctcgattttccagctggcgcttggtgagaaagtacttgaagaactcatagacagaccaagaaatggcggtggagggcatctggtagatgacacgcgcctggatgcctttgaagtagccggcaggccgttgagctggtacaccgtccggaaggcattggccatacccgacagccggccgctgatgttggccagcgagagggccacgttctcctgagtgttcagaagggtcttacagacgtccaggggggtcgtggcggccgcggcgagggccccggccagcccgcctgagatgatgtgggactgcgggttgtaggtccggtgggggttgacctgctcctgcaggaactcataggtgatgaagtggatggactggaaggggatgttcatggtcagctgcgtggtgtagctccggtagaaggcccccaacccctcggtcctccacaccgtccggatgcagctgattgctgaccggtgctgcgagttgtacatctgcaagcgctgcttcaccacttctgctggattcattaccgcatcgtggagcagggtggccatactcccagctatcccgttggctaggtggctgtttccttggtggtggaaaacgtcatttaaagtccttt

SEQ ID NO: 340608 - DNA, 1000 bp, Homo Sapiens; identical to SEQ ID NO: 159585

SEQ ID NO: 340609 - DNA, 1000 bp, Homo Sapiens; identical to SEQ ID NO: 159586

SEQ ID NO: 340610 - DNA, 1000 bp, Homo Sapiens
ttttttttttttttttttttttttttttttgcgggaagaatgtggatttaatggaatgaaggatgagagggcccgaagccagcaagtctcgccccacctaccagcccccacccagcttcccaagggtctcagagggacactcttggcactggcctttcacatctgttcaacaacccctgagctgaaaagttgcagtgggaggcctccagctcagcaggtggactccaaaatacccctcttgtcttatccactccaggtcgggggcagggaagcacatggggctgcttccgccacgttccctccacagccatccccaaggccaggcacacaggcaccatccaagggcctgccccctagcagtgagactctagctctgtgagtctgagcagtgaggtcctgggggtggcgggagccgagggtcctgctgggttccgctggggcaagtcctcggctgggcacatgagctgacggattctctctctgaaggggcccttgagggttccgagtctgtagaggctccaggcaggaatgcagaccatggaggacagagccaggagccagcccagggcatcgccccaccacgggtacgtgtacttcttgttgtaggtcagcggagtgtactttatcagggagaagagaaaggtggctgtgcacacagctggtgtgaggaagagccaacagtatttgataagaggccatggcctgtacccaatcatgtcttcgatgttgtcgtagaagcgcttggctccgtaaacccaagccacacagagggactcgaagatggccacgaacaggaggcacatgccactggccgcatagtagtcaaagagctggaacacgtacattccgccctctgtgagcatgatcagccccacaaggaaggagacgacagatactccaaggatgaggacttccctccggttcttcttgcggaacacgtgagggtacatgtccaccagcgctgtcaccaggctttctacacacacaaactggctatcca

SEQ ID NO: 340611 - DNA, 1000 bp, Homo Sapiens; identical to SEQ ID NO: 159588

SEQ ID NO: 340612 - DNA, 1000 bp, Homo Sapiens
tttttttttttttttttttttttttttttttaattttctttaaacctttttttatttagagatttttctggtaaggagatataccataggaaagcaatttcactggcagtgaggtatgtatatactctaccaaaatactccttattttaactgtttttaactttatttacatacgaagcaaagaatcaatgcatatccttggttcaactatagtattagccatactacatgaaataaaatggtgcttgcatacaaaaacttgttgtttgtaaaggaatctgatttcagattaaaatacctaattgtttttggaaaaaatttttaaaaagaatcacaatttatcatgaccaagacacctgcaccatattttccattcctcacagcacatttatttcagtaattctgttatgtcggttcttagcatgagcatagtgttacacgattttcgtacatataatcacatccaaaacaagttctaaaatttaaattgtaaacattctcatatgtagaaatattttaattggtgtattaagttttgctaactgatcaaatttggaagataatataaatgagaacgtctattctaaactgtgtagtgagcattgtttattaattacatttctacaatgttaaataaagtaagaggcaaacctgtcctgtaagcatgtcaaattttaggtaaaacattaaaaagaaacaaacctgttaacaaaagaatgtcttgcaataaagaacattagatttttaaaatctattatgatacaaaaatgtaaagggtaaatagcatctttgttgacaaagtaggaggtagcatggatgcaccactttattgtctgagaaatgcaactggagtaaagaatatttccttaccacaaataatttccagaactatgtacatatttcttttagaaatacttgtttaaacaaatctccctccactttttagtataaaaaaaaccgttccatgtgattttaaaaaaaacacttacacatctagata

SEQ ID NO: 340613 - DNA, 1000 bp, Homo Sapiens; identical to SEQ ID NO: 159589

SEQ ID NO: 340614 - DNA, 1000 bp, Homo Sapiens
ttttttttttttttttttttttttttcatttaggtaaactctttaatgaaagacatttattgtcagattataaaatcagtgttgatgataagccctcctacccacaaaacaaaaatcgtatgtatgaaattccctttcccgtaagttatgtgcctgtcagccatcccacttcagtccatctttggatgctgaggctctggttgccagtccttatctctacacctgtccctggtctagaggagaaacgaaggtgctctgaggcccctgtaacagagacccttgtcatccatatttgcaataaagacatcatggaggctgtgcaaaagtatccttctccccaacttctgcaggcaccatttccatctcactacccagaggtacatcagagagcaggagccaggcaggtgacaaagatgtggaaggcttctaagtggttggctttgccgtctcagaagtgcgaagaaatgaaaatccatcaaaacagaatgccattccatgtttcaggcttttacctcacctcaaatcaaatgtctgttctttatttattggtcccataagtagacacgcacttggacttctggttttagaacattctattgttatcctttctccttttaataaacacacactagtttcgaggaatctccctaataatcctggcctgacatgctgcagaacttcaatttcataattttactaacaacagaggaatttcatcttattattaccaactaccacattaaaggatctgaaacagtaattcatgcataattctatttaataatggttttcaaagtactttgctgtttgaaaatgcttcccagatgattctgatcggagagttgggaaccactgccctagactgtaaccactcaattgaactttactcagtgctgcttccctgcccacttcaagtaaacaatgcttaactttttcgtttctaaaacaactgagattactttctcccccttagtttctacaatgattgttgaaaatttgt

SEQ ID NO: 340615 - DNA, 1000 bp, Homo Sapiens
tttttttttttttttttttttttttagaaaaatgaaagctgatttttattttatcatcaacagccattctttagacatgaacatgcatacgtaatattctacgcacacatcacagcttttaacgttagttaataaaggttaaacacacaacatacatccttacaaaaaaagtcaaaatgcaaacttaaaactttaaacaaaagtattactaatttaaaaaaagtttgtgttgggtaccatttgtacaacacagttaatttaaacattttcattttggttgcacatgaaaaaggcggcagtagaaaataaagtcattgagggtttttaaatagcagaataggcagttttgccatgcaggagaagcaatattaaatattagtttcaaaaaaaatccacatttaaaaatatttagttcaagtcacagaatttttctcagtagagaccccaatgcaatgcataattagctgccttagatggcccgtttgaaaggatgatatcccttcagagtgtaactttactgattttggcacagaaaagaagtcttaagaacatgattaaaaaagagggaagaggaacagaggaaagaaataaaagcaagaataaatgagatagtaattgcaatcactaaaaaactgcattctcagtcattgcagaatactgtcttctgtctacagcaggtgcttattccagaattgttattgcagcatggatttaatttgcttggaggtagtctcatcattcaaatgttttgttgtgtacctgagagcatttagaagaccttccacactattaggaggttggtccttaagaactttgatacaacctttcatatcaattttggaagttttagcaaatgctcccactggatgtacgtggtcatagagtattatgacacccaccattaccctcaagcagaatgacactgtctcttcatttgtaaatctgcttctgtattccggtgtttccagcatgactctgcatacactagccattgtgctta

SEQ ID NO: 340616 - DNA, 1000 bp, Homo Sapiens
tttttttttttttttttttttccataaatatgttctttaacatgcacattctgcttacattgtttagggtgctttttattgtgcctaaaaatttgcaatatggtgaaataaaatatttaaaaatggttgaataccatacggaagatgaaatctcatatttatagcatgtaattcaattctcatgtatgcataattaatcaaaattgtgtctttaaatgacatcttgacattttttgaattgcactaagaaacactagtgtctaccattcattttaacagacttatttatgtttagctttattaacagtataacattttcatgcaatcttaaattttgttttaatttttacaatgtttgatttaattcaaattaacaaatattcaagcctacatgagagacaaatgaaatgagactacctttatatataatcagcaaaattctttttaagagtaaaaagttaatattgggatttaaaaacctaaatttccaatgttactgctgacaatccaatccaactatatgtatattacttaggccacaggactgcccattagtctttcttgtcggagagcaattaatctcttgaaccatttttcctcagcatcagctttctcgataaataaatttggatgggccagggaattgtcatcttggtacttgatagcagtagggatgctggtaggatctatttctttttcagtactgggtggatcagcaactgctgatgctggtcctgatgttgaagttgcttgtttcacttcactaggttccactgactttttgacttctttacttgatctgaatgtctgctgaacaaaagaatcactttcaatagcttcaatttcttttactctttttacttgttctaccagggtggcttggtcttcctcctttcttctctttgcttcttcctcatttctttctttggctttcaatgcttcatcagcttttgcagcagcttcaagaaccagctgtagtctggctttggcctgttcagct

SEQ ID NO: 340617 - DNA, 1000 bp, Homo Sapiens
ttttttttttttttttttttttcaagttaatggaaacaagtctttatcaagtaacttttaatatcagaaaaataaaactcttataattctctttacagcaaatatataatatcagtgctttggccatcttaagttaaaggccctttatcataaaatatatggttttaaattttactcaaattgaatttataatccctatgacttccctacatatacataacaaaagagtgtagtaaaattagcaaatactaaactatattgataatttatcattcttagtttgtggtttttagaaacagtacacgcacctaatatatgtcgattccttggcttattagttgcagtgtacaatgcaacaaaatacaaaatacatgcttggtgaacattcgttcatatctacaagacggcagctagagattaggtttcaatactgaccatttactatcctacaagcaattagcattacatcataatatgccatcaaggcaactttttttatactgaaaaaatcaaaataaaaaccgttatttgtaaacttttatacgaaatgtaactcttcaagtggaaataaaaaataaaatttgtctatttactattgaatacacataggatttcaattttcattataccgagaaaaaagctcttttgtgttgggaaaataatgcttcaaaaaataattagtagaaaaacccactagtataatgttttgtcctttcaatgccagcacagatttgggaacatactgaggatgaagttatagacatccacaggtgaaatgtacgagtatattttaaataaatctttccttgtgattggaaatagttttgaaatgaagtaaactgattggaggttgtcacagctgcttttgtgaattatgccaagggcatcattatccctttctccctcctccctcccctaaattactaaaaaataaaaatatatttataatgtgcaagacaaatatggattgaacataaaatgtttcacattttgatctata

SEQ ID NO: 340618 - DNA, 1000 bp, Homo Sapiens
ttttttttttttttttttcagtatgttagcattttatttgggatttctgcatttatattaaaatgtgcatttaatagctcaataactcaatttgtcttatcagttagcaatatacaaatgcaattatttttaaatcaacaaaaggtaactaaaattaaatctttcagtgatgaatttgagcagagtaagagatctaataacaggttgacataagaaatatttgtctcaaaaatcaatgtatttaatagttgacagttacaaatctcatcattattgttccttcagtaaaatttaaatattcccacagttctcaatcaaatatgctttttcagttttccaacagctgtgatttttcttcttttggtctattcagtagaaagtgaactatctgaagtagaacatcatcattaaaacctttcacatcattatcctcaattgtttcataaagaggcttactttgtgtaccccaacatatatttttacgagggttattttgatcagcttgtgtagtcagtgccaaagtatttagctggtagcagaaaaaggaaaagtattttccatctgtgatcacagcctgggagacaaaaggtcgagtaacatctgcttcactccagaatccttgatacatagcttgtgctccagtccaagcaaaaaggcttgcaatagcattagctctaaaaacaacttctatctgatcagcacagttttgtctcaaaagcctttcccttcttaatttgtcaggtaacagatgaaactgggtgtgaccgtaacagcaaggatctgcagtttttgagccaacaaatatgtggttttcatactgccgtttgaataatggaagtttgtctggtttacattttatagtggggatttctataggaacagaataatccaatggcacaaactctgcgagttgcttggatattcgaatctggttgtttggtttatcatctatctggtatcgcaagtcatcaattcgacctcttcgatgaccacgaggaat

SEQ ID NO: 340619 - DNA, 1000 bp, Homo Sapiens
tttttttttttttttttttttttttgcactcaatgaacaaatctttgttgtttattttaaaattcaagacaatttttttgcaaatgctgattcaaaacgtaccaatccccatctatcatgcctatgccaatacaatctgtcacaaaaaagtttgcttctcattgtcacatagctatggggactggtggccttctaaaatcactgtccagctgctgcaagtgtgaggccagcaacccacggcagggatgcaggagggaagccatggctaagctgtgggcctggacaaaggccacagatggggttgaaaggtgagaagcggtaagctagaggagacagacggcgttgccattaaaaacaattcaacttcattttaatgttgctatgtaagttcacaataaaatccctggaagttcaaattggaaagagcagtttggggtcatgggctcaacaatataaaggcagattcagtgaggggtaagggtagtggctctgggggcagactgacctagatttgaatgccagttgtaccagactcaagacaccttgggtaagtggttttatgaagtacctcagttcttcatcagtagaaagagtgctaacacctccataagacttttgtatggattgagtaagataatgcatgttaaaccacttgtatagtttctggctaactgtaaacaagatgttctagaagttctagttatctttttttttttttttttttttttttttttaagagtcaggttctcactgtgccaccaaggttgtagtgccgtggtgtaatcatggctcattgcagccttgaacttctgggctcaagtgatcctcccacctcaacctcctgagtagctgggaatacaggcatgcaccaccatgcctaattttttagagatggggtcttgctatattgcccagtctggcctcaagtaatcctcctgcctcagctttctgaattgctgggattatcggcatgagccactgtgcccagctaagctgtgac

SEQ ID NO: 340620 - DNA, 1000 bp, Homo Sapiens
tttttttttttttttttttttttttttttttttttttccacagaccaaagtattttattacatatatagctgagcatgtaattcataattgtataatatagaaaataaacttcttggtattggcctcagcatttaataatgaaaaactagtgacaaacatctttagaaaaaaataataaaatagtccttcagtattaaaatttcctagtaaaaagcattagatcaaagttaagaatatgacatgttaatgcatagatgacttaggcataaataaaatgaatcaaatcccagctcttatagtaaatcaaaataggtgaaatctgcaggttcacagtttgtcataggtcaattgcaaaaacaatgcatcattcatatttttcatcattctgaggtttttaatgatacaacatttaaaataatgcatacccaggatataagcaatgtgctgcatacttaccaggtgatttttatgccactttgctgaatgcaggattaatatatttgggctttttattgcttgagtagaaagtgctcattacttattttatgtttataatatagaaaattaaaaaaacaatttttttaatggcatacatcacacggttgtagtggttgacttcctcaagatcgtcttctgtggttttggtgcagtgggaggaggcacagttgcaggtctgataggggggaagctgttactgtggcttattcccattcccccattttctagtgggaaaggagggagatggggtgtaggagggaggggagggccttggtgaggaatctttcccggtgggtggacaggttcactgtgtaagtggacctccctgttttttatgttataccgggtatcacagtcaggacaatagccatggtactgtactttttcattaaaccgaactcgttctcgaggccctgcctggggacatctgtctttttcaggtctatgcatcagaagctggactggagccttgtccaagttactgttgggtatgcagcagat

SEQ ID NO: 340621 - DNA, 1000 bp, Homo Sapiens
ttttaatgttcaaaacacatttatttactaaatcacctgacactgacatctaagataatttcaacaaataaaatgtttaagaaaaattgtggtatacatcatatttgtctctagaaaaaagtcttatttacaagttaaggaacaaagatatttcttttaattaaaaacacattaattatgcagtgctaccataataaaagtgaatctcccaagaacagctcaagtatcttgtgaagtattaagaggtgaactgttttttttttcaatcatattcagaaaatcttatatgtttactcgcttgttgagtctttgccagtctaatcttttcagctttggtgattaacttttcagtgcctcttttcttttcccgaggctgattaagttttgcctgtctatcaaccaaaatcttctgccaatacctttgttcgtgatcaccagaaaggatctcgagtttccagcagtgttccttgttaatttctgtataggcatttattactgcttgagcatcctcaggagtcttaaatctagcatggcattctgtatccccttctagcaaatcaacataaagaacttctgagattgctgccaaagtatcccggacttgtttcctgccaggtagaggctctgtgctaatgatcttcacaatcactccactcacgaactgtggtcctgttgcattaactttctcctgggtgcgacactcttccctgttggctgttttttcatttttcattccagtgttttgaggtactccactgtctgtttccatttctgactctgattttatttgggatattgttttttttaaagaagccatgctagctttttgtagcgctaaatactcttttttcaaatccatccattcgctctttgatagcactcttaatggtataacttcttctcccattttatgtctctctttatgttttttcttatgtttcctttttgttttcaagagagagctatcttttagatctccagtatccttttcctcttcagt

SEQ ID NO: 340622 - DNA, 1000 bp, Homo Sapiens; identical to SEQ ID NO: 159591

SEQ ID NO: 340623 - DNA, 1000 bp, Homo Sapiens; identical to SEQ ID NO: 246519

SEQ ID NO: 340624 - DNA, 1000 bp, Homo Sapiens; identical to SEQ ID NO: 161066

SEQ ID NO: 340625 - DNA, 1000 bp, Homo Sapiens
ttttttttttttttttttttttttttttttttttttttttttttttttttttttttttttttttttttttttttttttttccctaacaccaaaagtttatttacaattgaagttaaggaatatttttaatgcatgctgagaaaacagtaatactccaaacttacaggttacttactatctgataaggaatacaagatgatgccgagaaaggcttgggcaaacacaactattggaaccaggttaccagtacatttaaacactattagaaccttgttatcagaaaacttacatatcacctacttttatgtaacaccgacttcatgaacaattcatcttctaactcctcaatggctatttaagttaatagcattcaaggttaaacattaagactagggagtagagaagaaatacagaagcaataagcatcacaacatttcagagcctacatatatgaatacaacattaattaggaaacttttaatttttgtgtgaaacaatattcatcaatgtttagcgcatgagaagacactgctttggtccatccactctttccagcttttcaaagtgtttcctggcattgcggatgttgatcagagtagctgcagaaggaatggacggatcagacatcacaaccatcacataagtgttggatgtaaagatgtcaatgaaagcagcgaagttagagttcctgacttccatactctggaaagaggcagccagcttgctgcagctcagcttgaactgcttaataatgttgcttattttctcaaatctatgggcatcacgctgctctttacactgatagtgagaaattaccagaaaagtagctctctcaaaaagaagtacttcatcagcttcgataatttcagcaaaattccttaggttcatttccagctgctgaacattgggaatcagctgataaactatgctggaccaagccttatagagggtttcatcccagatagatgttcggaaacaagaacattccaatgggcgagac

SEQ ID NO: 340626 - DNA, 929 bp, Homo Sapiens
tttatggcatttgtttctttattgaaaatatttgtcttcttgcattagaacacaagcattgtggatggcagagacttgactgttcacatctgtatctgctggaatacttattaaatggatgagtaactccttaggccagtgtcagcattgctgtcatcccaggacctacctttggtcacatacaagtagaagaagtcacagtagaagatggtttgtactactccagacacgactgcaatttggtcatagaaattctcagtctggtaccgcctgatccagttagccaggtagagtgcccggtacagacccagaaagaacaggtagtgagtagttatggtctcagcctctccagtcttgctgatcatgaagagctggggcaggatagccactgattccagatagatagagaaagtccagaggatctccagcagagtgaaactgtagttttcaaggaaggaaaggccaatgactgggaccagaagaaactccaggcggaatgtgtcattctcactgtcaaaagttttacggaatttcccatatatcatgtacactgtaacataggcacagaggagaaaaaccaccttcattactgtgttgtagatggagatgaagttggtgaacaggtccaggtacctggtggtgaagacgagagcaaacaggatctggctcttcccagagatgcccttgcagcacttggacctccagatcttccccagcagcaagatcatggccaggaggtggctcaggtcgccgaggattcggaacacgttcatggtccagccagtcagtcgtgcgcccgcgcccagcaaacttctaggaaactttctggcgggcagggcggctgccacgtctccggccccggtctctaggtgccccagagccctgcctgcgcctcacagctccgcgatcgcacccgcgcgccgccgccc

SEQ ID NO: 340627 - DNA, 1000 bp, Homo Sapiens
ttttttgctcggttacatttcaaatttatttccaatcgttctgagctggatcaatggcagacaaaggtaccttttagctctggcacctgctgttccccccaaatgtcaaggactgacatttgatgccattatccccagtcagcatacagatgacttatttccttgcttccccagcccccgggtaccccagcaccccctcaccctcaacaaggactttcctgccagtgagctgatgttgtcctgcactgcccagggggccccatgtgcccagattttctcccacctccgtggagcaaaaggtggcctctggggtggccatcgcctccctgggtccctgggagtggcctcttgtagcgcgagtcctcctccgttcctccctgggcaggcacctagtgtttccaggtggctatctcgggaagaatcaagtgctctctctctctgtctggtggtatcagcaggggtgctgggcgatggggtgtatttttcctgatggagatgggggaggcattcagggaagtgaagtctgttgtccctcaaataaagtactcctttctgctgctatcaccagcatcttggagggcagggtctccctgcagggctgcatctgcactctcagcaaactccgtgcccttggcctcattggtgtggtacgtgcccttgtgccggtacatgtagcgcagcatgacgaagaggagggagactaggacgatggccacagcagcaatcacacctgcaatgacgacaatgtccattatggtgggggtggaggtctccattctgccatccggccatccagacatccctggatcaggctcgaggctgagaggccacgccgtgctgttggggcttctcgtcgaccacattcctgggcgtcagcccgggcagagaccgcggggactggccaggccgggccaggccgggccgggggagggtcgcgctcccgggctcctgaccctcggcggcgagaggaagcggcacctgggtcacactcctcccgcgc

SEQ ID NO: 340628 - DNA, 1000 bp, Homo Sapiens; identical to SEQ ID NO: 159592

SEQ ID NO: 340629 - DNA, 1000 bp, Homo Sapiens
tttttttttttttttttttttttttgatcctttttaagaacctgttctaaaacactgcttcttaaagttcaatgagcatacaaatcacctgaggattttgttaaactgcagattgatttagtaaatctggggcagggcctaaagttttgcatttctttttttttcttttttttgacccaggatccaaagcagtagagattttgcatttctaaaaaagttcccgggtgatgctgatggttctttaaggttctaaagggtgttaaattagccatgactcgaattagcagaaaaagggatgaaccaactgtacacataatccaaaagcccaggggtagacctcaggcatggctggatccagagggccacataatgttatcaggaaatatatttggccatttctcaggttggacttcctttgtgttaatttcattcccaagcaggctctccccaggtggtggcaaagatgatcgccattagctccaggcttacatcctaccagctcaacaggagactcattctcaaagtgctagtaagctggcttgcatcacatgaccaattactgtggccaggggagagactactttgactggccaggcctgggtcatgtgaccatctctggagccaggggatggatgagtgactaggggagggtcatccacgtccttggtccagcagtggtcacagaacccatagggaatggaggagaggctggagggaagctggggttccagttcttcaccttgtgaatcccctctcccgataggggggccttctcggaggtgatcctggcagaagataagaggacgcagaagctggtggccatcaaatgcattgccaaggaggccctccaagtctagaggaagaagtctgtaattcttcaggaggcatctgatccagccgcttgggcccagccagcataaggtccccacaggctccggaaaaagtttcccagttccttgttggtctgggggctcggtcccttcgcctgggacgtggtagg

SEQ ID NO: 340630 - DNA, 1000 bp, Homo Sapiens
tcacgttttacatgtacagagtttatttgttgtttttacttaaaaagatacccaactgaaatattactaatgattaaaaacaaattcagagttaattacaaattcagttgaaacaaaatttcagtttggattaaatttacactgtgaattacaatgaagtgtcactcaattgcaaaatgatttccattcatacagcattttgtttttcataaattttgacctctgaccaaagaaaacacagctttttgggtaacattcatgaaaacattgaagcctataatataaatttttattaccactttcaatagtcattaatataaaaagttaacaaatttaaacaacaaagtttaagctggggagagccccctcggggggcatcggtcaagctgctgaaccccctgctcaccgccagcagcaggtgcaacctgggagtgcgtgaatgcgtccacccacaggaggagcgctcctcatgctctgacagttctgcgacaagcaccagtttcaaatcaaacctagtataacaagtactccataaaacgtgtgctaaggcaaagaaataagcacatttggataatacaaatatccagaaacaatggaaaagaaaggcttctattagagaacagaaggcttagcatatatgagtgcgcaatgatcctgatagctacggatactgtttttatttacagtggcaaaaactttattactacagaaggtcactgacagacaatctactggctggttaattgtttcaaatttgattctctatcaagcaaaaatatcacacaacctgatcaacacacacacaaacgcttcagaaatcacttaactatcaagatggagcagactatgagagctatttataaaacacgaatatttgcatggaactgcttaatatcagaaaattccaagaactgtcaaaggcagcatttgaaaatagttctgacaccttaagatggaattaccatccagaaagccactactttgaaaggagatctgagct

SEQ ID NO: 340631 - DNA, 1000 bp, Homo Sapiens; identical to SEQ ID NO: 159593

SEQ ID NO: 340632 - DNA, 1000 bp, Homo Sapiens
tttttttttttttttttcacctggcagttgagtcagattgtaggaaaattaacccagatgggtctacatttttcttcaagttcaaaccacatggtttcctagtcagaaagtctcatggactttcttcctaaggtgttctatgatcagaccacctcctaaatgtggcttttacccattacaggctacagttgaatcaggcaggagcagctgctggagagcacccagccgacagacctgcattccagaagcagcttggagaaactgggaagacatttttgacccattcttgggtttttactgtaaggttagcagttacatgatgccaccagtccaagacttagatcatgagagaaggcctttttaaaagtttaccagggaacatcgaggctcataaagaactcttttgtcttcacccatctctcctcctcccactcccatccactttctcatagctcaaaaaccactcattggtaagcacagtcaaacccaggcctgtaatcacctctgaaacaactactcctaagcaagcaaaccccatggctggtagaccccgtgggtattttggcatcaacactgctcccctcccctcccatcccagtcactgcagtttagaattgcatgccaatttccttttctggcagggcctggacggcatggaagccagggacagcatgggccaggtgcgcagcagcagcagcgcagcattcctggcactgcaacaaactgagaatgtgtctcaagtgactttccagtctggcccttagtgcccaataaccagagtgtcagaagtagtgagactgaagctgtgtttgccagacacccaagtccatagccagctcggtactcctccattcactctctctgtctcccctaatggggtaatagatctctttctaagaaggatgaagatggcgtttgtccttggccttgtaggtatggacagagaggagggtagaaaaggagttggtgttgcatgtttctaaagcatctgagaaggtat

SEQ ID NO: 340633 - DNA, 1000 bp, Homo Sapiens; identical to SEQ ID NO: 159595

SEQ ID NO: 340634 - DNA, 1000 bp, Homo Sapiens; identical to SEQ ID NO: 159596

SEQ ID NO: 340635 - DNA, 1000 bp, Homo Sapiens
ttttttttttttttttttttttgtatttgtagaaaacctttaatgttccccaggctgagggagccctgtgagccagctaaaaacccccactgtgaagtccctgccatgtcccagcagtgtggagtggcatggggcttcatcctgactgtcagaggctgaagccactaccatctcctcgaatgcgactcccccagccagaactggcctgctcctggtcatccagggagggcagagagctgcgggtaccaggatgtcggcagccagggtgcaggtcccagcacgggggcccctgagacagcccattggaactgggaggctggcggttctcaatgaccaggtcactgctgtcatcgtcactatcaggctcagcaggcccaggccctgcagagggaggacctgtcaaacgcccagatgcccctcgcaccacgttattgcgctggttggcgggcttgacagtgacaatgaggttatggctgttggcaaccatcatgtccgtcacttggtccaaggtcttcccggctacttcaatgccattgacctcgaggatctcatcactgaccgccagcagccctgtactctcagccagacccccacgtaccaggcgggagatgaagattcctggaacccgctccaggccctggggagccacacgcacgctcatgccatctcggatgtagaagcccagggggcggtctgaaccatgcttgtgcagccgcacccgtcggtgggtctcaggcagtaggtccacgtctatgactgaggaaacctggcggaaatcttggggcaggctgattagcaagggtggccgggtgcgcaggggtgccactggccgcagcaagagccctttcttgcgccgctgcagagagttggaggcaaaagccaggccgctggagtcagcttctgcccgcttctgcaccagtaggcgcagtggcgggggcccgctggccagggcccggtgcaggctgtcgtcgttggtgaggggcagcaggtcgccatgagc

SEQ ID NO: 340636 - DNA, 1000 bp, Homo Sapiens
tgtggttctcacagagttagactttattagataaggggtttcggctaccctcaaagctctcaggactggggctagggtttaaggaaggcttatttaaatatgggaaataaaatacaaaagggccacacccgatgcaaaagactttgctggctttctggtcagacaagcctagagatgtgtattttcttagggcagtaaaacaaaacgttttcacaaggaggctaaatttctatcctgaagttcataaacatgtggcgctcggttaatggtaaaaatagacaatgtgtgaggcgggaccgctcctcctcatcctcccaagctcctctcctacccacctcccttccctccaaggaaacgcaaagttgccccgaggaggtgggcctgcctccacatcgcccccagggtcaggtatgttctcagcgtcccctaaaacacttgcccaagatcctgctccttcagggccttgatctctgcagtcagaacagaggggtgtgcacaggggagtttcaggggaggacaggggtggggggttccaaagaatttcagaggaagacattcgcccaccccaatcacaaactataagcagcgttgtacaaacagggagtattcccaccttcaggggctatgctatatgaaagcagccttctcttttaatataaaatcatatcaaccaaataaaacctgccaaagctacatcatttaaaatatgtacagtttcacacacaatattacaactttaaggaaaataaaacatacttttcaatatgatacaaagcatgcatctcaaagtcattactttaaaagagagcaacacaggtaaaattcaatgataaacttcacttcttggcagtactatagctggaatgagatctgtggcatgatcagcccaagatggatgcattgagtcttcatagactcattcgacaaaaacacccagaaagaaaggcttttgctaagaacacttcaaaaggtttagaacattgcaatgtaacttgcaccc

SEQ ID NO: 340637 - DNA, 1000 bp, Homo Sapiens
ttttttttttttttttttttttttttttttatgttggggattcattgaaagatttatttgaacaaagagttgtaaggttaaaacatgttcgagaatcgtttcctagtgtaatctaatttgacaaataaggaaacaagcttgtagaagttaagcgacttgttcaagtcaatccagtcaataatgccaaagctaaggatagaaatctatcttctagcccaatgttctttggataacacataccatgtccacaatttctcaatatagggagcaaagcagctttctagtcattacatctacttaatacagtttattcttacctattgtaaacctggcttcctatagaatatgcgttctttgcccagactgttatttcttaacatttgaagcattgtttcttacacttaaggaaaaatccaaaattagggacccctatagtttgctttaagttggttactggtagtaatcttaaattttataccagaactcctcactaggagaactcaaggtagtcaatgcttattctccatggctctgctctgtcctgtgaactatagtttctagatgtcacttgtggtaaatccagctacagatttccttccacccttactttaatcaaaatctatcaatccattccttctgggagaaaactttgtctgtaatgaaggttgaattttaaaactctggaaaagggtaccatagtcccagtctagaattacccatcaaacacatttgctatagtcctactatgtattcatttttagggggagaactgggattgatcagtatttataaggatagtatagtttaccttttaggtaggcaattctaaaggatccatcaataagaagctctaggattaaaaataaaatacctctatggaatacaaattaggattcttgggacagtctggcacaaaaaggcattcagggacgggaagcaaagacaggcaatgtttggcttgtaacaaacagaaaagccctatacaaaatgaagcagcgct

SEQ ID NO: 340638 - DNA, 1000 bp, Homo Sapiens
gaaaataaaagcaaatttatttagagtgttttacttttcatttgatctttgtgttccttcaagattaaatggtctttaggctacaaagataaataaaatataatacttgaaagtttgtgtccttatttgtatcttaaattgagattagtagtttcttcaacagcaaagtataaaggcatgaggcaaacaaataattaaattttcttctacaactactagataattacatgaaagccgatcttcatttttaaaactgaaattgcttcactgctttcatgagaattacatccatcttctttttgtcattgtcaatgtgtaaaatgcagttaacgtggtgaactagcttcagtataattgaaaatcccatcacttagcatcaattttcactggtggagtatcatcaaataatatttattgcatatctcattttgaagctcaaggccactgtaatcagagattcctgtaggtttcatttgacattataaacaactcttcatgaatattatttgataaggcactttaaatctttaaatgtataacaaagaaatactgtattgtaatgatgctttttaagcccaataactgttgaaatttctttggctacaaataaagaaaatatttgtttacatgtaattgttctagaaatgctattgtcttactaaaggtaatggttaattgctggataccaatgaacatgattacatttgccttctccaaaagaaacttgactgtcgtcattcactttaagatggttggaaccacttatcagtctagatggcatagagaaattgtatctataaaagtcataggaaggatgaaaggagcaactaagtgcttctggggtgatggagtttggcagaaaaatatttccaggtgactgtaatccatataacatttgattggtagaattaggtgcttgtagatactgatcactggagtcttcagatgaaccgctttttgaattggtgacccccagggaagataacataggcacttccat

SEQ ID NO: 340639 - DNA, 1000 bp, Homo Sapiens; identical to SEQ ID NO: 159599

SEQ ID NO: 340640 - DNA, 1000 bp, Homo Sapiens
tttttttttttttttttttttgtggaaaataactttattcatgactgtgtttatcacactatcttatggagaagagatgatcaataaatatttgctgaataaatgaatagcagttacaaaacacttgattcatatggaattaatgttggttctcaaagtgaaaaattacaaacagcactgatattcagccagtatacaagtctggtcacagcagttgtataatactgaaataccccctgccactgacctttggcccccagatgcctcccactgccactgctctccccactgggaacccctgaagttcccacaggctcataactaaagggctaatgtcttgcacagcagcgagcacccaggaccgagcagccacatggccgggtctgctggtgaaagcatccattctgactgatcaggacctgaggggcctcatggttacatattttgataatatccctaattataaataaggctcagttatatagtttgaaaacaatgcttctcctcattgcaaaatctcttagaagactccgtagatccaggaacggaaatggaaaatgacagcgtgtcaatctctgaaggttttgggcatttccattagcactccatcttcatgtaaaccagaagatatgcagtttcctgccagtggtagttaggatttccgtaggtacactggatgtcttcccaggacaccaagcaaatattggagtcattgaagcagaaccattttccatccacagcattccggatgtagacacagtaatgaccggagtctgccattcccacgtgcgcaatcacagcaaaaagctcatactgccctccagactgctcctcagcatcacaagactctcgcttcattggaaggatctggctgaaatccaagctctgggggaagtacagggagtggcagatctttctcgtctgtgaattcctgatggagaatcgcatgaggtggattgtcagggtctggggcaaatgggtcagcttcaagacctgtttc

SEQ ID NO: 340641 - DNA, 1000 bp, Homo Sapiens
ttcacacagttcagcttttattaaaattaaaggatgggaaattagaacatgattcctgttaaaataatacatttgaggaaatgtttcttcagctattgctgtaactgatcaagcatgtgacaagtgttcttttacaagatatacagtccctaacagccacgcagagaacaccagatcgaggatcttacctatgcaatatgttgtacggggtgtcagtgatcaagtctgactggctatgacaaccacagggacagagcacccacacagacatacacattcagtgtcttcagttttctttcaacgaaagcattttacacataatatgcaaattaaacaagaagtacaacaagggtcctctattgccactgaaaatgaggggaggggaggacgggggagcgaataatttacaatctcataaccaaacatggcactagggtgatttgatgctgcaaatgccacagtcctgtgcattcctgccatggctgatgctatatccatgagtcactgagtcccatgacgaaggctgcacaggggctatgaggctgtaattatccactacagaagaaatctcttccattcccaaatgctggaagtgctgctggctctcctgcttggtcagtagaaacacagcacagctgaacatgaggggcttaggactctaaatagtgcaaacgcttaaaaaaattacattctaacctccttgcttctccaggcaaacagagcctttaaaaactccaactaactggaatatgagtttgctcagcctcccaacttgatccagctaggtgcaaatggggagcatggaggcaatttaaatggcacctgtcccaacaataataataataataataaattttaaaaaccatgatgcaaatggcagataaatacacaaaacagagcctggagtagagacatagctcaagaagcaagttgtaagtgtagtgtgagcacctgcaaagcatatgcttaacacacagggatcatgaggattgacccctct

SEQ ID NO: 340642 - DNA, 1000 bp, Homo Sapiens
cccccactattctggaaatgtaaacaaaaatatttaagtataaaagccatttttgtacctttttcttcaaacacttttttaacacaacgttattaggtgtactttatgcttggtataacagaaattctctatgcttatctagctgttcagaggaattcagatttttcactaccaaatatcactggtaaagctaagctctttggaggataaaggcagcaaagaactgttcctgtgaaattcctgggtatctttcagggtgttattaaggggtagctgtccgttgagtagcgtcagaggcaggttacaataagtatggtggttgcctaaggaaggtactggcaaggtcgtggctggtatctcatgtttataacctctgcaacagtgcctgatttgcattgaatctgaagggtggaattcagggagatcagcctgagatgacaccagagtggctgaagtactggtcatggcaatagagggtataggctggagttctccaaaaagtccttgttctgcggagtccagaacatggcaccgaggtagcatttcttttttcttgatgggcatttcatatactaagtgcttccaaaacttagaatttaatttgctgcttttggatcccttccacttgatcagggacagaagtttgatgctacgctttagtgattccacttcctggcaattcactttcccttttaattctgtacactcaatcaaaatcactttgatttctccactgactagcatgttatggagtctgctttccagttcgaaaatactccatccccgtctgagaatatagtctggagttagcacgataataagtcttctgctttgttcaacatatcttgtgagatcttccatgtatgttccacttggaatcaggtctctttctgggatgaagagtttatatccatagtgtttttccaggacatctggcagtacttcaagagcaaactgctcttcttcaggattgtcacagtctaaagtatcttggtccact

SEQ ID NO: 340643 - DNA, 1000 bp, Homo Sapiens
tatgtataaatataaagtttatttagcatagtgtttagaaaaataagttcacatcatttcagaaaacaaataaaacacttaattgtccaggcataaacccccattacagtacgacatacatacttcagatctctttggttgggtaattaagcacagaaatgttctgggacatgctctgtgtgccatcacctaacagtgcagtaaagactctgttaccccaccccatgatatacattctgtatagagtttctctttgtgtaaggcacagtaaaaccatattgagtatataattggttgcctctaaacatacagtacatgcaacaaaataatatttttgagaactctgaaagccaaaagagtcacatgctatacaattttgattaataaaatgtatggtggtaaattaacataaaatgtatcaattagatacaaagtaactgctaggctctattatctaagttttacaaagagtttaaaatatcttttgtgaaatgtaactatttccccatagttttcctgaattatttttattatgagatgatctgtcaaaacattttaaagaatgaagaacttgtggctatgtactaaagcacacttgtctagcatgtagcagggcaggctgccacacatgcccaataatccaacttttaacatgcaagatacaagggcatacacagagagatttaaggtcagtgtgcaatttaactatggatttttacctatggctataatatctacctgcctttcataacacaagaaaggcactgaaacgtgtacaatttaaaaagtcttttcattactataaatatacatgagatataaagcagtacaacacaggtgctcttgcttgattgaggaacaaatgcaccttctctttaaacaatagactgtcctttactagatttaactaagagctaaatgccaaattctggctgatagagtgcatagataggcttacaccaaaaatcccacagccagcagcatgggttgggttttgcag

SEQ ID NO: 340644 - DNA, 1000 bp, Homo Sapiens
gaattaaaatacaatattttatttttgtcacctaaaaaacaagcaacccagaattaagatatacgtaagtttctcaaatttatcctaataaaattttgaatatttatacaatttctacagaaacatacagtgtatcaaaatctgcataaatcaaatttataaaatgtgtagaaatgcatagtgatattaccaacttacaaagcaaggatatgggaattatttccaaagcagcctacagtagaaaatagtcattatggcagcagcttctgatgtttttgtttggtaggttttctgatttcaatatatagaatcatattcatagagtatcttcttttaacgaattgcacaaagtacccatttaaaatttacatgcacagttcattgccacctttcttaggcctatgcctagttaataaggttataatctactcaacatggaaaatggagcctatttgcaaacacacaagtaattaaagtaccaattctctcttagtttctttttttatagttggtttattttgcaattataaatgttaaacatccctagagatgaaagttaaaatggttgatcacagatcagtagcaaaatacaaattgacaattcaaaattataaataaaactctgttgaggatgtttaactttgagtctcccaaatttaagagctaagcttggaagaaacaaatttataggttatatttccctcttaaattaaaaaacaaacttcctctggcagtagtttgtgaattcctttcattgtaatgataccatgattacaggatcaaaaatgcttaacttacttgccattctgctcacatcatcacagttgtttttttttttaagcactcaatgtaggcattttaatcttctggataacagagtatcttttgagaaattaaaatcgaattgaccatttgcaatatttggttttcctaataggtactgtcttagtaaatgtttaaatccaaacaaatcttctgttcaccggaaaaatactaataa

SEQ ID NO: 340645 - DNA, 1000 bp, Homo Sapiens
tttttaaaagtaattacaaattaagaatttatttataagttttcatctttttagaaataaaaaggcttaaaaaacaaaatggttgcaaaaatggttaagtagttttgttatatcctaattgcttaggtgtgctctgtaaattccaaataagtaaaataatataaaaatacattttcatatctttatagaacaaaaacaaaacattaaatgcttttggattttctttactcctcccacagatgagttcacaaatacaaaaactggtgtacatttatactcaagtacaaatctccaacagccaagtaattatagtttgttctgttatgtgcaaagtagattatttcatatttacttggtatggaaagcagagtacaggctcaatggacaataatcattaaacacagattatgtttaagaaaatgctgttgtaaaaatgtacaatagtacatacaattttggtaattatgcacttcttttaaagtaaatacagcttttagatataaatctttcaaaggttttctttgaagagctgtgaggtgactatttcagatttgatgaacagtaatttgtcagtaaacttctcaaaaaaccaatccaagaaagaattgttttctttttccctccatgtggtcggtttcattcttaaggaaggtctgatgcagtaagaagatgcatttcacaaacctttacacaagtttgtgaactgtcaactaaagacaccacctctgatgtggatggtttcattcaatccatgttcgaccagctttatatcttctagatcgtctttaatgatgctaatcaaatggctaaggccttcctgttgttgtttcaaatgctgcttgatttctcgtaacagatctgcatctatgtaatacctttcttcagatctgactgctccaaaatgattctgcatcctgatttgagacatcaattcatttagtcggcccttgaactgagtaggtgcatttagttcaccctgaatcgtatccagctgaactcg

SEQ ID NO: 340646 - DNA, 1000 bp, Homo Sapiens
gcaagagaaacggcacttgtgatttttatccattttccttctagtctttgaatttagaaagcacaagtctcttgccacaagttcaggtcaaatgactgcagcattttgagtgaaaccaataaaatctaagttcatggattgttccttttgttttgttttctcaattgctcattctcaggggtccatatacaaggccatccatccctggagactaagaacatggctcactgcgagagctaaggagttttctggacaagaatggagggaggactccccacctccaacaggcagttctataaataacggctgctccatggtggcccctgaaatgcagcatttcagcagccttgaaatgacaaagcctggagagtaggagggcagtggcgacgttgctgggaacaacagctgggactcccaggagctgaaggctgaagccataggtagcccagaaaccgaggaatccagaagccctgactaaacccactggggccatccgacccagtcaggcggcaaggggatgggcgggcatggagcacagatggccctggggtaatcctagtgcctctggttcagggacctccaagcttgactcagctgttctccttaatttcatcatcccatggtgcactgggcatgcccgagggcttctgggagcacaggtagggcaagggcaatttgggagggctgaagaagcctgaatcatagctgaaccagcaaatgggggtgggggaagatgaaggctgagttctccagttcccttcattggcttccaggtgtgcaggtggcttgggattgaggactcagatcttctcaggccccgagggcatcgatgccagcagggctgagcaccagtgcctgaaggatgtcggagagggagaccacgcccaagagatgctgggtctcgtccactagcaccagcctgtgtacctgctcccgagcaatcctgtcgatcacttcccccaagctctcgtggggctggcaggaaaggactccctccaga

SEQ ID NO: 340647 - DNA, 1000 bp, Homo Sapiens
tttttttttttttttttccaaggcacttcctttatttagtgaccttaataaccaaaggaagagaaagagcaagcttgagatgaaatacatcttcgaaattctccccacccctcccgggcttttttctctaagattcaaccgctagcaagtgttctgttggccaagaaaagccgtttccaataaaaaaaaaaatctgtgaattcagtcaccccaaatgagagaggggttggcgagatcccaggcgcagtggagtccacaggagtcacaaaaaaaaagaacaaagtgatagattaggggaacaaggacagggttgccacaactggcgggctggtgagaaaggagggtgcgggagttccgagagagagcgtcgggggaggtttcccgagggctcccaggtctcttgtttcggagcacgaaggccggcccgggcacttgagggccgagcgcagcaggcagcctctgcggagatcagggccgcagcttcagtgcctgctggtgccagccccagagtgcctgcttggcccctgctgccccgcaggctccagcgccttccgacggcggtgactgcctcgttgaacggttaggactgctggacgaggcgccggcgctgggaggttttgcgcaggagcctcctgaagtcgtaggggttggctgctggctctctctcctcctccttctcggggctctccgccgcccagcacctttcattagccttaatacattgattctggagttcttgctgtggtcttcgttctcttaaactagggctatgttcctttggtccagaacgactgggcaaaaattccttataatagaaatcttccaaatctaataattttccctgactgtctttccttggtcttcgtttttcttcttggattgacttatgaagtagataatagtatgtggagtcttcagggttatttaatgttttgggtttccggggtcgtcttgggggtctcaatatttttggctcctctcctttacagacacctgagag

SEQ ID NO: 340648 - DNA, 1000 bp, Homo Sapiens
tttttttttttttttgacagtcggtcacttttattctattgattattctcctgtgtttataatgcgggcggcagggtgggggtttctttaaaatgcttctcctgagcctaaagagcctccccacccagcccctgtctgagggaaggggcagagcatacacgcccccctggcatctctggagaggaagaaggatggggtgggcagaaggggctgcccccaaacggctccccaggctggcacttctgggcctctgccccactcagtccctgttgacctcccccaccccccgcgaaagaggaaccaaaaccagaaaagaacaaagcatcctccgccccggacccttggggctgggtctcccccagccctgccactttcctaccaacagcctcctctcctctctgggaatcttgtcccttcttccccatccccttagcaccggcctctgccctcgtgggcacctctgtcccaactgcctggctttccgcaccacctgggggtgccctgaggttcatccttcctgcctgttgtctagaaggcccggggcactcactgagcgccctccgctggctatggcaccatgtgtcagccctgcctcgagacaggacactgtcctcggggtgtccacagcctcccactgggcctgctcccacagctcctcaacagcctgcctaagcccggtggcagctcgggcctccctctcccgggccctcaatcttgcctccccgggaagggcggcccagtgccccatcaggagcaggttggggaggtgacctggcgggcccctcacaagtacattttcatggcctcgtgcgtcgtggggcagtagcgggcatgcagctgggccagcagtgccctggacgtggcctcgaaccgcgtgccctggctcttcttgttccacacgtggacagcataggtggcactgagcagccgcggcagctcctcggggttgatgtcctcaaagtacttcttccagtcctgccaggggatggggtagaaggcc

SEQ ID NO: 340649 - DNA, 1000 bp, Homo Sapiens; identical to SEQ ID NO: 246522

SEQ ID NO: 340650 - DNA, 1000 bp, Homo Sapiens; identical to SEQ ID NO: 157482

SEQ ID NO: 340651 - DNA, 1000 bp, Homo Sapiens; identical to SEQ ID NO: 159601

SEQ ID NO: 340652 - DNA, 1000 bp, Homo Sapiens
ttttttttttttttttccgcacttgatccatttttatttcaaaatgtctacaaagttttaattctccattatacaggtaatttttcaaaatctagacattattcaaatgtaagccaaagtccttacacaaatagaatacactcaaagatcaaaaatatacatatctttcagcaaactttgttacataaataagaaaaatatatacagctggtgttttcaaagtacaattatcttaacactgcaaacatgtatagaaggaactaaaataaaaagaaacactacagcaaaggttaaaggaacaacaaattcattttacaacatcatcaattataaagatacatatatcaaatcttaggggaatatatacttcacactgggatcttaacttttacttcactttgtttatttttttagaatactctctggataggtgaaaatctatccatgacacctattacgaaagttacatgtgaagaattcaataatctaggtctttgtactctgggatagatgtaaaaagaattctttaaaagttaaatttgtataagcctatgttaacaatttccaagtaaactgttctattggaaattaaatatttcaaagtagaaaacgttaggaaaaacttcactcaaaaaattttaacacagtaagcaataaagaaaaattatgccaatgtttccttagataaaggcaactcagctaggtttatgttttaccccagaaattctccttccttttcttagctcgtgccagagtttgaaaagcccggagactagaagctgcagagcgagcagaaatctcagacaatctgtcctcatcttcatcattaaaggcttcatgttgaggtaactgcaaattgttcatccttgcttttcccacattgtgctgaaactctggatctctaagagagccctgaattcgtcgagagggatgccagtaggatggaacatgtggtggagaaggcaactgtccagggggatttgttgggtattttggaatt

SEQ ID NO: 340653 - DNA, 1000 bp, Homo Sapiens; identical to SEQ ID NO: 246523

SEQ ID NO: 340654 - DNA, 1000 bp, Homo Sapiens
gtaagccaaatcaagtcattttttaatggcacataagctagcaagtatttacattattaaatggttggagaaaacagtatttcatgacacatgaaaattacacaaaactcaagtttcagtttgcagaaataaagctctattgaaacacagccacctgcattccttcatctagtaattacctggctgctttcgtgctacaacagctgagttcagcagcagcaacagagactataaaagcccacaaagcttgaactatttactgcatgggcctttccagaaaaaaatttgatgacacctggtatagggacagagaatagcttgacggttgccacggtaaaaggtggggaaggagctgaccacagggaatttactggagggtgatatagctgttaattgtggtggtggtagtgacttgactgcatttgccaaaactcagaactgtacaccaaaaagtagattttaaaatattttattttaaaataaatgtcaatgaacaagagggacagaaaacaccagtggttgctagggggcaggagaagagaggaacagaggaacagaggggaatgtcctgggtggcagaactgtcctatcgattggttacaaaaccatgcatttgtcaaaattcacagactagacactaaaaagggtgattttactgaatgtaaattataaactttttcatttttaaaaaagagataatgaaggccaggcatggtggctcacgcctgtaatcccggcggcactttgggaggctgaggcaggtggatcagttgaggttaggagtttgagacaagcctggccaacatggtgaaccccgtctctactaaaaaatacaaaaataggttgggcatggtggcacacgcctgtaatcccagctactcaggaggatgaggcaggagaatcacttgaacctgggaggcggaggttgcagtgagctgagacagcgccaccgcaatccagcctgggcaactgagtgagaatctgtctttaaaaaaaaaaa

SEQ ID NO: 340655 - DNA, 1000 bp, Homo Sapiens
tttttttttttttttctaatccaaaatatatttatctttggaaagcaaggtaaccgttgtgaaaacattgtattaagagaataaaatgcagtgacctgaaatatgggtgaacatattcacacatgataatgtaaataaatatacagaaccactcaaatacacatttataaagagaatggcaaagtacctaaaatagcattttcacatataaaatttttatattaaaatattgctcataataaataagaggtgatatgaattccatttccctcttaaaaattatctctagtagtttacactaaggagttaatctgttgttttgacaggtgaattaaaatgtttaataaaatgacactgtaacagtatatttaagtagtcacatgtgataaaatttgtttagtaattctgggaaaaaagagtccccaaatgagccaaaatgattagccctagaagactagagtataatgatctgctttatttgacaaagatgttaaatactgccttatgtttggcaaatttaatgaccataaaaaaacggaccacaactttcttcaaacttcttcaaagtttgcatgtctgggagaccaataaagggcagggcatacgaagtaagtctgtttaggtcagttgtttatgggtaggtgcgacttcattcctgttcgccctacttgcagacatggtaacttagaacagttcttcagaagctgttcgatggcaacgtggcggacatggagctgtgaggccaaagaatctttttcttgcacttggtgagttaactcttcaaaaacctggatttgctgtaggagctttgcattcagttgctctacctcaccaagagtcatcgaattcaattcctctctgctgtaatgtggatgctgggtctggacattagcctctggactagagattgtctcttcttttttctgtgcctggttgtgactatgaggccacaatacactgttacgacataaagtggcacctgaatcttgtaacatagaaa

SEQ ID NO: 340656 - DNA, 1000 bp, Homo Sapiens
gcaataaataaaacttttattcaaacaagtaactgcagtacagggcacaattcagattttttaaaaaaaaggaaaggaaacaggaaaaaaatatgttcagcactttacatcttcatacaagtgttgctgttttgtgtctacattcatccattgagcatggaatcccctggatttgaaatctttagcggagcgggaacgccggcgcggaagggtctctacacagggcccggtccgcccttgcgctctccttaatgtcacgcggtccgcgtcttgagctgcttcccacacaaacactaccagccacgtcccaggccacggggaggtgtgtgggaggcttttactaaaccacatcagataaaggagcgccgcagcttcccaggggctcccaccagcgggcaggctgagccgggctgtgccctgcactcaattccccagagttcagtgtgggaagagacaataccagtagccactgagtccactgtgtttgtttctaaagtcaccaagacacacaaaaagacgagagcgtttaggaagaaccgggcaggaaccgcctgtttcccccaggtggggggcgtgggtgcggcgtgcccagagctgccctcccccagccgggcccggcccgcacaccctgcccagagcagccaggtagcccggggcagcatcgatgccctcacaaggctggtcaaaggaatgtgggggtggggtggtctctggaggtctttggaatgtccgtgtgcggccagctgggcagcgcctgcccccgaccttgctcccgccagtgcccgacgggaggtgaggccactgtgccgcgctgctctatgtacacctggcccgcagtgtccagagggagaagccctcaggtgcccgggcccggcctccctcacaggagcggccggcttcctcaggaggcccctcgagcttggcacgagccccctttctctgtgcacccctccacaggggccggggcggccagggaccccagcaccttccctgtccggac

SEQ ID NO: 340657 - DNA, 1000 bp, Homo Sapiens
attgttgccaaagagatgtaaagtttattgttgcttcgcagggggatttgttttgtgttttgtttgaggcttagaacgctggtgcaatgttttcttgttccttgttttttaagagaaatgaagctaagaaaaaagaaacctttgtgtgttgtcttctgaggtctgccgatgataaagtcctggacaggaggggctgtgccaggaacccgatgccagcccttcctggggccaggaggaagctgcccctctcctctcctccccactgtcctcggcacaccccggtggaggggatggtgttctggccctactgtgtgtgggggcgcaggggtagcgccctgcaggtctcccttcctgcaggccgagttggcctggtagggacgggtgaagaatggacctacaggcctctccaggacaacctcctccctgcccttctgagggcaatgtctgtctgtccctgggcccagggtggaaggcggaggcaggagagttgagcacagctgggcttccctgcaccctccgctggccagctctcaactgccctcctggcccgccaactctacagcttcctgtccccggggtgtgagtggctgtaggcgggagtgagctctcgctggagacacctccccagccaggtaagggctgttgtcaccagtgcagctcaccacactgtatttcacctaacaaacaaacaaacagtatggaagagcacaaatctgctaatgaagttttaaacccccaattccagcagagctccccagtgcctgcaggagtcagcggaggtgggtgggggaggtccacccaggagtcctggggcagaccccggaagcggggaagcccccacctgccagcgggcactctgctggtgaccccgcatagcacctgacagctggcctttggcgcaggagcgagctgggaggccctggcagcaaggttctggatgggaggttgggtaaggaggagggctgggggctgcccgaggcagggaggggcctggggagcc

SEQ ID NO: 340658 - DNA, 1000 bp, Homo Sapiens
tttttttttttttagtattaccatttattgatgacaaacacttaagttttacttacattccatggggagaaaaattccagcgtaaacaatgaatggaagcagtacttaactcgcagggctaccaggttttccatacggaccacacgcagagcctcagtgcacacacttctgtgtacagtaacacaacatcaaaagcaacacagctgtatacagaaacgtaggtcattcttttcagccctaatggagatgtaattaacagtatcgagcactctggaaaatcactctgcaggtttatatggactacatggagatcatatcctgtagtgtagtgaaagctaagtcctcaagagccatatgtatagatacacaatgttttttaataatctttaaaacagagatcaaagttcatttaagtcctgtttgcattaacaaaaataaaaatgaaataaaaatggaaccaaatgatcatctaaagtttaaaattcctaaattgtccaatttatacaactgtgggagacttattcaaggtttttgaaagtccaggactgtttcagctgaaccagagggcacacaatttgcatcactgaaactgtcctgggttagtcaatgaaataaaaatgtctaaccacatacacatggatatgatctttgtcggttagattattgataaagtcagtctcagacaagtttccaaactgtgctatttaactagatacaattgagaaattctcaaatgaaaattttatatagtgtcatatcaatcaaaagaaaataatgaaactaagaatacagatcactgttggaagagaaagcagtggtgatggtgtgggtactgcaggaggtggtggggccgtggcacactagaaaagttgggtcacgctgagtaggaagcatttgattttctctggtgcttttagctctggggccggtcaaaggcctctctctggcatggctgtccagggtttgtcccaatgtgtctgagtgagccagcttgagaagg

SEQ ID NO: 340659 - DNA, 1000 bp, Homo Sapiens; identical to SEQ ID NO: 159602

SEQ ID NO: 340660 - DNA, 1000 bp, Homo Sapiens
gaccaatcgactgttttttattaagtgttcattgcatcgagacagttgggtgttgaggatggaatgcaagaggtgtagggaaacatgttttctgtctcccagaaatatgaaaggagatgggctgaaaacattaaatcaaaactaataatataataagagcttcagttctttgttacaaaatgtacgtgcttcaaaaaggcatatttttttaagactgagtctcactctcacccagactggagtgcagtggtgcaatctcagctcacttcaacatccgcctcccaggttcaagtgattctcctgcctcagcctcctgtgtagtgagattacaggcgagtccaccatgcctagctaatttgtgtatttttagtagagatggggtttcaaccatgtaggccaggcttgtcttgaactcctgacctcaggcgatccacccggctcagcctcccaaactgctaggattacaggcgtgagccactgtgcctgatcaaaaaaggcataattaaactatgaatattctttctaaacaatgggcaaagtcacagtggattaactttcacctatgttaataatcaaattctagttctgacaaaggccccacgccaacagtgattacaatgaccaaaaatatttacttgttggttctcattcagttctatagatttctccttaatgtgcaggaaagcatctgataatacttttgtaaagtggtctttattgatttaacataaaacttatagaatactccagagaaaacatgtgatataaatgtcattgttagagccatcaaaataattcttattttcattaataatttgtggaggaaattattgagaaatgttgattctcttatcagagctcaggaggagttaatggtgctaactgggggtggtggaaatagtcccgtgagaagcagaggagccaaatctacctcctcacactgatttggtcacctcctttatattcccaagtataacactctacacagacaatgagagag

SEQ ID NO: 340661 - DNA, 1000 bp, Homo Sapiens
caagagaatggattgtctaatttaggagccaacaaatgctcattaatcaatgccccacggaagaacatgagaagacagtgttggcatttaaaacaataactgtggccattaccaggccccaggatggacagatagggacggacagggatacccagcatttctctgagagctggtgcaagaggattaatcctgaagggctcatttctgattctcctctgctggacaaagaatgactgagttggaacctcagagggtgcaagtcaaggtgccaagagtaagatgccagtttcggtctgtaagcaagtgtttctgggggtgagggaaggtcgggggaaacctgaccactggacaggagtgaggcaggtacagtgcattgctccaggtgtcatgcaaagctagaaagtcagcatttcctctgttgttttgatcctccttatacaacccaaagccaacagaggatttcaacttcccaaatttctgccctgagcattaaacaactttttcctatgctaaatttggttttagttttgaagtgcctgagatgcacaattcaaaggggtcaagttcctggcctcttatgttgatgaaaccatccccaatcctcagcttacatggcttgcccctatgcctaccacctcttatagctcttccatccatcattcaagtggttccatgaagaaagctcagggttaatgtttggggtagtacaagctaagccatcagcccttgggaacaaagattactttctgttggaggggtcaatttggctagtcactttgacgagcagggcagggacccaaagtggaaagagaagagatttttaaatgtagagatagctccatccacaggagattggattcctgggaagaaatggaccttactcaggggaagccttgacctctgatttagtctgagcctgtgagagctcacggcccatttctggccttcttgccctaggctcagattggtggacagcatccaaacaaaggcagcccacaac

SEQ ID NO: 340662 - DNA, 1000 bp, Homo Sapiens; identical to SEQ ID NO: 159603

SEQ ID NO: 340663 - DNA, 847 bp, Homo Sapiens
ttttttttttttttttttcacggcatgtgcttttattaacctggctgtttacaggagctgaagctcttgggtttgcggtgatgactcttgaacttctttttcaacgagcccaactgcttcttcccgcgcttctggaccagccctcggtacacggtcgtctctctcctgccctcatcagtggccttctctcttgggggctttgccttctcatcctctttgtctgtcaaaaagtcatcagtgccatccccatcctccgtgcttccaaggtcctttctggtgaatagctcaggtgggtacaggtctgtcatgctgtcatcacttgcagctcccccctcatcactggatgtgggctcccagaaggcttcccgcgggcgaggcccgtcaccgtccatctggtcctccctcctcctcctccggtgcaccaggcaggcaggcacgtactccaccccttgcttctgacattcttcatatttacacagagctcgctggtaccgccggccctgggtgtgcctcagcacgtgttctgggcacttgttgatgtgccgcagggtgagtttgcagaacaactggtgcgggttcttggtgctgggcacgatgtgcggctcgaactctgcatagtcgaaggccggggaggcgcggaccagccgctggtactttttgccgcgggtgtagacctggagctccggcaggcggcagggcagctcgtgacctgtcaggatgcacctcaccttgcgggcgtccgtctggagccgcaggctcgggtgctcccgcagaaacgcccgcacgtcgcccggcaactcgctcatggccgacgcgcccgcggagcagcccggcggaagccgctcgc

SEQ ID NO: 340664 - DNA, 1000 bp, Homo Sapiens
acttactatgagcaaaatcaagtttcagtcctaaagaacagtcctttgttctccaccagcccagaatattattttggcatggtcataaaaacaaacaaaattaacctactatgctaaatgtttgcttttgtgcaaaattaattacatacaatacaatgctagccatacaacactctaccaatgcaacaaaataagaaagaagtgagagagagcaaaagcaaaagccaaagagaaagaaaaaaaacaagagtgaactgaggaggagaggtatataatcaaagaaatcagtaagacaataataaatactcattttttgagagaaaaaatgacctcctcctcatttgaaataaatgtacaaaaacaaatttctaatccccaaccaacatgaataacaaagagttcctatcagtaccttaatcagcttatagagagcactcccagctaacagaatagcttgtaatttcttggctagacctgtttattgctattaggccttgagcactcttaaataaatacaaaggtacactattttcttccaagtgacaaaatggctcaagaaatctgatggggccattcctatgtcctggtgatcagattctgggttgtcccatgaggtgaactatcccattcactgacattctcccactaaacctctctgggggaagccccccgatagacaacctgtcctagtttcaggaaggccaaaatgacatggcagagctccctgtagttaggagatggggaataaaacctcactgcttcccaccccagtagcatgtcttcaaagaaatccttgtgtgataagtgcagttcattttgttcacacgtaggcaggtccccatgtggctacagatagagtcagccagaggaactcatctgctgcccccggagctatctgttccccagagttaacagtaggaacatcccatatagggaatgtattcccctccttctcctcccttacagttttctttcattctctagatgtatcatgactatt

SEQ ID NO: 340665 - DNA, 1000 bp, Homo Sapiens; identical to SEQ ID NO: 159604

SEQ ID NO: 340666 - DNA, 1000 bp, Homo Sapiens
tttttttttttttttttttttttttttttttttttttttttttttttttttttttttttttttttcaaagtaaattgcatttactttctttgaaaatgtcaatacataaataaattttgttcttcttgtctaaatacgaacagtacaccgtaacagcaaaacatttgctgctgatagtccaggcacggcagctcatgcctataattccagcactttggaggccgaggggggcgaattgcttgaggccaggagttggagaccagcctggggaacattatgaaaccctgtgtctacttataatacaaaaattagccgggcatggtggcgcacatctgcagttccagctactcaggaggctgaggtaaggtactgacaatcacctgaacccaggaagcagaggttgcagggagccaagattgccccactgcactccagcctgggtgacaaaacaagaccctgtctcaaaaaaaaaaagcaacatttcaaacatttggtgagcggtcctccgtttttaattttacaaatatttgcttaaagtagtttgcttggatccttagatatctttgtaaaacataatgcatttttagaagcaataaattagggaacaaaaatggacataaaacttattttcttgtgttgaggcaaaattaagggaggacaaacatttccagagaatggggaaaaaacctggtactttatataaggaactgctatttacgtcctagttgatacttctgagattgtttactctgcaggtgaacagtgcatatttaaatgcattttgctattcaatattaattaactcaagagaatgtaattcctgataaaatcttttcaattgactatatatgcacaaaaatccatttgaactgtcaagaaaaatgagtaatagtgacatatctggacactaaggtcagcgtatgctaacaaagtaagaatggaggtaatttcaagaaaaagattgtctgctttgcttggtaatttagcaaaatacccaatc

SEQ ID NO: 340667 - DNA, 1000 bp, Homo Sapiens; identical to SEQ ID NO: 159605

SEQ ID NO: 340668 - DNA, 1000 bp, Homo Sapiens; identical to SEQ ID NO: 159606

SEQ ID NO: 340669 - DNA, 1000 bp, Homo Sapiens
ttttttttttttttttttttttgagagctcaggagctttaatggggctgaaagggtcagaaacacaccgggagtttctcctgggagtgtggggacaggaggaagggggccgtgtgtcacggaggacggtggctttcaccaaacctgctcaggtcccaggaaggaggaccgtgagaggcctccacgtgctgaggtgggagcagttccttggggaagagcaaaagtgggaaaagatttggcactcgttaaagagtagtgatattgaatggggcttctaggagccaggcggaaatgcactggagtggtggggagacaagagaggtccacaaatcccctccgggacctggagacctagaagaaaaaaagtgaaagagggcgcacatcgccctcctcaggggactgcggggtgggacaggagcaaatctagtaccagacaaggattgagggagcttcggtcccgtccccctgctaagtgcggcaggtggagtaaactctggattagaggacggttgacggaggctcccgggccctccccgggatgccgatgggatcgggcgagactctaggcgtgcgggcgaggccgcaggcacccgaccgccccgtctagtggtaatggccccccaagtgcgaggctgcggccacggccccgaagggcccgggcgggggctgcaagctgggactggggtagagcgcggcggtggcggcggcagcggtggcggcggggcccgggcccggccagtaggagaagccggcgggcgcgaccccggccgaggcggccatgaggttgagtttggagaggccggggaagggcagcggggcgaggccggcgggcagcttgtagagcgcgccgtcctgggcggccgcggcggcggcagcagctgcggcggcggcatgagcgtgcgcgggcggcggctggcaggcctgcgccaggccctggaagtcgaagcggtaggcgtagcgcttgccatgcaccttgctcatgatgttcttgtcgtagtagt

SEQ ID NO: 340670 - DNA, 1000 bp, Homo Sapiens
tttttttttttttttttttttttttttttccacaaaaggaaattttatttcttgcctttaaacaaaataagatgctctcagagctttttttttttttttttttcctccctggaaaggaagtttcattatgttgcccaggcaggtctcaaactcctggcctcaaatgatcctcccacctcagcctcccaaggtgctgggattacaggtgtgagccaccacgcccggcccagagaactttttttttactgcagaaaacatttttataactttagaacttttctaaaatactactttgtcagctgaacaatatagaaaagtgcagaggcaagtgcctttccagaaccgcgtggtgacttagaagcggggcttgcgcttgcggccggtgtactgggtgtcaggtctgacttccctgccctggcgcctgtgccgctccttcttctccagcacccatgcccgactcttcctcaccattccccgcctcgacatccttaatgggaacctctcattggtgaacacagactccctgggttcaacttcatcctgattttcactcagcccctctggtataaaggtcgaaggcccagaaaacaagcagaggtagaatttctttgctttggcactgttagggtagtctaccaccatgccaccggagaagcctgcctttgtggcctgggttgtgatcagctccaactgctctgagttctcagggtacagctgcaggacagctcgggatccccggacgagaacagaaaaaagagaagcaaaaaagcagtacaggcgcttggcagggttttcagacttcttgttagcattacagagccactgcacagcagaaatgctgatgcaaccatcaaatgtgcctggcttgaatgggatgccctggcccatatcccccagcagcaggtctccctctatctctcggtccacagcctcatccagcatggcagggctgatatccaggcccacccaatagtgcccttcatctgacagataacttcca

SEQ ID NO: 340671 - DNA, 1000 bp, Homo Sapiens
tcagttatccagctggcacagtgaggccacccctcggtttatccagtgcttctggggcatgtctgttggaagctcaatggagaggacatagttggtagagtggcctgtggtggagagggttcctctgcgggcacttgttttgtagactggacacacatagatgtcctgatgcagaaacattgcgctctccccaggtttcagccaaatgatgggcagtgggtcatagaggattttggggagagattccccaatctgcatcgttttcctgtcccaacgggcaccttctaagaagagccctttgatgtaggccccatcttcggggttattctccatcactgtttcttgtggggttacctcaaactcaaatccaatgtggtcaatggggatggtatatttccgggcataattttgagagacgccagtcaaaaaagactgtgtgaagtagaatccagagatccaaaataccacagggggccccttgtcaatccattcctggaagaaggtcaggcgggccagcaggtcagccacgtagccccccagaggcttcagtgatgggtaagacttggctgcccacatggctggcactttacccacaagcatgctgttaaagacttcctctagctccgaggacatcaggacctgtcctttgatggctcggccaagattgatgaggctcctccgaaccactttggtcagcctgttgaatctgatgagctcctgccttaggacggtattcatggattcttcatagaccacggggtacaacttcatgacctcttccaggtcaaagtctctgggaagcttggagagaatgtcttgtgccaactcctcaaccacttcctgaggggacttgccacttcctcctgactgtctagggagggtcagcaggaccccctcaaacagctggttggtttcctggttgtctttggtgatgtctgcgttctcatggaggccgaacacttctgggtgggctgtgatggggagattcctgagatagtcg

SEQ ID NO: 340672 - DNA, 1000 bp, Homo Sapiens
attgtctttattatcaaagtttattgttggggtcagttcctatctactagggagtacaactatatctcaatatgtgctatagtaattctagggtaacagccattctgcaaaatagttgtactggggctctgttaggcatagatcataattaagtcagtggaagaatgagcccagagaaaccctggcagcagagccgttactctaggaaagttccagtgctatgcaacctgtaaggcatcatcgctcagctgatgatgagactcacagaggtgttggtggagcgaaacaggagttgaacccattttctactcttcttggcagggtaactatggctccaaggaaggaacccaaaattaggtcttgtaaaatcttttaagctcccaaagcaagagaaataagacatgaagaaagagccagtaactaggacagatgaaaaattaggtggaattggagggaatggaaacttctggaatgcaaagtagctgggtttagacgccatttgagatgaccaagaatacagtacaggtaaaagcaaatggggcaacaattcaaatattgagttgttcaaatactagaggttaagtaaaatttccccccttgggggaaaactggttgaaaaggatcagaaaggtgaatcagtaacaggacaatgagtacctgagtagaaataggtgtttcaagatgccaagaacagtttaaatatacaggtgagctgagtctacaagaaggaaaagtggttatggcagcctgtttccagatctgatcattggaatgacatttctagcaatggctttgtctgtgaggtcctggcatattttgtgtagcacagatccctttaaaggaatgttttcgtaacactcaaacttatgtgggaatgcaaattactatagtgtaaaaattcaatgacttcccacctattcctgcagggcaggagatcagaagtcttaaaacagctgtggctaaaagcccaagccctcccactgccccgtgataaaaatat

SEQ ID NO: 340673 - DNA, 1000 bp, Homo Sapiens
attcttcccaaaaatgctttatttctctctaagaagtaacatacatcctaaaacatttggatatattcagacactaaagatgtgattggaaatctacattcaaagaagtatcaccaattaccgccacccattccaattctctccagtgctaccttctcaaagttgtgaatcaggcattaccaacactttgaacctgagcttacaatttaagaaccactgttttaaagacatgtaaacagaatacaggttaataaacaatgagatcattatcttttcaccttagtgtttgctacctccaattttactaaaggatacagcactttagcctgccaggggatgacgttgtctaaacacattttcaatgttttctttttaacagttaatatatttccaggatgaaagtccatttctttctaaaaggttcctaggacacccattgaaaagtcaaaagcaatgaaataaaagggattgctattttgttggaaaagaacgacaccctttgtattgaagtggggaattacagactgtggtcaccctctgcacagtgtctctttgtcaagtaatacatgctgaaaaaaaataatacagatgggaaaatattgtgcactgtcagatcttggaaacggccaaaggatttttcctcaccaatgtcttgtcgatgactttcacattctggcacccactcagagccatggccaaccggaattcttcctttagtatctcgaggacatcttgaacacctttctccccctggaaagctaagccccaaacgattggtctccccacaaacacagccttggcgccaagagccagagctttcagaacatcagtgcctttccgcacacccccgtccaggaagacttccaccttcccttccacagcctccacaatttctggcagaacatcaatagtggctggcaccccatcgagttgtcgagccccatgattcgacaccaagatcccattcaagccatgtttaacagcctccctggcatcatca

SEQ ID NO: 340674 - DNA, 1000 bp, Homo Sapiens
ttttttttttttttttttttttttttttttttttttttttttttttttttttttttttttttttttttttttttttttttttttttttttttttttttttttttttacagttgataaaaagaactttaatggaaggcactgttgtccaaaatcacataaagggtaagagcccacacggtaccaccctgctctcctacttctcaaacccacatccaccacccagacaggagggtgcagaccccacaggaaattacctcccggagcactgactgatatttttccttaaaacaaaaaaatggctgtctcagactaataacagaacatcttaagagaaaaaaaaaaaaactataccagctattacagcctggtaatagaagcagctttctaagaattcccaagtttataagaggcccaagaaatgcatttattctgttgtctattaagcctccatgacaaggagaaagttatgagtaaatccttggttcatcaggagttaagagctgtgtgcctcatgaggagttaagagctgtgtgcataagcaggttcaagaaacaaactcctgtttgtttgcctcttgatggttcagaaacattcagctgctttcacctctaggacaaatgcttaagaatttactctcatcaacattggaactttacgaaaacaggattcctggttcatcagaagcctgtattaatgaaaaatgcattttgttctttagtgcttaaaaaaaaaagaaactcatctacttttttgcggaactttttttgggatagccattcctcctatggatagtcatcagcaagacacctaaaagacatgttttccctagttcttatcaaaaattcatctcacagaaaaagtcattcaagaaagcaaaactttgctttaagtagataaagtactgtttatatgcattaaaccaagcaatccactcagggttttaacggtgtaaaaactaaatcacagtacagctgaacagtgaatggatgggatggttctg

SEQ ID NO: 340675 - DNA, 1000 bp, Homo Sapiens; identical to SEQ ID NO: 159607

SEQ ID NO: 340676 - DNA, 1000 bp, Homo Sapiens; identical to SEQ ID NO: 159608

SEQ ID NO: 340677 - DNA, 1000 bp, Homo Sapiens
ttttttttttttttttttgattttgatcacatgaaacactttatttattacagcattgttttaactcccttataaccaagattatccatatttattgcaaaagcaacagtatcaaagaatgctttaaaatgcaattaaatttgtttaatatagataaactataagtaatgagattgttttcattataatataggtgtcacacatttctcctggtaactaagaaagataaatgggcagataaaacataacagtagaagcatctagaatagtaaattttattactggaagtctctccctagcaatggacaaactcaaccacattcaacacataaggaaaccagggacaagagaggctggcattcttcactctacgaatacttagggcactgactatgtgccaggcacttgctttgtgctagggatataaaagtaaacatacaaggtacccgtacccaaggagctcacagccaagataatggatgagtgtcctgaaagcagaaattatcacacagcttaataattattgtgagaaatgcatgctcaagatgcaaggtgcaactcatccaggcttgggagcaactcttgtgaatgagctgacctggaaggagatgcagaagtcagacagagaggttatgaagcagtgttctaggaaggccaaagtgcgggcaagcccagtgcatttaatgaccaaaggagtgacagtacgagggaactctagtcctgggtttaggagacaatagtctcctgactccctgttcagtgctattttagaatactgcctgtgtattgacaagtctgtgaagattcagcacatacatcaatactcttgcatagaaaaaaaagaagcttacatggctcgtgctatgccagtgtagacattaggattctctaaactgccttgctcaaaatgtttctttagaggaataattacttcctattttagcttttcatttccttctaaatgtttatatcaattgggccatgccataaaattcttaag

SEQ ID NO: 340678 - DNA, 1000 bp, Homo Sapiens
tttttttttttttttttttttttttttttttttttttttttttttttttttttttttttttttgggcttcaaatcaagtttaataaataaaacagcaaaggggggttcaaggcagttatcacttcacagtgtggtccttggtggggtgagggatggtcgagtccaactcggaaaggggctcgagcacaagaggccggacgacacccggggcagggcgcgccgccgcccacggaggaccccactccaacgtgtaaacagaaacagaaacgaacgagagggccagggaggagggggaccaggactccaagccatcttgctaggaagcttcccacagaaggaagacctgcagggctggggaaacaggctggagtctggcccctgcgtggccagcagggccggctcctccggaggctccctgccttggtaccgggggaggacagcaaaggggatgtaaatcacctgtctcctcaaacccacgcctggggttgctgagggaccccaccccaaccgctcaggatcggggagcagggatggagggggaagaggcaggtgggggtgtaaagtgcggcttttcctgaagtggagacgatggggtgggaaggcgaggctggggtgggggccggacagcgaggtatatggctctgtgccccacggggttggcactgagtagcagctgcccacgacccccagggctggggcagcccgcggccctgccgggtgtggagagacagagccaagcagggagctgagggcgccccggcggaggctgctggtgcggggcagggcgtcctgcccgtctccccgccggggcagtgacgccttccctcgcctctgctggctggaagggactaggtggccggctctgccctgcgtcccaacggcggggtctcttctgtccccggctgcccgacggatcccacgtgcaggcagcggcccggacccgggtggcagtgccgggcgctgacggcgctgggtggggccgtgggtccattctgtgtgg

SEQ ID NO: 340679 - DNA, 1000 bp, Homo Sapiens; identical to SEQ ID NO: 159609

SEQ ID NO: 340680 - DNA, 1000 bp, Homo Sapiens
tttttttttttttttttttttttttacataaaattatctcactccattttatttaagatttttttatccagttagtaaaaggaagatgtgtctctctttatacatatgtacaagttcagttataaaaatagcacattcaaagagaaaaggcttggcatttttctgattccctctaaatagcatctgtacacaggaatctgggtttgagcaggggaatcttaatgatttaaattaaatgattcccctataccccctactccaaaaaagttttaaaaatcaatctatcgaaactcaattccgcgattttcaggtgtgcaaatcagaggcttgcccgcccggaggtacctgctccaccagggacatcaggcagggacaggcagaaacacctcccatgcaaacactgcccctctgtctctactggagggcagcaagctcaggctggccgggctgggagggccggtgccgagcctgccccctctctccgccctcttcacctcactcctgctgtcccttcctctctcagtgcaatatagacagtgcatacagccaagcaggggactgaagggcatgagcagggagactgtgcattcaggatgggcaaaggggactctgcaagaggggcagtgaggctgtcctgctgattgaggtggctcctggtctctttactggcttctgggagtcccctgggtggaaggtgctacggttgctggtaggatctgaaggttctcttggtgtgaaccatgcaggatgggaggaattgctgggaacacaactgcctgtggatagacttcctctagcctctaccatgcttagcggcctccaccatctctcgcagtcactgctctctccaatgatgacactctggggttcagagacctggggagctgcctgaagactgtggacaacaggtatacaatctcccttactagccctatgagaaatcacactcttaagagaaatctctaccatggaaggctcttcacagcacctgcggagactt

SEQ ID NO: 340681 - DNA, 1000 bp, Homo Sapiens
tttttttttttttttttttttttgacagttttcaagtattttatttgaaaagcagcaaaatgacagttgacatatttagattgaggataactataacattactgaatggattattattcttcagtgcgatacactctgatattcagccttgccctgagttaatcaaatcactggagaacaaaagcgaataacagcaggtctctcttttttattccaatttcttacatttattgtcaatgatgaattcagatgccagtggcctgcctagaaagccactcttaagcaacaaggagtctgccaatccacttaaaaaacaaaccacaagagaaaaaaatccaaaacctctatgttaatgaagcagcaactgtggccccctagcctcctccacttcaagtacaggtgttcctagcagattaagtcccttaatcctcccagcgacccctagcatctgatgtgctatctgcattggctccgtgtcagtatcagctctggccttggcctacagagcttccaatgaagagactgtaatagaagaagccagaaggaaaaaacaaacaaggcaacatgggggtatttcaagactgtcggaggtgttcctgaatcggtggcattaatctagaggccatgttctgcagtgggagagcaatgggcttgacatcacagggaccaagattcagttgccggctctgagggttcctttctaggtgatctcaggcaaggaagcttcttgcactctgagcatgtttcctcaagtttcaaatgcagagataattctgacctcacaggaattgagacaatgtgtatgaaagcacctattttactacctggcacacaatgtaggtgctcaatagatggtgtttgaatcttaaacttacctggggaaatttttaaaacttcaccattcaatagataggagttagcaaattagcaatatgactgcttacttcctttggtttatttatacataaggctttaaaatcatcaaacgctaggctgtcaa

SEQ ID NO: 340682 - DNA, 1000 bp, Homo Sapiens; identical to SEQ ID NO: 159610

SEQ ID NO: 340683 - DNA, 1000 bp, Homo Sapiens
tttttttttttttttgctggatgacctgcagttctttaatgagggacctagacccagcccagatttggaggaggagggagtctagcagctgtgggcagtggctgagcctggcatggcctggcctgagatgcctccaggtgaatggggcccctatgtagccttggccccagcccaggggtggggtgcccataccactctgccagaccccgggcccgcagggtgctggtggtatggtaggtctcatggctctggtttctgagggcctggggttgaagctgaaagtaggtgaggggtgtcctggggccctcccccttaacagggaaataggtattccagatcctccagcctccgcatctcctccggcccgatggacacgatcttttgccggggttccttgcgccgcacggtgatctggatggggtagttctcaggaaagctgctgaagtcagtggccagggttgcaaatttgtagggcttgcaccacttccccaccccagctgtgttggctgcacggacactgaggcagtaacacgtgttaggctttagctccatcagcttgacagtagtgcccaaaatcttgttgaagatccatggacgattctttgcctcgggcaactcattctcctgtgtcttggccacctcctgtaacaggagctggtagaaactgaccggctgcttgcccaaggcgtaggtccaggaaatcacagctgtggaattgttgacggtgtgctcaaagatgaagggggtgtccggcaggtccacaaccacagaagattctgagtgcgttgaggaggtttctgtctccagctcagggttgtcaaggtccagcaggccccttgtggccatctgggacttcgatgggcatgggcaggggccgagcgccaggtcctcattttctgcattcttggccattggggagaagctgagtttgttcagctccccctccagcatccctgcaaagaagctgctgttgggctgggtcacagctaatttgatgggg

SEQ ID NO: 340684 - DNA, 1000 bp, Homo Sapiens
ttttttttttttttttttttttttttttttttttttttgactttgtttctgttccataaacctttattgtgcacagttcctgtgtcaggcactgggctaggggctgggatacaaagacggaggcttacaatctaacagggaagaaagatcacagttacccatcatgtagggcagaatggagcaggtgccagctgaagagtacaaaggaagaagagccaaagggtcagaggaggaagctgtactgggtgggcacagcaacacatctctcacccacagaaacaacccccagatcagccagagagatgaggtatggcttctgagtgcttaaaggactttacgttcctaaaaggcaactggtgctgagaattcacagttgatggcccaggtggcagtgagtgatggctggcatctcccgtccaggccctcacagtgtcctcaaggggtcattgccctcaagctgccgttcttcagagtccgtgaaggggtcgtaggaaggttctgggggagctgaggttgtgctctcatacaaggggttcgagatattctcaggctgctgcttgccaagagctgcaacattaatgtcctcttccgactcaaaatgctggaagccgattgttctccggtttatccgaaagtaggagtaagcagccaaggcaacagccccagtcaccaggatgatggcaaagaagatccctgctcccaagccagtgtgggtcaaggtcacgggggcagggggtgcttttaaaggcctggaaatgacatgaatgatcccattggaggcaaagatgtcccactgcagaatggctcttccatcaacaaacctggtctccgtcggttggagtgggtcctggctggcagtgatgagcagcttgcttcccagcctcgtttgcagggtggtgccattgacaaggtcattgtagaaaaacatgctgacattggcgaggtggtgctcgatgtcccgcccagacaaggtctcattctcccccagcccactgttctg

SEQ ID NO: 340685 - DNA, 1000 bp, Homo Sapiens
ccacttgatgtccttttatttgacttgttaccattagtactctcctgggatcaaggctgccaagcctgacctatacccaaatttcccagtgcactcaggaaatcgtcggtggccttgatgaagccagtgctttttgggaaaaacggagcaaggcaacgcacgacagaagcggtgcaccaaggagtaaagattcagttccatgggccccacttgctgtttgagaaaatgtcctgcttccttcctagctgacttgactcccagcagtaacaggtgggagtgaggacgcagggtcggcactcgagtcgactgctctggctccaggcgtattttctgaaactggactctgccagcccttagcttgtcaagttagcctggccagagtctggggccgactgttccactgggccgtcgactatgacactctgctgtccatgggccactatgcacccctccactgtccttaggatggtttggagccttcgatccagggcaaggaggtggggttcagtgaggacagggctgagctggtcttccagcagtgattctcgcatcacatcgctgagtctgtagtcagcttgggccagcagctgcaggtgcaaaagtgttttcttttttatcatgcagcactgggagagaggcgagaggatggagatttcatcatgggagtgtcgtccgaaccctctggcgttgtcaaggtgaataaggaacccatcatccccgaacttggtgaacatctcataatggtgccggtccatattccctatcaagaagtcgaagatggccatgtcgatgacattgaggagccgctggctgttgttgtacgggtagatctgtttcactgtgtcacagtaaaggggattgacctcccactcctcttttcctgccagtgtgtaggagcggatccaggggttgggcacagacagcctgggggccaggttgagggacggcaggaaggcagagagggaaccctccagcaggtgtggtttgccacagacagcat

SEQ ID NO: 340686 - DNA, 1000 bp, Homo Sapiens
tttttttttttttttttttttttttttagctgcgtccccagaaccgggagacttaaggcatctttattgcgggatcctcacacggcctcctgggcccggcgatactcatagacgctgccgtgctcgggaaaggccagtgcttgcgggggcgaccccggcggtggggcggggtcctccgggtccccatagccaccgccgccgggcgtgtggagacagaacacatccccggggtacacggtcaccgacgtcttgccgcccagattcaccgtccggccgtttttgcggatcagcaggtttaggccgcgggcgccaggctcgcccccgtggagcccgtatggccggaaggcgcggcgctcggtcagcactgacagcagcgcctcctcacgaaagagcagctcgcgggtgacgccgtcgccgcctcggaagcggcctctgccccccgagccccgccgcagctcgaagcggcgcaggatgaccgggtaccggctctccaggatctcagggtcggtgatgcgtgtgttggtcatgtggctgtgcacaccgctgcgcccgtgccagctgggacccgcgcccgcgccgcccgccaccgtctcgtagtagcccatgtgggcgttgcccagggtcacgttgttcatgcagccctgggaggcggcgcaggccccaaaggcccccaggatgacatccaccacgcgctgcgacgtgagcacgttgccgcccaccaccgccgcctcgggcgacgggtccaggatggagcctcggggaatgaccacgcgcactggcgccaggcagccctggttgagtgggatgtcgcggcccaccagacagcgcaggcagtagatgagggcggacagggttacggcccgcggtgcgttgagattaccaaacacctccggcccagtgccgctgaagtcaaacacagcgctgccctgactcaggctgatctgcacacggaggcggatgggggaaccgtcgtccatgtggtcttccgaggacacctcca

SEQ ID NO: 340687 - DNA, 1000 bp, Homo Sapiens; identical to SEQ ID NO: 159611

SEQ ID NO: 340688 - DNA, 1000 bp, Homo Sapiens; identical to SEQ ID NO: 159612

SEQ ID NO: 340689 - DNA, 1000 bp, Homo Sapiens
ttttttttttttttttcttttttttttcagaaattttcaattttattaatattcaatttacgtaacaggctcaaattttattaattgaattctgcatccatacgaatttagtcttaatttataaagcaacttacttcgatactcttccttgaagtatgttataaaatacaacgtttaaataaacatcacaaaaatattgtttgtcgatcatttttgtgactttaacagagaaatcttcaagtttataatccactcattcttgcttacagccagacactacataaatccttaccaaaacaaaacaaacccaggtaggttcactgttacccctaggtatgcttcgttggaattcacccagagaaacccattttccctctaacggagtcaatactttcattctctacaggcatctcaaaaatgactataataatgccatgtggctttggggactctggagaaaaatgaaacatttaattaaaggcaatagttgttcaaacagtaagaatgtatacacagtttatatatagatagatagatggatatgtattttttccccagagaaagggctcaagagacaaaacagtaaaacacttcaactttccctaactcttgaaaaaatatctgattttaagtcagtttacaaagttcttattttaatgagccacttgtatggagacacatatgcataaaaactttttatgaaagagccaaagcttgcatctgagttaaaacttgatagtcagtacacttgtactgggacatacgtgcccctgaagtttttattaaagagctaaaatctatgtctggcttataacttaccaattaaaacaagtcacacacatacataaagaaggaagccatacatggttactgaaaatacacaaattattttcaaccagatgtgtcacttccaccatgaaagactgctaagctgaagccaatcttagttcaagtatgcatttgatctgtcactaaatgcccagattttaacataaccttc

SEQ ID NO: 340690 - DNA, 1000 bp, Homo Sapiens
tacaaaactgtagttcaacaaaagttctctgtctcctcatgcagcagaggcattatctccataaggtgtgtgtggaacagaaagataacttgggagcagatccggcagggtatggctcgctccatgctgcatattctgcttaggagcaccacactaactttagggtcattacagatctgatgccttggtcttctgctgtttgattttttttttcattcatcttcatcatcctcatcttcctctccatcagacagggatgtacacggccggatctgtcggtagcggtcaagccatttttctaccatctgagtgaccagggggtgatttcgccgccgagaactcttctgcatggcaaccagaactcccccctccgtcacacagcagtccagccactccctgagcagtttttcttgctgttcctcattacctagctcctgagcagaaaggaagtgcacatggagtagcttcctttcactgtcaaccagaggcaaaaatgtgatggtgacatcatcatcggtattgagattagcaccagcacctcggttgccatagccatcattttccatggcaaccaaagcagagaagtggcccctcgtataacccagagcaatcggacttttccaacaaaaactctgttcccacaacaaaggcagataaacaccttgaaaccgagtatatcctaaagtttctccccggaaactcttgtaatattttactccataaactataattggtcgtctaagaatatgtgccagtacaaaaatgtgcgtctgctccaaacttgctccaggctgactagcaagagagagtataaatgcccagtcttcttgccattgttcttctctcaaggaaaaatgtaaaccaaagctctgagaataccatgattcccaatctttccagcgtgtgtaaaaccaatgtgaacagtcatgcaggctgtcatgcagggctttccgaagcactgagtccttgtcatagatgccccaggtagcttgtagaactg

SEQ ID NO: 340691 - DNA, 1000 bp, Homo Sapiens; identical to SEQ ID NO: 159614

SEQ ID NO: 340692 - DNA, 1000 bp, Homo Sapiens; identical to SEQ ID NO: 159615

SEQ ID NO: 340693 - DNA, 1000 bp, Homo Sapiens
tcaaagtgcacaagtttattttctagaacaaaggctaagggaagcaagtttctttcattttattttaagaaggacaaaaattgttattaaaacatctacattattatcaagatactagaccttatgaatatttaatattaaagtgtggtattcttaaatttttaatacacagacattttaaaggaccattaaattgattactgcccagctgagaaatgcagcatccctccccacccaccccgcccccatgcttgccatgccatcttgtccctgcctgccggggggaacacaggtcccagattcagtcctctgagcctcccagcctggggccctagaaggctcacaactgaaatagttaccctcatcattaaaagggtcttcctgtccctcctccccatcacactctgcctcccactctctcttccttaccctgtgggggctccagctctggccaggccaggaagccccagatcccaagggtccctggacagatcacaggctgaagatgaaaactctggacttgaatcctgttcttttcagcggggagacaaatacaaatcaccttctttccctgagcactcccactctctccgcactcgatgggggtggtctgggaagctagcagagttgggcctggggagggtggctcctgtccctggctgcccgaatcacctctgagccatggctccagtccctgtcaccttgcaaatagtccagtggcccctgaaaccctcctaatcacacaaggatggctgcattttctggccaaattctttatctttagccctcataaaagtgattccttggataccacacacatatataatattatatagagcgatatatttaatacctgtgtatatatgcatcacgggggcgacatatatacacactagaaacaaggctggtgacaacggactgcaacaccacggatcagggaaaacgagtatcatcgacatcacggccacacatggccacagcccccaccttgggtgtggtc

SEQ ID NO: 340694 - DNA, 1000 bp, Homo Sapiens
tttttttttttttttttttttttttttttttttttttttaagttctcaaacttttaatgtttttcaataaagtaacacggttctccatatgcagatgttacatttcatgtgttagatttgctaagtatgatttaattatacatttccattttttgatcttcaacttaattacacttaaaaaatgagtattttgctggtgtaaacacctccacttctttttttaaaaaaacagggtctccatgaaccaagctggagtgcagtggtgcgatcacagctcactgcagcttcaacctctcaagctcaaggcatcctcccacctctcagcctccgagtacctgggaacctgggcacgcaccaccacacctggctaatttttgaattttttgcagataagggcttttgctatgttgctcggactggtcttgaattcctgggctcaagccatctgcctgcctgcacctcccaaagtgatgggattacaggcctgggccactgtgcctggccccaacatctccacttctgatctcatttttctgttttctcaccatctgatatattttacttttgtcacatttactgtctctcactaaaacatcagctccacaaatacaggccttgggcacaagatacccaatgtgtttgctgagtgcaactcagtggtgcccacctccgccctgtgcctgatagatgtgtatccatcaccccaccacccactgagtgcctctgtgggctccctgggtgtggttttaagcattggtaggccctgtatcatgggtgctgggctatcaggcccccccacctgtgtgtgatgttgtgttgacaccacctgggagggccgacagtccctcagtcttgtgtgtgcgctcatggaccgacatctccaccactgctggtgggctctgttggggaaagggttagttgtcttcagttgtatgcaagataactgcatcatgttgggtgggactatgactatgttatcgtacttatttggagattaagt

SEQ ID NO: 340695 - DNA, 1000 bp, Homo Sapiens
cagggtgtcataactgtagctttattgtaatatctcccattatttccagaacatcactggcaactagaaacttgtatgcaagggtgatttttataaccgcagagtaaataaaatataatagagaatagacttgtaacaataaatacactttaaatataaatatacacattgatatcccacacatataaaagtcatgctctgcaaatactttgtatacacactgtccttgtggggtatgaattccaggatgtgtcttcaaggatttacatgtgtcctattagttgtagatatttccagagaacttatgtagaagcaacacattacaaattttggggaaaaaaattaagtatcacagagcaatttttaaaatatttaatacatttttgttctacaaagaatgagcatttcttaaatattacaaacagtgaaacaaatatactagcttacagatatgtacaatttatgactttatacttcaaaaatgcaggaagataaattatatattttatatacatgtaattttagatagaatgaacaattcaatattgctcttgtgttggtcttgctgcattgtatgcatgcccatggcttgtcgctggatggaggaggggctcatggggatagaagggaagtcatggagccccatgctcatgcccagagcgccatcttcaaagcaatatttaattaaatattaacttattctgcctgggtcaaaaactgctatgcccatatgcaatgtaggatgtgttttcaagaaccacagctacatatttgggaatggaaacgtacaaatgctttaaaaaaatctaattctgtgatactaactcctcaaactctgagtcaattggggatctcctaaaagacgattttgagataaccattgatatcctcagttcagctcatagaaaacgatctcaaaatgaagacccataattgaggcttcaatagccttcctagcctataaattcacagaaaaaatatgaaggaaaaaatgtgtcct

SEQ ID NO: 340696 - DNA, 1000 bp, Homo Sapiens; identical to SEQ ID NO: 159616

SEQ ID NO: 340697 - DNA, 1000 bp, Homo Sapiens; identical to SEQ ID NO: 159617

SEQ ID NO: 340698 - DNA, 1000 bp, Homo Sapiens; identical to SEQ ID NO: 159618

SEQ ID NO: 340699 - DNA, 1000 bp, Homo Sapiens; identical to SEQ ID NO: 159619

SEQ ID NO: 340700 - DNA, 1000 bp, Homo Sapiens
tttttttttttttttttttttatgtcacaaatacttttattaaataaatttcaaagtaacaaagctttgcctacattaaaaaaatcagtagcaattataaaacaagtcaacaggtagtcgtgcatctaaatctgatgtagtattcaaaaatagagaaatccacctgtgctttacttgtatctgggggaacgtcaagaggactccatgacatacagttctccccatcttacacttcttcagtcccttggcacagacccggggtattccagtggcaaagtagtacatccattacaggctacttacttaaaggaagacaggctacttgctcttttccccagtaagatggcagacataggtcactgactccttcactctcccctgaccttctataacctcggtttaatcataaggtatgctctttaaatccatcgtccatctgcacacatactatgttgaagcctgttaacattgacaactactacagtgtaacatttactaatatgaagaaaagggcaagtagtcataactgaatgaatataaatgtcaaattatgcaaatgtcaatttgagtgagatcactattgttgaattccaagatgtttaatgtaaactgtttttataaaaactaattatgaaacacaaagacaatagaaatataagttatttattaatcaatccacttacaaagcaggtggcttaatgcaagcttattgacatcttcacatatgatccatgggaacatgtcctccacatacagacagtgatattactgactggatgcatttgcaatctggggcatattaagcatatttaaacaaataaaattaggctatcctgtatatgaaagtatcttgataataatatgcatcctgaagtagattaaaacttcctccaaaggagaaatgttagtatgttaacttaactttatattctatattatgcagtaaatcttaactatagaaattaaaaattttaaatcagtgatcgactcttggtaatgt

SEQ ID NO: 340701 - DNA, 1000 bp, Homo Sapiens
ttttttttttttagattatgtatatgaaaactaatttattaaacctctgtacacaaagatgaacatacctgtatagcaagcatatatgaaggatgaagttacaaaaaagtaaaagtattactaaaattgacacatgtaaatcacttacaaaaataccccaaatgggataaagctgctcatccctgatttttctcatttggttgtaggagttgaaacatgaatttaaaatggtagaattttttcttttaaaaagtgatatattaaacttatatacaggataattagcaaaatgtagaaagggaaaacaatgtacaaaagacagataaaaaccatcactctcgacggatagtcacaatccaaaaatagtataaaccttaacaaaccctctctaaaccaggtcatattcacatctccccccaagttttgtcagtgagaataaaatatactgaactagtgagctcagtctttctttaaaataggcttgactttggaacatgaaccttggatagatttttaaacatgggagggacaaacaggaaaaccattctatctatccacttaattagtactaattaacggaacaaagttattaaatagctctcagtgctaagtcaagccattattcagaggcctttttgtttttctgctggtttcggggtgagttctttaacaagcttcttatcctgaggtacattccagtagattctgccatattctcaaattcaaatggcgtgattccagttgcaaatttgctcatgtcaggtatagggctatgaattttagtggccgttgaaggactggtgtctgcaggaaagagcttctggctgcccccattgctgatgtcacagtttggtacgacactgccattatcaagaagggcaccttcagtgtttaccggagccaactctgctttttccttctgacaaagtgatgtcacctcagagtctggactggaggcatgtccagcttctgatttctttgtaaaaatctctggtacctc

SEQ ID NO: 340702 - DNA, 1000 bp, Homo Sapiens
ttttttttttttttttgagatggagtctcactctgtcacccaggctgaagtgcaatggcctgatctcggctcactgcaagctccgcctcctgggttcaagcgattctcctgcctcagcctcccgagtagctgggattacaggcacccgccatcatgcccggctaatttttgtattttggtagagacagggtttcaccatgttggtcaggctggtcttgaactgctgacctcaggtgatccgcccgcctcggcctcccaaagtgctgggattgcaggtgtgagtcacttcgcctggccagacctaatatctttaagtaaaaatcatctttgaaagtaatcactttggatagttaaacatttatttcaataatgctaccattgctcaaaacattctttacatcttttctttgggattgcctttggagtcattgtataaatcattaaaaaaagcagactcattgctttagtttagtgttgctctatcatcctcaagtatctagcttagtcacttgaattattcactagctttgggtctcagtgacttctgattattttaaagtgtcaaattcaccctcaaagacaagtttggctattcttcatgatcttcaaaggaatgcaccacagcatgattggacagtaagttcttggagaacaaggtgcctctctcgcttctctttgcatctctggtagagtctgttgcagtgcttaaccacagcaggagctcaatatgcacacacttgtgggctggaagggaaggggctgcagcacctcagctgctcagcagctggagatagcagggcatggtgaggatgaaggtgaggaacggttccaggtcaggcttgagggcaactttttcctgttcgattatttcagggttttctttcactactccttagaagtctggctttgacagcgaaggacagaaaggtctgcctgaagctggcagcagattctcccaatactcccttcgagcccttgctctaatccagggtttggtgtg

SEQ ID NO: 340703 - DNA, 1000 bp, Homo Sapiens
ttttttttttttttttttattggaaaggaaacaatttattatatttgaggaaaatcattaaaatacatgtaatatgtttccaattcactgatttaaaggcatatagatttaatttttaaatacactttcaaagctgttacgcacagttccatagtccaggtggtcaatttcttcctctcaaagttagaaagcacttgaaggacacgggattcaaaaaaacctttattaatttttaacactttctttttccttccttaggatcttgttttggtctagcagatcgagcaaactgaaccaccatgggttttccaaaaagcacatatccattagcttcctttaaggcttttgctgctgctttttcattaggaagtccaatgaaagcttgtcctttcatacgaccttctttcatcaaacgtatatcaaacatgatccgctgtgtttctgatgaaaagtcaacatatcttccaaaaatatatttaaggtccttttcttgaacatgtttagctaaattctttacataaattctacagtttggttcacccggttcataacttctgaaaactgaaagtgtttccatttcttctctagaaattctgcccttttccaattcccttctagaaatacattctgaaggcatttcatcagagtcttctttaatctcctctgtgatgtccaaattaggtttggggaagatttttccaaatcctatattggatgcatcaacttcagtagcaggtaaatcatgatttttttcctcacaattttgttccttttctaaatctttcttaaatgcagctggcatgtcggtagatatatggaattcaattcttttgttacctacaggttgtggttggtcaaatacatctgaaggtaacagcactggatgtaaactgctgtgtgaaggacacaaaggtgtattcaacatatcctttatttttctcttttttctcacatggcgctgctttattgttttaggtcttttgggctgaagatttgctag

SEQ ID NO: 340704 - DNA, 1000 bp, Homo Sapiens; identical to SEQ ID NO: 159622

SEQ ID NO: 340705 - DNA, 1000 bp, Homo Sapiens
tttttttttttttttttttcagcctcagccttcgcagcagcagcactttaattccacaaaaactcagaaagccaaaactgattagaacactccacaacaggtgagcctcaaaaccagcaacattctacctgaaccctgagagcagtgagacgcctcccacctcaccccctccgccgtgcaacccattcctcctagctgcacgccggttctggctggggaagtggtatggtagagggccagagggcagaagcagaaggctctccatcagcaggggtgcatctttgcctgcggggtgtttggccaaggacggcacaagctcccacagcccctggcacctgagatgtggccactggatcaggatagccacagtgggggctggggcttcctctgtccctttctcctgattacatgtgggagtcacgtcctcacctttcaagcagacctaaagccccgtgttcccagggctggtgctctagctagggaggagagttgggaagaacagggtagctacagatggccaactgaatacaagcagagcaacatcccttcccaccaggagagccgttagaacttccccacatacaccagcctaaggcccagcgagtgggcacgggccagctgaacgcatctggaagagcctccaacacacaggcctcccctcagtgggcacttcccaccaggactccctgaagagtccttagggtcctgctgggccctgccctggccaggaccggcctctcctgtcctcctggtcacttgcacagggcctccaacacctccagagtacgtcggatatcccggacttggcgcgccagcccccgaaccggctgcagagcccgctccagctcctcgcagcgcgccagcagggtgtacatgcccttgatgctcatgtccacggcttcacctaaggagtccacagcatcgcggtaggtctggatgcaacccacgctcagcgccgtcagctcctgcaccgcgccacccagaccgcgaagcagacggt

SEQ ID NO: 340706 - DNA, 1000 bp, Homo Sapiens
ttttttttttttttttttctttaaatatttgaacatttgagcataactttattctatgaccacatcctgagaaatgaacggtttattattttttaaacaggtctacgccaagcaaactggataatggtttttaagccttgtttttcctcaatatcaaaatgtacagataattgtaatgaactattttgtaaattacatgtgggtgaaaatgggaaagctcatttcgatataaaatttcacaaagcacaaaattcaggttagtttgctaagttcagtcttctaaaacataaactattttttcccttactaaatttagctattttaaaacttggggagtcataatagattttagttagaactgttcctccaagaatgtctcacaatttagaaaaggaggctggcaaatagttagtatccagccacatggaaaatatggaatagtcctagaaatagactatatcttcccttatgaccaaagcaccacctactgcttgtttaaaaaacaaaacaaaaaaacaacaaaaaaaaggcacttagggaaattcactatttctgccaggccactagatgattatttagtgaacttctacatgctaatttagaaatgaataatttggaaatggagcaagaatgatactgaatatgtcctagctgccccaatgtatcctaagtactttaataataatactgcctacctcttaatgaaaaggcaccctagaagaagaacagctcagagctgtataaatttatatgaaaggccttctctgcattatctcgctcataagagtcttctacatgcaggagtaaaggcaagtacttgtatacctgtgattgatagcgaaaaaaaaaaaaaaaaaggcagctgtaaatagtatgtttctctttctattcaacatatcacacttgctctctttttatggtaaaagaaaacttagagataagtactcatttgcaacactaggtgaatttaattcagtggttcttttcttataccacactt

SEQ ID NO: 340707 - DNA, 1000 bp, Homo Sapiens
agaacttgctttcatcccactatctgcagggattaaggacgtctgcactcagcttaatgagcaacaggcctcgatcgacataaaactctctcagagaccagtctcagcaaacacaggtggcgccgttgatcaacagcacatggaaatgtaaacttcaatgtatttacaagtttatttaaacgactgaagaaaaacagtgctttatattgctgggattttgagaaggctagtttatgagatttggaccgtctcatgagttcaagcaaacacccttcaccatcatttccccaccagcagtttccaggcaggggcggcaaaattgttttcaccccattgtgtctatctctttccctagctccttcctcagccatatagagtgtggctccaggccttttatccccttttccatccctcactcctgatgtcctggatagagaattacaagtcagtaaactctgggctgggaaacactggctggtgctaccaagacactatgtaactgttgtccattcacaaagtattatctacactacatacagaatacattttcccctacattttaactgatgctcgctttagagcaactccctttgtttggacaagaaaggaatcccatctccctgtgagtggaatccagaatctattaagaaaaatcaaccttttccacacagttttagtttaataaaaggaaggaaaacccaccaagtacatttcatgtcgaaagagaagcaaaaaatttgtactgcaagtagtcgtgtgagttaccttgattcccaggaaaagaaattttaaatgctggtacatttgcaagttgcagcatcactcattgtaccttaaggactggcaaagcctttccaataaggaagcatcctggttctagcttattttaaaacaaagtgacaggacaccaactgtgaatataaaacaggtaaaaataattctttaaaaaggcatggaaatatatgtcttttctgactggtttcagaaattgccagattat

SEQ ID NO: 340708 - DNA, 1000 bp, Homo Sapiens
ttttttttttttttatttaacagatcgaacccactttatttctttgtgcttttccagtcacttatatacaattacaataaagcaaatcattctctatatttttgttaaatcatcacaaaatgtatgtttaaaaagtagtttaagtttactagaaagtactatctcaatagctgtatagctaacttatgtaaatcatatttatgctaattgaagagaatatatttcaccttcaggatattgtattcattttttctagccttaataaacattttataaatactgacactggggataaagttactgataatattatatttactttggcttcgcagagtaaaaattgttattcagtcacatacaacattctcgcatttttttagtcaatcctcaaactacctgagatgtaaccattattactcagttataaaaagaaaccaagattcaggtatactaaataatttgtgagtattcatgacagaacattgcaggtttgattgcaactctgtttgattccaaagtgtttgctctttccacttcatcgtaatgtatttccactttatcataatgtatttctggcaagaagcataagaatcaaaaacgtgacctgaaaaactactatggaattatttttaagtggtttgcatagactttgtttttagactttgtttaacttttcccaaaaagttgtactcagttgttcaaaggctaagacaacgttgtcgtcttcattttcacatagctcacgcaaggaaacactgatagatttaatggtgagtgcaaaatccttcaacaaataataagcatctccttcattcatcctgttatcctggactaatcctatcaaggaaccatgtttgtagaaatccagtgcataggcattaagcgacattttccttcctcggttatcaaatttctgtgacaacagcactggagcctgagagcgattgacaccgattgtgcctagagtaacatggtttggagtttctagtcgaagcaaatc

SEQ ID NO: 340709 - DNA, 1000 bp, Homo Sapiens
tttttttttttttttttctaacagacacgttcaacattacgggcaacatttttaaaaccttaagctttacagactttcaaacattcaaatactgtggtccctttcctttgatgtggtttattcagctagaaaagaaaacatggtagacaacttaatacattttcaccaaattgaaagtagtacaaaaattttgggactctaccgaactacacatcgtacctaatgtatcattaaaaatagaagacagtattttcttcagcaaataaaacagcatactaatatgctgctaatgcataccttttaatgtgtactgtcattcataaattatttacaactgctactgtgtgaagagaactagaatgtaaattttctgcaaaactggaaaaaaagcaatacaaaatttgtgaaagcctgtgttttatactatacaaaagtcagtttttctcttcaaataccagatattgtatgcagtgatattttggacacattatagtaattcttgaggatgttttagtgctggaggtaagtttacaggcctcgattcttcatcaaggagtactagatcttctatttcactgcctctgtatttccttttacatatttttaccaccacctttttcttgagaaataacttcaatgcttctcttgatgcaactgcttttgcattttctttgctttttccacagccagtgcccaaatacacagacttgcacctcaattcacaaacaatactttcttgagagctcttattttgaggcagatctgccaattcttttagtgggacaaaaaatacatccagtgttgctttcagagcctcaatagctgcatttaggagctctccatgattcacattgggactaaagccaccaacagctaccaacttccatgccaccgttttatatagtctattgaaaaaaggttgcttctgtttcacatcttcattggttaacttgcaagagaatttgacagaactctcacttgactgtgaagtacttttaga

SEQ ID NO: 340710 - DNA, 1000 bp, Homo Sapiens; identical to SEQ ID NO: 159623

SEQ ID NO: 340711 - DNA, 1000 bp, Homo Sapiens
ttttttttttttttttttaaagaaataaatttactttaatggtactttcaaaaagactaatccataacaaattaagttatactgtatttcctttgctacccagaaccacagggctggttgtcaacacatattgaagaaatgtaagcaaaatacagaaagtgatgattttcaaaaggaagagaagaaactccttttcaacaaacactttatatcatttattaatgcagtatacattagatctaaaatctgcagtttctaagcacaccatgtttagatctttcagatccttctgcagttttaggttatttctacagaggtacctttaagtgaatgaataccacattctgtaattcctgaaaatatagtacagagtgaaatgatttaaatataatttaggcacatattgattatgaaaatagattatctctcaatacaatacttctctgtcttggtaaaaataataaagcaaagaaaataattcatttctgaagttgctttccttcacttgtaaaggtctgatctcctcccactatgcatatgtaccctttactgttaaggaaagctttgcatatgtagatatagaagaataagctacgtaaatactaaagatatgtcattctcccaaaggagacacaggtggttttcaatgattccttgcctcatgttgatgagtctgtagaattcagaacccatttggacacagctaatatccctgctcttggggtagaaaataaggacaccaagtcattggtagggaggtacaggcccttcctctgctgctgcagagagagaatgactcaagaaaattgggctaaaatttgtttaaaaaaaaaaaaccacaaaaaaataagtaaaagaatcacaggtgctgactgattgataattacatcttggaccagccaaatgcctttatttttacgtctatttttttggtggctgtaatcaaatgtgtgtttaaaattcctcattccccactgtagggttctagctgcaattatat

SEQ ID NO: 340712 - DNA, 1000 bp, Homo Sapiens; identical to SEQ ID NO: 159624

SEQ ID NO: 340713 - DNA, 1000 bp, Homo Sapiens
tttttttttttttttttctcttcattggctttattaccatgtaacacaagctcacagcctctaatgttaccaaccttgtacacaaatggccaaacaagaaattgtcctttccaaaagataatttattctggtttcccctcttcatttttattttttttttgagacggagtttcgctcttctcacccaggctggagtgcaatggcgtcatctccggtcactgcaaccttcacctcctgggttcaagcgattctccagcctcagcctcccaagtagctgggattacaagcgcctgctaccatgcccggctaaattttgtatttttcgtagagatggggtttcaccatttggccaggctggtctcaaactcctgaccttgggtgatccacctacctcagcctcccaaagtgctgggattagaggtgtgagccactgcgcttggcccggtttcccctcttaatacagtgggattagatagattctccgtgacatcctgagcctttaaagaaaggctgtcatgaaagtgaaatcgccacatgaggagaacagtgcaaagaaccaattaattctcaccatcctctccctgaaggaagaatgcctgcctggcaatggtgaaatgggacatttaaaacatatttttttggccaggcgtggtggctcatgcctgtaatcccagcactttgggaggccaaggtgggtggatcacgaggtcaggagttcgagaatagcctgaccaacatggtgaatccccatttctactaaaaatacaaaaattagctgagcatggtggcatgtgcctgtaatcccagctactcaggaggctgaggtgggagaattgcctgaacccaggaggcagaggttgcagtgagccgagatcgtgccactgcactccagcctgggaaacaaagcgagactccgtctcaaaaacaaaacaaaacaaaaaccaaaaaaagcaaacatattttttcaaacaagtaaggataggccccaaatgtggacaga

SEQ ID NO: 340714 - DNA, 1000 bp, Homo Sapiens
tcatatttgaacttcatcttctgctttaagttcatggcatgtaccactgatgtgtgttcctaataattctccttctctcaacagtggagacaaggcaggaggctgcatcgtcaatagggaaagagatggagaaaaattgggagtcatgccttctggcagagaaccaagatggtaggggatgggagagcgtgggtgtttcggaggcacctgccccaggtttactgccggcattcttggtgggactgctttaatcccaggctgggctactgctgttatcaaagggggtggaaaaacaaaagatttcttctcttttggaatgccaggcatatgcaaatgttcatcctttagttttgcaatatcattaaatactgaggcaagaggttggaatttgggctcccaactaagaagataattccagtgatagttgtcttttccatcatgatcagaggtcgtctgagttgaaagagctgcacaccttacttcctgatcacctgaaataaagacagactcttttctaacgtcagccaggatgctctcttttgcctctctcttctgaactgtctggggtaacacattattttgagcacaggtggtgctgcagccttccccttgatctccttccccaaatgtttggctggcttctgctgtttcggcagtcaccatcacatcagtttccccagataggcaggagagctggtctgagtccctcgggatacccgagtctggcaccctggactcgtggtcactcagagctgagtctgagcactttctgtagggatgctcatttatcctctggatttccttatcttctgcagtttctccttccacagaacagtggccactggagtttgagtgtctgtacagattgacaatatccttctccatgatacttattaaactcaaccattccggagtggcatccacagggaccacctcgttactgcagtcgtcagttttctggaaggctttgagcacactggcatcccgggtcactctcaag

SEQ ID NO: 340715 - DNA, 1000 bp, Homo Sapiens
ttttttttttttttttttttttttttttttccacttgtaaaatcattttattggtataaatatacatatgaataaaatacttccagcctgtaatgtaagtgaatatttgtgaaatgtcttataaagagtagtattttgatttttacaggtgtcaaagtattctctcttaaaatcacacattaaaagctaatatgcagacagaaattaaaggccttcaaaaacatgaatattcataaaacctcattccaatcaactatatacattaatctgggcacatggtaaaatcagccatgggcctctctcactctgttcttagctgtgctcgttgatggtatgcaaaggtcaccgaccaagctttaaatgtacaattccacatcaggaaggaagaagttccccatgggagaaggtaaaaaccatacccaagatctaatatatataatctatacaaattattagtgtgctctgttaatataattacaatgtgcaattgcatacatcaagaataaattgctatattgagtcctgtgcggatttgacacaggtacacttagcagtactccgaggtctgctgtggtgttacttgtgtgagtgtgtgtccagttatttcatttatctccaaaaactcatcttgcagggcaatctgtagctgcctcagataaattcaagtagggcccatgggataattgctggctttcattaaaggcatatgaaggaatgtttagaaatcaaatgcaaagggttggaggaagaccaaacaaatgtgctttgattaccaagaaatggatctgtttctatacaaaaaaaaaaaaaaaaaaaaaaaaaaaaggcaggggatgggggtgggggcgaaataaagaaaaagaagagaataaagcacccagagaagaacgcctgggaagaaaagatgttgcccttggttcctctctgatggctaccaaagcaccctgcacaggaagacttctgcgtgggtgacctttacacaaaaataaactctttttct

SEQ ID NO: 340716 - DNA, 1000 bp, Homo Sapiens
ttttttttaatttcatagcaacatgtttatttaagccctagctaagttttcatttacaagcaaatattttcaggggaaaaaatcacataagacaatattttcaaatgttataccatctacataaaaattaaacttgcagaatttacaaattaatattctgagcagacagaaatattatacatccttttgcaaaatccagtcaacaacttttaaaaattcatacaggcacaacacaagatagtctctctatacaatctacctatttacatagcttttcccaccacagatgataatagctctcatcatagctaccaaggttcgcaaacatagtatatttaaaatatatttagcagcatataaaaaattagataaaagggaaggaaatactactattaaataaaaacaaaattaaatggtcataatagaaacaactccataggaaaatagatcaaaatatatttctgttaggacatcaacaatgtttcccatcacagaatatatgcacagcactggaaaaaaaaaaaaaaattaacagcattttagtcctgagcacagaatatagtagagctgcaaaactttggtcaatacaagtaaatgccaacatttaacacaaactgtctacccttctctgttagtagattaagatcaattccaccttatgaaaattcatcaataatattctcatatcttatttttgtccattacattaaaagagctttgaaatttgggaatccactacagactgatataaatacctgacaagcaaaccacaatttgactaacattttcaatatttagtttaaatacataaatcacttgaataaactacatgaatgagttaatggtgggctgcatcgtattccaggtgtgttttctgactgtcacaaaagcagacgtcttggtaattcaaataatttgaaagtgtgttttatagataggcacaaaaattcagccacaataaaagtgtgaataaagcaatatatcaattgtaggatatata

SEQ ID NO: 340717 - DNA, 1000 bp, Homo Sapiens
tttttttttttttttttgagacagagtcttgctgtgttgcccagctggaatgtagtggcgtgatcttggcccactgcaacctctgcctcctgggttcaagtgattctcttgcctcagcctcctgagtagctgggacttcaggcgtgtgccaccacgcccggcagattttttgtatttttggtggagacagggtttcaccgtgttagccaggatggtctcgatctcctgaccttgtgatctgccagcctcggcctcctaaagtgctgggattacaggcgtgagccactgcacctggctgctaatttttctttttaaataaagtttttaaaaaggattaactttcagtaggttttacatattatttcaagaatcattcacagactctattctttaccacgtatactttaaatactgtggtaatcatttctcctgttagtaaaatatcagtgtttctcattattgcaagggtttgccttttatggcatactgcacctttaagcataatacataatgcacaatcatcagttctcacaagatatatcattttctgtccaagaatactgtgactccaattagttaacaattagaaaatgtatgtgaacaccacgtggtgacccacttttcttatgtcctttgtattgctgggacttagcctttttcttctgttttgatgaagctgattggttttctcttgatgctgaaaaataaaaagggaaaattggtactagataattgtttacaatttagacgatacagttgtctagatacaacttatatgaactatctttaccaagaccattatacttaagtacatgatgctctgaaaataagggtacttgttcctacaaaaccatagcctcaacatgagacattttccactatttactcaaaagcatttattacctaccaataaacttttagtatgtaatttttaactcactaaaatagtaagtctagtttaatttggtgactgttgtgtttctatagtcattatgtaatt

SEQ ID NO: 340718 - DNA, 1000 bp, Homo Sapiens; identical to SEQ ID NO: 159625

SEQ ID NO: 340719 - DNA, 1000 bp, Homo Sapiens
ttttttttttttttagtataaaatatttattgaaaacaacagtatttaaaacatttacagagagtcccatagaggattctcaaatattttaaacttaggatgcagactgctattcacaatgcataaagaaaaaggtgatctctagagcaactatgtatctgcaacataaaagaaacatttacttcaatgcttttacattgaggaaaacgtcattaaacgtattttaattttagtactctcacagtaggaagataatagtctgcttttacacaggtctccagaattcctgtttttcctttagataaatttgacttcatagtcaagagtctcatggtaaagaaaaggtatcaaaatactcatatttttgttttcagctcaatttcccccaaatgttaacttcagctattctttattccacttgatgacatttttcatgtttagcaacattacatggttgtcctctttaaacatttaaaataattagaacattttagcattatctcaggtttcaagctgatgtatgtcagtttatatacctttgtatcttacaaatagtaaaacaaagtacattctatatgtctgatattaatgtaataagaaatccacttagagtaataaattagccctctttaccatttattccatgatataggaggcaaacaaaacaattccaaaacttaaatattgataaagatgacacatggccttggggtatatgtatgtgtgtgaatacatactcccaacacacatttacataggtgtatatgtatttatgcatgtatgtgtatattgctataactagaaagaccacatgcaaccataaaaaatatataataaaatcaattcgtgggatattaaatgaataaaaagataaaccataggagatttcagagaaggagtaggcacatggatataaaaagcgtggattaagacttcaagacggaagtgagatttttttctgaggcttaaaagagagctgtaattgtggtaaactagtaga

SEQ ID NO: 340720 - DNA, 1000 bp, Homo Sapiens; identical to SEQ ID NO: 159626

SEQ ID NO: 340721 - DNA, 1000 bp, Homo Sapiens
tttttttttttttttttccattatcctggttttatttaggaataggatgggggtggggagggcttaagtggcccacacgtccaggtgtagactgactacattgagtatcgctccaacaccgaacttccctttaacggtttaaaaaaagggtcatgagtgtcaacacagttcagcagtgttttcatgggagaccttcaggcaggcaggaggacatcctcctctctgctcaggaccaccacgggagttctaggcactccacctcactgttcttcagacagctgtgatgtgagcaggggctaggccggtaatcaagggggccagactgagccatgccacacccttcctcctagtccccatgctctcctgggagcctggcagctctgcttacttccgtttgtgttttttcttttgttccttacgttgctgtgctctttggtccttcttcatccttgagtccaccaccttgaaatgacctctgactccagctggccggcgcactttgcggcccacaccttttttggctacaacgtaggtgacatggcgtttctccttgccaagcccagccttcttgtagagacttcgcagctgtgccactttctctcgttctgagatgtccactgtgttcaccacggcttctgccttcttcctggtctgctccagcctcttcagcatcctccttttctttctagccttagcctcagccaccttcttgatgggacgtgcattgatttcccgccagcgtttccggtaatgctccacctccttcttaccaacaggcaactgtcgtatccggtgctgcttttcctcttgcacaaaccactccggaagctccccctcatcctcattaaatgtgtaccggttgaaggagttatctatgaggtctctcttggcctttttggaagaggcaataacagcacctagagcaaggccttcggggtccagtatccgatgtttcgctgggtcctcaataggcactatctcaaacccgtcatcatctgac

SEQ ID NO: 340722 - DNA, 1000 bp, Homo Sapiens; identical to SEQ ID NO: 159627

SEQ ID NO: 340723 - DNA, 1000 bp, Homo Sapiens
ttttttttttttttttttaagcaacaaggcctttattataacacaaatcagggcaataggtggcaggctgtctgagattcatgactggcaggctggaaaattccatcttaagaactctgtgagatccaaaagatccctgaaaaaggtagtccattttttcaagttatcagaagagtcctctgtgccaaaaatgagtcaggttcatggcctaactcattggagagaaaggaatgagaatagaatgagtgctgaggatactaaaaaatccctctgttgaatgaaacaaaatcaaagttacttctggatcatgatgagttaggcgaatgatgtactgtgggcacctgccaagtggtaaaggtgaaatgctttttagaagagaactgtaagtcacagaagtctagcaagagacctgggcaggtcgaaaaatactatgcagttcccacatacctggaatgtatgcagctatttgatgtatgacattcaatttaggcagatggcatcctcataaggggtttcctccagtgttatattgaagaaaaaataatattacctccacatctgtggtattttcctcatgtaaatattgtggtaaccaatgagagagggctgaaggctttctcacattcattgcactcaaaaggcacttcttcagtgggagcactcttttatgtaaagaagctagcattctagctaaagaatattccccatttgtcacactcataacaccttgatctggtgtgaactctctggccttgaaggagcaaaaagcctgggcaagagaatttccaaaatttgcttcacttataaggcctcattccagtatgaactccctgatggcgacggaacgaagaactgtggcgaaatgattttccacaatcaatgcattcatatggccttcctccagtgtgaactctcaagtgtttaataaggctggagttttcagcaaaggatttcccacagtcactgcactcataaggcctttctccagtgtgaactctca

SEQ ID NO: 340724 - DNA, 1000 bp, Homo Sapiens
ttttttttttttttttttaatatacaatttttatttgtcaattagaaagtaacaataaagagtgagcttataagttatggagttaaaattttatgcagaagcaagggaaaatcttcctccagtgaaaaaattctaatgagattttgaagacagaaacaaatcacattttttttgtttttgttttctaaatgttttacaagagaaaatttcaaaagcataatcagtaagagggagaaaagtgtgctgaattccatgtatccagcttgcagccattgttaactcaggactaatcttgtttcggttctacttccctttcaccacccccacaccccaaacacaaaattactgattctagatcatgtcatttatttacaaatactttagtatgtatctctaaaaggcatgaactctttaaaaaacataaccatggaatcttcaataatatagtaccttaatatcctcaaatatctagtctgtgttcaaatttttctgattgcctaataattgattttagattttgctcaaattaggatctaaagtctatatgttgccctttagttgttaagtcccttataatgtatagattccccaacatttttttggtcctttgcaatttctttcttttttggttgaagaaaccaaaaaagaaaaccaggtttttgtcctgtgaatttcccctttctggatattgctgattgcatatttgtggtggtgttagtaggatttttttaaaatttcttttgaattgcaaataagatccagagacctgatcaaattcaggtttaattatttggcaagaccatgtcacgggtgatgtgtgcactcctatagtacttccaggcccataatgtctggtcttcctctgtgatgttaatatttatcaggatttgggacagtttgataaatccattagaaatttttgttttttaatcagctttccacttaatggttttggcagccattgatgactgcccatatccataattttattaggggaaaa

SEQ ID NO: 340725 - DNA, 1000 bp, Homo Sapiens
tttttttttttttttttgtttttgctgatgcttttttttttgagatggggtcttgctatgttgcctaagctggtctagaacccctgggctcaggccaccctcccaagtagctaaaactataggcatgcatcaccacatcatttcattgaagtatttattaggtaccatcatgagctaggtgcagttctaggtattgagttttatcagtaaataaacatgatcatcacagaggatgtgaaggaagcatttaataaattcaagaggaattcagcctcataaactatgaaatattgggaaataattcatcatgtaaaaactggatataaagaaaaaacttttcctgcaggacattgttgcaggaagtcagggaccccaaacggggggactggctgaagccatggcagaaaaacatggattgtggaggtttcatggacatttattagttccccaaattaatacttttataatttcttatgcctgtccttactgcaatctctaaacataaattgtaaagatttcatggacacttatcacttccccagtcaatacccttgtgatttcctatgcctgtctttactttaatctctcaatcctgtcagctgaggaggatgtatattacctcaggaccctgtaataattgcattaactgcacaaattatacagcatgtgtgtttgagcaatatgaaatctgggcaccttgaaaaaagaacaggataacagcaatgtttaggaaacaagagagataaccttaaattctgaccgccggtgagccaggtggaacaaagccacatttctcttctttcacaagcaaatgggagaaatatcactgaattctttttctcagcaaggaacatccttgagaaagagaatgcacacctgggagtgggtctctgaactggcccccctgggtgtagccatctcttatggtcgagactgcaggggtgaaatagaccccagtctcccatagcactcccaggcttattaggaagaggaaattccc

SEQ ID NO: 340726 - DNA, 1000 bp, Homo Sapiens
ttttttttttttctttttgattattgatttactgtgtaatcaagagcaaccaaaactacttctcaattaaaagtacccaacaaaacttttgagccttcatgctacttcaagttaaaaagaaagcaatgcagcttgtgggtttcagaaaactgggccatccggatgttcatgcagtacaagtttcaccaccatactatttccgagagttcacatttgtcaaagtgcagttaacccaaagttgcagcgacagtatatcatgccagctgaatccagccacgtatctgagataggatcatatttctgcactgtattcagataggaagaccctgagtgaccaccgacgacataaaggtagttatcgattacagcagcaccaactcctgttctaggttctttcattggtctacacacagtccactgattttgatgaggatcgtatctttcaatgctggacaaatgtgagactccattatgtccacccaccacaaaaataaagcctagcatgacacccacgccaaagtgaatccttttatctgccatggatgcaaccatctcccaggagtccttacttggatcataacgctccacactgttcatgtgggcaggaccatacccaccaatggcatatatcattccatccaataccgctgcagcaaaacaacttcttgttgtcgtcattggtgccacaggttgccattttcttattttgggaatgtacttctctacagattgtaaataagattgtccatcataaccacctaaggcataaagttctcctgcaagtactactactccaagagtacttcggctttcattcattctctctagagaagtccaagtatttgtatcaggattccagcattccactgaattttcatgttttctgatagtgacgccaggacgcacattagttgcaataccacctataacatatactttttggtctaaaacgcatattccaaattcatagcgaggaatgtttaggggtgccaaaccaatc

SEQ ID NO: 340727 - DNA, 1000 bp, Homo Sapiens
ttttttttttttttttttttttttttttttttctttttttttctttttaaaaaatatttatttatttatttatttattgagatggagtctcgctctgttgcccaggctggagtgcagtggtctctgcaaacctttggaccaagtgtttacctctggggagggagcaagttcttattcctctggctgtcatcccacagtggtctcttccctgtccttgaagggtggcagcttgagacaatcaaaagaaagaaggtcttccaattgtagcacaattaggagacaaaggtatgaaaaggacaaaccagcacaccctaggcagatcctgcctgagcttcactggcccccgctgggaccttctctctcacagtcctctccacagtcattggccaagcacgctagagccccaggtattcagccaggaacacagcgagaatgcggcacaagttgtgtaccgtgggtgggtggagattgacctcggtgtccgcaggggtgtgccagacagcagggaagggcgtggagatgagatggagcacgggtacccctctgcggaggaaggggatgtggtcgtcttccacagagccagagggctccccgggttggaagtacatcacttcctggggatgagactgcagcaggttcaaacggtgcagacgcttctcaatgctcctcagccgatggaaccagcggaccgtgcgagggaagtggctgtagaaggtgggattgggggctcccaggagatcaagaagcataaagagctcaatagcctggatcctggtggggccggggctgtgaggtatagactccatgagctgggccaggtgccgggaaccgtaaagggagtccttgggtccccactccttcagcgcctcttcaccatccaagaagagcagttgcagggtcaccggggctgcctgttttttggccctgctcagctccaggtcaagtgcttgggccagctccagcagcagggcacagggcacagccgaatccgtggccccta

SEQ ID NO: 340728 - DNA, 1000 bp, Homo Sapiens
ttttttttttttttttttttttttttttttttttttttttttttttttttttttttttctgggggttaaatgagcctttattagaatgttgtagcagttgtgtttgaaggcggtggccctacaaaaaaaaaattaaattaaagtccctaactgcatgggtaggaaaaccagggctggagctcaattggaaccagtggagcccagaactcatggagacatacgtatgtacgtgggcacgggacgccctcgcactggcatgaagccggcccagcctgcaagagacacggaacggcttctgcctttcctcacggaaccagtttttaaagagtgggacgggaaagaaacaaaaatgaaactaaaagcagacctgatccttttaaaaacatttttgtagactctaaagggaattacaaaaaaaaaaagtctgaaagcaaatcctgacagcaacccctaggtttaaggacaggttctaaactagacccaaacggaaatcctgacatctgtgcgcagcggctcgccgcacacctggacggcacctcctgacctgcacacacctgtgcacgctcacctcccaggagcaaggccagggtggcttaagattgcgtccatcgaaatgaatagaaaaaaggaaaaaatttaataaaataaaccacaacagaaaaaccccgcgacagtcccccctccagctttctgctcagggctgctgccgaccggatcctctccttctcccttaatgggcagcttctggaatccctgcttctctggctgggtctgttcttcagtttgttcttctgctaagtctggaaggtgcgggggcgggggtctccagaacaagcagcaatggaggcgttcagctggagcgagggctgcctcggccatccctgcatctgtcagtcagtcacgggggcgggccggccgtccctgccaggggctgtggcaccatgagccgcccaccctccagggcacagggccagcgggatgatgcagcgtacaacaggga

SEQ ID NO: 340729 - DNA, 1000 bp, Homo Sapiens
tttttttattcgggggcagatttttattgcaaatatttactcaaaaactactatatacagcagagtattttaatcgccatttaaaacattgaacattcagtgaaacaaaatttaagaatccaaagcacattttaagaagtaaaaatgaagcattttaaataaaagtttattagtatttcaaagcaaactactgttcttcatattattcatttctatatctattatattctagatgataaaaagaactgaaaaatcaatttagcagccatcttatagataaattaggctaaatttccaaaaccagttcttttacatcactgttttaggtcccatttgaagtttttattttacaattacagaaaagtcacttaaacatggctgaatacatgccaggacatgttttcagtttactgctttacaatatctacattataccatactttggtttggcttccagaccatttttatgggcctatttctaaggaagatcattaaaacaatattaaaagcataatagctacaggagtttcaacaatgggtttctactttacattaatacaactaatacatcaaagaatttctacacagcttacacactgacaaaaagcacaaatataaatttatatcttaataattccactttcactgaaagtttaattaaggtaagcttacagcctggcaggctaacacttgtatggaggtacaaagattcaaatattctgtttacatgcgtctgactggaatgttatattaaatccaaaattaagtttatgttcatccaaattctcattagatcaatttagtactctaagcatgctccatttaccagcatcatcctcacaaataaagccttcattaacaatgccaatcagccattgtttttaatcaattactccccaaaagtacatggtttccaaatcccttcctctcagttaactgaaaaggatatacaggtaataaagatttttagcttaggattgatggaagtttgaaaggcttt

SEQ ID NO: 340730 - DNA, 1000 bp, Homo Sapiens
ttttttgaaatttgaaatccaaatgtatttgctttcaagttccattccaggtaacaaatatttgaccaatgaactgatgtctttagtttggcaattgggcaagcaaactctgcctctttccatagttgagtgcagcactgaggtgagtaccaattgttcctttactgacttgtagaataggataaagttgttaagtccccaaaaaagtattaacattttatcctcattgccaatcaacaaatcacccaaatttcccgctttccaccaccccaaaacccaagtaaaaggggaataaattagcccttgtggaactcaaacttacaagaatcagaggcaatcattggcaaactaaattcttggttttccaccttccttttcaacatttcccctgtatgcctaagaatgcaagagtgtagatttttaaagcaagctcactagcaagtcagctaatgtcaggattaaagataaaaataagttggaatttttcaaacccaggaggtttgctgcctgtgaactggaacagcttataataagaaaggagatgcaataggatggggagaggactcccagccccacatctctccttgtgtgaaaagctggtgcttgttcgaggtagggcaaccaggcccagcatacaagagggatgactgatccctcaaatacactacacagtgtggctgccaggagtgcttcaccttaggcctcacaaaccaatgacatgttctcagccatatttcaaaatatatatacattctttatgccaggggaatagggaactctgctctggaaggaagcaaacacctgtgaaacatgttttcagtctgaaaccgtatctttcttcataggacctgacataaagtaatttaacctgcaatattatatatacaactttggaaggaggagtggtgttttacaggttgagttagtcaactcctaactaatagtacccctgagctttaaggaagggaaaccctttcttaatgatttccagttcttcata

SEQ ID NO: 340731 - DNA, 1000 bp, Homo Sapiens; identical to SEQ ID NO: 159629

SEQ ID NO: 340732 - DNA, 1000 bp, Homo Sapiens
tttttttttttttttttaagcttgtgagcacaaattgtgagttttatttaactgcaagtgatgcaacctatgtaacacattcttttctcatccgtgttctttaactgctaatattacctttacagagacaaacattataaaatgtgcctgattggtaatttattaactctatctgtcaagtgataatattctgtaggcagcctttgaaatgatgttttgagaatttatttacaaccattgaacacagatggttttgtaaaactgacaattacaggctccttaaactcacaacatacatatatttcaatatttaaatagcctgttttcttcaaaagtaattttctactgctttttcataaaaatataaaaaagacaacatttatagttttaaaaacctatatttaacccaaatcaaattttttctacaaatgatacctctttccaaaaagttaaaaagacatcacagaatactgtgatgttaaaccaaagactcatcacaataacagcattttacttttaagaaatattgtgcagtatctcctttttaacctttcatgctagatttcaactatgtatatcctatgtaaacacaccagattaatcctagtcattcatatatatgcagtagactgtcatatatgaccagttaccatacaaactataataccatattttcaaaaatagcaaaaagcaatctttatgaaagcttaaaaaaagcttttaataaaaggcgaccaacattgccctaattttcagtaaaaattacctcttcttcctacctttccccctgctttgaatggtaccttttattgcatgttaatacacaaagatatttctagcacttctatttaagttagcctcttacatggctgctttcttttctgatacactgacttttaacagaaggcaccaagattagactcctaagaagtttcaatttttttgtccctttttaggttcctctagaataattttcctcagaaaaggataacttgaaaaa

SEQ ID NO: 340733 - DNA, 1000 bp, Homo Sapiens; identical to SEQ ID NO: 159630

SEQ ID NO: 340734 - DNA, 1000 bp, Homo Sapiens
tttttttttttttaggctgatcatactagagtatatttattaaatttcaccattatgatcactttgttataactaaattaaccctgacataaactttgacattttaaaaacagagaacatactgatttttcaactattttacttacatgtgttttttaattctcatgcagtgctcataattaggagatactacatattcaccctcacattatgcttattaagaaccaagctcagagggtagaaaagtgccaacttcattttccataaacttcccatacatatattaagccactgttcttctaattatatacttatggtacattcttctgtaaaatgtataactgtagtcacataaccattgttatgacaaggcggcaacatcatttcagattacaacaaatgagaccaaaagttgaagagaccacagcatataaaagtcatgagaacaccacacacatttcaatattttccactttccagtcaaaaaaacatgcacaaagttttcttagcagatagttgtcagaagtgcataaaaaaactggctttcaggtcatatatgttgagtgaggatcaatgccattgaggaaagagagctgtgttcattatcttttaggtctgtctatatcatctatagctgctagaagtttttgtcttgctttcttattgatatgggatcccaggcaaacattcaccagattggtcagctgcttcgttgaatattccctgtgctctttgatccaccgttccatgtcattctcagttaggtaataagctttaatataagtttctacaaattctttatcaggaatgggtctaatatctgttagtttttcaagtttcattaaaaactgttgaaaatccaattgcatcagggcacgaccctcattactgcatttcttgacattggcatatccttctacaatagttcgattagccaatcgtatacaatgttcccaaagtatattagacacaggcaagggtatgcgaactctcttagaaa

SEQ ID NO: 340735 - DNA, 1000 bp, Homo Sapiens
tttttttttttttttttcagagtcccatacctcacgggtattttctcaatcagtgaacacctcaagtactagcccatgtgttttgagtaaaaagggctcctttcaacgaggatccccttctagaggctttgactaaccagtctcttggcacccttagaatgaagttgagagcgtcacagggatgcttaacgaggccgaggggaaggccattaagctggccaaggacgtggcgtccctcagttcccagctccaggacacccaggtgagtgtcctgccacatcatccaggggacctggggggtggccttcctcggggcaggtccctgggacctctttgcatcccttttgcaggagctgcttcaagaagaaacccggcagaagctcaacgtgtctacgaagctgcgccagctggaggaggagcggaacagcctgcaagaccagctggacgaggagatggaggccaagcagaacctggagcgccacatctccactctcaacatccaggtgcctgccccgtgtccttgcttccttcatgggtcctctcaacttctctgcgctgagatcccccgcaggcagatcgcggtggagtgttggtgcgatggtgcttgaccccccagcttcccctgctattgggtttctccaacgaggagacatggtcttcgcttctcagagtctgtggggccagggacaggggccattcatggtccccctctcaccctaccctggacgctgtccttgtagctctccgactcgaagaagaagctgcaggactttgccagcaccgtggaagctctggaagaggggaagaagaggttccagaaggagatcgagaacctcacccagcagtacgaggagaaggcggccgcgtatgataaactggaaaagaccaagaacaggcttcagcaggagctggacgacctggttgttgatttggacaaccagcggcaactcgtgtccaaccccttatcacccaaaggcacgctggtgctgcttggccgtct

SEQ ID NO: 340736 - DNA, 1000 bp, Homo Sapiens; identical to SEQ ID NO: 159631

SEQ ID NO: 340737 - DNA, 1000 bp, Homo Sapiens
tttttttttttttttttcaaatccatataaatcttttacttaaaagtcatataaaagaataaaaaatgcagatttctgaatcaactgtagataaggaagcaaatgatgttgaaaggtgcccattaatttaaaatttcatcataggaatttgggtgaccttttgcactcagtattaaaaaaaaccatcaagttgctctttggaacagtagcatttaggtttgtttttttttttttttgtcacacttgtttatttctttgggatgttgctgtgtgtcatggaagaaacgctcccctgaaaactgtaaccaaacaaagtttggttaaaacaaagttggttcctttgttttcatggaaatgtcagacaactatgaaaagctaaggaagcatgttgaactgaaggtctggctttggtaaattaggcagagatgttctcagcagcaaacaggtaaaatctgacatcgagaagcattattttaatgtaggaccagttataatcttaaagaactgactaggttctaaaataatagaactgagaaataggactgagaaatgaccaacatcaagtataatacggtacacttagcacttgtttctatagaaaacatttcaaatcaagttctttatgatgtgaaccagattttccaaatgcctaaaccacttctgagctttaagcaaggcctcagaaattcagcgggtgcctgggaggcttcattcacattcacctctaaggagaggctaaaagaggaatttccagatggcagctactggctcagaaccagggggtcccttgccaagtctgtctctatgtggctcccggaattgctgaggtctcacttctcagagggctttgatggaaaataaagcaacagctgacgctcacgagcctcggaactctggccaggctccctgaggggtgcatcctaggagaactgaaaaatgggattggagcttttgccttatccttacaccccaagttctttgtgtggcagaacatctatga

SEQ ID NO: 340738 - DNA, 1000 bp, Homo Sapiens
tttttttttctgtaaacaataaatttatttcatttcttttaaagatttaatgatatacaaaacgtatatagtatctttaagtaatacactttttctttctccccacccccaatcaatattaaacactatttaaacagcttatcatctcttgccttgtctgtatctatgagatacactactaaatacaaataagctttatactgctcccttccaaataaaaattaaaattagtaccaaggaaacaaaagaaaaagaaaaaaaaagaaaaaaaattaaagcataaaacttagatgaaaagcttttcttgttattgttgaatattcaacaatatctggggctgttaaattacattttattggcataaggttgcactgcaatctgccagtatcacataatgataatccaactgaattaatttcttaagtaccacaaacagcattcatgttcaaatgttccaacacaattttaaatatatgcaagagttcatgtttacattctgatttgatataacaatcaataaaatctttggagaagtttgtaagttctgggttgttgctatagatacagatagggaaaaaagtactttaactttcctcaaaaggtaacttcccttgacgagtgagttaggtttctgcttttataatttaggttatgtatcagtttaccatggctttcttctacttaacagtgacttgataaaacaatgtttaaaaaacccaattaacatttttacacaatttgggttctatttaaaaaaaaaaactggctctatctttaaatatggagcctaaccctgattcataaataccgtccctcttgaaaatggtcttcagttcaggcttctcatacctctgtgaacctagaattagaacaagtcatttcccttcccgtggccaacaagcatctagttgggaaccagtgatatcatcactgaacacactaaatacactgaggaaaattttgactgccatttaaccaaaaggctgcgtgatttcttcat

SEQ ID NO: 340739 - DNA, 1000 bp, Homo Sapiens
tttttttttttttttttaccaaaaataagttatttattgctttaaaaaataaacatttataatagaataccaaattctatttaatctaatgtgttaacaaaagcataatatattccagtaaacaaggacttccaacttatcctataactaaaaagtcaactaaacagttggttttagctagagacaaacatcagtcactgccaccaaattccattatataaatttattttgcttcacatttaaggagaaacccagcagaggggtcgccctgctcttccccactagaaatgtactgaaaagtgacaagcccacagaaggaaaggctgtataaggaagtaggagcttcagtcaaatttctactttcattaccctgagggaggtgaaggagggtgttattttcatcaggtcaacatggatgacagtttgatcataaaaaacagcccacattaagatttcatttgtgaaatatggtgagcatgatcatgccctaatgatttcttagggtttggcagtgtctctggtcacatgcccatacttagggttgaaagaaatgctaatactgtaccctgggtcttcctcagatgccacagtggctcctgccctaggatgactaaaaatacggctctcctttccttagagatactggctcactatcaagaatagaggtatggaggcattgtgaactccagaagagttgagcctatggagtttattccacagtggatacattaggctttttagagctacaatgagactgtcagtaataggcgatcacctttttatacctatgaaacatttcttaaaattctcttgggtttggcccaaaagagtgaccagattgaaaactactctgttattcttaaggacaaatgcaattcctttaaagttacaaatcagtacttatatcctatagttgagcatgtcttcacaccatcccctgtttttggcctccatataaacagatgcattgcactgctgcatggtatattccatctcaacc

SEQ ID NO: 340740 - DNA, 1000 bp, Homo Sapiens
tttttttttttttttttttttgcagggcagcgtcatatattttcatctccagggagacaggtgcagttagggtgtggtagggcctcttcaaggggtccagaagagtgggggcccctgtcacaggtccgtggtgtccaggccagcgttggtgtaggatggcccctccagctgtccacttgcgcctgcctgccgtcctaacaggaccacgctcaggggctctggatctggctctggtggtgtgtgtggtggcctgtgctccttgatttcctgactgttcttgtccacatccacagagttgtcgtccagggagttgacgctgacagagtccaggtcattggagggagagaggtactccaagcccaggtctttgttggggaggttcagcatggggttggctcgctcagtgttgtacatgttagtccctgggatggcaggggctgagggcatcacccctgctgctgtcttcctggcctccttggcagccttcatagcttgaagcttccggttgtagctcttccgcacacacacgaaggccatggtcatgatcacaaggaccagcagcaaagccactcccaatcctatgatgacactgatgagctgtttcgacaggtctgactcctggctctcctgggagcccagcaccaccagccccagctgcagcagctgcgtcagcgagtcctgatcattccggatcatcacactcagctcatcaagggtcagggctgacccattggggaagacaaagtaggcatcgaggtaggagtgaggtcgggcccgagctgcagaatctatgtcctgaatgtccacaatgtatactgtagtcctggttgcctgggtaagagccgcattaatcgcctgtctgttggcgcccacctcctccttcggtgtggagaactgcagccgcgagcggtaactctggtccacggtgaagagattcagggtggtggtggcttccaggaaaggacccaaggaaggtctgtccctggcctggactgtcact

SEQ ID NO: 340741 - DNA, 1000 bp, Homo Sapiens
tttttttttttttttttctatacaacgtttttaatgaataagatatcattaagaatttatattctaaacaagcactttaaataaattttggtatttactaacttaagtattcaagaacctggtttgaagagtccaacagactgaaagtctgcttttcaagagaactatgatcgtctatcaatggagagattttcgtatttctatattctaatagttcacgatccttgcttgatgtcagtaattcattatcgactataccaatagttgcatcttccaccagaatatttgcttgatatgctccaatcggaatttcaggcaatccaatgtagtcatgatctgccactactgaaccttgcaagagataaagactttcttgttcactggattctcttatgtagggcttaaggtgggacattttgataggtcttttcagtctaaccccagtgttgtctctcaggacagcacatccactttctgtaatatagtctatgacacaaggaccaacccattcagactgaaaacgaccatccttccaccaattttcctttgtcttaaaacttcatgacccacttttaaatgaaatggatttaattgtttgggtttctttttaacaatgatcttgcttttatttagttcatccaaattgttgttctccatctggcccagtgaagttgtcttattctccattattttatcagcttctttaattgcatctagaattttggcaaacatacttgtattatcaccatccacttcatgaagactatctgaagtctcaggcatataaggatttcgactaaacatttgaaaatatggtgtatttttagtaggttccaagtgagttacattgaaggcaaatgaaacagctgataggtgatcatcccaattgtttgggtggtcagcacagtgtttggagagaaatgctttgattgtgttaggtgtactttccattgggttaacagttccagaggtgtgagaaattacaatttgctttatgcca

SEQ ID NO: 340742 - DNA, 1000 bp, Homo Sapiens
tttttttttttttttttttggacaccaactgcagcgtgatttattggacaagacgtgcacttttcaacagggcctcagtaaccacggtttccttcactgatcagtacaggaccagggtaaaggggcttaaagataagaaagacaaactcttcccaggaacagatggggaaagaaaggaggaagaagaggcatgtcctcccttcctccttccctagtactctgggcctccgttcaccccgtgctggagtggggctgaccaagggaagctgggggcagtgtgtgtcacagccagacatgagctgaggctgtgactgtccactcagggtcaaaatggccaggtggacgatcaactctgtccccactcaggcccccagatctggtcactgttccaggctccccccacccgccccaccgtgggtatggttaaaaaatacaaaagcggatccaatgcaggatgtcatatgcaaacatacacagggaccgagcttctacagtctctcctggccacagcctccaccgacaggtgtggcagagggcaagtgcgctgaggtgcttggagaagggtctcttctccatccaggtaggatgggcggctgctgtcactaagcttggggaaggtggttgatgaaggaagagcagagactgaagggtaggaccagagcggggcttctcccctcctccagcaggggagggggctggccagtcagaagcaggttgctggtacctacgggaagccagtcgggaagaggctgaggggctggctctcattggtgggcagcggagatcggtagccatcaaagtttcttggtatgctgccgctggtggagcctgagctgttactcagagtctcgatgcttccctctcgctgaagttctgttccggatcccacgacgtcccggctaggtgactcggccatggcgtcggcaagtcgctcccggaggccctcctccgtgtgctccatggaggacatgtgccgcagcccgaagccctcaggccagct

SEQ ID NO: 340743 - DNA, 1000 bp, Homo Sapiens
ttttttttttttttatttcaaaccaatatttttaatgaaaatttccctgttttctgattttacatatgttgaatgccaataagaaatacataaagaactctgagcatttatatagagctttcggtttctgtctgtttaatttgatgctctgcttattcagttatactagatgtgtttctcagagttatccagtccatacgtatttgaagagacaatttggtgtagaattgttagtgtccaggctcttccaagcaaggtcttccaaagggatatctcaaaaatattccttagagttgaagtggcaatgttatatagcctaacaattttcatgctattaaaagcttataatagcggatcattaaaatgcgagttacagattttatgaaacactacacgtttttacagagatttttaaatcaggtaataattaaaaaaaaaaaagcatatgctatagccccaaaccagctcttatgagtagcatttatcaagttggtaatgaacatttactgaaggctttattttaagaaattagttttaaacataaagacgggctctaagacatgataaggtaatttcaataagattatatcaaatcatactttaagatgattaaaaatattacagtactacccaagttactaaagaataagaatagtgtaatgcactcttcacattactgtctttgttaattctgtttttctaacagcaaatgaaagagcacaaattttgctaagtcaagcattccatttacagtacagttctttttaaaatatgcttgataacaaagtgttaaataccgaatatcttacttttttgttatgaagaaaggaatggtcaagcatgagatttatgtaagatcatttgtacgcaaaaagaaactgcaatagatgcttgtttctctcaacccttatgtatcaatagtttggcaaaattccgttgaaatttcttgtcataaaataagtcagtggacttaccacttgagaatagatatttgcttgta

SEQ ID NO: 340744 - DNA, 1000 bp, Homo Sapiens
ttttttttttttttttttgagtaaaaatcactagcaatttattgagcacctactgtataccaaatgctttaatgccattctttcatcctcatgacaactcgaggaggtagtcagtcacatcttcacttgaaggaaagaattcaggcaggacactgatagagacctctcaggcagtgggggttgggaagtagagctggtggtcagggcgggctggtccaagagtctggaagaactcccgcccctagcacagcgccaaacacatgcgggcagcgagagctggtcaaaagtgtaggtggactttacaaaggcatacgaggcttatgcagaccgggacacctgcgtgggtgccgtgcagggacctggttccctgtccttagggggctgggctctaagatctcaggccagattctcctcctcctcgccaatagggctgggcagccagggtggcgccggaccccggggcccgggcatggtcacgatgctgaagggctcgacaggcccagggatgagggtaagcggttcgggacccgcagggggcggggcctcgggctccggcaggccggggtcgagcagcgggtccccgcagctgcactccggggccgcgccttcggggacaaccgcgcatgagcagctggccccagtagacgcctccgacacgcagctgttcttgcggagtagaaaggacaggcgccgccccagcgggcctcccgcgaccatgcccgcgcccgccggcaggaggcgctgcaggaagtcgccgggcgcccctcccatcggtccatccaagccgtccagccgctggaactgcatgtcttctttggccagcgtgatgtcaaaggtggagccctggaaggaaggctgccgcagctggaagacagtagccgctgtgtatggggcgcgagcctcggctgcatcccagtacaagtccttctccagcacagccaggtcatcatacatctcgtccactgccagcatggacacctggaagtttctatcgatcaga

SEQ ID NO: 340745 - DNA, 1000 bp, Homo Sapiens; identical to SEQ ID NO: 159632

SEQ ID NO: 340746 - DNA, 1000 bp, Homo Sapiens
ttttttttttttttttttttaatgcttttaagacctttaataatgcccacgtgccctaaggttggccctcttaactccctcagctctttctggctttaagccatcaccccaggtgtgcagtttatgtcagagggggccatcaggtagggaaacttatcagctgctctaagagaaaggccgtccctgctattatcagtgggcacaggctggagctcagccagcaggggctacagtcgggttacctggagacatgatcccctggtcctctgagggcctaggcaggacatgggggaggacacggtcccccgggacagagtcccctagccaggagcagcctttcaggttgctcttgtgtgctagaaaaaaatattttctctatgtgccatgtcatgaaaaagacaaaagcactgagttaatgggatgtggaaactttagccacaggcttctctgcctgtgaagagagcatttctgcatgtgaacagctggagcaggaggctgaatggcagtgcttctccagagaccacaacatccacccagtcacctgtccacctacattcacctatccatctatccatccactcacctgccaaatatttattgcatgctcactatgcaccaggcaccatgctagatgccagagacaaagtgaagacaccctcagaggggcagatgcatggtggatttgggagactaaggcccagggagtagtaggttccccacaggtacccagcactcaaagcagcaatctccaaccctttgaatgcaaggacttttttgcttatctgtggtggcagatatcacaaaaattatacacagacttttttttttttttttagctcatcagctatcgttagtgtattttatgtggcccaagaaaattcttcttcaaatgtggcccagggaagccaaaagtttggacacctgtgatttacaggttatgcctagatctgaaacagatccccatccctcctaaagctgcccactggttatgggccctgtt

SEQ ID NO: 340747 - DNA, 1000 bp, Homo Sapiens; identical to SEQ ID NO: 159633

SEQ ID NO: 340748 - DNA, 1000 bp, Homo Sapiens
aaaagtagaaaacaaaactttatttgatgaaatctttttaaaagttccagtatgaagtaacaaaatcaacaacctacaaatctctttcagtcctttgcatttcaagcaaaatattctcttcagaaaaatgaccatttcataatatatatccccttctgtaggctaggcatgtacgagtgaacaaacggatataaaattcaagaaaaaaatgaaaatattttaaaaataaaaatctgaaccttttccttgaggtgtattgcgatatggttaccaacacattcagcaccttgtaatcaccaagttactgatttgagtcctggaacaagaccctaaaattaaagaacaagagatcctagtcatttgtgagtcacaggttggcagcagaagaaaaaccaacagcaactagaggagctcaaatacatgaaattcacacttctgaaatatttaatactcacttcaaacagctaattgtctatatgatttttaaaaaggaaacagctcagagtctggaatatgggtagttgtcctctgagtgacttgggcatttcttatgcatcttcagtactgttatcaacatatgactccatactgagaaagcaatcaaatatcaggagatctcatttcacagataaccttgggtatagaaacttaaggtgccaattgttcttttactttacccctaaggcaaacgtcatctagacttataaaagtctttcgagacctaaggttcttgtcaatatttgattattacaaaccacatcaagaaattttaaaaatctgaatcaatgcactaagtcacccatttgcaccaaaaaaaaggatccgtctttttttttttttttttttttgagacagagtcttgccctgtcgcccaggctggagtgcagtggcgcgatctccgctcactgcaagctccacctcccgggttcacgccattctcctgcctcagcctctcgagtagctaggactacaggtgcccaccactacacccggctaattt

SEQ ID NO: 340749 - DNA, 1000 bp, Homo Sapiens; identical to SEQ ID NO: 159634

SEQ ID NO: 340750 - DNA, 1000 bp, Homo Sapiens
tttttttttttttttttttttttaacgaccaaatcaatgtttattataagtaagtggaccaagtgtggtggtcctacctgtaaattccagcactttgggattacaggcgtgagccactgtgccctgccaaaaagttttttacatgttggattaacacaaccatttaattggtggccttcatatggtcaatggaagccaacactgcttaaagaataaggaataacagaaggctaagtacacatttggggactttaaaaaaatcacaaaatatttcattgaaagcaactttgtgtttttaaaatcaggaaaagcttgctgttcaaacttctaaaatgggtttttgaacacaatgcaaatagtttagagaaagaataataatttaaaaaaatgcctgatccatttctctaacgaatgatcaggaaagcagaggcaagaggtgactttaatttcacaagcaaatacatacgcatgtgcacatttatacgtctattttctgattacgtcatactccaggcaacaagggggcctggtcaatgtagaacttctcagacacagagctgccagacagtgtgagagtggaacccagatgctgagcttgccaacaccttactggggagagaatgtcaggtgcaaccgagagacaacattagattagctgtgcactttgcaagaagaggggaagaggacaatacgttcatcctgagagctgcttctgagaacctcagggaagaagtctagaaccctgatctacataaagtgacagatgacggactcgctgtggaggactcctgaagtagtgtccctgattagaatgctgatttcttccccaaaggtgatgtgggcacagaactgagctgtgtgaatgggaggccaaataagctctgctgaatttgctctggcagcccaagtccttaaggtgaggcctgtctggctgctgctgctgttaccagtcttttagtatggttagtcatttctcttgttcctgctgctgttaaaagag

SEQ ID NO: 340751 - DNA, 1000 bp, Homo Sapiens
ttttttttttttttttttttgttgttcaaaacttgtactttatttttctcaaatatttttacttatgctttttgtcattatccacagtgttttttttttaaagcctgagccactttgtggttttagcctcaatataataatcatccccttactcttagactaattccttttcccctgtcactttgcctgtatactctgtaaaaatgaggaccttagaaaatcaacatttcctgtgaacttgagagactatacaagcagtgcccaaatcagtaggattaggcaggtaaaaccagttggatagcagatatattatgatctgttggacaaaggtatagttgtgtgcatgtctacaaggtcatcgtgattcgccattagcttaaggatcatgtaggttgaccagggtgaggtaggactatccacaggattgtgtaaattgtggtaggggatgcagtatacaatattcatgaattaaacacttagctaactgctttcctgaaaatggtctgtgttctaaaagacaaagatctaggttttttgctgttttttactttaacttatgaagattcaagtcactaatatgttacttgctctggtttaaaatgaaagcaactggctatggtaaggtagagaagacagctgaattgtatcagaatatttaagacttttaaattaagttctgagttacctcaccttataaaaatatatgtcaatatactaaatacccaacaaagatccaggatgtgggatatttaaaaatacatttctcttgtatcagcaccaaaaataccagtttctgtacaacccgtgtcaagtttttaagtatacacacattaaaattatttctgataaaaaaatcacaaactccacagaaataattaaagatatatgcaaattactttcaaatacattttgacatcaaagtcaggcaattcacttggaagaatgttataatgaatgtcactgaatttttgtagtaagatgtttgacgtcaactttgatt

SEQ ID NO: 340752 - DNA, 1000 bp, Homo Sapiens
ttttttttttttttttttttttttttttttatagagacagtgtctggccctgctgcccagactggtcctgaattcctgggcccaagcagtcctcccacttcagcctcccaaagtgctgggattacaggcacgagccactgcatccagccacagattcattcattcattcgttctttctttgttttaagactagtcaagtgcagtagtgagaagaggggaagagtagaacaaggagcttgatctataactgactgcgaacaatcaattgagctaactcactaccttcagaccagccacaaattcatttctttagaaaaaagatgagaattattttctaaaaactgagcaatggaaaaggaaccccttcaatgggtaaagggaggtaaagttaactgaatggccttattcatcatacacattcaagttttatcacagttgtaaggtctggtaaatttttgagtagtgcttctcaagcaaggggagtggggagaggtacatcccattaggaatgtgccaccctccccaccatagtcttttttgagacaatgccatggtgagcaattgttaccaatgggaatgtgtcacatgtcttaagtgtagtgagacactttttaaaaattaagacccactccagtgaggtcttcagctgaccccctgccaaccttttagactttctgagatggcttggatgaaattatactcacattagacatctaatgcctattatttaatacttaatgataattaatatatttgaaccccttctcattttgcataggaagctttcaaatcagtgttctgcaaactgtcgtaaaattctgatttataacactgtccccaaaagtatataatgggactaaagtttaccaaacttataaaaatgttatgaaacactggatcttattttgttgatttaacatttcatttccatcattaagcatgtgaaaaagcaacataagcaaagattaaataatctaaaaatccttcaaattggtcactc

SEQ ID NO: 340753 - DNA, 1000 bp, Homo Sapiens; identical to SEQ ID NO: 159636

SEQ ID NO: 340754 - DNA, 1000 bp, Homo Sapiens
aaattttaaatatacctttatttctcaaactcaaagctttatcaagttctaacacattttgcattgacaagtgattttatctgcatcaagtaaggttagtgaccaccacgaaagaggaatccccagacctcctaggcactaagaaatatttcaaaggctatgcaaatatagaacaaaaagctttcaatttagtctaattggtatctatttttcatctatattaatttggaaataagttgctaccttagaaaaattacatttttatccattaaaataaaacaccagataggttgagtttttttaaaaacacccacagatctgtatttagctacttcctctttagtagatggtcatctcaccttcctatgcaaacacacacaagaatttgcaccaactctcactagcccaggcaaaactccaagcattttatttagcttacacttcaattatttttttaaagtgataggtaaacaagatttaggcacttgaacacacacacgcacacacacacacacacacagtcttttatttcctgatcttaaccttagagttctccacaaataatcctgaaaagttgccagatctttaaaaatacctctcctcaacaccgcccccctcccccacgacttggtcctctgattttaactggttgaattggaatatgttccaaagcgagctgtgaaattctagtctctgcaagattaaggatgtgaatctaaccttggaaactggattcttacaaagtccacccagaaggttttccctgacacagagccctggtccgacacccaggaaggaatggcctctatgagcgtcagggtctcgtctcaccattggataactactttgctctcaaaaagaggacatttgagctaagaatatagctgtatcccaatacaaggcaccaaccagtaccagaaagtaaactacaaaggagttattcctcaagttaggaagttgcttttgagtggcaccatttcccaaagtcaacaaagcagta

SEQ ID NO: 340755 - DNA, 1000 bp, Homo Sapiens
ttttttttttttttttttttttttttgacaatgagcagacaataggttatatctctaaggagctatgtcacacagtgctttaaacacagaggtgaaatgaagacaaaagaaagatggaagtgtggagcccggggcaggtgcttagctcagttcaggcctggcacacccccttccccattttgtccctgtcttggctagacctgttttctcctcagaggcccacagaccagacctttgaggaatagagcaagatgaaacctgaagttgctttccaccagacctctgggtgacccctgagtcttcagttgttccccacattcaaaagaggccacagcttcccttcacagaagctggggggacagatgcagtgatgtctcccacactctggatttctcaggacacagagctaccaggggtgtggagggggcatttccagcaaaaaaaaagctggcatggagggaacaatagtgcccctactcatttccacctgtcagttacagtccacacccactgccaggcgcccactgcaagtcacccgccagcatccaccttcccctccagagaaagcccaagacttggaaaatgtgtttcacagaaacccatcaaccccgttcccaaactatctagaaacccaacagaggtaggaaccactgccagcatcggaactggagacaaggaaggtgaacgctgaagaaaacaaaactctcagctgttttaagaaagaactgggctgggtgcagtggctcatgcctgtaatcccagccaagacatggcatcttaagtccaattttcagggcaggaggcaaaagtggcatcaccctggtgggcgagtgggggtggggggaaaacacttttgttgttggctaaaaagcctgcattttaaccaaagggaatataaattactctgtgcccaaactagcactatttaaaaaaaaaaaaaagagagagagagaagaaagaaagcaagaaagaaagaaagcaagaaagaaagcaagaaaga

SEQ ID NO: 340756 - DNA, 1000 bp, Homo Sapiens
ttttttttttttttttgaagcagagtctcactctgttgcccaggctggagtgcagtggcgcaatcttggcttactgcaacctctgcctcccaggttcaggcaattctcctgcttcagcctcccaagtagctggattatgggtgcgcatcaccatgcctgggcaatttttgtatttttagtagaggcggggtttcactatgttggccaggctggtctggaactctgacctcaggtgatccgcccacctcggcctcccaaagtgctgggattacaggcgtgagccactgtgcccggtccctttgttctttcttctaagcatggttttgtacttgcgggctagactaattttgaaaatcacattagaatttgtacattcactacagaggcccaggaaggctagatacctgttttgatggtgttactgctgactacaatgctctgggggtctggctgaagagaggccacagctgcccagcagcaccttctcctcaggccctgctgcagcactacacacatagtactgctgggcttggtcctctgtgtgacctaccagacttgcctctgaaggactctgggccaagactcctagccactcttattgggtcaggagtgctcaacttgaagttaaccaggaagctgtggtggaggcttgggagtggttccagaagagaagtttgagaaggcacagagccacatggcagcccatttagaggggtagaatccagcttccctcccagggcaggactctcagtttctgcccaagtactccaattgttctggtgagtggcagcagttggggcagcaaccctggtccacgggtacggcctccccaagtcgtttttcttttttctttttttgagacagagtctcactctgtcgcccaggctggagtgcagtgttgacctgaatagacgacgcctgctgcagtactgcggaggaattttgctgttatttgatggcatgcccctgcattccactctagacagctgtctcctcttta

SEQ ID NO: 340757 - DNA, 1000 bp, Homo Sapiens
ttttttttttttttttttttttttttttttttccaaggattcaaaagataatttattagtctgagaagaggagtcacatactatacccagtaatacgcttcttttatttttgtgcctttatcttaaaaatatatttaaacaaaaacaaagataatattgaattttcccataaactttgctttcttatttacagtgttatattgtaaataactttccattatacacaaattaaggactgtgcattactgtatgttctctttacatattctttcataatatagtccatacagctcgaagctatgcaatatttaagcttagaaaagcttgatgaaataagtacaaactgtatcaatcagactattatttaaaaaggttctgacattaattctctgctagattgtttcactgaaaccattctttgttaaagaaaaatgccccatataagggatgagaacaacagtttaagttaccacaggatccacttaaactggttaacaaataaaaacactttattacttattactgttattaaatggagcactaccactgtcaagtcatttaaacaagtagatttactcttcagttctgacatatcacatcagcgacagttggtacctctttacgaaataaaaaatgtttcctgcaactttaggttttacttgtaaacagttaaagcacacattttgtaaagatgatttaaccattcctggtcacacaatgaggagtttctatttcatccacggagaagcaaacacacatactccacacatacacatatgtgcgcacatacgcgcacacactcacacacagtcccgctcacccaccaaaggcccgcgtgtcactaagcgctaactacagcagcacttgtgtctcgagcagtgcacgaggttgcaataggaattataaaacaagaaagataaaacaaccaacttcagttaaaaacccccaaaagctcaggttctgaaatgcctctgagacgcttcacactcagcctgaaggg

SEQ ID NO: 340758 - DNA, 1000 bp, Homo Sapiens
attgctgaacaccaatatgtcactttattatttggattttttttcccatttgtcacatacctgtcaatgtttacacaatgagggaaatcaaccagcattggaagcaactgaccaaatcagttgataattctgtaccctcttaacacacatcaattttcacttggtagggattatctttaattcggtctcacagctattcttaaaattggtgtcaagattgtcacatctttaaatacagatagaattgccagaagtacataattatatatatatacacacatacagaaaaatacaagactgtttttccacaatatttaatttatacactactgtaactatatgcaacttttgaagacaggttaaggggtacaagtaactgtttagagcaagtaagtagtttggtccaatattatcttaatgtaatggtttttcgctccctcccttttatgtgacgacatactatgacatacaaaacatgcacaatcattcacttataaacaaaggagtaagacaccactcagactgacatttgtataccccaagggtcaaccacacaactaataaggctataatacagctatgcagcataaatggtcaacactgctgatcctaaagtgagcaccatatatacatctgaatataaaaaaccattgaaaccaaacacatatgggttagttaaaaggtgccattccaaggctatacataatcacaggaaaaagtatttacactgcttggaaaacagctgcaacaaagagtttattgccaatgccctttataaacttctctcctatgtttaatacagatgttacgctcactatctatgtgaaccacacatcttatttctggccctttataagatccctgctcaagaatttcaagcaaatatgttctatggcttcacccacacatctattctcatagctttcaaattataaatatcacaatgaactagagctgtagcttaaaacatctagcctaggtctagaaagtaaaataagta

SEQ ID NO: 340759 - DNA, 1000 bp, Homo Sapiens
tttttttttttttttttttttcctggggtcagagttttaatcctgggaaaaagaatctggccgctgggccatgccctgggactagcccgctggtccctggtgtgtccgaatcagtgctccagtgcccgcctcttctccagcttcttctgtagctctgccgtcatgtctgccagcccggctgtggggaagagaggctgggctgaactgactggcagcttcctgcccaagccaccattaaagactttgggctctggaagagaagacagatgaggccaggtgtggtggctcacgccggtaatcccagcactttgggaggctgaggtgggtggatcacttgaggtcaggagttcgagaccagcctgggcaacatggtgaaaccccttctctactggcttgggtccaacgggtggctttggaagcttggcaggaggctttggcaacttctttggcttcaggatgactggccaactagaggaagccacatcttggttctcatagtcaacagctgggccatctccaatgggggtcacgtagttctcttcctggttcggtagtgggggcagtgggggcagcttgtcctggctagacgcaggtgacagcggcttggggccacctgtgcagggtgcaggacctgggcccggagcggagggcgccacccacacattctcgccattctccttatcggcttccacgtagcctagcaccttctcgtagtcctcgtctaacaggaatggcaccagcgcctttttggtatgcgacacgaaatagttgaccacggcgtccagggaggtgcaagagaacggctgttccacatcgatcacgtacttggggccctcccgcttcaccttgtaatgccggaccacgtgcgtcccgttgtgcatctgccgcgtggtgaccgacacgccgtcggcgccgtccccgctgggccgcagcagcaggttcccgcactcggggtagcgctccaggagcagttgtgcctccagccggctcaccttcagga

SEQ ID NO: 340760 - DNA, 1000 bp, Homo Sapiens
tttttttttttttttttttttttttttttttttttttttttttttttttttttttttttttttttttttttttttttttttttttcgggagaaggtgacgtgacatctctttattggttcagtctatgcctggcccagcggcagccccaggtccagggggggtctggttggaggtctctggacagtcaggggcagcatcagcagaaaccctgggtgtcggggggctgtgggagtagcagcactggtccccgcgttgacaggtgccctccttaaacctcttgcaaggaaatgtcttgagccgggcagcccgctgggccacatcttccggcggctccttccgcttgttctgaagcagcctgcgtctctcctccatagcttcgtcggccgccttgccccctggccgggcacgaggccggggaccccagttggcctccgggttagcctggaagcgcttgagtcctcgctgtcgggagctggggttggcatcttcccggatggtgaagttggcctgcagcctgggctccacactgagaatgcggaacgctgggctagtctctgatagtcgctcccgtttcaccggacattccttctcccagcaacgcatgatgtcccagagggcagaggcaggggcatccgtcttcacagcgttcttacaggcgtgggagagtgagacccggaagtcagcgtggaggagggccgaccgcaactgcaggaggcttggtgtgttgcagtggatggtgctgctcagctggtccagggtgtagtacagaggcacgtccgggagctcctcagtgatgacgctcaggacccctcggatccgctccgaggtgtggaagcggccggggttagcgctcacagcctccaggacacggcccacaaaatccaggtcatggatgggctctgcccacatggggccaccaagctggtgtcgttgcccacagtgttcacactcgggggtcacagggggaccacaggctgcagagaacttggcccggccgct

SEQ ID NO: 340761 - DNA, 1000 bp, Homo Sapiens; identical to SEQ ID NO: 159637

SEQ ID NO: 340762 - DNA, 1000 bp, Homo Sapiens; identical to SEQ ID NO: 159638

SEQ ID NO: 340763 - DNA, 1000 bp, Homo Sapiens
ttttttttttttttttggtttggagcctcgggtggcaggatgatttaattagctttgtctttaagcaagagggaacgtaattggagaagggtagttccagatgttttgagttttcagccacagtggggcagccaggtcttccttgctcttggcctgaccactgcaggcccctgctctacccaacctgagaggcctcctgggaggaagtcgcaatgatagatggagaaggggcatttgtttttcccgtggatggaaagtgacacgtggggacaagctatgagaaacactgaggtgcgacggcacagagaaagcgggctgaggccaattacaccacgcagggactctcccaggcttcagctgccagggcagaggtggcgcagcccgtgggctccccgagttccctgcaaatcccacccctgaccctgagaccaccttgggccccgggagaccctacatcgtcgctctgtcagaggtctcaagacgctgagatacaggggaggggctgagcaaggcactgaactcaaaagagggaggggtggggcctgagacccaccccagagaggcagctccaggccaggggctctgggctccaggacaggtggggccaggcccagggctgggggcaagccagtgagggtcagggggacccccaggtcctgaagcagtagaaggcacgttgaaaatgcagagttcattcgagtcacctgtgtttcccaggaggccagcccagcaagtgcgtgcatggctgagtgggaggtggctggggacctggcctccttccatgggaatggaagtgggggccccatccaaccccacattgcccaagggatatagcgtgaacactgagcacccacgctcagcccctaagggagccgcttttagtgttggagtgggagcacgggcagcctgaccattgtcagggtgggaacctcagagccctcccactgccatgtcactgccaagccgctgaggtgccaggtggggatggcttccctctagt

SEQ ID NO: 340764 - DNA, 1000 bp, Homo Sapiens; identical to SEQ ID NO: 159641

SEQ ID NO: 340765 - DNA, 1000 bp, Homo Sapiens; identical to SEQ ID NO: 159642

SEQ ID NO: 340766 - DNA, 1000 bp, Homo Sapiens
tgaatggaagaaggggtgataagtaaggagatgaatgtgcgggttatgatctgtgcgctggccggactatccaaactcagaccccgaatctggggatcattggcgggatgcaccttttggatatgtgcaagggtttggagtctctaccaaaccaactgaagtgatagttagcaggaggatgtacttttattaaggcattattaattcaggatgacatatttatttgtcagagttgaatacttctgtgatgaagggcaatgctttcctatgatctttcaatctttgtatcatccaaattacaatgccagttaatatactatactcagaatattttaaataactttattcttaaatttaacaagctcttattagaaatgctttggtatcaatagaataaaaaatgctggttttcccccactgaatcgtgtcaagtaactggaaaagttacacatttgttttccccagctttttgggaatttttcacaaataatgactactacttattcacatggcttaatatggtacactgtaatgataattttttggacttcagaaaaaataaaccaaatatccagaagagaaatttgcaaatgcttcttagtttcttcttcaaaggatgtttatataggtggtacaactcttagatcaccttttttcccagctttgccattctcatccttaaagctgttaaggatggatcctcagtcccatctccagttgtctgagcatcaaatggggaatggtggacagggctgcctaagctttcttcttgctctttcagagatatggaatttttgtggggggatttatgatttgtgttttcatgaggactagcttctgatctttttctaggaagtggtgttggtttggctggctggtacacctgactatggggagctatggggtggtaggacggtttctctgcttctccttcatcctcctcctcctcatcatcaatcacaaccagctcagcatggatgatcccatcatatcctgtcag

SEQ ID NO: 340767 - DNA, 1000 bp, Homo Sapiens
tttttagggaacaaatttattttgatttttctgaaaatatcaggaactatgaaaaaacaagctcgatttctggccgtaccaaaagcaaaatacaagtaaaaataacatttgaaaaccaagtttaacctcagagaatcatgttttaaaatacaaagtttaacattctttcctctatggagctaaacaagttttctaaaccataagactgcagtttttttatttttttaactgacgtaattttttaaaagaaaaaacaaaaggggaataaaaagcacttcctaccctggaatcccgtcatttataaaataacatgctcaaatgtcagtgaaaataaacagttgataaacctgaaaacaagtcttttaatgagttcaggttacaaccgaacacaggattttgtaactgggaaagaacagcttgtgtaacaaccgattcttaccaaatacaaataaatataaaagacaatttaaaaacaaactgtataatcaaaatctttccgtaaaatagcagctttcacaaagtaaaaacaatttagttccacagagttgtatgctctgtaggcatatggccaattttcttccgagtccttttgtcttgcactatcaaaatagaatctttgtcttggagcaagtctgctgaagaaggcaccaaaatcctatcctccctattcccctaactgatattaataatcctcttatcaatcattgcaaggtaacttcaatgtcattaagtattaacattctaaatatgtaaagctatagaaggaaggtcctgcctattctctttgcccctctcaaatcattctagtctggtttaccaaacagaaccaccagctaggaggataaaaatacattcccatgttcactagccattaaatgaacatagccacttgtgcaggaagcctaacatttttaggatttcctaactttttaaaacttaaggataagtccatttctacaagctaattttacagctccttaatattcttaatctggacagt

SEQ ID NO: 340768 - DNA, 1000 bp, Homo Sapiens
ttttttttttttttgtgttccaataaaactttattaacagacaccaaaatttgaattttatataattttcacatgctataaaatattattctccttttgattttttaaaaacaatttaataaggcaaaaaccattcttagcttgtgggccatacaaaacaggtggcaggccagattcgccctgcaggctataatctgccaacccttgccttaatctcatgggacctacatactaaagagggaaaagaagaaaataaacaagaaaacaaatacatgaacagatagataattttgtgctatgaggaaataaaatagtaagctggtcagagaatgtgtctctgagggaccggggaaggtggagctgaatgatgacaaggagccagccatgaggaaagttgagtgcagagtattctagaaagagagaagaccaagggcaaatgtgggaggcaggcaccagtatggtgaattagaggaaccaaaaagggtatggcaggaacacggtgaagaggtgaaatgaggtgggaatgttcaggaatctaaataaggatgacatcatggttaagaatgtaactttaattagctgaccacagtagtagttctgttaaatagagcctaattttatacattgggtttgtggttccctgcaaatttatatgactacacaacgtatagtattgtgaagttaagagagagaagaagaaaatgtttttgtttttgccaaagagttgtagaaatacacagtatctcctacataaaccagcacatcaatgagagcagattcaattggaccacacaatttatttcaataaatgctcaagttatgatgcttcattttatatttgctcatactacaaatctgttgctccctggaccacttatggccatctatagcagttttatgtaaaaagtctagtttcttcatgaaacgtaaaacattaaatccttagttgatactttttcttcttatgctcaggccaatttgtgtgtaccaagcctgctca

SEQ ID NO: 340769 - DNA, 1000 bp, Homo Sapiens; identical to SEQ ID NO: 159643

SEQ ID NO: 340770 - DNA, 1000 bp, Homo Sapiens; identical to SEQ ID NO: 159644

SEQ ID NO: 340771 - DNA, 1000 bp, Homo Sapiens
gagacggtgtctcactgttgcccaggctggagtgcagtggcgcgatctcagctcactgcaacctccacctcccaggttcaagcaattctcctgtcttagcctcccaagtagctgcgactacaggcacatgccaccacgcccggctaatttttacattttcagtagagacgggctttcaccatgccggccaggctggtcacgaactcccgatctcaagtgatccacctgccctcagcctcccaaactgctgggattacaggcatgagccaccatgcctggcctgcttcaattttttgatgccactttgtaaacggcacttaattatggaaaataggaaaaagcaaaactaaaataaggaagaggatatatatataacttttcacaatctcttttctgattccctttagatgcccagtcaaccaggaccacacacagatttcattttatttgtagggtatatgaaaagatttaatagtctcatgcattttattttacgtatactgatttctacgttttgactgactatttaaataaacaaaacaagactcatttacaagggcatatactcttccttgtttggccagaagaaaatctatagctaaatctacttagaaaaacaatgctgctaaaactcttaacttcagattgtattaggctgagattttctaataacaaggttctttaaaattagaagggttcaatcccagcactttgatattatcattttatccacagggtttgtcaaagggtatcctcattggcttgccagggcataagagagtttgactgagaaggcattagtgggctgtgtaatgactaactttgtaccactttctcaattagcaacatcagagatatcagagcaaatggtagatctttacagtgatgcagttaggagtttgttaactgccttttggaagtcagtgtaagaataagtggtgttgatgggttcagtacgagttgtttccttaactgttttagtcagccggccacagcaaca

SEQ ID NO: 340772 - DNA, 1000 bp, Homo Sapiens
ttttttttttttttttttttcacgattcagaaaattttagttttatgtacatttccaagcaacctcaacatattatgttagttttcaatattttacagggtacagaaaaaaatagctcaaagtcttctttaaataagagcataaaatgtttaaacatataaacaatccggtttgatgcgtgaaaactaatttcacagcttttaaattaggatataaaagtttcatacaattagttgttgtgtgtggatatggtttgaatttatattacacactactggattacatccaatagcatttacctggcccgagcaggtactctgtaaacaaaacaaagttatatcaccaagtgccttccccgaattcgctccctcaaaccaaccacacagttctgaccactctacagtcatggcctgtcatcagagctttgtatgaaattaagtcaaagtgtggagctccttttactcatttttttttctccttaaaaaagaaaagaaacaaatgttccaagtaaaaacaaacgtatcccaaagcatgtgtgcattgaaaagtaaagaaacattataacaacttcataaaaactgacttaaaagtttaaaaggaaaaaaacatgtttctaagtccttctgactggagtaatttctcttatataaagaagagatattttcatatgtaatagtgtcctttctttacagaaatagttgtattatgacacatatgcacaaggattaacactataacacactgtacatggtgggtccagcttgctcaccagtagttgtctgaggccagatcactggggtggagccactctacagaggagcccagcagagtctgaatttcgttcgtgaattccaccagatctaacagctccttactttcagggttgaaggcttccaggtctttggagcaagagaacaagagacttgcagaaacctgccgataaaattctgcctctgcaatggtgacaatttccacgtttggaaaattgcagcgaaatatg

SEQ ID NO: 340773 - DNA, 1000 bp, Homo Sapiens
tttttttttttttttttttttaaaagttcagctttaatgacaaagatctattacatcagtctttttcttcaaataagatagatgtgaataaacaacttcaaacaggaggtactatggcctcttcaatacactgtagccagtgcactgggcccttggggatgcccagtgatatacacgttaaagcagtaatgtaagtctgtgagccactgttcctgaacacttccactcttcaatgtcgtgatattcttgatgatctgctgcaccaagatcgcattggtcaacatatgagtcctgaggggtgcatgctgaagcagcagtcgaagcagctggcccacaacaggcagctcctcaggcccaactctgttcacccgcaggctctgcagcatcaacctgaggactcgaggcaagagagccaggatggagacacagaccccccacagcttgtccctctttcttagatgttctgcttcccctttctctatagtgagcagaaaataaagaagactgtagcaacaagaagccagaaatggcagtagagtctcactaactacacaagtatgatccaggagcttacagataacaccaaaaacacagccagccgtgctgtcaggaattacagtcaacccaaccaaatgcttactgatggcactttgcaagatgtcaaagttctgacttcgggcaggaataaccaataaactgtgaaaaactgcctctgttacatcccagtggtgtaaaaattgatccaaatctgtaaggtagagaagcacaggggaaagctgtgtctggatgacatgaggaactcctcgaaggctctgaagccaagtcaactcctctttcgaaaaccctgtaagtgtggaaaataagaagctgaaatagtctacatcactcatcaaccagtctttagctgaatacttccacccagaaaatgatgatctcatgtgcagtatcccgataagcatggcagccaaacttgaactgagtcttcccataatacagcaac

SEQ ID NO: 340774 - DNA, 1000 bp, Homo Sapiens; identical to SEQ ID NO: 159646

SEQ ID NO: 340775 - DNA, 1000 bp, Homo Sapiens
ttttttttttttttttttaaaaacttccattttattttcctttaggagccatggagcatattggcaatttggttctgactcctaaaatcattttactatacctttacactgcctacattggagactgcaagcagtggaaaagaatagatactccagatctcgtcgataaacccaggctcctcctaaaccagccagattcagagagaaaaacgagctggcctgccttattgtattacttgccatcaaggttcaatgtggttctattacccagtaaagtcattgaccaaacaaggtattttcacaaagctaaccttttttaaaagcatgtaaaaattgtacatttgtacatatacgcattacaattttacatccaaagatcaaatagttaacagttcatttagggctttttgtattgtttgattttccagattctgtcactcccttggctttgacctaacctgacatcattctgtcacattatcttctaaatcaagtaaacgttcatttgtctcagtaagcacaatctatctgggtgacaccagagaggtttctgaagggtctggtgtacgctgaggcagtgaaataggtctgttggcacaggtaagaaggaagtggcatgataaacatcacaaccccagggaacagccttccagagtggcacaagcactcccaccgagatggtccagtgcccacccgttaaagagtcaaaacccaaagttactgagtgtcccacaaagcaagtcacactagctctcaaaggaagtgagctgtttcaggactcaatgaagcagggtcactttgaacactggtggtttgacatctgtgaaagaagtcatttgaactcttataaagagaattaaggggtcagcagcttccctggaaaatgcaggaaaaccaataagagaggggacagttttcatcttttcataaagttcttctccagagctaccgaagttctctgtaaagagtagatattccgcttcacccgatcctccaggga

SEQ ID NO: 340776 - DNA, 1000 bp, Homo Sapiens
tttttttttttttttttttttttttttttcagaagcaaggacatgtttattcagatccatgggtcgttacaagcttcattttggtcacaggccctaaaatgccattatgctcagtttacatcaaaatacaaagcccaacatttacaatttcaaaaacattaaagcaaacccccaaaaccccacaccgaaaacaaaggcttggtttggaaatcaccactgagatgctgttctccctcgcatgtcgcctgtggggtgaatgaaggtgaagaccccgtgctggtttctgtcagagaatctgtagttgtatattttgaatacttaagtaccactgaacggttgccatgtctttgagcacttgatgttactgaagtgacaatgcttctgaccatctttggctgcagagcagaaactggcagaatccgaccccatcgacccagcagtgtccccaacgcctgaggaccagcacccatctgtgacaaggcacaggggtccgcgatgttggccactgctttgggtgatgtgctcaatggcttggggtctgcggtgaagcccctgggctctgggagggtcttaggctcctgaaacatggaattctacggcccagtcttggaacagctgggagaacatgaagaacgcccctcacagtgaagaatcaggacagccactctctggttttctcacaactctagaaactttgattctttcctggagtggagacttaagccactgtcctggtcccacacagagagaggaagcgccacaacccactctgccaacctcaaggccagccagtggggaggccaggcccaggtggctgttggcaggctggctcccaagcttggtgcagcagagtagccaaatgggcagtggaaaaaaggccccgagagctggcttggccgtgagtccttggcggagggagggaaaggccgccgctgagctctgcgctgtcacagagcgtagctgttgagccctggcagctactcctttgctggggcccacc

SEQ ID NO: 340777 - DNA, 1000 bp, Homo Sapiens
ttttttttttttttttttcatgtttagtagatatatttatttttataaagacaagtaaagccaccttataacatatttaatttaatgcataaggtataatgaactggttcagtttaacacaactacgtaagatttttaatattatgaacaacctgtttggttaacaagatagcagctataaaactataatgtttagtttgtttctcctgcagactcagaaaataaatgttttctttttgctttgcatttataaactttttgcaactcaaaaaatctctttcagtattcaattttaattaatctagcctaaagtataatactcagcaatctgtactattctgactttaaaatcatatcaaatattaataacatatatgctcttaagaaagtacctttctttgtaaatacaactgacaaaatattcagcaaagtgtgtacaatagtgccttgtatacatgtgtctttctagagctacttcagtataatttaacaatcattgcacaatagcagatgtataatagtttccatataaactattatctaagctgtaaaatatggacatagttcagcaaatcatttctgagaaaaggcatagatgtttatttaccaactatctctttaagtggtaatttccttgaaaagacaaggttgattaaataatttaaagacactactagtaagtgtttagctaaaaccaatttatgggattttcaaaggctcaacttgaaaattcttgaacttctttgaaaataacatattctatgagcgatgaagccccatgtgttaagctttgttcacagtggattcttcccaaaggctgactgtaccaactccctccaagaaagggagacctcttgagtcactctgaaggaggtctgccctttcatggtttcacatctagaaaagtcaaaaggcttataaccaaagtcttttctaaagaaagaagctccaatgaatgatttctccccctattttctaagtcaattgattaataaattgt

SEQ ID NO: 340778 - DNA, 1000 bp, Homo Sapiens
ttttttttttttttttgggatttggccaaagctttatttaaagaaaaatatatagccttacatatttttattaacagccagaagatattgcaaataagcacctaactcaagaaaccagaaaaagggcctagtggagtgggtcacgcctgcagatctagctacctggcaggctgacacaagaggatcacttgaggcttcagtgagctatgatccagcctgggcaacagagcgagttttgcccaagcctggaaagtaggccaaatatataatagagtttctttcatcttcccagctcgagagtcaggatgtctcagatttaacaacagttgaaagggaagactcatcattacttaatcctgcagccaaaaactttttctgtgaattacttggtactgtgttccaaagccagtctttgactattgtgatcacggagtctttgtgcttctttcaagctgatccagtccatcactggcacctctgtgtctcagaatgttgttattgctatgtctgctgttcaaaaacctctcctgtgggcaccaaaaacacctgttcttttgggggctgtctcttctcacttttaagtacttcagctgatggtttgtcctgagcagcagcgcctatgtggaacacaccatcatcactcctcttcagcacaacatgttccatggccagagtgatggggatggggcctggagatgttggatagatgggggggatatcatcctttagggtgatgctggagttcagaagctcaatctgcatggggactaccaccgggatctcctcatcctccaagaagggccccaggccactgagcactgaagtgagcagctcgaggtcacagccatgaagcaataaatgtaggaagccattttgtgaggccaggggggaatgaacagctgctccaggccccacctcaaagcgaaggcccacagctggcctgatgtggccagtcttcaaagttgaggattcctgaaagcatgtacctgggcactgtcca

SEQ ID NO: 340779 - DNA, 1000 bp, Homo Sapiens
ttttttttttttttttttttttttttttttttttatattttatcaattttattgaaatattccaaggatcccaaccccatttaaaaataaaaattgtaaagcactccattcaataaaagcacataagtccccctcaataattagtatgacaattcacgatacagctcttactctgggagagtttattttaccctttattccaaaaggcacaaagtcatctgaggcctcagatattaaccccactgcatgttaatgacacaccactgaggtgcagctcaatgtaattattaaagcttataacacacttccccaagaatttatagattctttctataaataataatttaaaaaatactgcaccttaagaccaatacaggcttaacaaaagacctgaaatttctgcaagggcagttttgtttcttgatagaagtacaacttttgaaagtctattcccagcaaaagaaacactagacccagcttggccaaagaaacaaaataaaacaagtgatttctaacacgctaaaagagtacattttcatcagctccaaagaaagcagtcctggtcattcagaaggctcctatgatcccaccagtctgcagtcattagaaatatatgctttacaggccacaggctgctctggatttggtttcagacaccagtgaccagaagaagccagttttgcgtgtgaggggtgtgggcccccgctgccttgggcctgctcaccggggtggatggacccccgccgggtcacagcctgctgtcacgtctggactgttggcctcttctgcatctgggctgttgggctctcctgctctctgtccctcagtcacgtcattgtctggctgtccggtgctggctgcactctcatttgtgaggataaccccttccttcttcttttctcccaatacctccagccccatcatcctgagataatgaagccgttcattcttgggcacaaaagttcgaatggaggcctttccccgccatccgcataagacg

SEQ ID NO: 340780 - DNA, 1000 bp, Homo Sapiens
tttttttttttttttttttctttttttttttttttttttttttttttttttttttttttttttttttttttaacaaaacaaccaacaaccatttaatcttatttcaaacctaatgcaaacattctcaaataaaatattagcaaacagaactcaaaaatgcagctgttttgatagaatgaaatatccaagacctgtgagacaactgtaaaaggtgttaacatgtataataagaatttcagaagagagaaaggaacagaagaaatattcagacaataataactgagaatttatccaggaagctcatagaatactgaatagaataaatgccaaaaaaaaaaaaaaaaagaaaagaaaactacacctaggcatatcatattcaacctacagaaaaatcaaacaaagaaaaagtattgaaagaaaccagatagggaaaaatacgccttatctactgaggagcaaaaaaagaattatatcctatttctcagatactacacgagccaagaagagagtatagcgaaatgtttaaagtacagagagtggccgggcacggggagtaatcccagcaatttgagaagctgaggcgagtagatcacttgagatcaagaattcgagaccagcctgggcaacatggtgaagccctgtctccactaatacaaaaatgagctgggtgtggcggcgatgtgcctgtataccagctactcagcaggctgaggtacaagaatcgtttgaacttaggaggcagaggttgcagtgaactgagatcacaccactgcgttccaccctaggcaacagagcaagactctgtctcaaaaaataataataataaattaaataaagtacagagagaaaaaaattcatcaactagaattataaactacataacattatccctgcaaagaaataaagtagaagtaaaagactctctgacaaaccaaaattaagagaattagttgccagtagacatgccttgaaagaagcattaaaagaagttctctggagg

SEQ ID NO: 340781 - DNA, 1000 bp, Homo Sapiens; identical to SEQ ID NO: 159647

SEQ ID NO: 340782 - DNA, 1000 bp, Homo Sapiens
tttttttttttttgtggataaatatattagcaaataaatatatttcttaacatagtgcctgattcaagcgtctgtctggttcagatataaatacccatgtgggtacctaggtgctagtctccccactaactgagggaaaaaggttcccaggtggggtcctctgcccactttgccaccacattcacattccaaatgggataatgcctgaggggccaagagtggtcaggctgccctggggtgaatgtcaccctgatgaggcccatcagctcttgtccactcagtgaggccagacttgtgctctaatccactctcctgtgggtccctggcctgtatggcttatactggggagctgggcctctgggctgtccaaacccaagggtcacactttgcttttcctttgttgtccccattttccatccttgctctgagacaaaacttttcccagagaagaactctttgttgtccccgctcagctgtaattctgccttttctaccttcattccgcccttcctctgcccagatgaagtccagcagaaattcctcctttctacctctctgggactctgagacaggaaatcttcaaggaggagtttttccctccccactattcttattctcaacccccagaggaaccaaggctgctgtacccacctcagggacagaactccacactatagtgggaaagcttcagggacccctccttttagtgctcagggctcacctatgctactggtccttttggcaaaaaaggaaaatgatagagccagggttgcccctgatgtagcagccttactgtggaggggccaaagctggtgttcagagctcacccaaggagggaggtgataaggtgtcatgcgttctgctgaacccactggctggtatgaacatgaggcttggggtgagggaaaccaagtaggggttggagaaggagcagcacctttgtaacacctggctacccatagctagctttctgccctcaaaaactcagccttcaagggat

SEQ ID NO: 340783 - DNA, 1000 bp, Homo Sapiens
tttttttttttttttttccaatttattacttttattgagaacaggaagccgcacacatgacaatacaaagtcaccgttctccctgcaaggagccaccaccatccagtgaggagggtcccttccacccaagagctcagaccactgtgcaggccagtgacggcctggaggggcctggcccctacccgtgacttcacgtgccctgtagagattcagccatgggtgtgagccacagaggaggccaatacggaggctcggagggagacgcagccctccttgtcaggctgggagttgtcctctgaggaccaccacgcccagtccaccccacctggccctggcaggatcaccacatgccctgcaggagcagtagccactgccgccaccatcggcccacgcgggctggcctgctctgggacaggcagtgaggtaggagcagcagcatctttggctagaaggacatcacccgatggccatgccccagagaggctggggacagcagcaccatccgcagtgaggaacagggcctcctagcgcccttgctagcacctactcccgagacgcgaggggaacgcgggactcccggctcatcgagggactcacttctcctggaactggaggaatccgggtttgacctggggcttggcgttctctagagaagtcgttgccaagggcgaggcgggcaggtgaggcactgacgctgggatctgaggcatctggggtatggtggaagccagctgcttccaggcgagcagggtgggggtggagggcacggaggccgggctgggagcgggcccctccagagaggacaccgtggccgtggtgacaggagggaccggaggggacgagggggccatgggaggtttggtctcggcggccgaggccggaaaggcagcctctgtgtttccttttgctgctcctccctctgtccggaagtggaagtttgcgtgcttgatggccccgtccaaggtgctgaagagcgcgccgcattcctccaccacgcagt

SEQ ID NO: 340784 - DNA, 1000 bp, Homo Sapiens
ttttttttttttttttaatgtaaaaatcaatttattatacaacaatcatagataatgctttttatctacaaagaaaaatggcttctgcagcctccctgtctactccattcatgatactatgttcttaagatataattactttcaaaggaaaacaaagcgatatccatattttccaaacaaggaagcccccagacacatttatgaacgatatggaaatattggaaagaactcaaatggactcctagatacaaaaggctgttctgcccatcacagtaaacactgttttgccttaaaataaaaataataaaatatttctcaaatgcaggggtgaggactttaccccgtaacatgcctaagtggttcgatatataattttgatggcttgacaattgctatgtttaattccattcagttaacattccattttgttagtttaaaaaattgggggaattattaatagatatgctttacagtatttaagtattttcattcccatgggtcagaggaaatttgagagaaaacattctccattttttttaatagattatagaaatattaatttttcaatagttttagaaaaatcacattaaaataagcattttggttttttgaagttacaacacttaacgacaggttaaaatgtttacctgatttattttttgtggctaagatttcataactatttttttaattagcccttgaatggtttaaggctataagtgttttatgaagcatctcttgaattgaagaccaaattggaaatacacatcatgaatgaaacctctctctagtcactggcattagtttgaaagtataagctacccacatttttcactttcatcagagaggtttcaagctgccttgtacttaaagctgcttgactttgtctgctgaaggacagctccctccttgccatacagatatgaagcccaggaaaacatccagagtggcaggtatgctatgcactgagaccttagggcctcactggcacgtaagaata

SEQ ID NO: 340785 - DNA, 1000 bp, Homo Sapiens
tttttttttttttttttttttgcatgccagcctaactttattctgcttaaagaattatttctctcgaaaagctgcttacatgagcatctgcaaaatagtactgtttgtggctgtactggctcagcaattactttcccaggaagagggtagtttggggggtaggggtgagtaggaataaaaaagaacttttccctccaagtgtaaacaggaagcttcagccgatcttcggagcactgtgatcacaggttttggctttcctcaaagttcctttttggaaattctggatggagctgagcaaggcccctcggctcatgccattcacagcctgagacgagagctgggcaggtgcctcggtgctcgcaggaggcaagggagctgctggtggtggtggaggtggaggaggtggaggtaatgcagatatccctgatgtagagggtggagttggcgatgacggggacgtgagaggtgagctggccccagatcctgctgaattattggagttgctgtacttcgctgaatgctcttcactattttcaagagcagatcgttttgacttctttcgagctaaaatctttcttttttttctttcctcctcagatccatggtgggactgagctcttgtcagtcttcgatgctggtgaatctgtttctgttcctcaattagtctcttctctatacattctttggcaattctcaatgcctcttttaactttgtagggatcttaaactgtggtttttcagaagtggttagtaaaacatcgctgaataatggcatctgtaagagccgggagatggtaggcatgccatttttacaggcttcacaagacagcgtagactccaacacggccaccacagccatggacggggcaggagggaaggagtccacaggcaccgagtctggcggtcgtccataagtcatttcatacagtaagtggccaaagcagtggacatccacactttccaatgtattgattttcctgaattgtgaaaaataagatcg

SEQ ID NO: 340786 - DNA, 1000 bp, Homo Sapiens
ttttttttttttttttggaggaggaaatacaccatttatttacaattcttttcactttatccacaatttcccatacaaacataaaaactaaaaaaataaaaccaccacttgggaacacaagtgtctttctttaattagtccggttgagggagggtctcaagccctctcactctatgaaggagaccactgaggcacaccgaaggggaaaaggaagagggttgggaagaatgcctgagaaacagctccagatgagaaacctaactcacaccgatgtggtggggcctcactggcaaagagacttgagggtgttacccaccagggacactgctcggcttcccaggaggatgacagctgctggcccccatccccccaccctccactaccaaataccaaaactcaaacaggggtcacacatctcatgagctgtgtggggagtgaaggtgacagtaagggatatggagtgctgctctctgagaagagccccaaacccgagggacacacaagaagcccctttccttggcactgagtcttcagtcacagcttctgtccgaatacaatgctgaacttgaaaacgtaaaaacaaaagccctccccagattccggggaaggtggggataaaaacacatagagagggcttgcccgcctctgcagtcccttcctggggaggctgctaggagcaaagggcagatgctccaggaaagtctgggggttggggggcggggtgaagaaaggggcgaggaggactctgagacactgatgcttgggatggctccagctgctcagctactcacttcagcagcctcccgttctacccctcacagcaggacacccagaaccaacctggaggtgctgaagccaccttcctggcaacttcctctgtgctagtgacctagattgctttcacatgttgatgcacattataaatataaaatcatatctgctacaaagaggacatatatttgtacatctttacccatatacataataacacaatttacac

SEQ ID NO: 340787 - DNA, 1000 bp, Homo Sapiens
ttttttttttttttttttttttgagacagagtctttctctgttgcccaggctggaatgcagtccgccttcctggttcaagtgattctcctgcctcagcctcctagtagctgggactacaggcgcacaccaccatgccaagctaatttttgtatttttacaaatatgagagacagggtttacaaattacaaattagagacaggtttacaaatgttagagacagtagagacagggtttcaccatgttgtccaggacagtcttgatctcctgaccttgtgttcccctgcctcggccccgcaaagtgctgggattacgggtgtgagccaccgcgcctggccatgtgtatagttcttgtgtttgcaaatggatattgtcatgtatccaccacacagtaccatacagaacagctccatcagcctattccctttgcagcccctttgtagcaaacttccctccttttctcaaacctgacaacaactgatctgttcttcatccctatagttttgccttttccagaatgtcatataaatagaatcgcccaacatgtagacttttaggcctagcttctttcacttagcaaaatggatttaagatatgtctatattattgtgtgaaccaagagttcattttttactgttgagtatggataaactcaaggaatggatatcaacagcttatccaatcacctgttgaaggatatctgggttatttctagtttttggtaattatgaatgaagctgctataaacagtcatgtgcgagtttttgtgtgaacataagttttcagttcacttgggtcaatttctagtagtgaaatggctgggccatatgataagttatgcttataagaaactgctgaaaagtttttcaaagctgccctgacgctttgcaatcccatcagccaccagtgagagttcctgttcttcttcatccttacctacatttggttgcccacacttcttttttgtttgttttgtttttttgagagggagtctcgctctg

SEQ ID NO: 340788 - DNA, 1000 bp, Homo Sapiens; identical to SEQ ID NO: 159648

SEQ ID NO: 340789 - DNA, 1000 bp, Homo Sapiens
tttttttttttttttttaaataattttatcatttattgaatgatttgagtagctttgaattttcttacatcaaccgaaggcgaaatgatatctgagagctttttaaatgtgtgttagacttacatgattacactcaatgaattctttaatgcacaatatgacaaggtacagtacccctcccttatccatgggggatatgttccaagatccctagcggatgcctgaaactgtgaatagtaccgaacctgattgctgtcagaacccatttctattcacgccttccatccgcaaatttaatgtctttttcgtcttagcacttatgatgcactgtggccacaacttttgcagtttcagatgtgacagcaaaactagcacaagtttctttttcctccttcacaatttctggatagaagattcattcttactgtaaatcttaacaacctcagcatacattttttttctttattaagtcaagaactttaaccatttcactttaaggaagcactttataacttatttttggtgtatgcaaattgccaacatcactactcttgcactttggggtcattatacaataagggtagctttaatgcaagcactgcaatcccatgacagtcaatctgacaactgagacagctaagggactagtgggcgggtagcatatacagcatggatataatactggacaaaaggatgattcaagccgggtgcagtggctcatgcctgtaatcccagcactttgggaggctgaggcaggcggatcacttgaggtcaggagttcaagaccaggctggccaacatggtgaaaccctgtctctactaaaaatacaaattagctgcgtatggtggcatgtgcctgtaatcccaactatttgggaggttgaggcaggagaatcggttgaacccaagaggcggaggttgcagtgagccaagattgtgccactgcactccagtttggatgacagagcaagactctgtctcaaaaaaaaaaaaaaaaaaa

SEQ ID NO: 340790 - DNA, 1000 bp, Homo Sapiens
ttttttttttttttttccaaaataaaaggggtttatgtaacaaaaaacaaaaaaacaaacaaacaaaaaaacacagtaaaagataccacccagctagcagaaaggactcagcactgccttcagccttcacttactcagaaataactcatatctcaacctcagcaagccccaagcagtagaatgaggcttccctggaaagaggctgagactcacaggctggggatttaagaccctctcaccgtccaccttccttccttctttggtcttggaagatgaaaggctccatttttaaagggtggagaacagcagatcccctgctactgtgagtacaagccagaaaagtgagtcaaggccagactcactatggggtcaccccaaacagcttcagatcaaaaagcctgccttgctgtgatgcccatctgacagtggctgcaaatataaagggggggccacagggtctctggctttatttccacagggtagggagaagaccctgcagaaggctaggcagaggggccagccgggaatttcccagcttttctggttctcagcagaccaacgtggtctctaatcagaaagacgaagaggcaggagagcactggcctcagatatcccccatcttgtcctcttgcactgtgggccagggctgctgtgagctaggagaccagggttccagaggggctcactaggtcctgcgggaggctttcccgggcctcctgcatgcggcgccgggctcgacggaaggcctctagcacattgtgaatggaactctgctggctgaacccttccagacggtccaacacactccgcatccttttctgaagggagctcgattccatgaaggccctggactgctgcagacagtgcaagcggaaggtgacagtgcctgtggtctctgtgcggagtccaaagcggctcaggcgttcccccttgaaggatcctggtatccgtacataggagaggtcctccagttccagagaaccgccaatgaaaaacctcc

SEQ ID NO: 340791 - DNA, 1000 bp, Homo Sapiens; identical to SEQ ID NO: 159650

SEQ ID NO: 340792 - DNA, 1000 bp, Homo Sapiens
tttttttttttttttttttttttttttttttttttttttttttttttttttttgcaaatgaaagttgcctgcctttattatttatatatttgtctataatacaaaagcaaaattatattgttacaaaaccccaaataattttaatctcaatttgcaacataatccacattttacatatctataaacaataaacgttttagtattcaaatgccttagaaagaattcattttggttcaataattttatagccaggataaagtcatatttataatttataattttctgtccaggtttttaataaaaatcagtaatgttaaatggaatactatcattttatagagaaacagtatgaaattacattgagaaatgagaacagtcattaaacattaagattttattacaaaccatgcattatatatttctttacacttaaggaatagatatgaaacaatcttggagtaaaaattagaaggcaacttgcttcaagtttgtaccaagtcaatcaagcagaaacctgaagaaccttgttttaagatgagagtcatttatacttggcaggcattttcttccaatgaaaaaataaagtcaatgtgccattatcttgacacttataaaaatgtttataaaaagcatttaggccattgattctcacagttggctgaatattggaatcacctagattaaaaaaaatactaatccctatacaacatccccaaaattcagatttaattagtgtaagttaggccctgggcatataggctgttttaaaattcctcgggtgagtctaatgtgtaccagtttgaaaaccactagcttagagacctgttccatcatcatagaagtcactctttagctgaatgattctatatgccctgatttcagtgggtagtgttgttattttaaacatctgataggtgtatctcccttgattaaaaaataaataccttatggaagagattatatgttttatttatcattgtctctgcatatctggaacaac

SEQ ID NO: 340793 - DNA, 1000 bp, Homo Sapiens
tttttttttttttttttttttttttttacatctctgcatatcatgggtcacttttattaaaagcatcattactacagttggcagcaatttacattttatcttacatgatagcagttttcaaagaaaaaaataaaaggacatcacaacaaagaaaaacaatacatttacaaagtcatgtctgtaaacttcaaggctagtttagagctgaggtaatgctgttttagctttgtggctaaagtaacaaagtcctttaatttaaaaaaggtacctgattctctcttctctcactctttatttattcatctatttattttgtttttaccagtgcattacaagaccacgagacaatggaactgtagttctgtctggcaagaaccctcccagtaggttaattttccaaagggacccttcacattcaacagctgccttattattgctgcgcctcgggacagaggcgttcacactagcgtggagattgtcagagtgtatggatgtgtgtgtatgcacgagtgtgggaacccccatacagtcaaaaagggaaacaaatgagcaagtatgatatgtatggtaaatttcagcttgaccttcacagcaaaaaaattaaaaattaaaattaaaaaattaaatatataacttcatacttcctttgagcagcactttcttccattagtgccactcagttacaaattgctctttattataataccaatggtaccaagagaaaaaaaaaaagcagagcattatgtaagtttccttaaaaagacatgatcacctctcaaatttcatctctcctagggataataaataatgcactgcacaatacttaatgaccaagataccttttgacacacctgtataacatgacttgaacttttttttttgctacactatgttacagaacagcttataaaactaggtatgaacattaactgtgagtgtaaacagtaggactaccacttgtcaaaagttttaaacacttgaactggaactggtactggtt

SEQ ID NO: 340794 - DNA, 1000 bp, Homo Sapiens
ttttttttttttttttttttttttttttttacggataaatcactgcagttttatttaaaattttagacaaaatttaaatcatgtatataaatacaaagatgaacattggttctttaaacactgacaaaatcctgaaacaatataatgtatatattttaagccacatttcctatttttacaacatagtttacaaccttcccatttttacaacatagtctaaaactaagtttataaaaaaaagtacataggaaaatatgattgaagcattctcaaatacatggctctgagggtagattacttgttttttatcatttaatccatatacaatgcagcaaatagatacattaattataacattttccttcaattaatagtttattcactgtcatagaagctccatgaaggggcatcacttaagaagctctccaggttagagtcaagcaaattctgaacacttggtcaaaggcacatgaaaatgccaggtcctggcacaatgagtaaataacccagaaggtgatatatgtcagatcaagacaatcttaagcaccatagtaacttttgaggcaagtggcaccgtactcttattaaagaaaagtctttactgttgagggcactgggtctctggagtagatttagaagacacatatagaatagggtgtgatttcttacaagtttctttttccaatttgcttgaagtttcttttccttctttaacttctgtttgaagctttgattcagcagctaacctgggagagttaggggtgtttccacttctttcacttaaggcctcagcgtcagcgggaactcctatgagtttcacacatttcttttccttcttcagctgcatatccacgggcagatttttgtgaggagagagactgactactggtgtgtgtatagaaactgatttttctaattgcaagttgttatcttctaaactgttagggcaggactgtgtctcctctttctgaggcggtaatcgataaacttctcccccgag

SEQ ID NO: 340795 - DNA, 1000 bp, Homo Sapiens
caggcaggccctgcggctcctctagagcctgcaaagcctcctcctggcaattctgggcagggccgatgtctgggccacagctagtccaagcctgtcattgaagacccagtcaagcttctgtctgaaattccaccttcttctgtcccaagtggttgtggacacccccgggcgctggtactgaggaccagcagcagccgagggaggcagacaggctcagagcacgcttccatttatagggaacagaacgcaggcctccgagtgtccacggagcaatgtgcaaatcgcagtgatgagtagagtaaaacctctacttcgagcacagtatctctggcaaacacaggggactgcagtcgacaatgctgcggagtacacccgagtacacagtcagacatttgttcggtaaacagtaaatgcgtaagatcaatgaccttgagaggcctgtctgtgctccagacgtgtggttcacgtggagagaatggctgccactcaaagtatcttcacaggaaaacagggcttgaggcacacacacaacagacagacacacacggctcacccaaaaagtcactgtgtacggacttaactttgttcaacatggattttggttttgtggaatctaaatgcagacactcgtttacctcacacccttggatttgtctgtttttggacatatatatatatattttgtttgtttctttctttcttccataacatcaatgcttcgtctgaatatcatcatcgttcaagagttgggggaagaaagacttcatatgcacagggccgggtggggaatgtttgttttggctgtttgctgcctccattcagattttcctatcgcagctcagctggtgacctgaaggcgagcaacaggcacaagggtccccagggccttccggatggctgctttcacctcctgcctgggccaccgagtctctacacagaaaaatgagtcacccgactcaaaaggggtgggggtagaggcagggacaaggcatgaaaacca

SEQ ID NO: 340796 - DNA, 1000 bp, Homo Sapiens; identical to SEQ ID NO: 159651

SEQ ID NO: 340797 - DNA, 1000 bp, Homo Sapiens
tttttttttttttttttctgagaagtttttattggcctcgaaatgtcagatcttacaaatagaaaacacaaattatgtttttaaaataaagcaataggtttggtaaacatttgttaataccttttgaagggtttatgagtaaacatctttctctttatcaaaaagtaaagcacaccctcacctctcttccacactgactcactacttctgccgaaaacgtggacttctttcttctattacatacagcatgttccttgcatccattgcttgaatctgtacaaacacacacacacacacatgcagacacacacaaacctggctcctctcaggcagtggcccaagcaccacagtattgcagccagcacaggctgccctgatatgctgaggccagggcagtggctggagcaagacagcacagtggtcacgatcacagttgcccaatgcataggaaaaattaccaaaacctcatttttaggagatattaccaaagcccatgagtacagccaaacagcaggctagataggaaagatcagcttgagttggtttaaagggaatccctttaagtttagaatatctgataaagattatcgctcaaagcaggtgaggagaggggttggtggtgcaaatactgtccccagcagaggtgagataagcttttaattctaacaggctcaattcccatttcaaggggcacctttccttctaccccttccctcttatctctcagaagcacctttggattttcagagtagaatgaatcaagattagttttcagcaaaggttagagtaagttgacggggattaccctgccttggaataaaacaagcacttgggctgatggctgagattcccaatgcaacatcaagataaaggcatcagaggtgactgtgacacacagaagtccctggggaagtacttctgtaaaaaagaaccttcccattcccaactcaagctaccagagttcccaaatatgtgctttcacaaatatactcagaaggta

SEQ ID NO: 340798 - DNA, 1000 bp, Homo Sapiens
ttttttttttttttttgtgcttgttttattggaaacaagactccagccagctgcagggctcaggggaggaggcctggagagttcagtcctgggtctccctctgggccagcagggggaaaagaggtgttaaaagagctagaaccctcagagatgctcctctgaagcaggggaaagaaaactagaaagtcagcttccatacttcaggtgctcttcgtgaatgctgggtggctttaacccttgggggtcccaaacaagtttccagaatcccactgtccaccattctcccccaaagaaggtcccagaaaaggtgaagttccgtgtcttcacgcaacacgggcataagcagcaattatcgcacgaagtttccctagggtggtcggggatcctctcctgccactcctggggcccctctcttgtcgccttaaggtccatgctacctgtcttgaggagctgtgtccaggttgtgggctccggaggaccgaggagtgaaaggctggaggtacatctgaaggtggaggcgctggcggaagatcctgccggactaggtggcccacagtccggagtttcaggccgtctgatcctcgtccgcaacccctggctcgggttgcgatcgcttcgcggagccttctccagctgcgggttcccctaggctcctcttggacgctggcgcggctggcggggacgagggaccaggatggggattcgggggctggtagccgggctgtcgcggatccagcgcgtccttggaaagtaggatggcgaggccgggcacgttcttaagtacgctgagactagcggccggctcgccaggcgtctgaccctgcgtgggcccaggcgggaggctctgccacacctcgcgtacgctccggtagcgcagccgcgtgacctggtgcaggcccgccaggcggcgcttgaggatctcggcgcacgtgacggttttggtggtgacccggccgcagccgctgaagacgatggcgcgcgtggctggctgcgccatgct

SEQ ID NO: 340799 - DNA, 1000 bp, Homo Sapiens
ttttttttttttttttttttttcaaaattgacaacattattttactggaatttagcagggagaagataatatcttcaagctttcacaaagaaaatctccacattgaactcaagccaaataaagaaaatccaagttcctgtttcagtctcaactggcccgggtactaaagcaatgcactcctctcttaggaggcatgtgtcaagctgtcagtgatgtggccatcttttcatgacccttaactctctgcatcatgtctcagcaataccaggcatgaattctgaaaaacttcttccacttatatggttttcctcatccagctgagaatgctgctggttactgcaaaactgttcaccaaccatatgctctggtccatacagctttcttcttaaactctgggagaactctcaaggacagcagggtggctttcaaaagatccctggactgtgctgagagggcttctttagggctttccatgatgctgaatagccagtcaatgaacttctgggtctgttccttccatggctctttctgcagcagcagagccatgctattgggaaggagagtgagaacctcctgcagagtgaccctgtgcattggactcctgccaaggaagcttggtactggcccagccgggccattctcctgatgccatggcaaccaactggcactgaggccgaggaggagaggggcagtgtggtcagcccatgcaaccactgcggttgcaaatatcagcaagaagaagtccaaagcctcgtcaagagccgtattgtgaaaggatgttgactggtaagcaacatttctaatataacccatcagttccaagagccactccattctcttcaaaacgcccgtattggcatggctcacaatccgtgcctggtataagctgtgcagaatcatccaggccaacacctctttctcacggtgctgcacagcaacgctcagcatatcggtcaggttcaccaaggggaatcgtccttgagagactaagtacagtttg

SEQ ID NO: 340800 - DNA, 1000 bp, Homo Sapiens
ttttttttttttttttttttttttttttttttttttttgcaggtgcatttgtttctttatttaaaaaaatcatctgggggcatggtctgaggaggacacccctcccatggctttggggaggacgcaggttccaggagtcacagggcagaaacacgcggggtgggtgggggcgtggccggagtggggaggggctgtgcccccagcacctgggggtggctcccacggcaccaggtgggctagggcaacagtatgtacaggcgagcagtgctcctggacccggtcggggccggctggggccccattctgcggcaggggagctctggggcacagggtctgagtcccatcttgggctgcagggaccgcgagggccgtccagggaggctggacagcgggggcctttatctgggcccatcaggtggatgagaacggacactgcaaaccgctcaccacctgggccagggctaggcctatccggcaggggccgtccccacactgaatcctgcgtgcgcagaactcaagccggcatccaggcagtgggaacgccccgcaggctgggcttgggtggcctcgggcacgtgacaggtggggcccgtgtcctgataaacggacaggaacaaaaggaacgcaaggtctgggacccacggctctgggagcagcgccacccaggctggctcctagcagagaaatgggaatcgcaaatgcattgcaatgtgcagtgaagagacgcgagggacgcccgcggcgcaccgccggcagacgacgtgggcaggcgccctgagctgcgggtccgtgggccctggcccaggccggcacagccctgtccctagtcctgagggattgtctccacagggcctggccactggcctggccacctccccggctgccctgatccagcagccacactcgtggtgaacacagggcaaccccgtcctgatgctgagaaaggtggcatggagtggacagacggcctgggggacactgggcctggcaccgcgtggtg

SEQ ID NO: 340801 - DNA, 1000 bp, Homo Sapiens
ttttttttttttttttgctaaatagtattgtttattaaggcttgtattctcctagaggaaaaacccaatgtcgtccaggactccattcaggcagtaacagttcagaggaagtgacacgctctaaatacaagtctaatgatacagctgaaacgttaactcagagggtcttttggagcaagtagttttcagaaagcgtctgctctctaggacggtaaggatcctctacaagggcacgtgcagatccaggcgctggagcgtcaggcatgggcaccattttcatgcttcaactcaaactccaggtggtagtgagctcaacggtccctcattccacaaaacatgacagcaaattcatcttctaaaaaaagttttgttttgtttttacccattcaacaggaaaaaaaattagacacacacgatgaaatttacaaccagcagcatcatccatcacactgtctgtactaccagatcctacacttaaagctcagcattattggtataaaaacttaagacggcattagaattcttaagaaaaggtgtaaaatttaaaaagatgtgcaaacaacaaagaatgcccgaccctgaaccagacctaaagcaccttccagttcctccacacatcatgccccaacaccatccagcccaatcggacaccaggacagtgagggacgggtggctgttcagtgggcaacagatctggaaggaaagattttcaaaaaaaaaaaaaagtgtctgccaaatttgaaaaattaaaagttatctgtctagcagaaaaatcaaatgggtaaattagcactttagaccgataacagataataaaatgacaaatcagaatgaacaaaaaatcattaaccttttgatttcagtattttcaagagattttatcagaatactctaaatgacaaaatgactcatggtttcttatgtttgctaaaaagcaataaagggatgagaaatatgaagtctcacagaatatcaaatgactgaatttaagaacacaatt

SEQ ID NO: 340802 - DNA, 1000 bp, Homo Sapiens
cttccccatcccccccaatccctgcctttttttcccctttgcattttggcagcaggagcctactaattattgggtctagatctctgagtccaaatagaaataaaacataaatataaaattaattaagtaaatgcaaaatcttttttactcgccagtttctgcaactgaaataagcaaacatcaaattaactttttttttttttagtgatttccaagaacgatctaagacagtaaaacacaaacttttttcaaaatatcacccatttggtgtttagcttgaagtgtaagactatgtaacaactatagctactttgtaaaaaatgtactctcacctaaagcctaacatgattcattttttttttccaggaaacagaaaatgtctttggtctggtattaatatcaaaagaatttaactttaaaactgatcccaataagcatggcccttacacagttcatgaccaatatttagttatatgaaaatggttcattctcttctagaatctaatccagtgcagtcatctggtgaaagactggaagtcagaagacttttcaaaagcttctcactgaaatggtaatttggtaacacgggataaacagaattttgcataaatagcagaccttagtcactgaataccccattaaacagtactgctggaccatgatacttatatctgggagatgacttagttttaaattttttatgcagtttcttttcttgaaggaaaaacttccagacttcagaattttggaagctgaacgatgagcaggtttttcatattttgctgtctcagacatttttcctatttctcagactttgcagttcttttcttaggtgctttagagcacctaaaatatcagcttgctgtgggtcattcggtgctttctgagagtacagacggaaatgtctgatggtttccgataacagcacttcaggatctgcatctcttgcctgaagacgcagcatccgctcacaggcgatggcatagttcttgtgccaatt

SEQ ID NO: 340803 - DNA, 1000 bp, Homo Sapiens; identical to SEQ ID NO: 159652

SEQ ID NO: 340804 - DNA, 1000 bp, Homo Sapiens
ttttttttttttttttttcgctttcatcctgcgctggcgctttatttagacgcgggccttctctggagcccggggaggccgcggctgtcagagcggccaggacctcacggacctcacgggctggcagcccggggacctgggactggcgctgtcagctgtgaggcggggcggggcgggggacgggcctcactctggaggaaggagcacaggtccttgagtgttcagggcagggaggcagggaggggtctccagcccctccctaggctggggcagctggaagcagggggcgtcccagccccgcacgtgctgctcctgccagcagggtcccccagctcccggatgctctcatacacgttttccagggggccgctgcccacatccagggccctgagcgggagggtctggtaggccaggtcacccgccagggccagaatcgctccctggcccttggggtccagcgggtctgtggtgggtcctgggtccctccttttaggcttgcagaccctggagtacaggacgtccacctgagcggccggggtcacctcagtcttcccctgctgtggctcttggggactgcgatgggtccctttgcgcttctggacgcgggcatactcggccaccacagggctggccgccaggctgaccccgggaagggccgccagccccacgttggaataggtggcctcgaggccagcgcaccctgcggtggctgcagctgccggcagagcccggggcagctcctggtgtgggaaggcagagggggctgcctgcggtccggtgatgtccctggacacctccagccagtgtgggcgcaggagatccatgctggcaggccgcagggccctgctgctgcgcgggccccggtgcagctcgtgcagtctggtgtccgacttgctgagggagcagaggtgggtccgcctcagtagggacgcttccgccgccgtcgcactgccctgcagcctcgcccgctgcctccgcgccctcttcctgggggctacag

SEQ ID NO: 340805 - DNA, 1000 bp, Homo Sapiens; identical to SEQ ID NO: 159654

SEQ ID NO: 340806 - DNA, 1000 bp, Homo Sapiens
ttcatggggaagtagcaatacaggtattttatttcacattttattagtagacagatgggcagaaaaagacaaaataaaccactaaaggggaagtcaacacaaaatccgtcagataatcttttctcataagttaaactgaagcaaaacatctacaatttcagctaaaactattaaagtcaggtgtgtcctgctggtttcagaatagttgaaaattgcatctgaatccttttagttgtaaatgtaaaccttgtttgttttatcaggatgggaggggtggagagttcctttccagtggagagctgcacatttccccttccaatcagtttcttacaacatgtgccccaaacgtaaggaaaccagcaagtaaagaagcaatttgccagggtaagggaaagaaggttctacaaaaaagtttgactaatagaaaataactctggaatgattgataaaaggagaaggggggaagactgaaagaatcaacagcagaatcatatacttctccacccagcctcaaaatacacagaactgaagagcatctagtgaggcctcaattagaactaaaaggaatctaaaaatgcaggattttgagttcatgtcacatcaaataataagcaaaactgtacgtacatggttccggattgagcctgagacctccactcccagaagggggaaaaaaaattacaaactcaagtattttccacagggatgtgttctcagggacagagctctggaaccagcctctgggtttcgttcagtcagtctaaaataccagaatgtccacctgctagcaagagacttacccagtcttctggaactgattgtactcatcagaggcaaacccagcccttgacacttttaacaccccaaagggctgaaaggtacaacctccacttggcgctccggctccctgagtcaatgtctaacagaggccaatagggcctgatggaacagctgtgcagcagagcacctcccgcaatgccagggtgctggggctgccctg

SEQ ID NO: 340807 - DNA, 1000 bp, Homo Sapiens; identical to SEQ ID NO: 159655

SEQ ID NO: 340808 - DNA, 1000 bp, Homo Sapiens
tttttttttttttttttaaaaatcggcatgctcctttatttgttcagaagagcagccagcatcaccctcgccactcaaacctggcacatacgcttcggagacaatggcctcgggaccctcatgctgctgggcccaggagagacagttctgaggcagaaactcggcgtccaaggggggccgcgggtcaggcactgtggtgaagggaacgccggggagtccggccccaccttgcagctggggacacgggggcgcaaacagagggggcaggctagtgtcccgctgccccaggaacagacctcagggcccctggagggtctgcaggcagctaggagcctgccaagtgctggtggaagtagaggccgaaaaggctggcgagcagctggcaggcagccgtccaccagatgaggtaggccaggacgccacggaggaagaggggagtaagcaggccacccagggccccggcaatccgcgctgcagtctgctggacttcgtcctccccagagccgatgggggcagcgctggctgaggatgggtcgggggatagtagaggagctgggcccaggccccaggaatagcctcccagcgtcttgagcagaagtgtgcagttgagggtgaggatgagcggcgtcaggtactgcaagctcaccacggtcacatagcagtagactcggaccaccctctgctggatttcacgggcttcgatgcggccagcctcccttcgcagctgctccacccgggccttggccaggcacaggtaggcctgcaggtggggccgggtcaccgccagccgcagcaggcacagcaccaccagcaaccagaggcgcccagagtcgaaggcagaatcggacagcagggagaaacgcgtctccccaaacggcggctggtgcaggaagtcccgtgcaatgggctttgtccagagccacaggatgaacaggggagacaggaagctggtgtgcaggaggaactgcagcatgggtctgtcctccgacatggtcagtgc

SEQ ID NO: 340809 - DNA, 1000 bp, Homo Sapiens
tttttttttttttttttttttttttttttttttttttttttttttttttttttttttttttttttttttttttttttttttttttttttttttggaccagaatatattttatttttctcataaaagttataccaaaaatatattttcttaacttaaaaatacagcttcaaaaagcaaaatttgagttgttagaattcattacacattttataaacagcagtgaaaggaagaagtcagcagaatggattcaatttttaaatacacaaatgttcatttcacaagcttgactttgtcctttaataacttaaaggtagggttcttgctgattttcttgttaaagatgaccaggagttcctcttcggatctgtgatgctcatctgtcactgtgtagtactgagctaaaacctttttccttagctttttgatggttatttcattgtctggggcctgtttcagaattgctttaatagttcccttccagttgaatttaccttttgcaggagcctcatcgtcttctggttctccgccctcaggatgctctgggagcttcatctttttcttcttagaatctgtttcaacttccgagtgcctccgcttcctcttccctgcgcccacgcgtgcctcttcctcactggcgctgtccttgcgctgcttcttcttcttgctcctcttccctgcagagccattggcctcagggacttcctccccaccagcctcaaggtcagcctcctgtccctttttgcgcttcttaggcttctgattccttgagttttcctggtggttttctaactttagttctttcttttctcttttccttttcttctgccgttcttcctttctttctcttttattcttcttcacctccccttgctgttccacggcgtctttcactttggaggctggaaccttggtggagatttctgcatgtggatttgccactgggtggagtggccgttgatcctgttccttattgactggttcgctgttggaagcttcagaa

SEQ ID NO: 340810 - DNA, 1000 bp, Homo Sapiens
ttttttttttttttttttttttaagttgttccaaaaatcctctttaataatacatgtagccaacattgctgcaatcagtataaaaacaaagttattcctgattttgtataaatgaacacgtcgagagtcaggattataaagcatcaagatacaagtaccaagtgggaggaccaaagacaactcacagtgaagagaaacgcttgagaacaagaaatgtcagagttgtaggacgtggtaacaacccagggtgctgaaacggtcagaggtgcaggtgcagacgcaggcttctgcctctgcaagggcaagggggccgttggtggctggctgcaaaggaccagtgccaggcagcggggcagagagcaccaggggtctcgactctgcagattgggctttgcagaggattcctgtttcccacctccccacccctctgacagagactgaggagaccacacacgttgacctcctcttcatagccagccatcatttccactccaacattctgctgcgggtgtcattctggaaaataattccttgctgttccttgctcctttcagatcacagcttgcctggtcagaccccttcccaacatgcacagtctgagtccaggaggccctcgaaagtcaggcacaacacccagatctggtcctcttgggtggcttatgactggatatatccactgtgtgtgacggcctctcagctctctgctgtaagatcattggcaccaccaggtcaaagagggtctcaaacaggaggtccacattgtagccggtcttggcgctggtctcaaagcacatttgctcagcggccggcacatcctgctcatccagcatcttgtacttgaggatctttttataaagggccaccgcatcctccagctgcacctgcttaggtgcccttggggagacacggtccccagcgtccatattgggactgcactcttccttctcctggcccgccaaggccccctcctcagtgaggtccactttgttccccacgatgg

SEQ ID NO: 340811 - DNA, 1000 bp, Homo Sapiens
tttttttttttttttttttaaatcagcaagtatttattttaaataataaaactacagttttataccatacatatttacaaaaatgctttgctatagaaaaatagaatcaatcactgaatccagaccaccacagtggagaacctcctggtgaagctgtgttttttcccacactggaaacacagagtagccctgtttctgcacacgttagtgcaccgctgctacgtgtggccgcccagctgtctgcaggctgtgccgaccactgcctctgtctccaggaagcagaggcagaagtgatccttgctgaggagggccatcgagtctccgcttaaatgccagcacagagagagcactgcaaagtcgccttccccaggcacctgcaccgacatgcagcccgctggggaccacaggtagagcctgctgcctcccgtgcagatggccagccgcggctgctgcgggtcccactgaaacgcgcgcactggggacagctgctcgagcaccgcgaacagcctcagcttctgaatgtcccagacccagacggcattgggaatgttgtcgttccttgtcgccaggaagtagctgtcaggactaaatgccagcattcctatgcccattttcgggtttgctctgtcggtaacaggtttcagtgtctgtaaggagactgggacagaggcgatctcatatttactctctgagctcgggagagggccggccccggcccggggcggcgggaaggagaggcagcccagtcccagctgtgggctcttctcggcctccttatacaccactatcttgggatcattaatggctgcaggatgcccaaactccgtgatcattttccaagtcacgtgattaaggatgcgcacctttccatcatagctcccaactgccaggaactgactgctggggctccaggccacagacttgatgcccagggaccactcgtaagcgctgtacgtggacaacaaccggccatccaatgagtacagcagaatcttgtact

SEQ ID NO: 340812 - DNA, 1000 bp, Homo Sapiens
tttttttttttttttttttttttttttttttttttttttttttggacaactctttttattatctttctacagtaaacaaagtataatcccaaagttctgcagatacttaattgggaaaagacacaaccctacagtcagttgggaaagactacctttagaagagaaaaatgaattgtttgggaagaaatacattaacaggactgtatttctaacgcatttactttttaagccatcaaatgttctcatttgagccacgtgttctgtgcacattcagagaaccttttgaaaatgaattaagtctttgccttctttagtctgttgataaactcttgagaatgctgagaaatctccagaaaaccagtatgttttctcttgggaacgaattgcagagcctcttgccaattaccattgtttttcagacataacaaaatacgtatcatttgatctaaggtgagatttttgttaccaatttcccattgtaaatatttatctaatggaaggcattcagttgccaggttcagccgttttgccttggctagggatgtgcctggctgcatactcttatcaacaaaagacccaattacataaactttgtcatgcctgaaagtagtcataacattgggagaatctgcagttaaatagataatactgtcctttggaaataaatctacatgagacttttctgttgatgttaaaagcaatttgtcccatttttcttgataccgtttaactaactctctgtgcaaagcaccatctatttttagattgcagaaataaatatggaaaggatcaacatttcttctgttccatccttcactttctaaaagctgggaaacagtattctgcaattcttttcgtttcatataattttcgtaagccatgtcaaaaaccaaaggttgtccaaactgcatggcctgggcacccttccagcccattgctatgtccatattcctatcccaaagtcgtaaaaatagaaagtttttctgtttatcttcctcag

SEQ ID NO: 340813 - DNA, 1000 bp, Homo Sapiens
gggcccagcagtcgggcactttccatgtttattgtctggctgtcctcagaagggactgctggccgggctgggggctgggctcggctcgcaggggctgggggcgctctccagcatgtctcggaagtgggtggcaacacgacccaggtgggagccgtcccagaagacctttccacagcccgtgcagcagtagaagcaccgcagcccaggtgtcctcagcacacccaccgggacccctgccagctgcagccgggtgccgtcggccagcatgtccggtgtctccgcccgcaggtcagccatctgcagccagcggcaggggcggtcataggtgcagccctcaggggctgcgtctggggctgggcctggctcctgcaccgcctggctctgggtggcctcgtcacctcagctcctgggcccctcctggtgactgctgagccacatgagctgcttcatcatgtccctggagacctttaggtactggtcacagttacaggcctggcagcggctgaagatgtctgcgtgggtgacacgcacgttgaaatgcttgagcacagccttggcctgctgctgggccttcagggagcagtcgaccgagaggcagcgcccagccccgacctgggcccggagcttgtggaatggctgccccgacgtcagaatgatcctcccctcctgcctggcaacctcggccgccctgcggtggtcttcaccattgcccagcatgcgtgcatccacaccgagacagcggaggctccgtgccagcccctgcagcatgttgtcacacaccacacggaaggccctggccggaatctgaggggcagcgccctcagacacagccacagccacagggacctgcctgggtgcggccggtgctgacgctttctgcaggccgggtggcttccgtgcccctggtctctctctgtgcctgggcctccggctcccagccaggtcctccgacaggtggaagcgggcgggctctctgcacagggcttggtgcacctccagc

SEQ ID NO: 340814 - DNA, 1000 bp, Homo Sapiens; identical to SEQ ID NO: 159656

SEQ ID NO: 340815 - DNA, 1000 bp, Homo Sapiens; identical to SEQ ID NO: 159658

SEQ ID NO: 340816 - DNA, 1000 bp, Homo Sapiens
tttttttttttttgtcctgaccatttattggggactttttgctcagcactgtaggaggaaagaaggaaggagggatggaagcctcttcctctgcttctcctgtccctagaaccgtaaagcccagacgtcctgcttcccactgggaccctcaatgataacagggtcagtgactgactctgaggcagcaaggacagaggagaggtggaccccgtggtccaggggcccgggcgtggagctgacaggaagaacacagatgtcaggacgggctcagcaacacaggtcccaggtgtccggggtctcctgaactccaggaagcagtgacacccccgagggctgctgtgggtgggttcttagcttacagcaggctggccaggcagcccaggcttccggggctggttggggccgatgtactggagaggcacgtgggtaggggctgtgatccgatcagtgccgaggtaggactggagggcagggggcacgagcactgagccgtccttctgctggttactctccaggagcgcgatgagaaggcgggggacagcacaggcggtggcgttcaccgtgtgggcaaactgcagctccccagcctcggtctggaacatgatgtggaggcggcggctctggaagtctgtgcagttggaagcactggtgacctctccaaagcggcctcggcctggcatccaggcctcaatgtcaaacttgcggtaggcggggaggcccagttcttgggtgggcatatccaggacccggaagtgcaagcccagctctgtcaagatctccatctgaagggacaggaactcctccagcagctgtgagctctgctccagcccagggcctgtcaccccaaacatctccaccttggtgaagtggtgtactcgatacagcccccggggttcctgtcccgtgtttgtctctgcccggtagcaggtgctggagcaaaccatcctgactggcaggtccctgaaggccacggtgtggtccatgaagtagcctgcaagcc

SEQ ID NO: 340817 - DNA, 1000 bp, Homo Sapiens
ttttttttttttttttttttcatgatcggctaattttttatttttttggagaaactgagtctccctgtgttgctcaggccagttgcaaggtctaaagcaattgtcccacctcccaaagtgctgggattacaggcatgggccactgcacctggcctttagtgattatttttttgaatactttttccattccactctcttcctccttaccttctgagaccctaatcatgaatgttagcacttttgtatagttctacagatctgtgatgatcagttttgtgtaacctgactgggccatggggtccagattccaggaatttctctctgtggagcctcaggtcctgaggatcccagccaggctagggtgccttctctccatcgctcggagtctttttgtttgttttatatgtaacatccagggttgttaactgtacttagtgggaggaatagggaaaacacctacttcattttttcagaagcagaagtcaggagtggagtcagtaagtatctcttttgatgttcaaattgtcccatctttggccagtggaacaagccattattcttcgataggttccttaagatactccaggcgagtcctccttgtaccctccatgtgccaaccctggcatcagccttttctacaaggagccctggctggtctgggccagtcctggaagcccatctgccttagtcttctcgagctgctataacaatgccacagactagtggcttacaccatagagatttctttctcacagttctggaggctgggaagttcaagatcaaggtgccagcagacgcagttcctgttgacagccctctttctggccttgtagacagccacctcgtgtgcgcacatggccctcatctggtgtgcatgtgtggacagaggcttcagcatatgaattctggaggaacatgaacattcagtccataacaccgttcctcttgccaatgactggttcaggcatggtcacttctctcttcctaaagatgatggcag

SEQ ID NO: 340818 - DNA, 1000 bp, Homo Sapiens
tttttttttcagcatcatgaacatttattatgattattttatttaaaaaaaaagccccacatctccgggcaataaactacaatacagtaaaaagtagcatctggtgttaagacactctgccgacaggctgcatgccttcagtgccggcaaaggctctgcacagacatccacagtattccacactgcctcccccatttcagaagtccctactgaaatgagaaggacactgaggcacacaggggaagagaatggcctgaggttagactgccacgaaaggcacgtgggaactgggcccagaaaattccaaccgttccatacaaaatgctacccagcagggaaaaagagtcactgtcttcttccaagtgaccagtaatgccacactcatggggcagcaagaagggtggcaagggaaccaagccctgacctgagcccagtgatcaggccagagcccagccaatgggactcgcccacaggtccaggctcaccccctcacctccaccgcactgccctcactccaaagcccagccctccttgcggaagaccagctgcacagcctcattcacgtcattcaccacgtgggaggcctccatgagccctggactgaagcataagtctcggtgcccgtggaatggaggctcccctcctccaaggacaggctccgtggactgtgggttcctgggattgtagacgcctgtacacaccaggatggagatgcagctctggcttgctgagggctgttgctgccgtgtgcccccggcccctagttctggcgccccatcatgcgttgccttctgcaggtactggtggaacaggttggcgccgtatacgtcagacatagggttatcacccacagcatagagcttccggatgggggcggcccagccccgcctctccgcctgtcgcctgatcaggtcctcggcatactggtaagtgaggatgctgggtttgcccatcaggccctcgtatctcagctccttgcccgtcactttctggtaaatgg

SEQ ID NO: 340819 - DNA, 1000 bp, Homo Sapiens
tttttttttttttttttttgagatggagtctagctctgttacccaggctggagtgtactggtgcgatctcagctcactgtaacctctgcctcccgggttcaagtgattcttctgcctcagcctcccaagtagctggtattacagatgcccgccaacacgtccagctaatttttgtatttttagtagagacggagtttcacagagaccagtgttggccaggctggtctcgaactcctgaccttgtgatccgcctgcttcagcctcccaaagtgctgggattacaagcgtaagccaccgcgtccggcctaaatggactttcttgacttccaaaattttcctttccaactcccatacaagattattaacgttaacctattagagattagaacaagagcattggagcagatttcttatttctttgaatgtctgcactttgtttcactctccatatttttttacacagaacaaagattagttatcgtgcctaaccatgatggtagttattgatatgtagcattatacacagagtattatctaatttgcaaaccgagatcctccacctacttgcctaccacctgtcttttccatgtaacaatgactgatgtagataattttttttgttgttagatgtgtaagaatctcaaggatgtaaaacagatttaaaccattaaaattaaagcagtttttaaatgcactataacaataaacatggacaaacacataactgtgttgtacatttttgcccatcaatcattgacaacttccctcccatttgttcaagcagcatcttaaatggtgcaattcagtggtcccttttcccttcgttttaataaaattatgtggtgttcgagtgattcacatattcaagaagtgaccggtctaagactcttcggataagagcttcctcaattatattaaaatctatgaaatcatcataaaacaaagtgtgactaacttgcagatgtcttattaaactgccactgaagctgcttggattctc

SEQ ID NO: 340820 - DNA, 1000 bp, Homo Sapiens
aatcattatagtaactttattaacatagacaacatttacaaacataaagtgcactgtgctgaaattaaaaatttactgacattttctggtaaccttaccttctcattgaccaatatggaaaatggttttgttcatctatgttgctgtaatgcagttaagcctcttacgtctaattcccactttttttttttttttaagacggagtcttgctctgtcacccaggctggagtgagactctgtctcaaaaaaaaagaaaacaaaatacaaaaatagccgggtatggtggtgtgtgcctataatcccagctattcgggagtctgaggcaggataatcacttgaacctgggaagcagaggttgcagtgagcctagattgtgccattgcactccagcctgggtgacagagcgagacgccgtctcaaaaaaaaaggagtttcagttattttcttttcttgctatatcctcaggacaaacctgataggtttctcactcacacatcattggctatgtgattagttttgtgataagtacaatggcacaattcttaaattcttgtattatagcaataaatctcattttccatgtaaagtgtcagtggaactaagaatgatttatgatagtaaacatcaaaatgatcgtattttaataaatttccacagattcatccagtttaaaaaacctttcttgatttcaggtgttttctctccttctccttgatcaaggttatttgggtttctatctgtgacttcttttgtttttataagggtctcgtatattttctgggctctgacaatttctttctgagcatcaaaatggactttttgcctggtcaggatgggaacaattaaattaaaatcattaattcgcttgtttaattttctgatgttttcttgaaactgctcacaaacatggttccactgtttcttttcagttggtgtcattggattcccaagttttttcctagacactaaaattgcctctctgagttgctcaatagtatcg

SEQ ID NO: 340821 - DNA, 1000 bp, Homo Sapiens
ttttttttttttttttaaattataattgcctaggagaaaggtgagctaatctctttggaagtgtcatcagctggtgaacttcatcttggtctccactttatgtctttcactccatgaaaatgtcttttcaaagcagtgttatccgcccatggtgagtttaaataggcatcatcatcattttcttccaatctcttgagctcctcttgtcttctgtgatagtacagcatcagctgcttctgctcctcactgctaataataggctctcgggctggagctccctgtcccctttgctgaatcttggcgataattttggttttttcattcttccccacgtagtctgaaagcttcttcgttcttctcagctccttggctgcccaccacagctgcgcctctgcctctttaatgacgttgagccctgcctgtgttcccgacaagtcttccttattttcaaactccatgcggatgggatcatacggtggcaaccccatggggtaaacaatcatcaccgcgcctcgaagctggtccaaggcatctttcaccatctccatggtaacacagacaccggcttccacttgtttcttgcccattccttcgtccaatatcatcctttttaaacactgcacctccgctgggtacgcatttttcaccccattcatccttcaatttcaattcttcaatctgatcatcggtcagtccttgcatattaggagggagaaatatgccatgttcggctaattcttccatttctgagcagaggcgctgcaccttgagccgcccattatagacccgggccacctgcaccgtgagctcctccagctcggtactcccaggcgcctgcagcaggaactggctctcgtcgccccgcttcacgtgcagcagaaccatggcggtcccgccgaggtactgaggcgttgagaaggccccggctgcgtggcccgcgggtcctgccggccgagggtcgccggatcgccagcagctgcgacgcactaacagccgctca

SEQ ID NO: 340822 - DNA, 1000 bp, Homo Sapiens
ttttttttttttttttataactgaaagaagtttaatttgcatatctttgtaagtttttttcatataaaaatacatgcacaaatcataaaaaaaaacatcagaaacaatgtcgcatttggaaaaaatggtcccactttattactgccactacactgttcaggcctataccatcttgtgtggactgttaccagcctgtcagctaatgcctttgatgaaatttacacttcaataaattgacatttaaatttacacacaggtcaatggtaggtttaagactgtctctgctatgttgattgactagacagatccaggtgtattttagacttggaatacgacaatcttcacttacagagaaaatagttgtctaaaatttgccctagccaggaccagaaggggctctctagtgtctgacacttctcccattcctgaccagctttcaaagagaaagagaaagattataatggacacagtaatgatcccagggcagcagaggcagttccaatgtgtatttttactttcagacccctgggttaagttggcttccaacctgtccctggagagtccaggtcatgtccaaggcaggaagttgcaatgtaggagtagtcccaggagccagtaagtcaggaagtagcctagaatgtatcgtgtgactggagaacaggttttccagtgatacaaaagtcccatgataggatttctggggaccttttgtcctggtggggagtcctctgcaagaggcttccaaggcacagtctttaaggatctcaacagcggctcttgatcctgaagcaagtgagctggaaaccagtacataataggagtggaggagcccaaaaacctggtgagaacctgaacatgcatgcacagacctccaaacagcagcagcactgcagcgtggaccacgtacacaaacacctgaggactgaggaatccaagatcgggcttctctagggtcttattgttcttgctcctttgcagcccaagtgtaaggcagagccaa

SEQ ID NO: 340823 - DNA, 867 bp, Homo Sapiens
ttttttttttttttttagtcttagcatttactttccccaccccacattcttggaacagcctttagttctacaggaaatggcactgatggacagaagactagcattaccttcatgaaagggctgttagagctgcctgggaagaaggcgtgccttggggaactgggaagatgccgtcagtgtgggtgggcaggaggacagccagtcgtcctgctgccagcccaatagcttccagcggcaggtgcccaggtgctaccggagcccctcataggggtaggggcagggactgcacctcctccaggcactcatcgtaagcctcctggtactcctcatggggcttgaccattatcacacaggtggggcgcttggagcctgcggctgcacccaggtccgtcttagaggggatatagacatagggcaaatttcggtcctcacacatgactgggagatggcagtatacctcaatgggcagtgtgtctcctgccaaaaccatgatccctttttctcctttgttgacaaatttctgaacctctttcaccccgcgccgaatctgcttctgcttcaccgctttcttgatgcatttgtagagcttccgcgtgaggcggcgagaagccaggggctgcgcgatggggttctggttgaccagcagctcctggtaggtgcgctccccggaacacgcctccgcctgagcctcgggcccgtcgggatctgcctttattttggtcatcgcagcggccgctgaaacctagtcccagggaggcgagcccacgcggtccacagctttaggcatcacttccaggtcatcagctgcgcgagaagccgccgtacaacacggccaatcaggaaaggaagtctccgactcagcccaat

SEQ ID NO: 340824 - DNA, 1000 bp, Homo Sapiens
tttttttttttttttttttttttagtaagaaaatctatcatttttattttaaaaatctttcaattttaaacatcattaccaacacattaaaagtattatcaataagtgcctttacaatttcaagcaaaagctactgtgttttccttattggaaatactgctttcagtcatcttttttgtctgaggtactctcttcatgcttttcagggctgactttattactggcggtggagggggttgtctggacttcttttggtaatgaaaacacatggcacgtctggaggtctaggtatgttgtaaatatcttagcatattctggatgctttaaggcaaaacttttaaattcctcataggaaattgagtccccttgggctatttccttgaagagaccagaaacatcaaggtcaggcactccaagggaagcctgtagaatggtggagaactcttcctccgttatgtagccatcctcatcaacgtcaaacagcttaaatgccacctggatgatctcctctgtgttggaagggttgcacaagacagccaggccaatcacatactctcggaagtcaatgctgccatcatggttcctgtcaaagagtgcaaaaagttgtctcaagacatctgaaacaggcaactttaaatacttggcgaattcttcaattccaattcttcctccttttgaggaactcgcaatagatgcatattcatccaaatgcttacgaacaccatcccaatctaatttcaattttcggctaattttagtaaattccaccagcccagcttccataggcaatgttagctgtcctgctgaaatcatcaatctgcagtcttcataggtatgatctgttactggtattcccagagcttctgccattaaattccggactttattggcaaaaaggacaggatcatttttttcttcatcatttggtacttgaactggcataaactcaacttctacctttgtgaagagctggcagaaagtaagcatacaaagctgaatg

SEQ ID NO: 340825 - DNA, 1000 bp, Homo Sapiens
ttttttttttttttttttttttttgatacaaatggccgctgtatttttgctaaagtgacagtgacacagataaggcaaagagctgaggggcaggacacatcagatggggagggggagaccgtgcaaaatggcagcctaacagaaaatcatccttgtaccaacagccccttccctcccaagttaggtgagcccttgggccagtgtatgggcagaaaagcagatttgtgtccttcagaagggaaatgtaaaaaggtgaaagctctagttgaagggcagtgagaggggctggagtgggagagaaggtctctcctggccggtggtctgggtgcagcaagggcactctgagaaggcagaatggaaacgcagggctggaggggcatgggcacaggtttgggggctctttccagcctctactatgttgcccccttccccaaagcccttacaggggcagaagcacattccccgtgaccctgagtctggcctcatttgggaagtcttctggggtgtatggatgcctgtgtgtgtgagtgagatgggtggggggccacggctatctggctctagcacactcatgggagaccagctctgggaacaacaggatggggtgctgggatgggggtttaagaggtctctgctagatatttctgaactgacctccccaggtgcccaacctggccttgggaagagagtgcctagggcagcggggatggaaacccttgcctgcagcataggtccaggcctcatggccctacaccttgacctcttgactttgttgccctggccttaagtacaaagattcctcactgcgtgctaagaaaacagatccaggccgggcacggtggctcacacctataatcccagcactttggaaggctgaggcgggtgaatcacctgagatcaggagttcgagaccagcctggccaacatggcaaaaccctgtctctactaaaaacacaaaaatttgccgggcatggtggcagatgcctgtaatcccagctac

SEQ ID NO: 340826 - DNA, 1000 bp, Homo Sapiens
tttttttttttttttttttttttttttttgatcagaatgcttgttgttaaagttaactgaggttacaaatggtttgtttttccaatgaatttaacatccaaaagtattcaatattgagtttattaacaaaagtggatgtgtacatagtcttatctcatatttgaatatacacactgcataatgacagctattttttatcagagcaatgtttcccaaacatagaagcgcagaagtaaaatgttattttcatttttctgtattcttgattttagtttctagaattcataaactcaaaactgttcacataagtttagagtatttgttcttgtttatctctgacaaagaggtgttctctaagaaattttatattttataatctttcctctgaaatatgagaaagacatggaatctcctgagttatatatgcagcttatacattctttgaaaaaattattttttaaaaatatcacaaagtatatatccataatatatgttgctattcacacaattctttaagcaatattcaagtatatttgtgctttatatttttacattactttagaacctatttttagctttcaataaaactatgtatctccaaagatttctcaaatatttaataaatgaggcaaaacaatcatgaaaatataaactgctactatagatttttcatctttcattttatgcatttcctctcaaccatgtaatttcctgttaaggaatgttgataaatttttatctttataatatcaatattgctgctttctcagcctggtgcaacagtcaagacatcacaaggtttctgaacacgcagtattcactctgccatataagttggagcaataaaatctgataggactggtattcatcatttccagttatttcaactgcaggaccaccttattcgctgcttccaaggactgtattagattctgcagctcctctctactcatttcaatagaataaggttttacttcaccattttcttttacatctagat

SEQ ID NO: 340827 - DNA, 1000 bp, Homo Sapiens
tttttttttttttttttttttttttttttttgttgcataacaatgtttatttagttttacatttgtttacaatttcttataaacacttcattataattgttttatacaaacaacagtttaaatttacttatgtttatcatttatttgcttactagtttttcaatttcagataatccttttagaatcatttcccttcttgaagatcatccttttgtagtctctttactgaagttgtgctgaggataacatctgtttttcatctgagcatctgtttgtttcagtttcgcttgttgcaaattctaagctaatagtttttctcagaattctaccctcttttgggtacattgttgctgttaggaagcctactaagtatttgactgtcttgctttcactgatctttttctccccatggttgcttttaaaatcttgtatttggtatcttgtcatttacaataccttgagtctaggcctggattttatttaaatatatgtttggtatatattgtgcttcctgaatttatgaattcatgtttttccaacaaatttgtaaaattgtgttatctttcaagtactgcctctcctttattctctaaattttctctttctaggactcctagtctttataattcttccctcgaactctcttaactttccaatgttttctagctccttgtttctcctcactgctcactgggtaatttctttagatccagcttatagtttagttcacttgtctcttcagctgagtctaataaaatattcaacatgtctgagggcttttttcttatttcaataaatatttctcatttttaggagctctatttggttctttttcagatctgcctgtggttccaacttcattccttatgttggtgatgaaaccttgaagaactgagttcaatgtttattttttctatagctttcttgtcatgttagtttgtttcaacttgtgcctgtgatctctagtcataaaatactactacttgataataatctgtag

SEQ ID NO: 340828 - DNA, 1000 bp, Homo Sapiens
cattcacacacacacacacacacacacacacacacacacacacacacacagtctcttgagtccctttcgtactcaagttcattacactgattcccaccctttcatggtgtgggcaatagggagtgaatgaactgtgccacatcttctattttacaaacaatgcactggttgagaggcaggaaaaatctgcccagtacttttctgattcacttgaatcccccagtacaaaggccatcgatagtttttttgaagtgtataaaataaaaaataaaaattaaaataaccaatactaccttacttttctgaaaacatctacctatctgattgtcaggccaaagctagaggtggtggtacaaaatccaggggtaggtaagttggaaggagtgaagaagaggtagataccacttcatagagaaaaaaaaaaacaaaaaaaaacctcaggaggccacagctgtccccacaacctcataggtttatcatataagtctttgataatgagtatcattataaatgctcagaaaaaccaaagctagagcttttctataggaccttatgtgatgatacccaatttctgacagctactgccttactaggctcccagaggagataaataaactattggtgctatatcttcaatttgagactaggacctagtcttactgccattcatctttgaccagaacttctccagaaacagaccactgaatctgaagtcccagaaacaggcagggaaggggaaaagatggacacaataggacatcccaccaaaatcctggagaaatctagggtaagcatttatatcctcctctagcttgggcctaaaatcagaaaagtaaaagtttttccctcttcctggtttggtgaagccatcttcagcttatcagtcctctttccgttgtgccacagtttctagcttttgctcttgtaagtggttcttctccctattattcatagggaggtagcggttaccattattacactcattgctgtctctggataa

SEQ ID NO: 340829 - DNA, 1000 bp, Homo Sapiens
tttttttttttttttttccaagaaagatgtgtattctccctaacaacaacaaaagagacctaaatgggctgctccctgaagagagccctcagctcttttaccgtgatgcacactcggggctgggtgtaggctgtgtggtcaaatgtatgaaggaagaaggaacggagagaacgtgggcaatcaaggcctggcactgccctacaggaggcttacaggtcacactcccagaactgtctctatccccatgcctctcctagtaagattcattacctatggtttcaaagaaagtgcagtttctagggagtgaaggaacacgtgaaatacagaaaataaagacagaaaaacacacaaattattaaataaaatttaaacaatagagggaaaaaaagtgtagtttgttctgcaagccacagcccaaagaagtctatttcctcccacaggatggctagagtttaggagccacgttctcctctatagctcaccagaggatgcagcctgaagagctcagggtttgaaggttgggccttgggcgggagtcagctactatttctagctgttctagaaagacctagaaacttcctgtgtgaaaacaggattaggaagctctgggggtgaaaatgccatgcacggagctggcccatgccaagtccctcctaactattttaaattacatctttggccaggcacggtggttcatgcctataatcccagcactttgggaggccaaggtgggtggataacctgaggttaggagttccagaccagcctggccaacatggtgaaaccctgtctctactaaaaatacaaaaaaattatctgggcatagtggcgcatgcctgtaatcccagctactcaggaggctgaggcaggataatcgcttgaacccaggaggcagaggttgcagtgagctgagatcatgccacgttacactccagcccgggtgacagagcgagactcttgtctcaaaaacaagaaaaagaaaaaaaaatacagcctcatc

SEQ ID NO: 340830 - DNA, 1000 bp, Homo Sapiens; identical to SEQ ID NO: 159662

SEQ ID NO: 340831 - DNA, 1000 bp, Homo Sapiens
tttttttttttttttttttttttttttaggcaaaaagaaattttattctttcacagaagtctgaggcaggcaggtccagagttcatgcaggagctcaataacatcagagattgggctctttttgttcttcttagcatatcgatgttttacgtgatgctgggcacctcggggacctaagatggctgttgtagctccatgcatcatgattaaaccagagacaggaagtgtacgatggaagaggccagaggtgatggcctcctcctctccttttgtcttattcctggagtgactccctcctcttatcagcagggatacaagcagtgcctggcagccttccctctctcctgtatgagccaaaagcaagactcatggcacccctccctgcaggaaaggggtggaatggagcccctggcaaagggggctggacttgcagtgacagtgctgctctgaacaggactaggcttctgttggagaggtggtcagcggctgctaggcaggtcacaagctgcctcacccatggctctccagctctgcacctaccctctccttctaataaatctgtttcaataaccaccacgaggtttaaagaggagcagtaacttgcccacggttgcgccaggcacccctagaagagcaagaattccttacaaagttattaaaacaggcaaatcccatataggtgacatttctatccaacaatgctgacatctcttttagttttgagccttagtaatccaattttctgcctcaggaagaggcagcagcttctgggaaaaatctgctcctgctaaggtggctcattcattgttttacctgaatagagtggtggatggtgaaggttcaaattctcactttccatattaaattttataacataaaaaataattaaatggggtgcgcgcggtggctcacgcctataatcccagcacctgggaggctgaggagggcagatcacgaggtcaggagatcgagaccatcttggctaacacggtgaaactgc

SEQ ID NO: 340832 - DNA, 1000 bp, Homo Sapiens; identical to SEQ ID NO: 159663

SEQ ID NO: 340833 - DNA, 1000 bp, Homo Sapiens
ttttttttttttttttttttaaccaaatatgaaaatgtgttttatttctcagtacaaagccagatactgtaaggctatgaaaaactgactagccagaggccagaaaggacaaaaagaagactatctctggcctggtgccctgtgatctggcgtggtgtcacaggaggtctggggacagcagcaaagacctggaccggtggaggtggatgagggaagcgatctgccagcccttccagcctcccgcggctggggcctgaggatcctgcctgcctttgggggccactggttgcctggcctggctggttccaggaatgaactgggagaggacaggaggtgcagggagggggcgggggtgggaggcgtgaccctttttgcacgggaagctctgttttcattccgtgccacaggtgagtgtgcagggctagagttgagaatgaaactagggtgctgttgcccccaaaggtaccttcagtccctctaccacatcccagttagaaagtcttgagcccttggacaggcagacatgggcctgggacttaaggctgtaggaggtgaggctgtagtgacaggggtgggaggtgaggccgtagtgacaggggtgggaggtgaggctgtagtgacgggtatggggcggagctgagaggaatgtgtgcggcaacagacgtgagggtgtttctccaaggagttgtggatcctcttcagtgtcaggggagcgtgggcatgtgtgagggctcaggcctcgccctcctctccactgtcatgcacgctggcctgtctcaccaccttccgggacctgggcgtagaggaaatgcagggctctccctgcccctgcccctgcccctgctcctgctcctggaaggcctgggtccggttggccaccacggcactgccctggagggtaaccactgactggcgggacttcagggcaggctgaggccccctgtccacctgctggcctcccttggtccttgcaagctgtgggaagggctgcagaggctct

SEQ ID NO: 340834 - DNA, 1000 bp, Homo Sapiens; identical to SEQ ID NO: 159664

SEQ ID NO: 340835 - DNA, 1000 bp, Homo Sapiens
tttttttttttttttttttttagattagaaaactagattgctagtttattttgttatcagatatgtgaatctcttctccctttgaagaaactatacatttattgttacggtatgaagtcttctgtatagtttgtttttaaactaatatttgtttcagtattttgtctgaaaagaaaacaccactaattgtgtacatatgtattatataaacttaaccttttaatactgtttatttttagcccattgtttaaaaaataaaagttaaaaaaatttaactgcttaaaagtaaagttttgccattgcttggagaaacttttttttccttctctgcgctgccagctgtaacacttcttctggattgcttgcattcaactctgtctggccgatggctttgattgcaatttgtcttttatctgtttctcctcttttatgatgaagataagtcaagtattccaaaatggtaacatcccatatgtagtcgtagtaggagtccatagcatcatgactgttttgttcttgcagagatttaaacgctgttttgtagtcaatttctctgaggaactgacataaaatagccacctgtgtgtggcaattcagcaaagaacaacattttatcattcgttttattacctggtctgtataaacatcagggggcacagccttgttaaagaagtcagaacacacagctcctgcctggaggtaatagtgaagagctgctgaatactgattcgttgcaaagtaaatatctgcctggataattaaccaagaatggttatttggatttatactgagtgtatatcgaactagctctttcactgtgattgccacagcttcaaagtccacagactggaggttgggaatggaagatggccaaatagaaatgtgttcagctgtaatatcattcacaatgtcctcccgaacattgtgaagtttcacaaagagtgataaaataatagtcaaaacgagtggttctcgtaattttttgataaaagaaagcagt

SEQ ID NO: 340836 - DNA, 1000 bp, Homo Sapiens; identical to SEQ ID NO: 159665

SEQ ID NO: 340837 - DNA, 1000 bp, Homo Sapiens
ttttttttttttttttttttgaaaaattttttatttttcacctgtttaataacagtggttttcctacacccatagggtgccaccaagggaggagtgcacagttgcagaaacaaattaagatactgaagacaacactacttaccatttcccgtatagctaaccaccagttcaactgtacatgtatgttcttatgggcaatcatgccaggggttaggcaaaaacctgtgttctgaaccaaagaagacttaaaactgctcccataatttgtgaatttcttgaaattttgcggttttttgaaaattttttaacaactggtaatcaatttatgaaaacagttgacttaagcatttgcaatggtgacttccatctcaactcctggctcaatactgatggaagtaatctgcttaactatctgaggactgcgcaagtcaatgagtcgcttgtggattctcatctggaaacgatcccatgccttagaaccttcaccgtaagtttttcttgtagtgattctcaaagtcttggtaggcattcaaactggtcctttcactgattcttttcctttgctcctcagatcaagtcagcacacaccttatccagggattttacgttgcaactcgttagagtgatatgaattcggtgaattgccacctctgactccacgggtgtttttctggtatgtttaaaagccatggctgctgcaaggcttcctagccagcttcctgacagacttggtcctcaggcaacagcaaagagcagtgagtcaggagcaggagcaggtggaccacagctccgcaccacctatgactgtgtcttcctcaaagagaaaatgtcttttaatgtcggaaaatatttatacacttagaaaaatccatacacaaagaataaagcaactctcccatttgctactgacatcagatccccagtttagagtcaaccacagtaacacagaactcttatactagcatgaacatatttattcacatacctttctaaaacacga

SEQ ID NO: 340838 - DNA, 1000 bp, Homo Sapiens; identical to SEQ ID NO: 159666

SEQ ID NO: 340839 - DNA, 1000 bp, Homo Sapiens
ttttttttttttttttttgtcttttgttcagcttttactggaaactgctgtctaggaccacctgccctaaccaggaataaaggcaagacagcctggagaccagtttgtttcttcagctgcaaacagctgcctgggcaggcaggtgacacaaggcctctgtccccagggatgggacctgcagggtctgttcacccagggcacccacagtcctgaagtgcaggcccagggtctgtccagctgggagagggcagaggtggcggctgggtgagttgccggcctcagctgggggcctgggggaggcccttcttcagcagagatgtgaggaagctccccagctcctcgtcctggtaggtccaggagaccagcagcaccttggtgcctgggtcctcagaaggggcggcggcctggaggaggacggactccacagtcacagagccgtccgggaggtgctgcacacagtggtccttcaggacgctcttgaggtggctgtagacgcgcaatgccgtctcctgctccttgcgtgtgtcatgcaggtgcacgcggcaggtgaagcgcagctggtgctcagccagacccagctctttgagggcttgctctgaggacaccagccggaagttgctgtccttcatgatcagggtgccgtgcaggagccgaggcttcttggcctcagggagcagcccctgcgccatctcccgcttcagcagccccagcgagatgcctacggggatgctggggcttgtgggcagcgtcaccgtctcgccattggccggcatgtagcagttgacccggagctcctgctcgatcttctgcttcaggaactccatcttcttggcctcgccatgcaccagcagcacgctctccggctctgcctggcccaccagctgcatgatgcccttggcgtccgcgtgtgcgctgaatgacatgtactccacctgcatcttgacctccagcacctgccgcccctccatctcgagcttccgctgcccgctgaggatcttgt

SEQ ID NO: 340840 - DNA, 1000 bp, Homo Sapiens; identical to SEQ ID NO: 159668

SEQ ID NO: 340841 - DNA, 1000 bp, Homo Sapiens
tttttttttttttttttaggttttccaaacagctttcaatgataaagttcaataaataaagtacagcactttaattgcagggaaaaaaaaatgccagaatttagaggtaaaacagtacaggggccaagaccaaaaaattttatttggaacattcagaggctagaaagccactgtcccgttctccagagcctctgagaagttaactgagaaccaattaaagaagggcatctgttcctcctcatcctaccatcacctcagtcagtctgtgacctggtgacagtgactcctctcctcacatccagtcttccctggttggagctcctcaggcccggcaggcagcttacagcttctctggctttgtgattgcttgcccaagaacatacccaaggagaccctgtggtgtaggggtggggctgaagcgcagccacctgacagagctctcctgggaaaatgcctttccaagtagcctctcagagtatgcaaagctctctcctaacaccctagtgtgctctatgaattgatgactcctcttttggagattctgaaggctgaaatcaggtccatatattttctccttaaggggattactgaaggcaaaggcaacacaatttctgcctggttttccaggtaggacttcatcttactgcagaatagtaagaagcagcagcccttggcagaaaccaggcagggcaacagatttcacccgttcccagtcctctcttggtcaggacttcaggcccatcttggccatcatctcttcatacaccgtccacgccattgctgccattagagttctgcggagggctcgggggatgccaccttggaagaagccacgtagtccatagtctttgaaaataagtgtcactgcttggccaatccattgaaacttcagtggataaagctgcatatgagttttgataacacccgcaggttgagttaccagtgaggccagaataccagcaaatatcccacagctgaaatttgtaataggaataagggt

SEQ ID NO: 340842 - DNA, 1000 bp, Homo Sapiens
ttttttttttttttttttttttttttttttttttttttttttttttttttttttttttttttttttttttttttttttttttttttttttttttttttttttttttttttttttttttttgcctggaatttccctgtaatctcttccaggcagaggaggcctcggaggtgagagtaagagcaggaaaacagggacaggtttcactctgttgcccaggtgtggtggctcaggtctgtaatcccagcactttgggaggctgagatgggaggatcgcttgaggcagaggttgtagtgagccgccgagatcgtgccactgcactcaggcttgtgggggctgggtaacaccaccctgcaggtggtagtgagaaaaagaggacttgggtgttgttatcttctgtggcagcagctgccctgggggttctgcagggaggggacagggtgaggccttggggatagggcattcggggcccaccagcctgtgtggcctcagtctcagggagaaggagcacccgggtggcagtagaagcctccagggaacctcagctggcatcattgatgggagtgcgggtgccacccagcagtctctcctgctcgctctcctctgccaggggccggcccctggacaggcggcccagcagcggacggtgtagcccattgtagagggcagtgcctataaggagtatgaggaagccaaggatctgcagtgcatggaaggcctcccagcccagtgccaggctcagtgcccagatgacaacggtgcgcaagctgtccaacaccatgcgggtggtggcgctcagttccttggtgacgctgatgcctgcgaagttgaagaaggcaatgctgctgatgttgcccagcagtgccacggcaatgagcggctgctggcccacctggcagaaggcgtccaatgcatcctccagtgtcccacgagggtttccgctgaaggagccggcggggatgtagtacatgggcaccagcagcagggagaggatcacaaagc

SEQ ID NO: 340843 - DNA, 1000 bp, Homo Sapiens
tttttttttttttttagatttaaaaataaggcctttattaccacacaaaccagagcaatgtgaggcagccagttactaggtggtgacttggaggctggaaaaactaccaagtgttgtgtgaaaacaagaatttccatgaagggaagccttccacatcagcttccagcagaacccaggctgggcccttctggccaaaactggtcagatgtatgctgtaatcagtcagaaaagggaaggaattccccttaaaggctcagactgctcaaggaatttcctccaagggttgggagaacacaggtgtatctgcctcgccttagtatgcaagggtgactaatgatttaactctggcaaaggcctccagcagtttagaacatgcaaaggagctcctgcaagacacatatgcctggaactaatgggagtctgacccatcgggaggtctagaagtatgaggtttaactttaggcagacggctccttcacaaaggctctctatagccataacactgaagaaagacatggcacattccctgcaggtctaaggcttttctcaggtttggagtttcaagagttaaacaatgttagatcttgggctgtagggttttccacatttgctgctgtcacgaggcctctccacagtgtgagattttcggtggagaatgaggccagagtgttgtgtaaaggacttcccacatttgccacactcatatggcctttctcctgtgtgaaccacttggtgttgaatgaggctagacttttggataaaggatttcccgcactgtccacagtcgtaaggccttaatccagtgtgaattttctggtgttcaacgagggtatagctttgtctaaaaaatttcccacattcactgcactcaaaaggcctttctccagtgtgagttctctggtgcctaacaagtttagatttgaacataaaagctttcccacattccccacatacataaggcctttctgcagtgtgaactttgtggtgtttattgagggtg

SEQ ID NO: 340844 - DNA, 1000 bp, Homo Sapiens
ttttttttttttttttttaggaaaaactagtgacactgctttatttgagaacagaataaagagcgtggctggaactctgccaagatggtctttaacattctgccctaaccagggtgttaactttccaacactgttggtgtatggctgagtgctgcagatttctcagagaattagcaaaaggttgaaataaacgctaaagatgagtccgtaagaaggaaaataagctggttttctttctgttccttttaaaactctagccagaaatactgcccaatgcataatgaagactgtacacagcagcatcaaaaaggctatttacaagagattttcttcaacagaatccacttgaaagcactgagaatttgcatcttagctaagagcagtttaccaaggaacagggccatctaagtgcctaactagcatttaaagttgtcaaggggtggggatgtgcaaattaagcagcaaaagattattatcttgttttgctttaagggaaagtaatagtggtcagaggggccagttccaagggctggtccaaggggggccgctggtcttggtactccgccacatgcccattccggtggtggccatactcaaacttgatccgcagctcgccaatcttagattggggaaggatatctgggatccactcgatgatgaaaggtgttggctccttttgatctggggaagtgttgccaactttgagaaaagtttttagttccaagggtcgcagcactggttgtttttctatacgaccgtaggtttctgctatgctttctacttccactttagggcatttaaatagctcataagtcccatctcggttctggataaagctacgggtgatttccaagggcatctctggggtatctaagatttgtttaacttgcaggatattagtgatatgccaagtatacttggaaaaggttcccagtggcaaggcatctttccgaacaaaagctgtggtggagttggggagccgtttttttgcacttcctat

SEQ ID NO: 340845 - DNA, 1000 bp, Homo Sapiens
ttttttttttttttttggattgtgatgtaatctttatttcttactctgagctccagttagaaaagtttgacaatcattgttatagagctatgttcagaaagtggagactttctgactcactgtgagctctgctgtatctatgcgctccctggagagggagcaacttgctaaggtacagtcctgtccattggcatggatatttattgttccacatgttgggaaaaccatgtgcaataaaaatcaaacatatgaaacaatggctgtcattgtaccacagtatacattgtatcttggtgaaggttcttaaattactccttggagtttcctaattcacttcaggaaggatttgttgtgttccgtctttatgctgtcacttgcaaacacttttgctttgctagttcttgtattagatcttcatatacttgcaaaaagaggtcctcttcagattttgttccatccaggtacacaacttcccatgtgatgtcctgcatttcttgtctgtactttagatacatgggccacacatggccatcaaagtatcccggagagtctggaggctgatagacccttgtactcctcctccttttacattcttcatatggaatagtcaggaaatagcttctattccatatagtgtcaaggggcttataattaaaaagaagaaaaccttcgatgattaaaatgggaatttcctcagcactttcctggtctgttgataccacagagtgtcttgcgctttccatccagcaggaaatggctgacatcattttttccatgttaagtgcttcaagcacatcgtactgcaaaaatccatttttatctgtctctatctcagactctggcttgaagaaatcatcctgagatatgacactgcaatttgggaggtgtttctgcaaattcttagccagtgttgttttgccactgtttgtcacaccactgattccaatgataaatgttttcataattagctttgaaaatcacagcttcctaatatttcctg

SEQ ID NO: 340846 - DNA, 1000 bp, Homo Sapiens; identical to SEQ ID NO: 159672

SEQ ID NO: 340847 - DNA, 1000 bp, Homo Sapiens
ttttttttttttttttttttttgcctctaaatcctttaattaggctgagtctttcagaagaaagcaccattcattgttattgaagggaaccgagagcaaacggagatagtgacacacacacacacacacagatgcgcacatgcacacacacgtgtgcacacttacatgaatgcatgtatttgtaatgattataattaaactctcttgctgaagggctcagagtttacaaaaaaatttatttgtgtctgagagccacgattgagaacattaaaaaggtcctcctgggaatgtaacttgggggaaatgtggcgagagggcaggactcggcagcccatgggcatgccacaagatgcgcccaggcgctctggggtgaactctgctgtgacttcaggccagaggtgtctgcccccgcagtgccctgacagctgagtggtcggaaggccccggctgggaaggattcatttggaatctttcttcttcttctttttcactagcgtttcttctagtgtagcgtcctctgctatctctactggtttttgcagctttttcttccctctcctctttttgggcttcagggtgaagtcccggccctcaggcggctgcacatggtcccctgcatcctgagcagaggccttggaactctggtcccagcaggggcctctgagctgctcttctgctggcgcgctcttcttcttggccactcgctcctgggcctcggccctctcgggctttccctccgtgtgcctcttggccttaggctggaggtaactttccacatctttacctgtggcctctttatttcttttcttcccccttttacgttctacctgcgtcacagaaatgtcagaccctggaactggaacctggggcttgttcttcagtgctgccatccgcttggcaaagtactcctggatggtgaaggcgctggttgtcgtggtttcgttctcctctggagtggagggactggcatcgccctcgggagtcttcttactctgtcttt

SEQ ID NO: 340848 - DNA, 1000 bp, Homo Sapiens
tttttttttttagttttaatgctgtgtgatcatcttagtgcaccacacattttctgcattttgatttttttcttttgtggtgactcccgaagatagaatttctgagctaaaggatattttattttatgttcctgcatacttttgccaaatggttacatacaaaggatgaagcctttacattcccactggcagaaaatgagtacccacaagtgccccaagtctatggtaacctgtcctatggagggaaatctgaaagctcttagtgagaccagtgggcagatgctgagcctgcccccagacagagggagaagtcgaaccaccaagcatttgctaggcggcgcagcatctatgtgatcagggccaatgatattcttttgctctttccagcattgcccagtgatcctggggatgccgtttggaagctgcacacctttgacatctttagggtcgaagagatgatgctccccatggggactgaccagtgatccattagtttcttgtggagtcttcggaggtctacggggccttcctggggtgcacctcatttcccccactcctgacttcgcaatttactcctttggatctttccagaaaccgtctttggcagttctgaaacaaaggccaccttcctggggtatttgtatggagcagtcacccttttcacatgctcctggagttcccgcgttagtgcctctgggtcatgagaggagtaggctggagtaaggactataaatgcctttaccacctctcccctgatggggtctgggctgctgaccacagccgactccaggacagcaggatgctctgccagggcactttccacttcaacaggcccgatccggtagcttgaagaattgatcacatcgtcgtttcttcccatgaaccaaaagtagccatccttgtccatgcgagctcggtcccctgtgatgtaaaagtccccttgttctgatgcagctgtcttctcaggattgtccaaatagcaattgaagaaacagaaggg

SEQ ID NO: 340849 - DNA, 1000 bp, Homo Sapiens; identical to SEQ ID NO: 160849

SEQ ID NO: 340850 - DNA, 1000 bp, Homo Sapiens
gagtaatgccgactttatatcagcacacccagtgcccccacgttcccgctggcccaggtcccggagaccatgatggcacccacagtggacttcgcaaaggagcgtggggaccccgaaggccaggccacccctcagatgggggtcccatgctaaagcagacggtgccggtgccgcagggcgtctgagacccacggtggagcccgggcctggcgtgcgggaggcggccacgacggcgcctttctcccaggaactccgggagggaccccaggactcagcgccagggcagccttggcaggtgcagtgaggcagtgacttgtgggggttagatgtgggcctgccccacgtgggcagggatcagccaggcatgggggtccagcggatccgagcggggccacagagctctggaggacttttctgcacaatgaatttctgcttaaaaacagagatcaagaggaagctctatcctgcagctccggaaatgggtggctgcgtgcttggggtctccgccacgcgggaggacagcccagaggcaccctggtctcaggcagctggttcctaggctgtgtcctccccactggccgggcaccggctggaacggcacgaggaccagcctcactgttctcagaggggtctcgggccactgggtgtggtggtgctggaggagtcctgcccgctgtgggctctggagggcacggcagcagagcccctggcttttctaggcagagcggcacctgccccatagatcgtgccagctttggctgcaggcgctggggcctcaccgtgtttcctgggggggcccggaccccccaaggcctcgatctgaagctctgaggtctcatggatgcctgctcctggtccgataaacgagatggctgtggtggggaggagcctcaggcggcccgggaccctttggcgtccgtcgctgggaggcggagggacccagagccgaggctgtgcccaggactgtcccgggcgccgggcgatgccaacactttgtgct

SEQ ID NO: 340851 - DNA, 1000 bp, Homo Sapiens
gtggggaaaaagggtgtttattaaccaacggcagggggaggagctgagcccaggctccccactctgtcacatgcctgttccacccacctggttgtaagtgggggcattcctaaagaagtgtagccattctcacaataaatacattcattgtggggtggaggtgggagaggttgggtgaagggcagtaaaaacccgtgggattccacgttctcagctacaaaaataacagtcatcctcacccgaggggaatgggggagctcagtcagaattgattgtcccatataggcctagagacttcagaggcccctggcccctgaaagtgccccggtgaggtaggacaggggtaggagctaagcgtccaaactcccagcctctgccctttgcatagttccaagaatgggcttcatgtgccagttgagacatcagatttctcctccctttccctgctgtagtctagaggaagcaaatgcttgattcccccaaaagagaggctggctcattgagtgcagtgttggtcatccatcctaggcaagggcctgtgaggacagttaaatgggagggggatctccctctgaaatgtccacggactaaacccaacagacaggtccaagacagcaagggaggctcagaggtgcatgtgagtggaaatgtaagcacatgtgtgatacaggtgtgtgttaccacatgtgcatggggatgggacatgcctggagctctgtctctcatactcttgagaatgaccaaggagagtggggaggctgattcacaagggccacacaggaagggagaggaggggagtgatgcagtcttacctccccaggctggcccgttcccaagctcttgacaaagaggtcaccacatggggctggggaagaggaccagataggatgtggcaattgggagggtaccccaagtccagaagcagggatgaaacaagaatgcaccaggagaaggtgagggtgggggcactgcagcccagccgataaacattcttccatgt

SEQ ID NO: 340852 - DNA, 1000 bp, Homo Sapiens; identical to SEQ ID NO: 159674

SEQ ID NO: 340853 - DNA, 1000 bp, Homo Sapiens
tttttttttttttttttttttttttttttttttttttttttttttttgcagctttttagttgattcattaaacttgctttattcatcaatattaaagtcaggaagtaaaagtgtaatagccatgataacattcaaaatagcatttttgatgatcttaattatttttaaagccttcagtacctaaaatttatatatatactttcatattcccccctctaatactttccttgcattaacctggagcatacacaactttgaaaagtcaaaaatcgagattgttttccagggtaaagatagttgaaggctggataataaggatttgctgatgtatcgttgctgctgttgttaagatctcagtcaatccctcctggttgctgaagccatatcaccctagtggatccatcactcatcactacaccatccgatacacagggtcaccaactctcaggcttccaattttttccactgaataatagatcccaaaaagtggagacaacttgtacaattccctctcagaaggatcacacaggcggtagctcttcagggtgtccagtggctgtttcctgtctatgactccagtgtctgggtccaccgttgtcaaaatacacctggggcatgccattacctttttcacttctacactaccaattaggagttcatcccaggtatcctcctcaaaagcatcacagccggtcaccacaatatttggcctgaaattctccattttcattttcttctccatcctggtattcaaatctaccagggaggcatctgtcatgatcaggagcgggcagtagtctgggtaggccacctggaaattctgatcaagagtggggagaagttttcttgatgttcttcccttcatgtttgtctcaaattgaaccaatctatacgcttcagttttcaagaagttggtgaaccacttagctgcctcattgccacagtctctgcctttaatgtcaaggccaaatatcctgcagttgtggagtttgtttgagga

SEQ ID NO: 340854 - DNA, 1000 bp, Homo Sapiens; identical to SEQ ID NO: 159675

SEQ ID NO: 340855 - DNA, 1000 bp, Homo Sapiens
tttttttttttttttttttttttttttttttttttttcccagcattgactatatttgaaagagctacacttgagaaggtaccatatcttcacatccacactgcatcagagaaccccagaatggggtactaaaaataaacacccctccccaaaaaacgcactcaggcatgcacacacatccacacgcatcctctcagttcatcagtgcactataactgagcttcaggggtgagagccagagctcagatgctggaagtaaacctttggcaaaaaaaaaaaaagaaaagaaaaccagagaccttccaactcctcttcccttccagagagaaggtgatgaagacaggagcagaggtgaggagacacagggccaccacactgcccaatcccagggaccccactcccactgaatagatgtgaatgatggcccttcaagttgtgcaatcacagctgcccacctgtaagctgcagccctgagaggggttcccaggagtagctcctaacagaaaaggaaattcgacttccatgctccaccagttgccctgactattgagggtgttgtggcacattacaacggggtctggcagaggagctggctttaagacgcaagcctatgtgtttgcccgtgccctgaggtggatcacagatagtgaatgagctgcctgggcttgaccccatttcatctattcagccaggaagctcagcaggaataaaggatatggcctgggcagggagcatcatagggcctggaggctctagccagttagcctcgggcaggctgcagtgaaacctggccaacatatgatggctaaaatccaagtgtaaaagcttaggataggtcaggcagtacttcccgggggctcacactgtactgtcccactggaaaaggtaagcagtggagaaccttggtaagtagggaggctggccagtgtggacacacacacacacacacggacacacacacacacacgcacgcacacacacacacacacccagaggcttgc

SEQ ID NO: 340856 - DNA, 1000 bp, Homo Sapiens
tttttttttttttttttttttttttttttttgcttgatgaaatgcagaattttatagagatattttattatttactattatggttaatgtcattattatctagaataataaccacatccacgacagtgaaggaatttcactcctgcctcgtacctgctggcaaagtaattaagccactgagaccaagactgggagtagatttgccactaggtcatgtggatagtagtggagaagatgaggggatgggaggactcttcggcttgcagtgaagtaaactgggagctccgagtcggcttcctcaagcacatgggctctgtgtgggctctaggaggcaggtctgggaccagtgcgggaagctagcaggaggcagaactcacctaagtgtgtaacttgcagagctgaatgactatgcagtggactgcatcaagagacagtgagataattcaaaaatatgcctaatattaaattagtagcagtcagtctcttatgaaatcttactgtgtgcttgatgctgagttttacgtacaaaatctaatgtaattctcataacaactccagtctacagataaagaaattgaggctcagaatctgggcaagagtattttgccaaaggtcccgtagcacgtggtgttgtgggatttgaaccaaggctgtctgtgttcagagccagagctctgatccactatattaaatgacctctactggctttcagaaaagcaccccctatgtccaaggcactgtgctttagatgctacctcactgtgtctgttgacaacattttaaggaaagtgttgttatttatatcttacagatttgggaactgaagtttgtgggggtaagtggcttgctgcaagttccacaaggcggagaagccagatttcaactctggtcagtctgattccacccgtgccaatccagaagaggctgggggctcactgagcaggaattgtagaagggattcctgcagtgagtggaggctcctgcattctttcactcaaaa

SEQ ID NO: 340857 - DNA, 1000 bp, Homo Sapiens
ttttttttttttttttttgagaaagatctttatttgctttgtacaaagtaaaaattacatgacacattaacatattatatatcaacatgatacataattcataaaacactgtctgccaaaagtaattttaccagttttttttttttttttaaaaaaaaccatctaaaagtggttttttaatatatatattttttccaaaggaagaaatttcttgcttttactcagggaaaaaaaaaaaattaaggtacatttgagtagaatgatttcatctaaaagagttctttcaggagacatctgtgattcactgcattgtttttattttcttctttttcctcttcttttccaacatttctaccattttcctcttcttggttgatatcaggccactttcttttgttgctttcttactgtcacctgttaaaccgcgtttctttgtgttaggttttgaccgcttttcttctttgtgcactgtgtcaccaggctcctttttgccaattttggactgttctttacttacaggagaaggctctgcagctggaggaaggctttctttcatgtctgccactttgtctagccacactccaagacacgtcagcctggcattagtgtttatttcacagagtaaagatgggggaactttcttatcctgcttaagcttccacattttgatgaaaccatcactcgatgctgaaacaataacatgatgctctggaatttcaaaactgaacatgtcctttaccctgttttcatgagctttaaattcgcagaggcacactagtgaatcacagtcaaaaaaccttataacttcttcatctccagccactgcaaggacagactctgaaagaaatttaacagaggaaattctcttttcatttgtgatggtgccactaatggatgcagtgtcaagctgatagatgtctattttattctgtatgataactacatactgctctcctcttggggaccattctactatgtgagcattttgttttatattttt

SEQ ID NO: 340858 - DNA, 1000 bp, Homo Sapiens
ttttttttttttttttttttttattatgaaagtggaatttatgttaaaattctaacacacacagggagcaggagaaacggaagccaactgtgctttcctgggtcttctgctgctctccacactgagacctcaggcccagcctctgcacagacgagtggggaggcacagtttttgaacacccacctgaggcaaggaggtcccaggagagggagtgttgtcagcccaggccatgtcacagggagggagggagcctggtgcttggcagtcaccccacaggcactggtcagccatagaagggaacccagacctccctctaggaggcaggggcaagaagagagagagcagctccttttccttgcacccaggtcttttgggggagaccagaccaggggcagggaactggcttgggaccccttgttcactctggcatcccctgctgcctccagagtcttctgctggtgccccagaggctgtatccaggccccgagaacaccgaggccccgagggactgtgctgtctggctgctcatggaacctccggccggtggcccttgcggtggatgaccagctgcgacttccagtcgaaggcgcggccacagtcactgcagaagtgacgccgctggcctgtgtggctcttgcggtggatgaccagctgcgacttccagctgaagctgcacccgcactcctcacacgggtaactccgggggcccgtgagtgagcgtcgggggtggtgcggaaaggccacctccccttgtggtggcttctctgtgctttccccggtggctagccccggggactgcacacctggcccactcgtgtgtgtccggtggtggatgacgaacactgacttccagtcgaagccgcggccacactgctcgcacgtgtagggcttcctgggggtggcagccggctccagtctcgtctctgcaggtgtgggctgagtgggcactggcggtgtccctgggcgcacagtgggggcaggagtggcagccccagacaag

SEQ ID NO: 340859 - DNA, 1000 bp, Homo Sapiens
ttttttttttttttttttgaacatttatttatttattttattgtttatttttgagactgagtctcactgttgccctggctggagtgcagtggtgtgatcttagctcactgcaacctccgcctcccaagttcaagagattctcctgcctcagcctcctgagtagctgagatgacgggcgtgtgccaacacacctggctaattttggtatttttagtagagatggggtttcaccatgttggccaggcttgtcttgagctcctgatctcatctcaagccacccttcttggcctccgaaagtgctgggattacaggcatgaggcaccgcgccgggccgaacatttaatttttgattgtagaacttgaatatctcttgcagtgacactttggttatcacttgatcagaaaaatactcgtcccagctcaaacattacctctatggtaatgaggatgacaatcatccactccaagcggagtgccctcttctcattcaggtgattccgcattagatctgttagttccatgcagtgctgaagtttttcattcatgaccttaactcttcggccaatgctaaggaattgacacgttttatcgtaaagtccttccaggttttctctgtcccagtagaaatcaggagtaatcaggaagtctgaactcaagtttatacggtgccttagagcaaagagttcaccgattttctgcataacttcttcatgagatagtttcactttcttcccagcttttaaagcctcaggaattgactgaatagattcaataaatttatccagtgatgcttcccaaattgccagttttacagaaaggcatagagcattggagaaagcaaacttctctagaatggcatcatctaaatccagctctgaatttaacttgatttcccccctgtgaagttttgactgtccctctatttttatgtagttaagttcttcattttcccagtgtaccagtgcgatttcatagggctgaatttcatgtttttctagaa

SEQ ID NO: 340860 - DNA, 1000 bp, Homo Sapiens
tttttttttttttttttgtctttactcttccccttttattacgaaaaataccaccttgacaaaagagagcctgtcagatgggaacgggaacaccaggtccatcccttcccacggattctggtccctgaggtagctatccatcagtccttgcaaagtccacctgaaatgtgtccgcgtcaccctcctgcatagttcaacacacaggggagccctctcacccagccttcagggccacatgcccatgtggctctcttggtgtatgtgacggtttcgcaatcagagatccacgtggagttctccatacattcctcttcgtttgggcactgtggttacagaaggctagttttcaagttgcaggttttactgtaaagatttcaagaccctccagcatcatcagtatctgattgtgtgcgtttttttgaaacttcaattccattctcttctaacttcctctttgcacagtcctggcatgcattacccaataatgtggtgctgtccacgcgatcagcatctgggctttgctgtttgcagatctgagtggcaaggtcttgcacatatcctggaaagtggtcaaaacagtccccgtaggatacaactttgattccgtgcagaagcatatctgcctgatgcttaaagaaatggtcttcattctccttcagcacaagcatgtagtgctccaaatccaccttattcggcacggagtaaagaaagagggcctggaatatctgatcatgaagggtctccccacagcccacaaacagaaaggacttggtgcggtataagttctggaggacttccatgacttctgcgtcttgagtgacgtctttataccccgatgggtccagcaccaccccgcaggggtccgtgtagaggccgtgaatgtggaggacgccgtacttcatgtgccctcttgcccattcaaggaccttggtcttgtccttcaagtccagggactccatgggcttgttctgccgccggccaaaggcctccagcaggttgt

SEQ ID NO: 340861 - DNA, 1000 bp, Homo Sapiens
tttttttttttttttttttactgatttattgcttttaatgtgatgaaacaccaaatttgacagctaaagtagcagtgggatacaagtatgtttttatctttaatcatttttgtagaataggacatgtacatatccatataaaaagagactgtagcagatgcctcccagaatcaaccagttcttgtaaacattgcatttgtgcagattttcatacttgattccaaaattgagaacaataagattaaaagcaaatttagtagccacaaaaagtccagtttgacttcctgcaacatatggtaccactcttctcttcagaacaaaacaaaacaaaaaacctagcagcacattaaaaaaaatttacaaaacatttcagtactctttccctcccatcaaaaaccgaacaaaaataaagtgcagcacccataaaagtgtcaagaaaatagccaagttcttcctttcttgtaacaaaatagcacttggcctcagcagtcttaaccaaattatacagtgtccatcattttgggttcatcatcttctttatgtaccaccgagtttaagctgcagagagctgtactgatagaatactgaagataatctggattctgtggtaaggattctaataaacctatagatccaacaccagaatggggaacatgattctgaactgtcataggttgaaaactttgtgattgagaataaagtcttactcttgacttgaaagcttcaagttcatttttgaatgcttcaaaataaccttcttcctctgctttggctttctggaaaaataaacgaaaacaccctcttggatccacattacagtttttggccatttccataataaactgcattacaacagcttgatgtgctatttgttccattaaagcccctttcttctcagcttccaggtgaaaacaccataaaataagatatttagcagtttcttcacatacaaggtatggatggtcagacaaaaatctctggctatcatcccatcgactca

SEQ ID NO: 340862 - DNA, 1000 bp, Homo Sapiens
tttttttttttttttttcaatgtgacttgtcgtttatttcaatgaaaatttaaatgattcttacaaatcctctgaaaagtaaaactgatacttttataaacagaagtatatgcaaacagtcacaatatgcattaggacgactgacgatatttcttacatgccaggtagttcttccatcccagcaaacacctcttatctgaaagtgttttttctcctataaatttgcatctaaggtatttttaaaaagtcaaaaacagtgcttaacatactaaccttacatacactgtagaccaaaataataaatcatcataatttacaccttgatctcttaaaaattaagcatgtctttggtgaatggtttatagatgcataaacctaaagcatataagacacaaatttatagtctaaaaaactgagttaactttgcctggccagaaatcaacttgtccttggcagtacatttattactttttgctactttagctagtttgccgtacaatctattctgtgaatcatttgatttcttaggtattttagcatttttatgttgaggtggttcatttctattatcacagagaatattttcaccatccaaatccacctgtttcctttttgagcttttatttcctgtctgactggttgattttcttgatactttttcatttttacttctgtccagatgaacatttccaaaactcgttccaattgttgatcttccaacagatggatttacaccctcagaaaggtcattttccatgtaaagaacacacaaaggctttgatgctaaattaacattattccaattatccttgcttatcatgtagtcatctttataagtacaagcaaattgggatctaattaaagtttgcttcatcttaatttttttctcttgcattgacacacagatgcgttctcttaggggttttatcaaattattcacctgtgtgggagacctaaaaagtgtaagaatagacgttccatgatgatggattgtgtcttc

SEQ ID NO: 340863 - DNA, 1000 bp, Homo Sapiens; identical to SEQ ID NO: 159680

SEQ ID NO: 340864 - DNA, 1000 bp, Homo Sapiens
ttttttttttttttttttgatactttctagttatttaatgatactaagaaatggtgctgtttcactggatttcattgatgagatttaagacgtatgaaagagaaagtctctttagacagggacatgaaaggtagccatcaataaaagttactaaaagtaaactcagaaagaaagaagtgataaaccatccaatcccctaatgaaccttagctcctggcagagagacagctcacaccttctggggtgcaggtgcccatccctgtgctcagaaaaaagcgttaagtaaggcaaaaagtgattcctcctattttaaatgagttggggtacagaggggagctgcctgtagtcttgaattctttttttccagtattaaagcctttctgcggtttgagatagacatgcggttgggctgggccatgcttgctgtgaatgtcaggtgttgagattagcaccacaccattccccgggtctgagtcttgcatgcgtctttgtccatcattgtctagaatgtgagaaaggtaagcatgggaacgccattttggggaagaaacaccagctatagaaagcaaagggatgcataggagataaaaagtctggggaaaaggatgtgaggtagcaagcgagttctcagctccccccagagaccagctgaaaagaagactgggtcagataccccctatctggcagatatatcacccctcaaaactggaacatgccccaggaaatgttcttggtggtttttttctccttgctcattttagcccaaactctaacaatgttgaaaatatctcgaaatttctttttttcttttctttttacctagaggttataggaggggatgaacagagatgacagacaagacaaaaaaggttatgagagaattcctcattatacatgggtagagttcaccccagaaaccaaagaacttttcataattacaagggagggacagcacagggcacaagatctttgaggtgttagaagacaggctgacagacca

SEQ ID NO: 340865 - DNA, 1000 bp, Homo Sapiens; identical to SEQ ID NO: 159681

SEQ ID NO: 340866 - DNA, 1000 bp, Homo Sapiens
actggatgagtcttccgttttattacaaaaatgaagatcagtttgatcaaaatgaaagcttgttcacaagttttacatgaatattctaaatacaaagtctcctgaaacaacatacttttgatatgattttcatttttaaagggatgcaaacattccattttctcatttataatctattccaaggcaaagtattttaataatgtatcctttctgcagttagatcacaattcacaagtataactgaaacagacaaaaccttgtcagcaaaggttaaaagtccttttttctttaaaaaaaaaaaaaaaaaaggaggtaaataaccagcccttatgtgttttcagaattttgtactacactgacatgatttgcagtcaggtttttcttcctaccccttaaggctacaaaattctgttgcaaatgcattgcaaaagaattctagaccacttaatgcaaaaatcaaaaaatagtttttcaataaaaagtaaattttataaatggtaggaaacagtatctgtggtaagctactaattgacattttccccctattactaaacaaatcatgttacacagaaacaaggaagacaggttatcaaatacaacaagcttatactgtttacatccctcattaaaaaaaataataatttcatacttttcacacactgcatttgaaatttacatttttcccatcaggttggagggggaggataatattgtccataattccaaggattctgataattgtattgataccacgcactataattatatacagcttggtttgcctgtaaatcaccatcaatcatctgtgtagatgatgaagttgtatcttctgtatgtgctttcttttcctctggttcttctgatccattttctgctttcctttttaaagaatcctgttctttcaggagtgtttgatgttcatcataagcattcagaagcttattaacatcggaaccaaaatcttcaagaaattccacttttctctgagaaaatgtaattc

SEQ ID NO: 340867 - DNA, 1000 bp, Homo Sapiens
gagacggtctcactctgtcacccaagctggagttgcagtggcgtgatctccactcactgtagcctctgcctcagttcaagcgattctcctgcctcagcctgagtagctgggactacagtggtgcgcctggctaatttttgtatttttagtaaagacagggtctcaccgtgttggccaggctggtctcgaactcctggcctcaagtgatccacccaccttgctcagcctcccaaagtgctgggattacaggcctgagccaccgtgcccggccatgttgcttttataattgagatatttcatttgttttgggggttaggcaaatttaatttgccattcctcaaactcagtaacttcaaatataaacaatgcctagaatgaatatggttcctcattatttctatcaaactactacaaatactgaagaatcccaaagtagttttccacagaggcagaaaagcagttcaggggttgaaaatcttcaatattaataagccctgggacattcaaatggcacttcatatttcaaggtaatgcaatatgaatcataattcattatatattgtccccaagagttacttcaattccgtattcaccagttcttacgatttggaaaaaaaacttgaatgtttccagatgaaatctaatccccaagccttgtgtgtcaacattctagtgaatctctatttaaatgagaggcgctccaaaacacttcctgcaccactcgacactggcacttggtggagcatcaattttctgcaacctttcaagaatctctgaagacagactattgtatgcaattccatattcattgtcaaatgcctcaatatcaatattctctcttcctagagacactaatgataagaagaggatttctctgtataaactcctttgtcttttcatgcctggcttcatttgctgtgaaagtaggttgatgggtttaagaacattattgtgctgaatactctgcctgatggtttctactaaagtgcttgtttcttgt

SEQ ID NO: 340868 - DNA, 1000 bp, Homo Sapiens
ttttttttttttttttaacatcagttaaagattttatttgattcattaaagaggaaactggtgaggcatttccaccagctcaaggaagaattttgtaaatgttatatttatggatcagaaataactgaaatgaatgtgcaaatggaggcaaaactggcctcttccacagtggggaagaaagtcaacagaacctccactaggcataatttacatatgtacagactcaatcagcttttaatatagaaagatatttgaacccaaaatctttcattaaggtaaaaaatacaataataatttttaatgaaatcctggaaaattcatacaaataaaattaaaagcctccaatggggtataatccagcaatatcctaggcaaatgcctcctgaagaacaacagcttttttaaaacatcactgtttatcattcaaaattcagacgtctcctatctttggctatttttatctcttcaaactttactcctaaaattgcactaggaaagcgttccttattggaatcataatgggagcaaagctgaaaatgtttctttagaaacatctaaggaaattacttagacccagatacttataagtgactataacaagcctttatcctgttttacatcagttttaacgggaataaaaagtaaaaacacatttattagtgtttcacatagctgccatgatggcaacgtgactgtgacttgcataaataatacactcaaggacattccacactccttggtggttccagcaatgcgatttactaaataaaaaagtgactattcccatgaaagaaagcatcaaaaactagttttgagaaagaagatgaaaggctcaatctctaactcctggatgccaggaagcagagtttttcagaatcaaaaacaaattaagagctcacagccccacccctcaggggtcacataagttggtactgttgcttgtaactaattcatgattttagccttttctttactcaaaattaaaactaaggacataaca

SEQ ID NO: 340869 - DNA, 1000 bp, Homo Sapiens
gattatttatttatttatttatttatttatttatttattttgagagacagagtcttgctctgtcgccaggctggagtgcagtggcgcaatctcagctcactgcaacctctgcctcctgggttcaggtgattctcctgcctcagcttcccatgtagctgggactactacaggtgtgcgccaccacacctagctaatttttgtattttttttagtagagactgggtttcactatatgttggccaggctggtctagaactcctgacctcaggtgatccgcccaccttggcttcccaaagtgctgggattacagggggtgagccaccatgcgcggccattcctgggagtatttaataagtcatttttgcagctttgctatcatagcagggcctttctgtcagagatggcacatattctgtcaatctggagcttccatttttcattaaaatgagttccacttcctgaaagtcccgcagtcttcgaatgtctttgtcctttctgagcagtgtgtttggtagctttctgatcttctccactcgttctggtttaatccccagttcacagcaactcacgtttagtaggttttggtaactcagttcttgtctcttcagttcaatttcaatgaagtcattttctttggggttctgaattctgactttaaacacaagctctaaatcacccataaattcaaatacagtttgtaaaggaaacaaaatacctgtcagagattttcatatctattattacagcataaataatcctaaaaactgaatgttaagtagacatggagctttcatgggcacatacacactttgcattagctgagggttcttttcttggagtgttgggcaagctctgggatgtatgcccccattatatccactgaagacagaaagcttgcagctttaagccagccaaggatttaaaatatgcaatggatatttaaacacatcacccttgggcaatacatagcaggtgctcataccttgttgcttatctggaa

SEQ ID NO: 340870 - DNA, 1000 bp, Homo Sapiens
agtagagatggggcttcaccatgttggccatgctgatctcgaactcctgacttcaggtgattcacccaccttggcctcccaaagtgctgggattacaggcatgcgccaccgcgcccagccgagaattgttttttttctttttaaacgtggcacagtgtgtgtagtgtatgtgactactatcatttgtgtaagagaaagaaaagtttactatcagagactgtatctggagggataaacagactggcaagggttgcctctgggcaagaaactggggaatagagagcgggagtagaaagactgtattagctgggtgtggcagcacacactgtaggcccagctactccagaggctgaggggaagacttgctcaagcccaggagttcaggtccagcctgggcaacacagcaagactaaaaaaaaacaactttcttttccaagaataccctttttgtaacttttgaattccgtattttttaatggtctatggtctacaaacactcatgtgcaaacacatacacgcagaatagggatcacctgcacgaagctatgaactatttcctcatcccttctagccccttcctagaggcgaaccctccgcccccacccccaggcactatctgtcctgcttgcacccacctccacccagggctggccaacaatagcctgtttcctctccattccacccctctcccccaccctcccatcccaccacagaagaggattactggttcctgctttccttagcgcccctaaatttaaaggtatctgttctatgttgcatgcttcagaaccctgtagaaacaaccagcaaatccactgttgatacgcaattacccctcttggatgcatctgcaacaagcactccccagcttcgaaggggcagcaaagaagttcacaattacaagaccatggggtcacgaccacagaagcgatatgaaacaggtcccgggacacagggaggggcagaaagaattctttgagtaagcctggaaggtggaggg

SEQ ID NO: 340871 - DNA, 1000 bp, Homo Sapiens
ttttttttttttttttttttttttttttttttggaggaactgatgaattcattttaatcacagaaatttgcctgggcttgagcaaactgtggggactcaatagatttggaggcctcctctcccttctgagaggcctgcctgcttcctgccctgatgaatccctaatttcagtacaaactgaggaacttgaaaaacatctgtgcactgggaccgcccctcacaggagggctgaaagcagcacagctgagtcagcggcacattcagcaggcgttcagtgaggaagcaggagacagaggcggcgctcacaggacccgctccaggcttgtcacagccacacatcacagcactttgggttttgccacaacagagcagctctgagctcaatccttgcacctcagaagtgcatttatgattaaaatcatgctcgacatgaagccctgttatgatgtgcagtttaaaaagagaaacgggtccaaatcagcaccaacagagccccccagggggctccaagactcgccccagagacagcagaaggaccccatgtgcgcgctgatctgtaagaagggtggtggatgcagcagcagggggctgcgtccaaaggcagcaggtgggggcctctcatagtgtgaccctgggcaggccactcccctaccccggtaccctcacctgaaaaatgggacagcaacacaatgagacaacagagactgtctagaatataaagaaaagaatgaaaaggtccatcccaagggcagcctggtggggacggggacaggcagtggggggaggctgcctctggaagacctgtcccagcagaatcagcccccacctctgcactgccttccaacctttgaaccaccaggcagtagacacattcccctgggaaacagaatttgcaaggcaggtggaaagagcagcactcacactggctgtgactgctgaaaaatgctcattggcccttctcgaggactgaaaggagattcggaatcacatttaaaattaa

SEQ ID NO: 340872 - DNA, 1000 bp, Homo Sapiens
atgaaactcctcagctttattaatgcaaacatatttttattaaagaatgaatgcatttatgctaaagaatagcttacatatgttgtaaagcaacaagcatatcttcaagaagtgagtcctcctcaatatgactccatgcttattctacatgcctgaaaactgggcccacacacaggggcacacgtacacgcacacaaacgcagatacggacacacagatatgcagaccgaaatgctgacaccatcgctctctagattggattagctctcatttaaggcttcttaggtgccgcagtgcccctaatattaccaggattgaaaacagacttttaggaaggagcagcattacttcgaaaagtagtcatctgctcttgtcctccaatgtgtgtattttaacaaatacaatttcattctatgttgactctgtgtttataatatttaaagaaccatgaaattaagaaatctcaggattgttttagtgagaacttcccattcaaaataaaaaaaaagggcaattctgaccctaagatatcatcaattttatgataacgcaataagatttccctttaggttaagatgacatgggtctctagacaagccaagtttatctaactcattctgtatctaagtgcaatgctgagtgatgggggcaaggtttcctcggtgatagcaaatcagatttgaagcttgccatcaaggatgcatcagacaggaccattaattaaataagttaccataaatctcagctggataaaaggagagttgacatagagtgtgttcacttgctgatcacttattcctctttgccaaggcttctgttgttggggttgttgttttaaactcctggtttgtttgactgtttattttatttgcttgattgttttcttccttttggtgtcctgcaacatatgctgagatttcatccctctaaggatgttagaaggggaaagagggtggacagggcagcaggagggaaagggaaggggtcattagtaattgca

SEQ ID NO: 340873 - DNA, 1000 bp, Homo Sapiens
ttttttttttttttttttttttttttgcaaatcaaatcataacattccctactccaccacagcagcaaggaagcagaagccttagttctacttattccttaactgtacctgctttatagattttgaagtaaaatattttggtacaagttaccaaccaattaaattagcttttgctttttcagtcaactttcggactcgtcctctactagaagttccaaaagttaaagaggtgtcttcgaacaacagctgcctttgctcctcttcagagtcatcctcattatagaaagctgtccttcgaccttgatttctagttctcatgtggggttcagagcctttgagttcttcaaactcttcttcctcatctataggatcatctatcttttttcggttacttctccttaacactttgacacttgcagggactaggagatctgcatctaatttttgtgtcttcatcttccttttgggcttcctacctccacgattctttttctgtaacaaatcttcctttacattattagtttcagaaagaaaattgcatgttgaagaaggaagtacttcatctctgatgggatgcacattattttgctctaaatcttctggctttgcatactgtagctttttgggctttctaccccttttcttgtgtataatttcaccactattggtattaacttctactttaggtttccttccaggtcccctcttcacaagttttgatggctgtcctccatggccatttacttgaatggttcctggtacaagagcgttgttcttacaatctccttgctcaatgacagctgatgactttgaaagagtggacgcctttgggagtacagatgacttcattttacgtttgactggcttttccttttccatgttttcttttgcagaattattcctagtgccatgactaaaactggattgaccaggactggaaagagtattcaaagctttggaatgtttcacagaattctctagtattgttttccctggtatt

SEQ ID NO: 340874 - DNA, 1000 bp, Homo Sapiens; identical to SEQ ID NO: 159684

SEQ ID NO: 340875 - DNA, 1000 bp, Homo Sapiens
ccattaaaaagttgtttatttaaaaataccttctcccaattctgattccatatcaaattaaatcaagaagtgatgttacagcaataactcatcaaagtcatgagtagggaggatggcaatgaccccattagctcattagtataatctagtaagtgaaatacaaattcaactcatttacttcttcacaaaaggcaaacataattgatatacttcatatcaaaaaactagtttataaagcttgtcttcatatttcagtttaaggttcaactgatataaaatgccttaaaagaacatccaagcaatgctttggattttctttctttgcaaaattcaaggaaaacatgattggttgaagtttcttcactgctggcgaattagttaagagctacctgagattccttcgcacttccactcttccactctttgagtttccagtgattaaaatatgccagagacataatttagagagcgctagaaatgccacacagatctcatcgcttaaaaaagagtttctggccaggcacggtggctcacgcctgtaatcattaaaaaatgactttcagaaacatatacattcaaagaaaaccttttagtattctaagcattgaatactttgggggaagaactggtttcttttttggattgtttaagaagtcagtcttttctcaacagtttcttgataagcaataaatcttcgcaaattcattttcacattgtcaagaacacacagctgatctgtgctatagttacctctcccttctttacgtatcttcattttaaagaccggctggaattctttcagagcagataataatttaatttgaatcgaggctctttcggcttctttaccatctgcaaaaacatcaaagagggcatccaaagcttctcctgctaccacaagggaaggatctttggtggtaacttcaagcagaaagcacccaatgttcttaagagtttcaagtgtaccatcttctttggcaaggacgctgccagtgattcc

SEQ ID NO: 340876 - DNA, 1000 bp, Homo Sapiens; identical to SEQ ID NO: 159685

SEQ ID NO: 340877 - DNA, 1000 bp, Homo Sapiens; identical to SEQ ID NO: 159686

SEQ ID NO: 340878 - DNA, 1000 bp, Homo Sapiens; identical to SEQ ID NO: 159687

SEQ ID NO: 340879 - DNA, 1000 bp, Homo Sapiens
tttttttttttttttttttaggtttaataattattttaattacaaatttccaccaattcttgccagtcatattattgtggatatcacaaatgaattatataatagtatattaccttatattcatctgcatgaaacttaggagaaaggagagcagaaatgtataagtttctgagaatgacaccataaagctcatatttacagtatggtagtctgtaaacatacaggcctgccagttaaagcccactcttctatcatcacccagctgcatgaccctgagcaagtcacttttgtttgctaatttttaatatcatctatcacctgacttctctatctacgagagttaactggctgcatgcaaaataccatgaaaaataccatgcacttttaagtgtgaagtagcactgtaaagtgacttatatattactggtctttctatttttagagtattaatattcatacatcagttaaaagtcaacatgtgtttgctaagtgatccttttgaaaggatccctttaaaagttcctaggcatcagcttcactgacaatctggtatgattctgaagccagcatttcaactcttggaaagatatacaatagtcacagcttgaattagtaactaataaaataaaatgccctcttattctccaaaatgtaataattcaggagtaatgacatcaagatttttctcctcaaactgaggagaaaaaagccccaccgtggcttgtttaaatgacttaaaatacaagtggtaactatggtgactagggaaccaatgtttaaaacatcaaaagattattacaaaaatccaatttcccatgaatttctaaaaattaaaattctgagatgttgtgtctgagaaactgcttcttcagcaaaatatttagcacagactacatcatcccaaatctatggtatggccaggtatttaggtccttcaaccaacgtttttagaaagggtcccgttgctctttacttgcaaaatgactatctctagggcctc

SEQ ID NO: 340880 - DNA, 1000 bp, Homo Sapiens
gagatggagtcttgctctgtcacccaggctggagtgcagtggcacaatcttggctcactgcaacctccgcctcccgggttcaagcaaatctcctgtctcagcctcccgagtagctgggactacaggtgtgcaccaccacgcctggctaatttttgtatttttagtagagacaaggtttcaccatgttggccaggctggtcttgaactcctgatctcaagtgatccaccctccttggcccccaaagtgctgggattacaggcatgagccaccacacccagctaacttcagtttttgatgagacagaaatgggaaaatgtagactggtttactactttatcttatgatacaatgttattgtagtataatatactatagactacccattaaagaaccaggaaggatattccgctagccttaagaagtaaatattgaatataaatataactttctacctcatctataacatattgatacattttattacaaagaaactcacacataaatgatttgtcctatttatcataataggccaccaatcactaggagccaagcttcatcagcttaagtcctaggtagcatgtctcaatgcatacatatttatatgttattaaccgtgtttcttttctttttttcgagacagagtgtccaggctggaggtgatctcggcttaccgcaacctccgcctccgggttcaagtgattctgccgcctcagccttcctgggtagctgggattacaggcacgcatcaccacgcccggctacttttgtatttttagtagagatagggtttctccgtgttggtcaggctggtctcgaactcccaacctcaggtgatccgcccgcctcagcctcccaaagtgctgggattacaggcatgagccaccatgcctggctattaaccttgtttctaacttcagcattgcacatctccttagtaaagcagtagccattaacaagtcaggtccaacaaccattttcctctggtcctcaagcagagac

SEQ ID NO: 340881 - DNA, 1000 bp, Homo Sapiens
cactgtaaaagagaaactttaatgtatgctaaaaattttttttaggaggtaacatcctggtgtttctcagatgcaggtaaatcatgaccttccacattctctttcaacacagggagcacctgagatcctacagacaggaaacatggggaggataaatccaatgatgcatgcatcaggtacatgccaaagttcacctttgtttcacgactctcagaaagtttttggaaaacatgctggtttcgttgcccagtttgctggtcgatgcaaatcatctggcatctgtgacaaggccccaaaacctggaaacgcaaagagccaattgaaatctcatcccatttctcttcttcaaaagccctttttccattgataataatattggcacgaaaacgcaagctgagatccttcagtgagaataattcctcctttccattctcatcactggtgtttagttgccggtgaagttccaaaatactggatgtgttgatcagcagatactgtgcctcattcaccagagaaagggtggccattgtaccaggaagttgatcttttccatgtttcttctttgcattcctttgagagtttgaactttgtttgatcaaattacaaggacggccaaaaaatgttgacaaccagcttgaaattttttctccacaatcataagtacttactctgtcagcacagaccctgctttggcgaatctgagtccgttcactattttcctcaagaggcacctctataggctccatccctttggctttgatgaccatgatcctttgccgcaagtcgatgaagggctggatcaggcagagccggggttcctgcttctgactcaggcaaacaccattgtgattcacaaccatccagctccggtcatatagcagcccttggtttcctacaggccacctggtcacctcaaatgcagcacaggatttgattggatagagataaaggttagtgacaacatgtggcccaagggccccctccaggactcctgcagctt

SEQ ID NO: 340882 - DNA, 1000 bp, Homo Sapiens
ttttttttttttttttttaaaactcaatgttgacttgtaatttatcagtttaaacaaaaatgacaaaatggaaggtgtatttgacataatcagaaataaaatttcaaatagcctataattcacacaaagcctaggctggaaaatacaagtgctttgactcatttattaaaaaaggcttcatgtaaaccttgcatgagaagatgtccattagttactcaggatagagggcaaagagattatatacaaaaagtattttcaaggactatcttgttcttcctttataagaagttgaatttaatttttgaagtaattacttaggaagaaatgcagaggagttccacagaaaaagatggcaaccagaatgatattccgtcagccagatttttaaaattccttcactctgaaatttcttctttgtcagctaaaactgttttctgggtcagtttccttaggtgagccttgttcacattcagtatcaaaaccagctgacatttattattttggtttcattttcctttttgcgtctttatgtttctttcgacaatccatacgcaggttggttgttctggcctcccaagagttcctgctcatattacttcctactcctctccagaataagtcagaaccttgaagtcgttcatcattcttagagaaaaagaaaaatctagtggtctctttctcaagtaatgatgcttctccaggactggagtttctgtgatctgtttcttcagtaacatcttcctcttctgaactgctgtcttgtaaacgagggtcttcctgccagacaatctttccaggtttcactgtttcaactctgtaggtctcttcctttatgtctttagtgtctgaatcaaaaaaagagaacgtgaacccgctgggctgctcagcgtcactggtcagagctgcagggtcctggatttcctcaggtttctctttaccacagtcctcattccagggtgtgccctcttccttttcactggtatattttgtagtttggaat

SEQ ID NO: 340883 - DNA, 1000 bp, Homo Sapiens
cagaagcaaggacatgtttattcagatccatggtcgttacaagcttcatttttggtcacaggccctaaaatgccattattctcagtttacatcaaaataaaaagcccaacatttacaatttcaaaaacattaaagcaaacccccaaaaccccacaccgaaaacaaaggcttggtttggaaatcaccactgagatgctgttctccctcgcgtgtcgcctgtggggtgaatgaaggtgaagaccccgtgctggtttctgtcagagaatctgtagttgtatattttgaatacttaagtaccactgaacggttgccatgtctttgagcacttgatgttactgaagtgacaatgcttctgaccatctttggctgcagagcagaaactggcagaatccgaccccatcgacccagcagtgtccccaacgcctgaggaccagcacccatctgtgacaaggcacaggggtccgcgatgttggccactgctttgggtgatgtgctcaatggcttggggtctgcggtgaagcccctgggctctgggagggtcttaggctcctgaaacatggaattctacggcccagtcttggaacagctgggagaacatgaagaacgcccctcacagtgaagaatcaggacagccactctctggttttctcacaactctagaaactttgattctttcctggagtggagacttaagccactgtcctggtcccacacagagagaggaagcgccacaacccactctgccaacctcaaggccagccagtggggaggccaggcccaggtggctgttggcaggctggctcccaagcttggtgcagcagagtagccaaatgggcactggaaaaaaggccccgagagctggcttggccgtgagtccttggcggagggagggaaaggccggcgctgagctctgcgctgtcacagagcgtagctgttgagccctggcagctactcctttgctggggcccacctgccttcctttcttggttgcgtttcctcc

SEQ ID NO: 340884 - DNA, 1000 bp, Homo Sapiens
tttttttttcccagtcaagtggtttattttaacctgtaaaacaaaataatgaagactacaagcttctgaatcttagtagttcctttaccagccaacacacccacccccttgattgcttattaggaacaaagatgataccgaaaaggggaccctgcttggccaggcctgtattttccttcctcgtgcttaaaaatcttcctgagatgtaactcagtaacatgtgcaaaaagcagcggagcctcttcttggattctcagtgctacttcaaggagatgatggagtcccaagggccagggttatccgggaggtggatatagccctgagccattagggcaggtaggcttctcttcaccctttcatttaaactgcaagtgaaaagtcacacgactgccatttccacagcaaaaatcataaaaagccaaatcatcacttctgtcttggtttcatcctcaatctgttttactctgaaattactttattgcctccctcctcactgatgtaggacagtgttcaacatcttaaaactcacacatcctgatttaacattttcatgtttaatatttcaaaataatgtaacaaactaaaacctaattttagactgtctttaaggcacaccaccttcatattcctttgtatttaaatcccctgttctcttaacaggttctggataaaagcagtctccaagtcccaaatgagtggtgccaccagttttaaaagtaacttgcttggctcagtgcagaacagatcatttgatttaacacagaagggaaataaaaaggcgtattaaatttcaggcagattcgcttcatcaggtccagtggtcactacacccctgttgtactataggtctatgcttccctggtttccttcccattgatgtatccagaggttggcagggagcttgaggaagcaaaggatgggggcagggaggagggtcacctgcccactgcaactcttacccatgtgaggagtaggtttcactagtctattattagttttg

SEQ ID NO: 340885 - DNA, 1000 bp, Homo Sapiens
tttttttttttttttttttttttttagatgtaacaatctttttactctcttacagtcatattgcagtttcacagtggtataaactccaataaaattaagaattttttttcagtacatgagatcaaactgtatacagagctgccataacgtataagttaagccatgtatatacattaatacatacatatatgttccaataacatgttgaagatttcccaggtttttttttctttaagttattgctagacatatcaaaacacagtataaaactggtcatcacaacacccttctgcagtaatgatgagagtgggctaggaatgtgatgaaaggcacagaattcataagacttgagtaagtagatccaaatttgttatcactaatggctcaaacaatgtggagccactgattttctgaagtgaatataagaaacagtagttaatagtatttatccaggcttctagtataagacattgtactaggagtttctcaagtagaaaacttgtctcacaagggtaagttacataaaaactccaaagaagaaagggcaactgatagaagattagttctcctgtggctagacggtgcgttgtacagcctttccgtttagtgaggttctactaaagggaatgccaactttgtggttgacatgggtgatccttgggtttcgtcacgcatgaaattaacaaataaaaaatgttcaaggccaggtgtggtggctgatgcctgtaatcccaatgctttggagtctgaggtggaaggattgcttgaggccacaaatttgagaccagcctgggcgaaagagcgcaaccctgtctctaccaaaaaaaaaaaacaacaaaaaacttagctgagtgtggtggtaccagcctgttgggaggctgcagtgagaggaccattcgagcccaggaatttgaggaagctatgctcataccacttgcactccaagaccccatctcaaaaaaagaaagaaaaaagaaaaaaaaagttttcagtttatgga

SEQ ID NO: 340886 - DNA, 1000 bp, Homo Sapiens; identical to SEQ ID NO: 159689

SEQ ID NO: 340887 - DNA, 1000 bp, Homo Sapiens
tttttttttttttttttgaacaaggagcccctacatttttattttgtattgagccccacagattatgtagccgggatcctgaacggaattaacaatattttctacctcagagagtcgttgcaagcattaaataaactgatctgcttagcacgtaagcagtacccaataaataggaacaaaggcctattgtctcttgctgttagcccaaccccagtgcccatgtgtgataaatgaatgaaatgaccgaattgagtgacagcctggcagcatctggaagcgaaggtgcctgggtgacgggggatggaggtgagggttgagaagagctgtaaaggaagcggggcagttttgcaccccacgttgtgcagctgcagtttcctaaacagccggtgatccacgctgtggtcgagacccggccgccacaccccgcaaaaagtccacttggtgagagctgagaacgtgggttccagtctttattatgcgggcgttcagtttctagctcccgggccgtggtccgcgtccagcttccagagccgccgcgggataccagccgccactggcacggcgttccactagcaccggcgccccgcccagccccgggtccggaggcggggccgcggagcgtccggcgcaggcgcaggccggtatgggacggggcggggctcagaggaaggggttggtgccggtctgcgggggcgggggccgcggcccggctgagctcggcgtgggcagcagcggctgcggtgcgaaggctccggcctgcgggaagacgctaaccgaggcggggagggtcaagccagctggcacgctgctgagcgggaggggcagagaggcgctgtaggtcatggagcccaggggcgcccccacaggcccgcctgccaggcccagcgccggcgagccggtgcgcatctggtttagcgtcggcctgcccgtctcgcccgcgccgaacgggttggtgggggacggagcgctgagacctgtcaggaaggggttccgggtcttt

SEQ ID NO: 340888 - DNA, 1000 bp, Homo Sapiens
tttttttttttttttttgagacagagtctcactctgtcacccaggctgaagtgcagtggcactatcttggctcactgcaagctccgcctcctgggttcacactattctcctgcctcagcctcccgagtagctgggaccacaggcgcctgccaccacgcccagctaattttttgtatttttagtagagatggggtttcaccgtgttagccaggatggtctcgatctcctgacctcgtgatccgcccgcctcggtctctcaaagtgctgggattacaggcgtgagccaccgcgcccagccagcttctccaagttttaaaggattaaagccctcaaactctcaggcttaaatcaattcctaatgtgggatatgttctccaagtatgcctaccaaagccatacaagaataaagtgagcagcagcagcagctagggtcaggcagatttctgaagcatgattgttcaaaggcgggctgtgccccatcatcctgagccatcggccttgccaggggcctgtggagccccagagggcaggacgggggctctcacaccatagcctcgggaagtacctgggagcttaccaacccacaactcctaaagtaacatgcaaccagttctggtctgtggtttgaaaaagttaaacgcaaagaagctgtagcttttcttgccacaatcactcaataggcatacaacactatattactggcataacatgaaaataaattaacccttaagcactacacctaactctaaaaagaaaatgcctttcaaaacaggtatgctcaaataaggtattctgagagttgcacaagaacagtcttggaatgagccagtgcccccggagagtcaacatttgaacaaaatagcacagttcaaacccttctctgtggtacttatgtggattagtacaattatgacatcactactttcaaaggaatgattaaaactattattaaaaacttttgtcacaaacagaaatgccctgcaaatcatattattgcaca

SEQ ID NO: 340889 - DNA, 1000 bp, Homo Sapiens; identical to SEQ ID NO: 159690

SEQ ID NO: 340890 - DNA, 1000 bp, Homo Sapiens
tttttttttttttttttttatgtgactcatcaaagtttattatggcaattaattacacaaacatacaggcggtcggtcatccagctcagaagcactcaaaccagtagagtccattagtgatttctctttataaataacttaggagaagcaagcacatttggtaaagaaccggcagcgctgacctagcgtcacgcggatggcacataggccggggaggggcaggcaccagaaggtcaaggtccctccttggccccagcagccccgggcccaccagatgctgcgtcctcaggtagtggacatttcaaggcacgtacaacttcctaagcaatagcagctccaggctcttccctgagacctggtttacctctggaacaaccaagttaacactcatcacaccccctttgtctattgtattcattcttattactgaacatgccccaaaccccacagtgcagggggctgcatattaaacagagacataatccccaccctttacattctgaagacagggaggtgtgaaaaaattgcccctaatgtagtgatggtgttttttaaaaagcaccatttgggaagtaaagttagggcctcttttgatgcctgtcttaggatggacactgggggtgggaggattacatcaacagagtgagaaggggaggggaagggagggggctgcttgtgaatgagattcaaggcactaaaggagtggatggatgcgtgggcctcgggcaaagtcgccctaaagtggggaccccagaggagagaagggagggtggctggggaggtgacctggccctccaatcctaaacaagccccaatgtgaccacaatctccagggctagagctgcccgcttccctctggccagagggcccaaggcagccccctgggttctccaaccactgcaagcaaggtctggggacaaccttgacaacccccagccttcttgctgggctggcgctgctgccactcaaataggacataggacaagcttgtctgacatca

SEQ ID NO: 340891 - DNA, 1000 bp, Homo Sapiens; identical to SEQ ID NO: 159691

SEQ ID NO: 340892 - DNA, 1000 bp, Homo Sapiens
ttttttttttttttttcacgcctcaatcatcatcggtttaatgaccacgtggcatgactctctggctatgtacatatatacacatattcacatatataatatgtaaataacttttgtgtcatttacacacccaaaaagtgtgcaagatgtgagaggctggcagcccacattattactatcgagaaagaacatttcaaaagccgagttctcctaacacacacgttctctgctcgcgcctcctagctccgcagggtgggcaacttggcctcgcaggcacagcccgttttcccgctgctctctaatcctccagcagcagctccagctcctccagcggcaggcgcacccggagctccttctcagtcatcaggtccaggatctcctgcatctcatcggggaaatactccacggcgtccaggtacaacacctttgcccaagggcaattctgaagtgctttgtagaatacacctttgcttctttctttatttcctaaggaaaccagaaagttcaaatacatcctccacagcaaggggcactggctgccactgtcgctgcgcatggcattttcaaacagggcttggatccgatgcattaagccggtctcaggaattgtggcgtggatctctctaccgtctaacctctggacagtttccaccagtctcttcctcagtttctcagcttcaattgcaaacaaccaaggctccaagggtttggcagacctggtgattgtgtcaaaaaatctcctggttttgctggcactgtgggacttattctgaatctgtacataggacctccaaagaacctggttgcctggatacaactttaaagcctgtgagagtgcctctcgcagaggggccagcgggtaaacactcactttcatgtggaatctcagcaggctcgtgtgcatcagtgtgatggcttcgagaacactggtccaactctgggagctggcactgtccccctcgccagagccttctgggaaaacagaactgttcagttttgc

SEQ ID NO: 340893 - DNA, 1000 bp, Homo Sapiens
ttttataaaggcatgtcaaaaagacattttacttccccaaagcatggccccaagaagccattattataatagagtatgaatttctgctgcaggttattagcctataatactaacaataaagtcctgcttaggacataaaggcttacactgggacatgaagtagtaagacacaatccactgactattttaaatttgctgtacacctaaaccatcttctccattataccaatctgtgtgtgtgtgtgtgtgtgtgtgtgtatacacacgtcctctttcagtagaacataaactctgaagatgaggtaaaatacaatacagctgctgctgctgatgagctgtctgagtttctgcagacaatctgcaaaaaaatggaagttctcaaggcccagttgctggtgtctcttttgaggccccaaaacttggttgatttatcttattggcactctgcatgaatcaagagtaggctcaaaggcaagccttatctcctgcgaacacaattccatacaggtctcaactcaatatttaaatttgtttggaactggctacaaatttggaacttcctcaaatgatattaaaagctctacacaaaaggtatgcagaagcagttactggtttttcaagaacaaagacaactgcaaaaaagcaacagttctgtaaatggagctgtagtaaatgttgagacagcaataacaaggtaacaaatagagcagaggatgacctttttgtaaaaaattgctgcctcaatatttcactatttaaaaaaaagattcccacaacatgatcttctgagagaaagaatccactgctgtgtttgaaagaggagttggttctggtggtgaaaggactgggaatgtcgattaagatatgcaagactatctaacacaaagtccaacatttgcttcagcaacacccagtcagctcctggagggtgaagtcctgctctctagctgtatccagggctcttttcttgtggcattttaaaaaatgtagcagtagttgc

SEQ ID NO: 340894 - DNA, 1000 bp, Homo Sapiens
tttttttttttttttttttttgaaaagtatataacagatttctttattattatttacaatcaagttctgttggccaacataatgaaataaataaaagatgtgccctggcctgtgaatttcaactctccttgacttaagttctctgaagggcaaattggaaagcggtgatcaggcagggaagagagggcaggtggaggccaggaccatcggtgggaaggccacctgactcctctctcaccagctctaacactcacatccccaaatgtccagagaacaagcatggaagaaaaaaaataaagtgcaaatttaaaagtgataaaaagggtgtttcgcacacccaatgaactaaaactttatacgtaggtaaaatagtaaagataaatgtttttccttggccttcatcacaacccctgaaacggaaagatggcgctgctgtgcttctgagcctaggcttcttgcactaaagcaccaagggcatcgcacacaggcttggcagaggggccatggccagaatcaccaccttcagacaagtatgttggaggtctcgaatcccttggcacccccaagcatgcagtgtgcacccaccttctgggtgtctgcagatcgatacaggaacacatccttacctctgcagcgaacccatttccctggaaaagattttcacacatcctctcccacctcaaaaaaacaaaaaaacaaaaaaccattttttaaagccacacggagatttttaaatatgtcgaattttgtgggggaaagagagccagaaagctctgaagaacagtgaaagagatgtgaggacatttcagcagtaatgagacacattcatgcaacccaccagggaggggtctgtagttcgggagtttccgttaatccaatgcttaaagtgagttcaccgggcaaatgaacccaaggtgttgggacatgcgttaggccagaaccgactttggaaggacgagagaaagcacagagaacaccaccttgatgtgggggctgattt

SEQ ID NO: 340895 - DNA, 1000 bp, Homo Sapiens
aagtggccactattttattaataatgcacataacatatgcttatcattaactcttaaaaagattattatttaactatacaagaactaccatacaacatttcaacatacaagttcctatacttcttaagatacacaataatattttgaaagattggaaatgtttcccaaggactttcctatcacaaatcccccccagtaaaaattataggaactgtggaatatggctgctaatattctgagatgaatttagaaagtataagtattgagagatggactttattatagcacctgtagaagaaccaaattcaggcatttatcccatattttctgaaatatttacaaagctcttataacattttcaaataacatttaatttactaagttctatttcatggcaaataagaatcagaaaatttgaggatgctattttttaagttttcccaatacagctaaagcttttgggataaagctgtatttactaaaatgatcctgttctcatttgtggtgctcgttctctttgtcatttcagagcccttgctaagtcacatgcaaatggttacggagatcgtggtacccactgtctgctccctctgtgtcctcatcactgctgttctactaatgctcctcctgaggaggcagagctgagacaggattatcaattttggagcttcataagagaatcttcaggatcttcctcccttttctgctttgagggtttccatacattgctgttttcaggttctacaataattacctttttttctctttctctttttggcttgtgcttatagaggacttcatcagcacacttcacttgaaatgcacctggctgcaggtaaccatgttagtaaagaatatcctttcttccaggctaccgtttagtgttaattccgaaaaatcaggtttgtgaaaattcagatggtctatgggtgagctgtcactcagttgccaaactgtcttaatcttcttttgacctctatatatttccactctccatttc

SEQ ID NO: 340896 - DNA, 1000 bp, Homo Sapiens
cttgttacatgtatctccttgtactctgccttttctttttttgttgttttgttttgttttgtttctgagatagtctcgctctgtcacccaggctggagtgcagtggcgcgatctcagctcaccacaacctccacctcctgggttcaagcaagtctcgtgcctcagcctcctgagtagctgggattacaggcgtgcactaccatgcccggctaatttttttatttttagtagagacagggtttcgccttgttggccaggctggtcttgaactcctgacctcaagtgatccacctgcctcagccccccaaagtgctgggattacaggtgtgaggcaccataacctacctaagttctttttagaataaggtaaggggtagagggtggaagagtggatggatggatggacgggcagatgggcggatggacagatgggtggatggaggaatggatggacagacagacaaagggactgaagctgtaaccagcctctccactccacctacccgtgactgatgctcagagcaaatgccaaccagcgtacgcagagccgccagcatgaggtcagtctctcccatgtccagtaaacgttgcaagagctgaaccccattactccggaagatcttctccgctccagcatcctccctggccagcaccaccaggttctgagaagccttttgctttttctcagtgcccttctcttctgggtccaacagtatctgaaacatctgttccactttggcatccgtcgaggacatgtatcgcaccttctcctgaatctggcccccgatgttccgcaaggcctcctggaaaactttgttcttgggctccaagctcacacatctctgcaggtcaaggacagcctggtccaggcggcccagcttctctagggcttggctccgccggtagagtgctttgacatccccaccatccttttcaatggctgagcacaaacaggagcgctgtcagcacccatgaggccactgtctccaggcaagagcag

SEQ ID NO: 340897 - DNA, 1000 bp, Homo Sapiens; identical to SEQ ID NO: 159692

SEQ ID NO: 340898 - DNA, 1000 bp, Homo Sapiens; identical to SEQ ID NO: 159693

SEQ ID NO: 340899 - DNA, 1000 bp, Homo Sapiens
ttttttttttttttttgcattgccatgattttattattagtgtccaaaatgggactcccaagtaataaatgatttattccagccacagccaaaaaagactttgcctggctaaaagagtctctctctaagtatgtaatatacaagaaatacaattcaaagagatgttcctataagtacattttttacacggcatatatttaaaaaggaggccccttttaatataaaattccggttatataccaatatggttaattagcatttacactatagtttgaacgtattttaaatagcatgatgtgtatacaatgtctcccgcgcccattggcaaccagggtcgtgggaagcttggtgaggagttaaccaggtcctgtggtttaagcagtggagcacccgggattcctgcccccctttctgctcacacaattgcactccattcttccgccttccttgttttctccaaaaccacctgataggggggatgtcctgatttctgaggtgtgcttctcatcatgactgcttcgttttgcccttctgatttccacggcacaagattataggaggaaactcattctcatcatcaagacacactggtcccgtcgcaaactcatgttcaggaataacttctcctcgcagcgccccgccgtcctcagaataacctggcaccgtggaggctgaagatgcacttggtctggctacggtcgctgcataagactgaggtaaggaaggtctgaggtcattttctttattctcttctgttgttcctgagccaagcaagctgtgggttttgattaagacacactctcctccatcctgaggatccaaattgtacatataaaggtgtccactggatgacgcaactagcagccgtggcaacttctggatcgttgagagggtacagatgttcctctgtccggagaagttcaagcgtgcagtggcaaaagccctgtcctgatgcatcatgtctgacacctgggtagggaggtagttggtagcagccata

SEQ ID NO: 340900 - DNA, 1000 bp, Homo Sapiens
ttttttttttttttttttttttttttttttttttttttttttttagtccagtgggtacaaggccctttattaaagcataccctgattcttagaagagccatgggaagtgtgcttggcttatactcaggcagtaggccagctgcagtgtttgctttgcaggggctcaagaatcttccctctgccactgcctacggtctgttcctggaagtcatcccaataaaacaagtatgatgtttatctcagttcaaaattccaatttcagtgagtgtccgttcctgggcacaaaagactgagtacagggtttggtttaaaggggattagacatcagtgactcaacacagacaacaaaaagtgttcatttctttaaggatgcttcaattgtctcagtgagtgagctcttcatgattctccttaagctttcattaatttccccttaaaaatatctctgttcatgcagtgagtatttcttcagagggtagcttggtctttcaatgatataatttacttcagaggtagaatcttccttgttttggtgcagctgtgctctgtgggatgtcagaagactgcataccctctcatggatattcttccatgtggactgagaaccaggatggaacctttctctgagaaggggctgatccaaggggccaggagaggtggaatgctggtaggtggcaaatgaagctttcccgtggaaatcagcatccccttgtttactggatgaagactttccaaactgacttgaatctaaacatgatgatgagtcactccttaaaacaatccgttcatctggctctttgataacctttacgttagctgcaaggctgtcaagagaagaagctcttctcgttggaaacggaaagtctgaaaacttagattttcttctagacctcctcaaatgatgctctgaaatattctcaccaaagggctttgcactgtccacgtgtctaacaacaaatggaggcttgcttcctccagagattttgaaattatttccaag

SEQ ID NO: 340901 - DNA, 1000 bp, Homo Sapiens
ttttttttttttttttggttttaaataaaaacactttattgcacaaatcccacaaaggtctcaggccctgggtccaagcccacagccccaacctgtcccctggctctgggcctggtctttggtgcccaccctggcctcacatgccaacgtcttctgtggagtgtgcaggtgtccatgagcgttcctgtgttgggggaagcctgcctgggccacaagtagtcaggcactgtggcagcctcacgatgaagacaggtggggtggagttgggtccccacctgcccaggctcaggggccacaggggtctacacagtcctttctgctttgaaacacgtggtagatgctggtgggagggaacatggcaccggcaccaagcagggagcccacttggatggccacaccagctgccagcaatgccggccgacccccaccatgcagcagggagcttgcagccaccttcacatatgagaacacacacagacacagcacccacgacagcaccacaaggaccacccctgcagtggtgcccaccaggggtgggcaggggctcaggattgccagtgccatcaggtaggccccaaagagcatgcccagcagagaaagaccaaccagccctgccagggacctgcacagcacgcccatggccaggaagcaggcaagggggttggcggcactgcccagcaccacagccaggtggtaggccaggcgcccatagggcaaacaggaaaagctctgcacagaaggcagcacgccattggtcacggcactggtgaaggccatcaggcccagcaggaaggcaccatgggctgagaacagctgatggacctcagggtctgggccagggatggtgcctgctgcctggctcggtggctcctgcaatggcaaagcctcttcttcctccttctcttcctcctctgctcctggggatcccagttgaagttcaggccctgagccccctgtggttacagagggtagtgatggcaacagcaacaggagaccccgg

SEQ ID NO: 340902 - DNA, 1000 bp, Homo Sapiens
caaggtatgtggtaatttactttaatattctcaatagaaaagtaaataagtgtttccttttatttagttcttctcaccactaaatccaatacgagttcatattgatattggagctgatggcagagccacaggagaagcagatgtagagtttgtgacacatgaagatgcagtagctgccatgtctttgtatacaacatcataacattcattgtaggtaatttcatacataaggatttagttctggagtctcagggcaagttagatgagcatctctgaatgagcagtgcatgacaggaatcacaaacccgtactggttttggtgaagaaggcaaaggtagttcgttgtcagagcaggcattacagaaaatttccccacaatttctacagtggtgctttctcttagagagtgagaattccttttcacaaagtttacaatgtgttgcttctttgtctttcagccaaaccagtccctgcaatgctttgttggcttcttttatgtcttcaattttaagttttgattcgctaagcttgttgccgagttcttgaagagcttgctcttgttcatgatatatttttttcaactgctgattttcatcctggaggttaaggaactcttttttaagactaatgatttgttgagtctcatttctaagatgagataaggcatctttctccttttgaagatcttcctgcaaagtctgcctccattccttctcaatcttcaagtcagtttccagttgcaccagctgtttctccttttgggagatttgtttctgcagactatcagatttactgagacattcttgtagatatttctcatcctcatcttcagcttccatttgcgccttctctgcttgctgcaatctttgttccagctgcctcatggctgcagtaattttattggttttttcttctagtcgggcaattatttcatttttttctttcaagccatcttcagaaccctgcaacttttgatacatctctatgttaattgctttaa

SEQ ID NO: 340903 - DNA, 1000 bp, Homo Sapiens
ttttttttttttttttacagaagtaaagtttattacatttgaaacaatacagcagaaacctcaaaagtttactcataaatatagtttaattcttacaaatcttcttttgaaaatgcaattcatatatgctgcaacctcagaagtttgaatttgaaatgaaatatgaaggtagtagtcagggaagtcacatcagagtgccttgtcaaatatccaaacaaatcagcacatacctcttccttgatacaggaggaaaaaagtgattctaaatatatccaagtgaatgcagaaaaatacattactatttgaggcagaccatgctaaaatataatttacaatgattagtttgcacttaagatggttaataacgcatttaaaccaatgaaatgaaggttaagttgaattttgtagtatttgctcagtctctgtactaaacaatagttcatctgaaaagtttggaaaaagcaaataacctgatacttctctttatgcttatcattttctcactgtcatcttaaatgcaaacaaatcaatacagcatcaagattttttacatattaaaatgaagactaatgactcatagactgtgtaccatatagtacttaatagatgagcttgcaatgaccatcacctcaattttttaaataacaccaagatccacaagccaaaataaacatttgattaaaaagttatgttattcaagataactcagtttcctttttctctttgagattgggaagggctgggtctttaaaaacctgaagaggagttggtaagaggaaaaaatcctcaatgctttaaaaaactcaactggttagaagtccatacaactactatgctggcatggacagagatgtttcctgtcacagaactgttcactttcccatagaagtacttcctccaagccaactatataaagatgtaaatcagctcacccatgattgaaactgaaataatccttcaaaatagaagtaagacacctcacccaaaaagatcttttaaa

SEQ ID NO: 340904 - DNA, 1000 bp, Homo Sapiens
gagacaagagtctcactctgttacccaggctggagtgcagtggtgcaatctcagctcactgcaacctctgcctcctgggttcaagcaattctcccacctcactgggcctcccaaagtgctgggattacaggagtaagcgaccacgcccggccaaccaaacctctatcttagatgttaaagaagacccttattgactacactggccaagaagcaacagagatataaagctgaatcttgtagctaacccctgaaagcaagccaacgcaaattcctccgccaggccagtcttctagtgccaatatggagactgtgggccacagaagattcccttctatttcaggttctcaaaaagtggtgtagactcaggcaaatgccaggaaatgtgtccatatgccagaggagacacagagccagaaatgaaggctatgggtcctgtcttcagtgaaacactgaacgctctcggaaagctcccatcattcttgcatcgctactgccaccaagacggtggcaagggaggaggctaactttcaaatgcatgcaacggcaggtaatatactgtggaagctggaggtttacttttcatgttttagttactttcttgcaaacagcagtccaggaaagcaagcaagcaggtaaaactccgggtgtgcatgaggagatgatccaaggccagtgggcctcccagtgagaaccaaacaggagtggccaggctccactcctggggccagagtgaaaccggggtttaatcactgggctatgtggtctctgtgtctctggcctgaatgagatctcttcaatgtcgggggacagggatccctggaagagcgtgaaaaatacagtggtcactgtgcagttctctctgctggagcctgtcctgccatcatacaaggtgctgtgacagcaatgcaaggtgaaaggagatcaaatggcccagctcagcagttagtgtttgtccctttttgctcttcagagttcctgaatgagagcttttctggcttca

SEQ ID NO: 340905 - DNA, 1000 bp, Homo Sapiens; identical to SEQ ID NO: 159694

SEQ ID NO: 340906 - DNA, 1000 bp, Homo Sapiens
aagtatgaaaataccatggctttatttttctcttaaaaagatagccgtgcttatgagctaaatggaaaggatgtatgtcattctcatcagtaaacaagatttaactgctttcagatgcaaaccataatgccgaagaagtgacatgaaggggataaaagtctaatgctttcatcttcacagcaatcaaatgcaaagtaaagcaaaaatgaaatggacttaattaatgctgggcattcccacagggaaaacgcaagaggatattataacaatcagtagcagtattgtatacaatttaaaaattccattaggttgagccaccctcactcctctctctggctctctcccatctgaggtatagcaggctggaactaacagagctagtagtcgggagcttttgctttggagtccactgagataagtgagtggcaaagtcttggaagaccagataatctggctctggtgaggcacctacgtgcagcagtgtcgcatatggaagttgacaacatactcagcattagtcctctgcacagaaatagcgaaaggctcaaaagggtgaaaggtgaaggcaacaaggcgtcgcactgtgtggttgatggggcggcccaataaccccgcctggatctcaaacttgagcaggcccgagtcccgggcatagaacctgattgggtgatctccacaagtcttgggccgctccatgacagatacccacttgtcatcataactgaagagagacaaatccagataggggctaccgctgtaagactgagcactgatggggagctgacccagcagccggcgtactgcctctgtgtgccctccatacttggcatttataatagtgtctttgaaccggcgctggatctgccttgcaaaattgttgctagaagctgagcagggaaactgaacttcactgtgcagggtagcattacgaaaaaggtcacagaagttctcaaagagctccaaaagctcatctgatgtattctcaaacacagcaatcacc

SEQ ID NO: 340907 - DNA, 1000 bp, Homo Sapiens
acaaattgcttactttatttctttaacaatgaaatagtaataacacaataattcagttgtaacaaagccaccaacagagcaaaacaaaaacaaagctaattaagaagcattgcttcagctcaaattagttatctcctttaaacaggaaaaacgaccattagtctactggttctcaaccctgtctgcacatgagaggaatggagggaaacaggacaggtgtttaaaaaaatagttatatccaagacccacctcagaactattaaatgagaatctctcaagagtgaggcccaggcaaagatttttaaagtgctgtcagtgttgaaaactacaggtctaaagtaataaggaataaaaccatgcctcgaagcaattcaaaaccaagaagctgattatacaataaattttttcctctaatcctgggaaaacagggggaagcaggcaccgattcagttttcatttttctttatccatcttcagttgcccatagtagagcttaaccaacatcaaatattggaagctttgcaaacacgctacccaaattgaaattatcactactttacatttagaaagctcttttaaaacaatagcttttacaacaatcccgcccatcttaagtttgcatagatgttcaagtcagctatttgttcaactaacagagtcaatagaatgtattagaaagtactttattaacaagttattataaaacaatattcattttatataccacaaataaactttttggtgcagataggaggaatatttgagtttttcccacctatttctaaaactgctagaatttctttttataagatcagtaccttcaattctagaatttaaacaaaactttttgctctaagaatgcatacataaaatacttcccctacaactgtactctatccttgacaaatccttattaagaggttcagtagtaactgtaggtatttaatgtcagaacaatctttcttcatttctcaggtttggaaatataacttcaagtatg

SEQ ID NO: 340908 - DNA, 1000 bp, Homo Sapiens
tttttttttttttttttttttttttttttttttttttttttttttttttttttttggtggtaagatgcctctttattggtgctggagctgttcctgagggagcaggccatgggaccctcatcgggacccttgccctcagctacttccgcctgcgggggatactctgtcccaagggtacctcttctgtcagcttctgtaacaagcgggcctggtaagcagggggatcctctccagccaaaggctgggggcgtacgtgcaggtagcgctcagtggccgtctccagctcttccacctcatacaaggtggctgggtccagcgagtgggcattgatgaggctcacaagatactctttgtagtgtgcctggcacaggccggcatagccagctggagtttccttgccacaagcttcgtccctgagcccattgggaacctccttctgctctatcactcggcagccgcctccagggactgcccgggccccagctggaggctctgtattaaacatgacgttattgtcctgtagcagcttctgaagccggagagcagtccagtcccgcaggtagaagaggcagtctcgagggtggtggccgtgcagggactttttcaccctgcagttaggctctggacatttattcttggcgtaaaaggcattgtagcagccgctgcagaactggtggcggcactgggtacagtgaaagtgcatgcagcctcctcgggccagggcgtacgagaacttgcatttggggcagtcaatgccgttttcctgaagatacattgctaggccctgggcctggtattctgggtcgttcatgcgtttccagttctggaagtcctcacagctccgacctcggtgctgctcctcccactggcgcttgcagcgcacacagaaggtctggtgacactggggacaagttgcctccagctgctcacgctcatatatgaagccaaaggagcactgggcacaccacaagaacttggggtcccgcatcagcacaccctc

SEQ ID NO: 340909 - DNA, 1000 bp, Homo Sapiens
aggtttatttattttattgtttgtttcactgtttgaatgtttatcttgcgagagtctacagaattgagagaaaatatctgcaggctaattttacataacatgaggcaaagattaagcactaaatataaaaaataaaacttttagcttgcttattaaactaggaagaattttcctgaaacacagcagttaaattggtctacaatgcattaataaatggagaacacggatctcgcctatgaaatattttaaacattgtggacgctaccaaaaagctcattggtatataaaaattttcaagtcacagtcctctaagcagactaaatacaagttagtttttaacctgaattcagaagtgcaaaatctgtaaaaataaaaatatttccattgttctcagcaatctatggattaaccttacaaatccttaaagtcttttcagtaacatgaaccatgatctcttgacaagttccttgcttaagtggcaagtaacttttgaagctggacttctcaatctgtagagagaagcaagctgcattcacagcattgctcccttttgaaaattatcttctgaagagaagaaggtccagcaaagatcttcagtgcaatactccctgcatatgtgcaagtctgcatgagaggtccccccacaggtgcagttctttctggccatctgccaggcatggaaccccaggcttcttggggtaagttcgacgagcaagcttaaagaactcttctgcagcatcaagtgcaatgagacggtccacaacaaagagatatctctctgagagctcccaacttgttgggaaaatactggtttcttcagccagttttaacaacatctctcgagctttccttgtgtttttagaatcactgatggtgctgagtttagtcactgacaacaaagagtcagcttccttttgaaaacctaaatcttctaagatgcacttccatctgtttcttacttcccttcgaacctgccgcagggtatggatatcatagttga

SEQ ID NO: 340910 - DNA, 1000 bp, Homo Sapiens
ttttttttttttttttttcaatgcatgaatatttgattttatttcaaaagacaattatttataacactgaccctctatcaaaaagaatatgcttttctgatggggaagtgacaaaaaaaaaaaactacacagaacaagagtaataaagttctcaagtaaggattgcactccaataggaattgagtgattctctcagagagcactcattacatcttagacaacgtcactcttctttcctcttggccatatgttcaggtctcatagtctttctgaacacagaatggcagtggccagcattgtccattatctatgttccgcttgtttactaattaaaaagctttggtcttcagtgttgtaaacgcaatttctgccttcgatatcaaaaggtgagtgaatgagacaagattagttgaaggaagtacttgatattttactccagatagctgaatgaaaatgggtattctcccttgtactttggagtccatcgtttcctactcccaatgctctcacagacagtaaataaaatagtttaactcgcaaatcttttacaaggatgttcaaaacaatattctagagaaaactttattgatggttgaaaacaaaataaaatacacataaggttcccttcccatctctaatatggaaaataaaacacttaatatgaatactcagttttaaactttgctctaagttttattttattttattttgagatggagtcttgctattgcccaagctggagtgcagtggcgagatcttggctcactgcaacctccgcctcccaggttcaagcgattctcctgtctcagcctcccgagtacctgggactacaggcacctgccaccatgcagggctaatttttgtatttttagtagagatggggcttcaccatattggtaaggctggtctcgaacttctgacctcaggtgatctacctccctcagcctcccaaagtgctgggattacaggcatgagccaccacccccggcaacttttttaa

SEQ ID NO: 340911 - DNA, 1000 bp, Homo Sapiens
ttttttttttttttttgaatttaagactttactttattcagcaaaatcatttatttacacaatggggaatgctggtttgattttgtcaatgaaataaaaacaaaatgaacagagacaatactgaactgtatatatactttgtatcagagttgaccaactgtttccttacctgtatcaggaacatcaagagcaacagtatcacaaggacactggtttaacaatacaccacataggtccagtaataccctgggaatttcccaatgcaatcaccaactttttctttttttataaatatataaaaaaacaaaaagtcagcaaaaccagcattatgatgtagcaaacagagtataactctgaagtcagtggggtcagtaaaagccttatcagaccatccatagttttacaatgtgatctgctcttcctcagaccactaatatagaatccaaacaggtgaaaaatacgtcactccttagaatacaacaatgatctgataaggatttgacttagtggaaggaaaaaaaaaaaaaaaaagggaattgcagagcatagcccctattagaacaagctaactttccagattttacaaattaaaaaaacaaaaacaaaaacaaaaaaccacttcaacatgaagctaccatacaaagtttttccatttttctttgtaaaaagttcagagtttgcaatttaatcctgggtttttaatgagaaggacagttttggcctggacttccccttgcccaggataattttttgttcttctttttgttgacgttgtcgttcttgttctagtttcatcctttcctcatgaatctttctttgttcttcaacaattctcaactgttcttcggccagtttggcttgtgcttctgcaatttttcggttattctcttccagtattcgctctagctcctcacgttttgcacgttcttcctcctaaaggggaggatatgttaagatattagaaaaacaaaatgtttatttttattgataaatatttact

SEQ ID NO: 340912 - DNA, 1000 bp, Homo Sapiens; identical to SEQ ID NO: 159697

SEQ ID NO: 340913 - DNA, 1000 bp, Homo Sapiens
ggttttcaataaatgtgtttattaaataaataaataacatgttggtagcctgataaaatttaatttcaagctaaatcgctttaaatggttatgaagatagaaagtaaaaacaaaaaaaccccatcaaagttcaaattcattcttctgcccaaacctaccattttcagtccttaaaactaaacaggctaaagtctgaagtggtatggggaaaatggagtcatggcaaatattcacttcaaaattaaaacctattgaagtgtatacatatacatacacagaaaaaatcacttccagctcaaataaaccacaatattgatacataaccaaaacagccttgatatgtaacaaccaataatgaacatataaaacaaacttccccccaggtctcagatttatccagatcattttccttttccagataccccattctcctcaccatatattcagagggcagaaggccctctaaatccttacatcaggagctgtctgtgaattagtatagagataagtatctctgatacatgtaattactttgctcagtcctgatccatatacaaaagcacactgtagacagtgaagaacagaagaaaactaaagcattttctttaaaaaatttccagtttctaaaatgtataaggcaaaacaggtaatagagtcaaaatattgtttgtaatacttttcttctaaaattttctcattaaacttctccaagtagatggtagcacaaatattaatactggagtgtgcatttttgtctaaaatgtatatacattttaaagtgtataggcataggatactatggatcagatcactatttggtctccattatacattttgtgccttggggaaaaaaatccaaatattgtagtttatgaacctgtatcataagaaactagaaaaatttagttatgttgcctactcaaagtagtctttaggagtgttaagtagtgtgtctagaaacaaatagtaaaataattcagatttgattgcactttccctc

SEQ ID NO: 340914 - DNA, 1000 bp, Homo Sapiens
cctgagacagcagagcataagtccttttaattatgtgtttgaaaaatgtcacaagtcaaaaaaggaacacaaggcaggctccggctccctccacccccgtgaggagcccttgtccatttcagccttgcactcagaaagaccccgggggtcttgtagttccacgtgcttcatgtttcgtggtatctgtcagagccttaaaacaggcccacccactactgtgaaatttcaaggaaataactgattcagttaaataacagtcccaaggtagacctggtctcacaggtgaccacccgcttaaatccagagccttcttttctgtccaaagccactgaaatttgatctcctccttcacacattcccaggtccccaatatgccacccaccttctgacaggtggctacaggtctacactaatggaagctctgctaaaaacatctccacccaaccctcctgccaacgaggtcagctggcaggcatctgctaagcccctaaactggtcagcgcaggttatgcgcccattccgagacccaaacaatactccaggacttcgcacctcctcctcgagaggcaacggagagaactgctcttacttcaatctgacagtcaagggagagcacacaaataaaacgtcccatctggaagaaatcagggaagctggggaaatgaggctgttcatcaacttttaagagctcaaacttggctgtgtaactttcagacctagcttatggttggggaccacctgaactggcccccagggttgcctctctctcaacacaaggtgcatactgaacccttctgcagtgtagtacacgttgctgccgcaagtgcaaaggccacgagggaaagaccttttaaccagagcaaggggaatctgaaatgccagaagggggaaggtcggttcgcctgaagacctcttctggcctgtgtggaaaggacggccccttgtcaaccctggggaagcactgcagatgtgaagcggtttggccactcttgggcactga

SEQ ID NO: 340915 - DNA, 1000 bp, Homo Sapiens
aataccaaaagatttattgtagacaattttgttacacaattatacacattatgatacacgtttgaaacattaacacacgtggagactgctaaatcatttaatatttcttttgcaaaaagataatttctttaggctgtgatacctgcaataaccaatctgttctcatttggatcagatctttctccctctgtcctggagatctcacagttcactttgctgaagcaatctatccacttccctatcgaccttgcttatagcagttcaggtatagactatttgagccttatatactaaactgttaagccagtgcgtgccctatgccctgctgagaatagattccttctgtacttgcagccctcagatgctgaattgatcaatcaatttttgagacggggtctcctctgtcaccagggctggagtgcagtggtatgatcttggcacactgcaacctccgcctcctgggttcaagtgattcttcctgcctcagcctcccgagtagctggaattacaggcacacaccaccatgcccagctaattttctgtatttttagtagagacggggtttcaccatgttggtcgggctggtctcgaactcccaacctcaggtgacccacccacctcgacctcccagagtgctgggattacaggcgtgagccaccatgcccggcccagatgctcaatttaaaaggcagagtttattcagtcactccccgccttaccttcctgactcaaacatctacaggacccatgaaaacaggaattacgttgcttgggtaagtttctctgactctgactcacaggtttccgattttcctggagcagaatagaacagatttctgactgggcatgcattctttgttctgccttccacacaggctgtgttaggaagtctgagatggggcgcctccaatagacccgggcacctggcagcgccaccttctcctgcctgccactccctcccatcgagggggcctctgcttgtggacacagactaatctca

SEQ ID NO: 340916 - DNA, 1000 bp, Homo Sapiens
aacgttaaatcgattttatttaaagccataaataaataagccaattaacgctcaagtctgagagggctgcagtctttttaacaataccatagtccaaaaagactaatacttattgctgattcagctcacaatattacccctttccagacaacagcacattcaaatgttcaagaaaacattttatgggcaccttttatgggcatttgagattcacagagcaatgggccatggccctgccctcaaggaacttacaatgtagctggagagacacaaaacatccaaaacagacatgaggggctggctctacctccacacctctatctgaacaaaaacgattactggcttaagtcctcgtgttgtaacgcatgagccacaggaatatcttagcaagtacgcactttatcaagtttcaatttgacatgtcaaaacaaaagtttttatgttgttcatttatatttgtattcactcagatttccactcaatcaaattaaaagagaaagacataattccaagccaactgtaccataatgtttgctgtcctcgatgaaaggatagcttgttcatgtcctagaatttctccacagttccacatcttgagaccaagttcagcagtttttactgccaaaccgatgtgtaaattcggatagtgtgtagacggcgccccatcctaccttgggatccatactgatgaaatcgttcaggttcattttggaatctccagtctcaatgcagggatatggcggcggaggctctctccaattcccactggagtctttcatgtgagatcggtcagaagcaaagttcttcaaatatgaatctgcacggatcactctaaatttcctcctaaactgtgggtgaatgtcatcatcagacttaaaggcatcttctacataagtgtcaaagaggcagggaaatggcaagacagtatcgagatcataaatgaagttctgtcctccacttgaaacatgaagcaaaacaacatggtaatcccagatcacag

SEQ ID NO: 340917 - DNA, 1000 bp, Homo Sapiens
ttttttttttttttttttttttttttttgaaaatagaaaaattccactttaattaaactgttcagtctggatttttttcccccgatactaactgaaattaaaaatagaaatcaatttctgcgacctttcaaggcagtctttgaaatgtcaaggttttaaaaattattttacagcaggaatttacatataaatacactctgtacaatgcgttaactgaacaatcactgggcttccatcatggaggagaaatgattctaggacgagccagggcagcattcaattactgccttcttagtggaagacttttcagccgtctcagcagctcctggggcgacacgtctgcggtttcctcgtcactctggctgtcgctgctgtcggaactctcggagctactacttttctctggttttttattcttttgcttgcctttgtgtttgtgcttcctgtgtttctttttcttctctttcttccgcctgtgctctttcttggccttgtgcttgtctttgttctttttatgtttctctttttgaggaacctcaagtgtctgacgagcattggggcagaagacgggaggcagccgcgggccgaactcttctctttcatctatctgcatcttttgtatcgggaaggaaggtggcggctcctggggtgctggcacaagagcgtgagccacagatgatgtttcccccaagtcagtgtcttgggagctttggaagttggcctccccagagcctgcctgatcatcttcactgtcaccttgctcatcctcggaggatgaggacttttcatctgaggaactggcaaagatggccctgaataagtccatggatgggcggctcccttctccttcagcctgtgcgtccacatctttgttgacggtctgatttgcggataattctggtgcatgctcttcctctttgtttactaaggggctggactgttgtttaggtggctcggcttttgatctagccaaacttaaaaattcactaatggaatcttc

SEQ ID NO: 340918 - DNA, 1000 bp, Homo Sapiens; identical to SEQ ID NO: 159698

SEQ ID NO: 340919 - DNA, 1000 bp, Homo Sapiens
cattttgaaaatgctttaataagtgttgacaacactgttttgcaaaatgtaaagatactatacaaattcttaatacaaaaagaataaattaaaagcagatttctttttttaattctgcaactttgtctacaacgtacatctttttcattgattacagttgaacagaatccagtaaaatcattttacatgctctacagtcagtttcaggagcaacctaatcttttttcccccattattaaactagagtccattttacacaacttgtaataaactattgaaattaatgtatatgtaaaactttacacctagttaactaagcagtaactggtcatctgatagcacctggatggggtttgctatatttagaactaaactaatactgaatgaaaacaaattggaattttaacagtttcaacactcacctgcatataataaaataaaaaatcaacctggctcacaacatagtctgatgtatgtgttttcaccagtcttctggctgaaacaggcaatttcttttacgcatccgaagaatccaataggggctttatatcagaccaaggacttcgtatttcaccttattttgttttaaagaaatagggataaagagtttgcaagtgcttgtgtacaataactacatcatttcccaccacactgatcattaatcatgtcagtctcaaaggactaacgttttatgtacattttgtattaactgaactcagctaaacagtaaaacctgttttacttaatctctgtcttgactaccagactatcatgatgtttgttggaactgtaattcctgctctccatttctctctgtcccccaagttgaaaatataacccaaatctttagaatttttgcctctcattccttgcaactccagtgggctagaatcttgatccagttttctccagactagatttcaagctactctgcatgatgtagaacatgtaaccatgtaacctcatcagctgccttttcccttttgacttttcctgttgc

SEQ ID NO: 340920 - DNA, 1000 bp, Homo Sapiens; identical to SEQ ID NO: 159699

SEQ ID NO: 340921 - DNA, 1000 bp, Homo Sapiens
tttttttttttttttttttaaataatgagaattagttcatgttaggagtgcatggatctatgattccacccaacactcccccctcaagatcttacggggtagatgccatttgaagcaaagggagtgtgatggttgatcctggtataacatcaggagctttaaatcccaaaaatgtggggttgctcatcttggcccagtagtttgccgctgttgctaagtttgggaacattcgtggtgacagctccccaataatggggtggcaaagtacacccccaaactcaaaatatttccccaatgcctttttaaccattgttttttttctcctcaaagactgggatctcagacacaatggcccgtagagcaatggagccatccatgcactgatctagaaacattctcacagcattaataggttgtcatctgtgctttcttggcaactaacttgacttgcgtagcttgtgtagaggggattcaaagtctccaaatagaagtgtgaacattaattctccaacccacggtcttgagctgatccaacctatggctgattctgcattgcagctgattagcagatcagcactctcaccatgtgaaagtcttccaatagatgccatcattgccttgaatcgtctctgaacttggagactgctggtgcaaatcttatcacttgatccagccgcaatgcctatcaaaaggtcacagcagtggcggagaactgatgacttctcaagggcaataaagttaggcatatctttgaatctgctagcataaggagtacccctttcctcgttctcattcccaaccacagtattagacctcttgctcacaccaacactcagtaatgcctggtgtaacccatcaaatatgaaacacaagaatactaaacttggggtcacagggtggaaatgagatttatgtgctgggtctagcatagacttggctgcttttttaatgtccttaatatccccaatgctgggttggggttccaatgcatccagtggat

SEQ ID NO: 340922 - DNA, 1000 bp, Homo Sapiens
ttttttttttttttttttttttttggggaacattctaaagcctttatttagcatcaggtagattatttcattataacacttgttaacttcaagacagcaattaaaatcacggactggcagctacctaggcccctgggagcagtatctcagtctggggtttgggtggataaatactataagatttaagatgaatgtgccccaattaaaggggcaaaactactgtacagtaggtctccacacatattttaagtacacaggtactttgcaaacttgaaatgcacaaggcctccttttatatagtttgatacttacatgagtgcaacttactttccctagtggcatttgccactggaagtggaagcatttaacaaggtttgtcattatgtaatggtgattaaaatctatatttctagggcatttttgtgaattgctagattttatacatattttcagttcaaatgtaaacttaaccattttaatgatactgactgcagaaaactgtaaaagtaaattcagagcactaagtaaatgaaatacttttccagtttaattctttagaattttcaaatcagaaatatctattctgaatattcaggcattttttttcttcttggaagatggaaggggtaacattgggaggattagtatgaataaaagccatcttatcaatgaagtctttataaaatgacataacctctatatctgagaataaacattgtataggaggagagttctaaatatgtcaaaggttacatctaaaacattcaagcatgacagcataaaaatattcaaaataacttgatttgggattactatatagttccataaagctaaagttacatttaggtataaaccttcagtaaatatggcaacagcaaccataaaaagcatattccccagcagtgttctcttacctctatataaaatagtattccaaataagtacattttatagcaaaattatgcatttttcctaagactttcatcaccaatatcgcctt

SEQ ID NO: 340923 - DNA, 1000 bp, Homo Sapiens
gcagaaaccccccgcagcctcaggaggcagcatcagatttatttattcctactcaacatgacccgggaacacaggagcaactctgtacacttctagaaactcacagctagctccaaaacaatagaaattttaaactacaaaagatgagttgtattcagcaaatataaagggtaattttagactgtgtgaacgtttatcagactatttacagcacccgggagacgggttcagatctcgccggcctccttctcttctgacctccgtgaagccatcttcccgttggagctctcaagcctccagtccgggggccctcgctcgctccgcccgctctcccaggactcctctctggatgcccgctctctggagaacctgggaaatgggaaccagaggctcagtggaggctgctgccccccttctgctggccgctcaggcactgacgatggacccgcagaccaggccaggcaaggccctacatcccctatacctggaaaccccccggaggccaaccagacttgcccaccacatatggagtgttagatagccattaaaaagtgacctttgcgaagatttttaataaggagagccttcactgtaacataaacagtgcaaaggagaatacaacactatatgcacagaacatgacactacgtaaaaacacaatggaaaaaaaaatatcaaaaacaaaaaccaaaacagaggtaagcagggcctggtcaggacacaagtctcagccactctgagcatggacgcaacagtgcacaggccccaggacgcaggcaggggacagtgcctgtgcagcccatcacctggcgccgtgcgagctcctccacagccctctcgcctcttcccacacctgagtcccgttcacgactccccagccctactcctgagggtgagcccagccccatccccaccagacacggccctcagcagaccctgggaacacagagaagggctcactcctggttgcagctaccgaaggagtcagagtagttacttg

SEQ ID NO: 340924 - DNA, 1000 bp, Homo Sapiens; identical to SEQ ID NO: 159701

SEQ ID NO: 340925 - DNA, 1000 bp, Homo Sapiens
cacctttaaataaaaatactttattcattcctgataggttatcaaaatgtacactgttaaccaagtaaaaatggtatgctgaaatagttaactagggcatatttgaagaattttgtttacttttaaaagaggaaaaatcacttccaatcttcccttccacacattcctaacaagcctgcactatacctgcttaaaactgaaaatataaacaattacatgggccccacttcattacagaatgcattttcctgtactcttaaaggaagctattacattgaagttaccttcctttgccaaaaactttcagacaagtttactgctctttatattttgtgtaactttgtaaattatacaagaaatatagcacacaacttgaattaatctaaaaacacatacacataaacacaggataaagtgcaacacaacagaacatgtctgcaacattcactttctcaaacccccacagaaggattttcggagtaaatggaaataatgttgttctcaagtgcatgaacactaaattcaacagaataggttatttttccacactgatatttatattgaaaatcctatttgctttgcttcccctgtggcttctgtctctcattttcagttaaaagttccgaagctgtgattctttttaaaccttaagaaaatccaactccacagagctacacaaagtgttagaaggcagcttccaatgatctctcgtcggtaacaaggagaattacagtcatcttaacaaaagtgagccttccactaacttggcagcaaatgctttaaggacctttgacaccagccaccaaacatttctataggcaagtatcaactataaatgtcagaagtttttggttgcatgttgttttgatgttaaattatttaactaaaaaatgcttttgttcctgagatgagcacaataaaattaaacgagcttcctctgaagctgctgtcaggactctgagctcctggttccactctccttatcttcacactgtcagtt

SEQ ID NO: 340926 - DNA, 1000 bp, Homo Sapiens
ttttttttttttttttttaacattttggttacctttaatatatttgggaacaaatactgtgacaacatattttaagtacataaataactcagaaaagtcatatcttttattctggaactctactgaccttatctgtataaagaacctagttttataagaaaaagggggtgagggaggggaagagagaaatgcgtagactgaagaggaatcaaagctcaggattcttcacaagtgcagcagcttccacagttggcccagaggatggtagttgcatataccaggttacgctaacctcaacaagacctagttctcacacacaaatgtgtccagtggataaaacctcagctgcagaaatagattttagcaatatccaaagacattccagggtccggtaggaagaacaaaagtatggcaaaattgaaaactaccatggacttggcagcatccaagggcatcaccaggggggctctttcatgcatgcctagagtcctgcaaactcaaccaaagttttgggatgtaaatgtaaccagtttcatcaaactgtcacacagcagggcagtgggatataaagacagcccgtggacttagggcacaggggcccagctgcacccagaagccttgacaggatgctggagccctgggctcagtggtacaggcttgtccatcaaagccccatcctcaggtaggggctcaggttctgggcccgaagctgtgcatgttgtgcccgccaagaggggcctcttggctggagtctggagggtcagctcctgagctctcagtttctgaggagggcgaccacgaccacgtctgccatttgacgggtggataatctgtgcagatggaccaggggtggatgatggagttgagctgggcttcttagagctgtggacagcagcagcccggggctgcgtagcagtgccactaactgcagatcggcgtgggagtgaagagcacacaagggtgtggcaccgtgtcccactgcgggcagccataggccaag

SEQ ID NO: 340927 - DNA, 1000 bp, Homo Sapiens
tttttttttttttttttttttttttttttttttttttttttttttttttcaagcatggaagaaaatttattcaggaactacagacagagtaaataatactgtgcacagacgagttaacaaattaattttcctaatatccctcaaacaatatctgtgaagattatttagggagaagtgaaaatagacaaaacccaattatccaacatcacattaagttgcttaacttgcaaagttttcaaagaaatattttcacagaattagagaatgttatcaaatatataatgaaaaatatctcagtagcccagtccattttccatcaggtgagccttcgacaagatttaaacatctttttatcattcttctgaaagcaatctataccgattatctggtatagattttctgcaaaggaaaactggtctctcagagacttgagtctctttaaggctttaaaaagggctttcagcaagtatttccttcttgtaaaatagtaggattcagggtaaattacttgcgaccttaaatcatactggcagcttgtcatgccttcagggctcaagtagaagatctttgtcatgacacacacttttttagtgtaaccaccaatttttgccagcttctgctttaaggttagggcagtttgtgtagaatagcctttaaactcctcatcctgtaccatgtggaaggtgtataggactggaggactgtcctgggaaatcagaagagcatcacagaggactttgtggttctcttgcaagcccagatccacagaccagctcctagagaagatcagtgagccctttctgacagagtccatttcttcacatattaattgcttaagtccttcatgttgtaagaacagttttctgcaaaggttttctggagtatacgttatccttcctgatagccctggacagtgatgtctctgccgttgccattccaaaagaggccaactgtggggagcaggtaatgacgtatttatttgagagatcacctcttcata

SEQ ID NO: 340928 - DNA, 1000 bp, Homo Sapiens
ttttttttttttttttttttttttcgtatattcaaatttatttagatgaatgtccagccacagtcctctgtggatttgtgtacattcactttttaaaaaaatggtttccataaaaggatttttggtaattgcctaatttttaatacagtatttatatacaaaacccacttcaaactacttactgtacaagagaaaagagaagcatcagattgcatgattttagcaaataatggaaatgtacgacacctatgaactttgaccacagttggcagattaaagggaatgtaacatcacatcaatgagatcttcaagacaaatttatttctatttttcctcctggcctttgctaaaatgatgtttctcttggtgcttgagaaatttcagagagttgtttagtatcattgctgcaaatttagatcactcatatcatttatgagacttggttttatacacttttaaaataattgtccaacagtgacattcctgtgagtaaaaatatagagaagtgttaccaaaatataagcctttattaataaaaatctttggtagtaacagtattttaaattcctctcaacgatatttggttaactaataaactccctccacctttgagctacagaaaaaaaatcctcaatctaccatataattgatatttgaaaaaaaaacccataaatattctaaagcttccaggggacccctggaagccctaagacttcttgaaaccctgacaccatctgtggaaatgcttccgaggtcatctctctctgcccattttctggtcaaccggttttgtcccataaggaagatgaacaactctgaggtcggcttggtgtgatgggggcaggtgtgtggctgacagtggggagcctgctggggacgccaagggtgctgtttcctgcttaatcagggacacctctgtccccttctagctttccagggataactgggatgctcccacgccccctgtgtggctcagggatgaggcacttctctctcagcc

SEQ ID NO: 340929 - DNA, 1000 bp, Homo Sapiens
tttttttttttttttttttttttttttttttttttttttttttttttttttttttttttttttttttttttttttttttttttttttttttttttttttttttttttttttttttttttttttttttttttttttctttcttttttaattataaaactaacagctgttagaatctttttttctttttttccttttttcttttcccagctacaaaatactctggggagatgcattataatttaaaatatataatattgcacaaacaaccaaaaggttaattaaactaaagaaataattacaaagagaaaaaccccatcccgtcaaaaaaaagattcagcattctctccatcccaccccctcactgaaggtttgaagtggaagtgacctcactctctcggtgtccctgacccacgatccctttcactcattggtgagcacaccagattaggtacaagaatcaccagagcagcatcgtgaagcaccaggctctccagagattcctgcagcccctcattcccccagaggtgcagctttaccagagtggagggtgagagcacaaaggctgggtctgtcttcaggaagaagagcttttgcagaagcctgatgagagtttcaagttcacccccaggatagctcttccagaagcagaagggctgaggcggagaagctaggcttaccagagttgtaagtactcggctttgatcaccgctctgtaccgctggtagctgttttgtgtcctaaactacaggggagttgaggtgggtagctggttggacaaggtatcctgccaggcaacacacagaagggcctgaagtagccccctcccttcttggggaggggaagaaacgcaagagcgaactcctgcaggtggcacagctgggctaaggacttgggtgcatctgacatgaagaagccctgggaaggcatggggacagaccagtgtgggctggaggaaaggaaggaggtgggtcagggtttggtctctggattctgaacccca

SEQ ID NO: 340930 - DNA, 1000 bp, Homo Sapiens; identical to SEQ ID NO: 159702

SEQ ID NO: 340931 - DNA, 1000 bp, Homo Sapiens
aaaaattgacccgttttaattatttaaaaacaaaaaacacatcaaatttcctttaccatctacaattcagttatatccaaacactctaagaccaaacagaagcagggatgacaatgagacactgaagacacacgaaggtgaatgctgaagaccatcagagtcccagcaggaggtcacgtctttcattcagacgctccaatgcttttcatttcagtttgttaaagaacgtgttttacaggaagttctttacagtaatttcatgccagacaccaggtttcttcgatggtacacagctccatgaaatttgtgtttccatccagttgacaggaataaaaaggaatttttatttttgtctttttttgggccgtagagacgtaaaatggtcagattcctttaggaataaatgaggaaaaggagaggaaagagaagatctgggctgtgctggtgctggtttctactcatctttcggagggtgtgacttcaagagttaaatcacacttaggccactacaatgattagtactagttatctttttttaagatgataaaaaggaaagtatccaatggacataaaaatggtcaaaggtttttttactgcaggtcaatttttcccccgaccaaaaaatatacaaaatgaacatataattgggagggtaactctgctggacattccaattcactcatctgcgtgtcccccacacgggtaaggggaacaggcgttcggttttattagtcatgttacagcagtaaccagatgtgttaatggcagcttatttacggtccatcgatcctttgaacaagtataggaaagcatggctgtcagtctctgactgctcacatctgagcacattcagctaccatggaaactacaagggaaggaaaaatatatttattccaagatttactgggagttttaagtgccctttcttccacagagccccagagtggtgacaaggtgctaggggctgctgtgttttccagcatgagctcccatcctctga

SEQ ID NO: 340932 - DNA, 1000 bp, Homo Sapiens
ggaaaagaggtacctttatttgaacagaacaagcaccctggccccagggcaaccacttccccaggtgcacagccagggccctcctgtctgcaggagaattcacagctggtgtgggactcagcccctaggccattcacagctttgtctggctctgtacattcattcagcacggggcaggggggccatgccaccagcctgggggctcaccaggcccctggatgcacacaactcaggcagggcacctgtgggaaggcgcatatcctggcggcagcagcacgtggcaccaggtgccaggccagttaggtggatcctggggccccagggagcgcagcttgctgggcagtttcataaaatgcagcccctgcccacacccacctggcttcaggctttggatgtctccaaaccaaaaacctcccactgaaaatccaggtgtgatggccgggtgtggcggctcatgcctgtgatccccgctacttgggaagctgaggcaggaggatcacttgagtccagaaggtcaaggtcacagtgagctgtggcaccactgcactctagcctgggcaacacagtgaagccctgacccaaaaaccaaaaaccaaaacaaaacagatccaggcatggccaagcgattcatggctgggcagggccagtcccgtcccgctgcacgctgaccaccgtgccctgcgctcacgcctgcaagccactcagctggaacctggcctcctcggatatgccgaactgttccagggggtccttgcccgtcaccttccggatttcgttcctgtagaagatgaggcttctccgcatgaactcgtagctggcccgacgcagagcctccatccactcctgacactgctcctcgctgctgcactcaaagtgatacttcctctcagggtcctcaatgaagctgatggagaaggtgccgggctcttcccggacgactctgcagcgctccagcagcagggctccgacgggctcggcctcgtctgtccgaaagtagaag

SEQ ID NO: 340933 - DNA, 1000 bp, Homo Sapiens
caaatatttaattggaaggaactacatctggaataagttttaaaggaatccatataaaaagaaaagcaaatccattagaaattgatataaacagttgattttatctggaaccaagaatgtgaatgaattggaacctagatgtcctaacctgtttctttgcataaaagccagttgaattttgaaatttatatggcaattatactttattactttacatagagctttgtttttagctaatattttagagacagattacccaaaattacctaatttggttcccacttcattccttctcaaaaaccaaacataaaacagaagggggccagctgtggtggctcatgcctgtaatcccagcactttgggaggccgaggagggtggatcactaggtcaggagtttgagaccagcctgaccaacatggtgaaaccccgtctctactaaaaatacaaaaatcacccaggtgtggtggcacatgcctgtaatcccagatacttaggaggctgaggcaggagaatcgcttgaacccaggagacggaggttgcggtgagagccgagatcgtgctactgcactccagcctgggcaacaaagcaagactctgtctccaaaaaaaaaaaaggaaagcagaagggggcattttcctgtcttcaaaatacaacctcctgctaagactagcaagtcagcagaaactcattgcatttgggcttctggttactaaatgaattaagagacaccgagttccatccttagatgtccacatagatcccattgatcaaataatccagtcttgagtaacgtttcctgcggagtgattccgagaggattctacccaggaggacgaggcctatcaccaggaacaggacaccaaagagcagggacccgataagaagccatttttcaaatggaaggccgtactgattttctggaacactgccctgggaggaactgcctggactggcctccctaccttcccaggaagcagttttattcatagtggaagact

SEQ ID NO: 340934 - DNA, 1000 bp, Homo Sapiens; identical to SEQ ID NO: 159703

SEQ ID NO: 340935 - DNA, 1000 bp, Homo Sapiens; identical to SEQ ID NO: 159704

SEQ ID NO: 340936 - DNA, 1000 bp, Homo Sapiens
cttttttttttttttttttttgaggatttcatgaggctttattcataacctaataatactgttgaaaacaacacatctgtcacttgtagagacccacaggcacacacattctcttcctctcacatagactgaggtaggaggtacactggctaaggcaaaaaaaatactcagtggctgtgcaaggctcagaccaggctcacaaggctcttggttgaaaagcagccccttgagagcaggagcagaggccaggccagcttcactgagatcccagaggttctgactggggccacccagagttgggcatccctggcttctagcatttgggatctaacccgggactggttggtgcaagtagcggatgaagctaggctggtagctggtcttgttccaggttgcaaggacagaatgatgttcctggcacataaactgctcttggcaaagatttgtttcatgaattgaatgaatggtgtgggggagggaaggaagaattctagaggacagcccctgtggcctcctagcccaggataggggagctaaggggtggggcagcacctataccagtcattttagaggtggccagggagggaggtggaagttttggggcaccagctataccaatggcagggggaaaaggtagtcttctttcctcccaaagtgtcttgtacataattggggctcttgaccctccagggcccagcccttctcatcttgttcactgtgaactccttgaaaggaggcctctgcccgactcagcaccatccctggtgcccggcccagcacaggcgtcccgctcttgctgagtgcatagaggccacagcagcatcgttagcttatcctcgcctgccttctgccaacagagtcactctccatctctgctggctgggtctgatcctgcttcaaaggacgccgttcacctatcccttcactggcgaagcagcctcatccttagccttggggaaaaacttctgtgctaaatgggtcatgcgcctgttctgaggca

SEQ ID NO: 340937 - DNA, 1000 bp, Homo Sapiens
aagaactgtaacactcaccgcgagggtccgcgacttcattcttgaggtcagtgagaccaagaacccaccaattccggacacaaaagaatccagacccaaggccacatactgcatgactcaggtcagaggcgtgggagccacagcaaccgcgtcttaaataggggctgggtaaaaacgaggctgagacctgcggggctgcattcccaggaggacaggcattcttagtcacgggatgagacaggaggtcagcacaaggtacaggttcaagatgcgggtcccaaagacactcctttcacagtgttgtagattgtctggggcctggctgggaagtcgttctgctccacgtggtgtccccgggatcactggtgggactgcattcgcctggaagctcagcaagaccagaacagccagtggcagccctcaccagtcccgcacctcagctaggtgcttcagcggccagaggctagctgggcctccccgactccacggggcctcccttccttggggtgatgccaagagcttctttccatggatgctgagttccaggagcatgaaaatagaaaccaaaggcccttcagtctggcttggaaggtcccagaatatcacttatgctgcatcctgttgttcggagcaagtcagaaggccggagaatattgcagggaagaagagataagcccccttctctttgtgggaggaactgttggtggccacctttggaaatgccttgccactgtctttcctctggccacagtccacacccctcccacataaaaaatatactcaacccccttccaccgttaaggcatcaaatcagagtccaggatcctgggatctgcaccaggtccagaaatgcagaccgtccagagctgtgagacattctcggcagtgctaacacacacgttgtgggactcctaggaaaagaaacagaacaaggccaggcatggtaatcccacgcctgtaatcccagcactttgggagggcaaggcgggcagatcacttg

SEQ ID NO: 340938 - DNA, 1000 bp, Homo Sapiens
ctaaaaagaattgggtgaattatcttaaagaatttcaagtccaaattttaaaaaatgctaacatattgtccaagtaaaaggtatcccaataaacgtctttgacatggaacaaagtaatcaaatgacacatgtaacaaccactgacaaagggaactgccattatcaagtattctaataaagattattgattaccacatgcccaatcccagtctatgcatttctccaaaattcacttgtcatctgggcactaagacatccctgtacacaaagtgtgactctactgacgtttcatcaatttccacaatataaatatgctaaaaaaatttaacaaatgggggaaaagccaagacccaggataaaggatttaatccagtatttattccacactcatgatggttctgtaatcagaatacaagttgtaagaacaatctatcaaataatttgctgatagtcttaaataatgcagcacagcattacttttaatactcctctgttctagattaagtttaaaaactcaaacagcaatctccattatcaataaaaaaagttctgaattttaaaaaaaggacactatatcaagctgtttcataatttaaggattttccatttataaaaatgctttggaagcttgaggcttgaatctgtttctctactcatctgccccaccctctccccattacatgttagtatagggttctgcaagaatgctaggctttagacattaatttttttctttaatatagtactttaaaatctgagaaagaattcaagaaaaaaagattacatgtcatgtattttttcaaataaaaaaaggaaaactaagtgaataaattttaggcatactaagtgtccctttgaggtagaatgctaaaaggacttttgatgaaatcacagcctaaaaacctctgcatcagaaactaacttctcataaattctctctaaaggtaactgtggagaatattaagtgtaacatattaacaagagccttccaagataatat

SEQ ID NO: 340939 - DNA, 1000 bp, Homo Sapiens; identical to SEQ ID NO: 159706

SEQ ID NO: 340940 - DNA, 1000 bp, Homo Sapiens
tttttttttttttttttttttttttttttttttttttttttttttttttttttttttttttttttttcatcttataaggaacatttatttggtaaactatctcatagaaatagactctaaaatcaaacagtttcttaaacaacagagagcataatcccaatctctccccatgaaaagcctacttcataactgaagtacctaaagcccatgaactgcattactagaagaaaggagggaaaaagacatttactaaacttccacaggaagactgtataaatctggaagtggttaagtacacatcagcctgtatccaagaatactactcagtctcaaaaattaactgaaaatctaaacttaatatggatacttctttgttcttggtaaggctcagaaaattaccatctatttaagtacgcatggtactagttacatgtcaactgatataataaaaaaggtgaagtggacaatcagtatttcaaacccaatacagggaaatcactagatgtaaataagaacttttaaaagctattcttgagctccactttaaaacaaacattcaggactggaatcttcagaattttctaatatcttgaatatccccatcttctctttaattggtcctgaagcattcatttgatcaataagatcacttcgatctaacaacaactctagatctttatcactaatgaccttctctcttgatccttttatttccctttcataatctctagattttaataattccattaattccttaggatctaagaaattcttagacagatttaatccagactgaccacctttgaaatgatttttatggatgatcaacttttccagtttccttttagcagctgctctttccacaattttctgatcgatagtatttgctgtaacaaggcgataaacaacaactggctttgtctgaccaattctatgacatctatcctgggcctgaagatccgactgggggttccaatcactatcataaatgataactgta

SEQ ID NO: 340941 - DNA, 1000 bp, Homo Sapiens
tttttttttttttttttttttgtcattctacagttttatttacacaaccagtgaagggcatgttctagaataccagctttaatccttttcaaacattaatataagaagccaaattgtaatgatacagcaaaatgaggccactggtattaatacaggtagcaaaggtccacatccaggtggtactgacatcagggaaatttccaaaaccagttgctgctgcctaagagtggttgccactgacgaaagcttgaaataacctgtattcacagaaggggtattggcattgctgcatgtcataattgggacctcttgcaacaactcaacaaggaacaaggcagcccacaaatgcaggatacgtgattcatgaaacatagctagcaggctgttctccatatcgtcgcattatttgatcatgcgtaaacttcacaaacgcatcatattgttctgcaagttttgtgttcaatatttcttcatattcttctcgaactttctcttcacgttctttcaacaaacgttcacagatcatcccaacctgccgtagagtaaataagggctgttctttttttaatggtgaggatgctgcagatgaagtccctggtgaagctggtccactgaggagaaatgcatgtggctgtgcatcagaagtacaacacggatctgtctgttggaaactcgtttctaaatgtcttctcttctgcattcgtttatactcttgttttatgttgtacagaatttgttctgtggtgaggcgggaggagacgtcgccgaagggggatggctccattcggagatacttctgcggcgaggcggccgcagcggagaaggaggcggcggtggccgcggccgccgacaacggggaggcagcggccgaggtgggcgccgacaatggcgcacatcgcctgcgcttcggggacgccgggctcaacagcgggtcgaaatccagagtccttttcagagtggctccgcacgccatggccgggggcagctgaggcgccgggct

SEQ ID NO: 340942 - DNA, 1000 bp, Homo Sapiens; identical to SEQ ID NO: 159707

SEQ ID NO: 340943 - DNA, 1000 bp, Homo Sapiens
ttttctggatataccacattaaaatatattccatatttattcagaatatcataatcaatgcaaacacagaactctcttctcacctgtaaaagttaagtacaatactatgggctagatacataatatttcagtcgagtcttcagtattagcttgtaaaaacaaaatctacaattatagatatccatcatacaaaatatatatacaaaagcataattgtagtgtagaaagataaagttaacaaaatacaacttatgtaatttactttacacaaaaatgtattctagttaattttttccaagagcttcaccaattagtcgaatagcaatactcttgccttcatctgtttgaatgacaagcaaagcttcaaatttgcctgcggacttcggtttgaactgcacgggcatgttgatgtaatgctgggctctcaaagagtacttggaatgtttgacatagaatggctctctgggactcaaaaacttcagtgagtgtgtaataaaagaattatttcgcagattgactttaagtgtccgtgattcccccacactagtcggccggaacctgtacacatcctctggggcataaactccacgagcagtcacatcaagctgctcaggtatgcgagcagaagcctctgacacagcttgtcttcggggcttaactaaatgatctattttaatgagggaatccgtggaaaggcatgcgttttcaggctcattttctgcttcgatgctttgtccagagagttggaatctcaacgtgtgtttcatgtgaggctccttaagagggtgacattcaacatcccaaaactgggcataatcccccctacctctgggcaaaaatgtgatggagactttttggatcccatggctttccagcagaccagaaataggagaacatctgaatgctgcataggtagctctaaaaacatctccactttcatcaactcccttgacataaggtggcgctaaagatgacagatgccatttcacgtctgtggtgc

SEQ ID NO: 340944 - DNA, 1000 bp, Homo Sapiens
tctcacgcactgtggcctgaggacctcattttgagaactgctggactgtgctggatcccagtttgtctgtgaccagttcagcctcaaggagtaggtgcagtgtgggagaaggagcttcagagagtgtgtggaacctctgggagccactgtggaggagacacattctcccaggctcatacacagtcagctagctctgggcctgggaggggtagaggggaccttccagtcttggttttattttctgtgttctagttaagggctggttgagggaaagtgctcaagttatttatcaccttaatccagaggactactctagctccttagaggcaaagtgtgagtaaatacatttaatataacaatagtattataataacagtaattacatatataaagtctacggttcccctgtcacaccctcctattgtttgcatagcttcattgcttgtgacacctcagaatggagtcaccagggactccagttgacctggcagagatgattcttctcagggaaagtcagggggtgagaaaagaggagaacatgggctgccagggagggctggcatgggagtgatgtcctggatacagtggcccaggatgggaaagcaccggaagagggataacttccccacctccagggtatgaaggcaagcaatgtggctgctctgactcctgcaggagaaggcaccaagctagggagactagagatagtggtggcagggcaatactctggtcgttagacctcctctgtgtccaggaagcagagggaagaaattcagcgatcgcccagggctccattatgccccactgccatcccagcccaaagtgtgctgagaggagaagctgcacgcaagttctggatcttctccaggtcacagaggcgtggtggggtcactcagggctcgagcatgactctgtcgggatagccctaagatccctcgactggccagggtgggagtgctgctcccagggtgggggggttgcaggctggggctgtttcttg

SEQ ID NO: 340945 - DNA, 1000 bp, Homo Sapiens
aaaaataccgtgtatcatttactctttctgcagctctatacgataggcaggagaggcttatgtggcagcacaagccaggtggggattttgtaaagaagtgataaaacatttgtaagtaatccaagtaggtgtattaaggcaccaaaagtaacatggcacccaacacccaaaaataaaaatatgaaatatgagtgtgaactctgagtagagtatgaaacaccacagaaagtcttagaaatagctctggagtggctctcccaggacagtttccagttgctgaatagtcttttggcactgatgttctacttcttcacattcatcttccatcaactctgctaagaaaggaatggattctggtagcaagacaatataattctcctttagtttttcagccagtgctaacacagtaatcaaagcagcaaatcgaaccttaggcgaggagtctctcgtctttagcagaatctggtagttcagtggtttccaaagagagtcatccgccatggccaccgaaaactgtgcgatgcatggtatcaggtgctttgtcacccgttcctggaatttctcttctcccccaagcctgttttccagctgatccaccagaggcatcatcaaggcttctgctctctctttacttataaaatgctgggtatcaaaaaggaagattttgtataaacagttcaaaataaactgcaacagcaagcagcacttttcagggtcattttcagagtcaaaaaatgcttcatctgttttggagatgttcacctggttcaaggtgtcagcaaaaggcttcactaagtggccggcaaacagagtaaaaagccctttcagcttttcagcaatgcaatctgccaagttgtaaaatgtcaacaacctgtcctttggggcatcttctgttttagcccaatcaaacagcttgaagaacaggggcctgaatgtgacctcggaaagtttgacaaccatggctactagacagtcaatgatacaattttccgtttttcca

SEQ ID NO: 340946 - DNA, 1000 bp, Homo Sapiens
ttttttttttttttttttttttttttttttttttttttttttttttggcaggtttccttttattggttctagacagtttgtggaaggaagagatgaggccatctagaggccggcaggctcgcccagtgccccaaacactgccaccctgaagtagtgttggaagctgctccagggatgttgcagccctaagcacagtgacaggtgggggcaggagcagcaggggtccccgaggtgttgagaggctggtgagggcacagagaagggacctcctggggctgaggcccctggtggccctatgtgttggagcacgctggcgcttgtctgtccggcctccagtcacgccaaggcctcctgccctgaccaccagcaatgctggcctcaatgtggctgaagctggacgtgtgactttgaccccgtgagggggtcctgggagggctcagttgctgccgttgctgtcgtcactgtccaggtatgcacccagttggctcagggaggacgcgccaggcgtcaggggtgtagggttggcctccttcctgttctgcggggctcctggggtgggggccgcctgaggctgcccgttgctgcagtccgggtcggcctttgccttcttcaccacgaccagcctcgacagcgggggccggctgcccaggctgccaacgctctgctcccagacctccaccttcctcttgggctttggggcctcatccaggatggcggtggggttgggccgaagggctggctgcaggggcgagggagcagcctcatcctctgagtcggagtcctccagcagtcttcgctttctggcttcctccaacagggccgcggtctcctgctcgtcctcctcctgctgctgcctccgccgctcctcctccgacaggcggtgctgcctcagcatagcctcgaagtccacgtgcgcctgccgctggttcaggtctttcagctcctggaggttctccagcacctccatctccagcttggagtccttggtccggttctccag

SEQ ID NO: 340947 - DNA, 1000 bp, Homo Sapiens
ttgggaaggccatatcctttttattaaaatcgccacaaatacaaaagcatcactgaactaaaaatacatcatatacgtatattctcatattcttagaaacttatcacaggtttattggctttccatcttatcacatgtcatatctcgaaaacattaaatagaaacaaaagtctccatgcaattttcagatgaaaaacattctgtgcattttcaatttgtgtgttttcatttagatggttgaaagggtttgctaacaactgtttcccaatttaggctttctggccatgggagtgacatgtcctgtgtcatgtagaatttgatagcttgtaatgtccatttaaatttcaagtgtatcttgccttctctgtagcaagagccagcctgcggatattggatatacaaccagctgcagcttcctggagatcctggtcaggggacccaaccatatccagtagaagctttactgcaccattctcatgcatggtgatgcagttatcggcgtcttctgagagttggtacaaggcctgagctgtcgcccgatgcacgttggtgtcatttgatttcagataacgcactagtggagccactgctttgtgctcaccgaaggccactctattcctgccccacatacagcaacgtgaaatagcttctgctagatgatgtctcaatttattgttatttgtatttgccagtttggacaataaaggaacaactccatgatctgtgataacagctaaattttcttgatcttttgctatgttggtaatggcagcacatacacttgccagaacttctttgttatctgatttcagtaaattgacaataagttccaaaccaccaacaaaggaacgaaccatttccccagcatcctttgcatttttgatgcatggacagagtgcccatgctgcgctggccttcacgtctgggtgaggatttttcagcagggaccacaacaaacgaactccatctaagcgatcaattatcatcatactttcaggtt

SEQ ID NO: 340948 - DNA, 1000 bp, Homo Sapiens
attagaaatgacgttgttactaaaaagccacacaatatctcatttagagaatatgcttaacaaaatatacatcttaaaaattcagcactccagaatgctttttcaggtgtttccatttgagaaataaagaataaaaaattggtaataattatagacacaacttcatacaataatctggataatatgcaagaagcatcatgttgactttcagatatttctctttgtggctaacgaaccacacatcaaaggatggaccaaagttcagatgtacacagtccagggcacctccgagcacagtggcagtgcccttggggattttctttccctcagtgagagacacgggggatggggaggagcccaggagtgtcaccagaaagtacacaacccagcttcttacccagcctgctgccatcatcaactatcaaaccatttgctcctctttgcaagaggtgctcctttagaaggtcccaataatttccgcttatattgttcgaccagctggttgaagcgggtttccgtcttatttcccttagcttttttcctagatacctgctcggacgataattgctgcttctcctgcttccactggtttatctgtggctttggctttttgggatggacgggcttcactttgcctttgtcccgcaacctgattttggggcctcggtgtgaggggagcgccaggacctttcttctcttctttccatcaggcagctccacctgctccacttcagccttggtctggaacccggtccatgaggtagagcccgcctttctcttctgctctgggggcaccttgctttgttcctctgtgtggtgttgagctgccttctgttgctggtcttttgcaggctctggttgccccttctgaggctcaccagttgcaggcttggatctcattttttgcaagctgcgctggatccttaattccttcattttaagttttcttcgatcttctaaagagaactccactattggtctcttcagaggcccaaagatt

SEQ ID NO: 340949 - DNA, 1000 bp, Homo Sapiens
ttttttttttttttttttttttttcagaataagtgctttatttttttaaatctcacaaaaactgaaactaccatttacatcagttgtaatagcaataaaaattagaaatcaatttgctataactcttgaaaacatttataaaaacaaaattaaacaaaaaataaacaaaaaggtaaaactaagtattcattttaaattaaagataatctgactccttatgacatacccacttgcagatgtataaatagcagatgcattcaaaacagtgcaagatttaattaatttaggacaatattccaatcaatcccaatgcaggttttaaattactcgtgcacgtttatatagaatcataaaaataaacctctaatatgtaatcagcttatagccaattcagaaaactccacaccaatacaacaactgtggaaatcatgagatatgactggggggagaaaagcaaaacctagcatcaaaagtgcatatactcattgtaactacaatcttactatatattcctacttttgttttaaaaaaagttttctttaaactatatgtctcaaagggatactaaaggtataatttcatattcttttttgaatttaaaaaacatatacgtaatcctcctttgttttggtaagttcaaatatgaattgacagtggggtaattggattgtggattctttaagaaagctctaagaagagaatacaacatactatatcttctttaagaagtatgagctgaaatgttaggcattccttgtattgttttttaaatatatttaaggaatgctgtttttgtaaaaccatggctttgaaaaagaaatctgagatcaaaatacattactagaagatctctataaaaggtcaccaagactatccttgtttgtgaaatcagggaaaacatttttagaatttatcttgttagaaaaaatgctaccacttttctttctttttcttctttcttattatcacaattaaacaccagaagattttccccaaataa

SEQ ID NO: 340950 - DNA, 1000 bp, Homo Sapiens
cactagccacaaacatttattgttggggtcaatacgtatatccttttgagaagtgtttcgagccattcatttgataactacaaacacgtcagaatctgttttactggtatatttttggcttgcatgacaagggaaaagagattattgcaaaattatgaataaagtccaaaaggcctgattaaaaaaaaatctataaaatggaaggattaaacactgcccagccctactgtgtcaacaaagacggtacaattcaaatcaaggagacaatcccatacaagtccagcaaggcagatgttggcaagtagaagttaagcaatctgttatacaaaatgcaaaaggagttaaagataaattacaaaaaataaaaaacaaaattttagtcagaaaactattactacataaagccatataagaatgtgtattagttgtttcctttaagggaaaaggaaatcaaactgttggttttctatttattcagaagaaaaaataaaggaaagtgtttggaaaatatttctgatattaagtgaattatttctcatctgctacctagagtttacaaacaactgacttatccttgtcaatctgtggaaatgagaaaataaaatcagcgtctggccttcgtgggatactcataacacccgaatgaggtccagagtaatcctagatcgggggatgtcaatgttgagtacttggacttccactctttctccggggcccagtccaaggcttcttctcttctttgtttttgaaagttttgcttctgttacatttcgtatgggaatcagcccagatttccccactcctatatccacaaaaattccaaagagagtggcattctcaactttgcctgtaagaactgtcccaatctgcagatcttccaggcatactatgcttctcttgaaatcaggtttatcaaaatctgttcgaaagtcaaagctttcaggctggctgagaccatctatgatgacctgtaaggtgtgtactgttgtttgcaatcttt

SEQ ID NO: 340951 - DNA, 1000 bp, Homo Sapiens; identical to SEQ ID NO: 159708

SEQ ID NO: 340952 - DNA, 1000 bp, Homo Sapiens
ttttttttttttttttttctagattcagatatttaacgaatagtattgcatggtacaatcatgcaggtttaaaataatagcaattgagtccataggagaagacgacattcttgcttgacaaggtaggaacaaattcattatatttcaccaagactaaaattacaaagtttgggtgtgtaaaggcaagatttaattgttgggaaaatttatccgagccagccaccacgacaaaagccaggctgaccaaatcaaatggattctttacatcctccaagtttcagaagaatcttgaatatggttagccagaagatatggtaaatttgaccccaaacatttgcttgaaggagtaaggtcttctaatgagtgaatgtcaagagatcagcacataagtaatagcttatttatcctttaggtcacatccatctgtgaatcaagcagccttgcagtccacatggtcagcatctctcccatggctcgaggctcaatgatcaaggttgtttagccagtcttagagtatataaaaagcctctccatttttttttggttgttttagagagagaatacgcaagggaattcttcacaggaggagacgtagtcctaaatcccttctgctttccgttgcattggatgtatcacttgttctctttaataatcattttttccatcctcattcattgtacttggacagttttaacctggggatgatgttcatagactgtagttcctggaagagcagcttgcaggcatacggaatacggagggaagacacgtggcaggatgacttgcagtaatggcaccagccagaataccccagaagtccacactgcccacagacatcaacctcaaaggcatcacttgaaatcattagtctctctagcaaaagcatactggctccataaccgattaaacagtcacgttccatttccccgagacgcaagccaccatcacgagaccgtccttcagtgggttgcctggtaaggacggctcgtgggccccgggc

SEQ ID NO: 340953 - DNA, 1000 bp, Homo Sapiens; identical to SEQ ID NO: 159709

SEQ ID NO: 340954 - DNA, 1000 bp, Homo Sapiens
ttttgttacaaaaatcacctcttggttttatttctttttatattagtttgatacgtgaatgttagtccaacttaatttttgaaggagaaacaaaatgaaaaatgttttttaaaaaacaaacagtggtatctcttgtcatgagttggatgcctgtgactgacatcaggtattgccaagtaataaacattttgccattcaactctaaatcccttattagcattagttttaaaggaaatgttacagcttattatttgatttggtatttaataacagttataagtacaatggtagacactgaaaaagaaaacccttaatagaaaagaaaaagacaatttaaaattagattttgttgaagggtgttataagtgcaactttatccatatgcattccttttaaggcattttcattgtccaaatatctcaacatgtacatcaaggtttatattataaaatgggctccttttgtattcattcaagacttaaagaaaaaatacatctcaggactaagtgtagctgaaaagaaaaacacaaaaattcaccactcacaaaaagtaacttaaaatacaaaagtcatttagtatacattattactccccattgtaattccagatttggtacagtatctttttcatttcctgacataaaccattaagacagcacaggctgtagtacttcattgtgaggtggctacaactctataatatgcacagtgattttaaaataggctttttgcatgccttgcatgaaaggtgctacatacaaacctgttttgtgaactctttggtaaccaccaatttaaaaatttggatgaaagcatttccacatggacagatctgaagcacattattggagctctgagccaaagctattaccctgtatattgattcttcagtttccttgaggggttaggtgttgatttagaatacagccagataatttaaagcatgtcaggccccggttaggaaaatgaaaatggctccgattcgtttccagttggcttt

SEQ ID NO: 340955 - DNA, 1000 bp, Homo Sapiens; identical to SEQ ID NO: 159710

SEQ ID NO: 340956 - DNA, 1000 bp, Homo Sapiens
ctttcttggggcttctcattgcatttatttaaatttttttaaaaatgtacatcacttatttattgaatacataaaatgccagtgctttgcaacagttttgttactgcatctctaaactaaaaaaagaaaaggggaaaaaacccaggaaaatacattcaaaaggccaggctgttctgcttatgcatgggcagtggctgtggaaagctacagcctgctctgtgacagttcagaagcattgccaaacatcagcccactatcaatgaaaggttgcacataaagcattaaaggatacaaagaacaacttgacagagagcaggagaaaaataggaaattaagaaaaatgccacttatgccatgggtaggggtggggctggtagactgaggtggaagtaagcacaaatgctgatgtctttggaaactagatttacggtgaaagatggaagaaaacaaagtaacatgtttggcaagctacattgcagtgtgtgtgtccacttccaattttctactttactttccaagagaaatgtaacaaaactgaggtagaaataaagcaggagcactacagcccagatttcaaaatgagaagcaaaattgcactgacaagagtggagtcaaaaagaaggggaggagatggagaggttctttgtggatatatatatgtgtatgtaagttggtttgttggttggtttttgtttttatttatttgtgtatttgttttggttgctatcctctgcattctatcaaacagcacggcaagtctataagctagattagtgaatagaatgacaccattcccagcagttttaagagataacttgcaaactaccaccaccatcaccaccactaccacctatgcaataaaaaggcagtcatagtttttaggtactgtgactttcagggtcctaaacaggtcttgtggctgacaggtctagacactaacacaaactgaataagtagctttcaattaaccagtgtaccttttaagaacattttcacttaa

SEQ ID NO: 340957 - DNA, 1000 bp, Homo Sapiens
ttttttttttttttttttttttctgtaaaattgaataaagattttattataccacacacacaaaaagcaatcggtacagaaaaggcagttttcagttattctgttgagaatttctttccatgatttctcccattaaagtatagttttcaaagcaaccaccacgacaaaggaagcatctaattagtccgttttcttctgatccaagaatgctgaacatttactgtcccatctgtagttgtatcagcagtgtaatgaacacagtttatattacttaactattctttgaactccaagaactgttgaagtcttttctgatgttctgcagatgcttgcacagcattcagatgttcaccaaatgtagtagttattcgatagatggcagttttcagtgatgctctgaatgcaaatcttaatgttttatatgaagtgtccacaaggcttcctgaaatccggggtggtttactggaagcatgaggaagcttaaagtacttgtcgactgcctcttgcagtgtcaacaaagtattaaggatagctggtagtgtcgtctggacaactccaaatctatcctctgtaaatgatgctgctactaagtgcgacagaccttctaatgcccaaatatgcatttgggcatctgaaaaaacagcctgaatggaggcctctgggtgcttactgaaaaaatacattatcagcacccgttttgacaagaaattcttaatctgttcacgtttattctgaatccatgaataaatcacactgggttgtctcattgtcttaccctcagcactaatagaggtagatggagaaggattagaaaattcagtcatttgctgatcagaagctgatgtccacaatcttggcccccttcttattagctgaggactttgcggtgacccatagcaggtgtttacatcaaaaattccagccatccgattcattacactagagccaaatggggtcccaaatgggctcacaacatcaggtgtagataattttgaagaaa

SEQ ID NO: 340958 - DNA, 1000 bp, Homo Sapiens
ttttttttttttttttttttttttttttttttttgacagaagtaaaaatatttattttatcttaaaaatctggtcccgcaaaaaggccaacacttttttcagttcacggtcttgacctttcaaagaagaaatctttcaactgagaggtgagttaataaaaggaatgtcagaggtgctttcagatttcttataaaccagtaaaccaagcaaccctggacttctagtttactgagctccttcttctagccattcacagttcctgaaggagaaaagaagttgtttgcagataaggcactttagaaaccaccaaagagaaaacccaagtctgccaggagctgcactgtgaacatgtgagccgagagggccaccagcagacagagtgccaactcccacagctccatgacaacagcatccaccttcctgccccaacactgttccgtctggcttccagcacccgccttggctctgtgttgcctacctggcctagaatacatggaaaccagacaactggccagagatgaacactgctgcctgaagctcagggcagctgcccacagtgaggaatcccttcagaggccccagctggggcacgccgagggagcagttccttttgcaaagatgagttagtgcggatcagcacattagcaaagcaaaatatttaaacatttttaaaagctgctaatccttccaatttccctcctgattgtagctcaagctgcagcctctaaacctgctaaaaatcaggaagaaacccctcctctggagggcagatggactgaagtggctacagccagtgtgggtacggaaagcctcccgctgaactgtgatcatgtgacacctgcagaccctgggaagggctgatctgaatcctggcagcaaactcaacctcttcttttgcttggggggcttgtgtttaatacaggtcattgcgatggaagaagtctcagagtctctctcacatcaagaggacagatggggacagggatcctggagcttttct

SEQ ID NO: 340959 - DNA, 1000 bp, Homo Sapiens; identical to SEQ ID NO: 159711

SEQ ID NO: 340960 - DNA, 1000 bp, Homo Sapiens
ctgaggcagtatatgtgtattaaatttaaggtcacaattttcactaatctgagaaaacacatatatgtaatatttaaaagttaatgaaatccagtgaaacttcaacttatttcattgagaatttactaacaaaatatagaaaacaagaatttacctcttttaaatggcatgtctgtattacttacaatttgataaatgagttcctttccatacataccttaagatccacaaccttggtggcataaataacatgattaaagggtcaggtacaatgtatattttaatatgggatttgtgtagtgatttagagcataaatatcacacagtgaaaaatttatcacaaactaaatacagtaacaaaaggaaagaaagagcttatgtccacatttccaaggtctttacaataagttatagcgtccaggtccaacacagcatatttgcatacaaagccactgatgtgaacactgaaaggaatctgtcctgtaggtctttcatcttgatttaataaagtttgtacagtatcaaataatatcaaaagtctaaaaaacacaatgagcttttatgtttataaattattgtttttataccataaaaaaagtcaaaagtgcagtttaaaaaaaagtggaagttgttattcttgataagagctagaaaaatgtcatgtcccagttaagaagcaatctcaaggctcatccaatttctaaggaattttaactggcatctaaccttggttaccatatgctgtaagcaaaaccaacagaatgggagctatgtaacaatctagcgaagagaaacattgcaaataaatgtaattataggcctctcccaaagtgaatgaaatgattctttactggaatgaatgggctgtcactgaatgtgactatacttggtaaacttcaaaggcttgctagaaatttttatctttttcaaatttttagtcatagctgacaatggtacatatatcccaggattatgaaattttctagtataactgagaaaa

SEQ ID NO: 340961 - DNA, 1000 bp, Homo Sapiens; identical to SEQ ID NO: 159713

SEQ ID NO: 340962 - DNA, 1000 bp, Homo Sapiens
acacttgggttttaggtatttatttacaaagttcttactaatacaattgcttttaaaatgtagcaaagagtcatttactactctcagaagtggcacatacatggcatagaaaacaatctatagtcagttaactattaaaacagaaacttgaaatttaagtgacaaacatttgtagcactccctaaagaaataggaaataaaaatgcatttatccatatgaacttgattattctgaattactgactataaaaaggctattgtgaaagatatcacactttgaaacagcaaatgaattttcaattttacatttaattataagaccacaataaaaagttgaacatgcgcatatctatgcatttcacagaagattagtaaaactgatggcaacttcagaattatttcatgaagggtacaaacagtctttaccacaattttcccatggtcttatccttcaaaataaaattccacacactatcaaactaaatcaagatttgctagtggataaaattaccataaatataccgtactctctctgaaacagctacaaacatcttgtttttgcaaaatatacaatgtttctcaatctttctgtccttatctcaatttgcaaaaatattttgaaacaatctcctttaaatgttattcttgttaatgagggcaaatcttttaaaatccacatgctagatcttgaaaacgcttgagaagaaaataaactgtgaaaggagtggttatttaaatacttcaaactgcacatgtgaaacagacccactatttaatcagaattctatgcaagttttcatccagtattatgatgtcatttaatctctgcataaattgagctgcacaaatatctatttccataaattcattcatggatactatacaaatagattcacagcagtatttggcacccgcccataaaatttatttactctatcagggttgcaaagctactaatatcagctgatagcaacttaaattattggcctttgaatgacag

SEQ ID NO: 340963 - DNA, 1000 bp, Homo Sapiens
tttttttttttttttttttttttttttttttttttttttttttttttttttttttttttttttttttttttttttttttttttttttttttttttttttttttttttttttttttttttttttttttttttttttttttttgggagtactttcacgtttaatacgcaagggcataaaatagaatgttaggaaacaatttggatttttttccctaaaatataggtgactatgggctagtttacaactttccttctctcactgaaataaaaatacatagttaaggaatagggacgaatacataacaggtgacatttgacagtttgggcatattccttgttactttctaatcttgagaatcacagtttgctgttttagaggtatctgagaggttccagataaaaggcgatggctaaatgctcttaaactttgagcgtgctggatgctctaaagtaggagaggaatttataacagaagcttacaatgaagaaccagacattccgagccatctgagatcttgcaatgagaaggcgccaggcgataaggaagagggcagtattaaagaggtagtgaatatttcggagcctttttaagcgttgctttgcttttgggatcccagccatatcctctttcaataagtattttttaactcccaaaacataattttcaatgtattccaaccagttcaactggcgcacgtcaaagttgaatactctctggtcttcaggactcagctcagacatcagcatttctgtattgtacgtgctccattcccaactccggttgatgaaatactccaacatggaaacagttcttaaaagccgattcatgagctttgtcatcctgggcttccttccagtgagccgcagatagcagtcatagataatggcaggggcccggtggctgaccgcattccagtactgtgatgtgaagctgttgctggtaaaattagcatttggcctcctgaaaggtctctcaaatgggattttttcaaaggttgcca

SEQ ID NO: 340964 - DNA, 1000 bp, Homo Sapiens
gccactatgaagagtgtaaggtgtatttcaaagcatagttccagtatcaaaaattgtcttgcattttctcatcagcaggtcagtttgagaaagcacgaacaaagttatagtagttaattttgccttctccatgagagcacatcctgattaactccttaaccaaggagtcatccactgggacgttaagcgattcacagattttaaagaacatgtctctgtccacatatcctgaagcttccttgtcataaatttgaaatgcctcacgaatgttgtctttgcatgagtgatctttcagttgcttctgaattgtgtctattaatgcttccaattcctgcacgcctggatccttttcagtttgcttgctttctgcttctggagcaggcgcttctcgctttcggacatggttctgaattgacgcgagtgcttctggtgaatactgggcagcgttgctctccatgtatttcaaaacatactcgtctgtatcaaggatgatgaaccggtgaccaaacacttcaatcacagcaccaatgaagaagtcactggggccatagtagacagggttgtccactgtagagtatggtttaacaactttagtcctgccaaggtacttgcccccaatgataccagaattgcgaacaggaggctcaaagatactgatcatgtcggtagctagaaagtaagagaagacaaatctgcggtctttgtcttctgggatgggggattccagtacagccaaataacgaagcaccttgttatcattcaccagcattttaataacgtctttttttggagcttttggaatgagagtaaaacaattctgagcagaatcttccactagtccaaaaccgttataaggaggcaactcctgttttactggaggtggttcccgcttgctcacatcaatacgtggtaaatcagtgattccaaacttctctttgtaataccgtcgagtaaatggatcacaatcataaatgaagaaagttctcccaaggatagtgag

SEQ ID NO: 340965 - DNA, 1000 bp, Homo Sapiens
ttttttttttttttttttacaaaagaaaacacaaaaccagaatttattgaaagtaggtaccagctctgattagaacaatcagctcaaagataccattactcagaacaatatatacaaaaatctcagggaaaggagaataaaagaacttaaaagaatacaacttgaacaggactgttttactaaaatggtcttgttgcaaaataataacaaataccacagagagccctacatgagaaagccatgtgccttcaagcctggggatgaggactctagttctcaaattcttagaacatagcacatgattctccagggcagagaggctggctggagaatgaggacctcactgctgactctgcttaacaaagtccatgccccaggcacaggcacacatggaatgaggccaccaagcaagtcacacccacccctgttcccatgaaccccataagagagaagtgctctctgaagtctacagacttggcagggaccactggaccatggatagcttagagacagttattctgtggccaatgacataaaacctccagaatctgggccctacagttcccttatccaaatttccactaactagggaggtagaagagcaagacatggaagttgtctccaaaccagtatttggtcttcagtaaacagggataaacataaaacactgctccacaagcagacttcagaactactgggcacagcaggtgaaagatccctaagtcccactgaccacctcccacaggaggaggaggaggaggaagaggagggctggtagggggaggtgtcatgagtgcgagagggtagacggacatgttccctactgaggtcactgctgccaactgtcctgctctgctgatctgtacagttccccccaccttctggacctaccctctcatggcccagagctcacttatctgagcctaaacctcccggtctcaagcatagagagcagaaatgccagatgcagaggttctctgggtagcggtggtggaggcag

SEQ ID NO: 340966 - DNA, 1000 bp, Homo Sapiens
ttttttttttttttttttatagtaagaaaatgtcaatttaatcatttactttagcaggcaagcaatttgtaaacattcagtagcggcagcatccaagttacaaacaatttaaaaagaaccaagattagtgattataatttttccttccctttccccaaaagaaaaaaaaaaatgatttggaaatgaatgacttaaaaccctacaaacattgaacattcagttatgtcttctatcagccttctatgcatcctctctgttttattttaaaagatgtatctactcctaaaatgcattatcttgtaataacttgtacgtgagcacttgcaatctaggaagttgttcctgcacatcactgtgcatatattatcttagtttaaatcccatttgcaaagggaatatttatgtcttgattcaatgcctctttgacttcgagtggcagggtatcaaaaaggtgatcttccacaacaagcccgcttttcttgagcatccgacactggcccagctgggctggcaggcggtccaagcagttccccttcagctccagctgagtgagctgggagagctgaccaactttctctgggagtgaggtgatgcagttctgtcccagattcaaagtcctcaactttatgcatttaaacaattgttttggcagaatgtccactttgttcccagtgatatgcaaatgctgcaggttctgaagcaatcctatttctattggaatcattgaaatgttgttgtagctcacatctaagcatctgagtttctgtaaactaaatactgccactggtaaggattcgagcttgttgttagagaaataaagtgactccaagtttttgacatgggtaatagagggaggaatagtaacaattttgttatgccataattttaaacaagtcagtcgttttaaatgctggaaactgatgatttcctcaattgtgcgaatgttattggactttaaatccagttcctgtaaattagagaggctgaaaatagcatgtgg

SEQ ID NO: 340967 - DNA, 1000 bp, Homo Sapiens
tttttttttttttttttttgtacaaagtttttatgtatatatatatgtatatatatttatgtacacagacacaagggtataaaatccagtgagaagggctcacacatgcccaggtaagggatgggagtagctataattgccagggttgaggccacagtagaggcacacaggaagtggtagagtagcagcctccctccatcctcctacctcgggccaaagggaggaaatgggaggaaggacaagtatacaaaggaagatggaagatactggaaaggcatactccaccttttactaaattcctgaaagcccctaaatgcctcacaggacagatcactctcacacctcctggcaggacagatcactctgaggcctcctggcaggatagatcacttccatgcctcctagcaagatgctgaggctacagtaggtctggcctcaagctgcttcaagctaaggtctgaggctggcttctcaatgcacgtccatgctatctcccagggcccttgtagcagaaagagcaccttcaaggttcacccacaaactcagtcctcttgattcagaggtcctaagggttttccttgacagactaaaggttaaaggtacaggaaaaggagagaggtcagttccttcagttaatgccctatggccttcccaatgggggagaaattgaggaatcactaaggtgttggaaagggcaagaaggtaatctcagagacgatacacatggagaaacaggtattcaatgcaggtgtggattctgttctcttcaactggtggctttgctcagcagagtccatttccagtgggaccatgggcaggagcttttcttggtatcttaagggtggccccaatttcctcagagacaatgtccatgccctcaggatggcttggtccacaaaatggagaaatggggccatggaagagtagatgtgaagtggcaggatccagaggcacaaggaggcagtatactgtgccactgatttacatggtctggggggta

SEQ ID NO: 340968 - DNA, 1000 bp, Homo Sapiens
tttttttttttttttattttgtattggttttatttaaattttacagaaacctgatcagagttaagtatgtaattataagtccagtaacaatttctacaaaaatgcacatacaatgccagaactccttaaaagcaactaatatcatatttgtgttttgcataaaacatgcattaatatgttggccaaaatcagtctctacaagaagagacagtccaatacagtcaataagaaaactagttgtgaacaacaggtaaaaaaagaggtttccagttaatgtgaaagaaggaatagtacctttcataaaacaagcccttcagcgctgagttaactgatcggtactattgtgctgcacgtaatgtaacacatcacctccaagacttggtcctgattggtcataggaagtaagggactttctggtagttacatcagatatttgagaagattaaaagttttccggacatgatggtatactaatagtgcaaccttgcaaaaagggttcgaaacattgtcagacttggaagagttccccagcttgataaacaacctcaaagacaccccgagcctttgaacggagccctctgcacaaggccagctcagggctcaccagcatgtcctgtggccacaagaccttccagctccacataccacccttcgtgaggatctgcaattaggagcctgagtgccgaagaacatggttgtgccatttctttgaggctttgactttttataaggcctagttcatctcatccagggattgggcactcgaatgaatacacagatgctggacacataaggagtattaatatacatggtggccccacagcctgaaatgcttttattaacatacatcaaggtgtgtctccgactgtcaggaaagaccttggtcctccagaggcagagagaagctgagggttctctatgtatcacaaggcatttcctacatagactgaggggtgttaaagagatctcatatcaactgaaaggacttcccctcaaatgt

SEQ ID NO: 340969 - DNA, 1000 bp, Homo Sapiens
agttagaaacagaattttatttttgaaaatagaaaaatcaaacaatatttttaaaatgcaatctattgatgtcatcatatttggtttggaatacctaagaatgcagtgactgaaatgtctgttctaaaaacataaacattttttgatatcagtaccaacccactttaatttatatgtgaataagagaacttcgcttgaaaaatacaaatatacatattcgagagcactaccaaattttgaagcttaatgtattcattgccaacgtactgtacataactaaaagtcattttaaatgttttctaaacagggactgatgtggatatcaacaatggtttcatcctaaaactgagttttagcatttgtttagtatatttacctatttagttaaagcacattacaataatctttcacccattccttgtggcttatgtttattttcattttttttagagatggaatcttgctatgttgtccacgatggattcaaaatcctgggctcaagagatcctcctgcctcagcctcctgagcagctgggactacaggtgtgcaccgccacactccacagctgatgttttaataaagtgccactgagtatcagactgatcaaactgaaaacatcccagaacttcagaccaggttaagggggccaatgagaagatcatgaaaagtgacatcagatgaaagctgagatctgtgaaagtttcaaatcagtttttccaagtaagtccacagaccatttgataggctaagcccagttctttacacaatgtagcagccatcatgtctgagtactaattgttctcttcccactggtttttgtgaaattttctgttctgttaccttttaaagattctagcaagtttttggctgtttcaattgcaaacttattgcttttcttcttggtaaaggactttctgtttggagcagatggtagcaatagggataccagcccccagggccgattacttgatatggaaggtcgatctgtatcttcctgtt

SEQ ID NO: 340970 - DNA, 1000 bp, Homo Sapiens; identical to SEQ ID NO: 159714

SEQ ID NO: 340971 - DNA, 1000 bp, Homo Sapiens
gaaggtgattagttttcatttaataaaattaataacacattacatgtagatgaagatataacaaaaccatacgaaagcttgtcagagatattcaactagaaaactaaaacagtagccactagaaaaaagacatagtggaaaaatttttgaacggatatgctttttgttgaataattacagtaattactaccaatatattcagaccaacaaagattagaaagaacatgcaaaatgctgagaaaatttctcctacaattaaaacaaatgtgtttttatgagagagaaaaaaataagtcaagctcctaaaatgaaaattacaaaacataggattaacaatttattaaaaattacacccttgatttttttgaggccaaaaaaagtagtttttttaaaacaagggcatgaaaaagacttcagattaagactcatactctgttctaaatgaaaagtagtaaaactacttctagtagaaaatacctgctatggaaaaaaaatttcagatattttccatttgatgtaggtattaataaaaaatatgatgtttatatctaaaatataaactagcaatttattttcatttataatataaagtgttttaggaaaagtttactcttctcagtgttcaaaataaaataggaattgttctccatacctagcaattttaatgataatgtcaagtaaaaatttaattctgctgaactaaagctcaaatagattcaaattttaaaaatatgaaaaatctacatttttaaaagcttaaaatttttgttactttgcaatgacagatctgctttttctaacatttaaaaaattttgtcttcttttattaatataaaactattcaaataatcacaacagaatctcttataccggtaaagcataatcacatgatacactcgtaacactctacaaatacaatccagaaaggggaagtctccctcaaacaaagaatttctttctttctgtcacctccattccatatatatagtcttcatttcac

SEQ ID NO: 340972 - DNA, 1000 bp, Homo Sapiens; identical to SEQ ID NO: 159715

SEQ ID NO: 340973 - DNA, 1000 bp, Homo Sapiens
atttggcattagaaaccttttattgagacaaggtaaacagtgggctgaaaatattacaggctgaaggaaggctgaggaaaccagtatgaaggcagctcaaatgatgaactaaatatattccaaaggtactatttatacttaaggcagttttaaaagtgaggtcttaaccaaaaagcctttacatggcattcaaaacaaaaacaaaaacaaaaaaaacacggggggggggggggtcacttaaatctcttggactgactaaaagagctaaattatgtacccaaaatctgtacagcaggggcctgttttcagcaggaaagcctatgtacaagtaagaacctcttactcttgtaacattgtcctgttttgttttgtcttataagaatatataactcctatcctcacagagttagtccataaggcctcagtgacctcacagaaatatggagttaacctctactacagaactatttacactgcactgtaaatacacatatgtgtgtccaccctcacagctaagctgtcaatgccttgagtgaaggggttacagctcattcgttttgcatctacagtgacaatgaataggcactcaatacatacttttttttgcatgaatgataaatgaaatgattttacattaccaccactatttacattaacattcctaccattagccgtctccaaaataaaaacacaaaattgctgccacatgttcagcagttttcacaatacagtgtgtctggactttttaatgtaaacaaacatgcttgatttaccaattttcagagcaaggacacaaacttagcattcttctaggaatggaaaacttgccaggaagttacttcattctttttctctttttcaaaagtgcatctcgtagtgccaactgtttttctcggaaggaacgcttattttttgaccggacattctggctataccgcatcatcataaagttcttctgttttttcttctctttatttgtcgaactggaaaatggatttgt

SEQ ID NO: 340974 - DNA, 1000 bp, Homo Sapiens; identical to SEQ ID NO: 159716

SEQ ID NO: 340975 - DNA, 1000 bp, Homo Sapiens
tggatggaatttttaatttatttatcatgtttgtaagttacagacatttatgttttcagcaacagtttataatagttacatctcatacttcaactattagaacagagagaacattaaagtacaaagaaagacttcaaaaatgaggttactgtgatgtatcataaaaggagttaaaattcaaaatatcaaagacctcacctatcggactaaacataaatcttaaaacctcctatggtcctctgagcctaaaattacaaaacttagcaactgcttaaaccaaggaattaacggttctgtgttttcaaggtaagaaaacaaaaaatgctttggtaaactacctttaatactagtttaaatgtttctgccttgtttgtatctctcttgaaagactgtatataagtacaggcacagcatatatttgagaaaacatctcacaaatttcatttactataggtttctcaataatctttacatttaatcaatgagaaaagtgattcagtctcttgaattttaagttaaaaaaattaaaaagtatttccagggactcttaaagctctctcccaaagtataaaatattatgtactttcaaaatcttaagcattcacgttctttctgagaccaacgcaggatacaaacttactctcaacatagatgcttatgtgcttttgggcacacatagtcttagaacagtggtcaaacagctcacaggaccctgtactcctcttcatcctggactgtgacggtggccacagccagaccagccccctcccatctgccttccaggtcagattccctggcatttattaagctgtcactcttcaatgggttcttccttgggggactcaagctcattcaataagtctttgccagctgctccggcttttgaagcaaagagaactgctccctgcttaaaaccgaggttcttcaaactccgggcataatctgcatatatagcagtgatgagtttctctgtgtcctcagtgacttcaaatgctccata

SEQ ID NO: 340976 - DNA, 1000 bp, Homo Sapiens
tttttttttttttttttttttttttttttttttttttatcatcctgcccatgtcagtatacactctctttattatgagaatgaaaccaaataataagcaaaatacatcaggaatttcaaattgtactgcaaagaaggtcccagctggtctcttctgggagtgatctaactaacttaagctgaccctgcgactggctgaggataatcccttctgtccactgcaccgtgcaatgccacaggtcatgagatggtcagttcctcttgctctgtgtcgtctgaagcaagtcgaggccctacttctggttccgcccttcttccttgggcttagatttgctgggttagtagtttgctactattgtcaagactgtactgtccctttaaggtaccacatgccaccatagcttacacagcagtcctttagtactttatccacctcctgtttactgagatcttctccacactcttgagtcaaccgagactggatcatgtttcggcgtacccggtaatttttggaaaaaatttcaagcaaaacctgtcgatgctgatcactcatgtctccagactcccagagggcaaacaccttctgctcatccggggaagcagcagtctgggggggaaaaggcaccagtatctgcttgcaaccggcggccagcaccgtgtcctgtagcatgcggtccgagatgccgctgaagagtgtgtggccggggggcaggctggccaagtgcagattgaagaggcgcttgagttcgctcagcgtgagcacaaactgtctctgaaaggtggcctccacgaaggccttcagttcccgagccacaggggtgctggcgcagccctggggcgggtgcccgttgaagctgtctgtgcccgcagcccgcccgagaggcagcccgttggccagcttgctgtggaggccgctgggggaagtgtccatgggctcctcctccgcctcctgctcctcgtcctcctcgccctcctcgctcacgggctcctccttgatccgc

SEQ ID NO: 340977 - DNA, 1000 bp, Homo Sapiens
caaactgagaaaaagcagttttaatagcacacacacacacacattcataggactttaacaagatgtagtataaaatctttaaaaaaaaaaaaaaggaaagaaaaaaatctgtatttacttcctaagagctggtggattaactggctgacaggactgcccaggaaaaacaaatgcacagataatgaggtgcgccgacactgttcatgagtaaggaataaccatggatcatgctaactgctctacgtgccccgccgcctggaccctactgttgcctccttagcgacaaaccaccacagtcatcccctaattctccaactcagtagcttgtttaatgggctacctcttaaaattttcatttttaatttaaaaattactcttggcttaaagacgccacacattattactggccagtccccaccaattatatttgttttgataaaaataaaaatgcaaatactccaactaagcctggatgataacacgccattttgtatcttttacatttgaggagatttttgtgaagctgaaagcaagctactatttgcgcttgaaagcagaaacaaaatgcaaaccttccaaaaggtgacaaaggcaccactgccatcaggagatagaaaatgtacaaatgctgttactttacggctacatcaatgcattttgtgcatggagagcctcttaatgtgataaaactagtagaattatattttcagtaacaagaaaagcagttagaaaaggcaaacagttacacacaaaagcataaacacttacaagtaccttaatgtgcagcttgcaagaagggtaataagtttgccatacatatccataaaattagacaaggtgatttttggcacagtaatattgccaaacacaccaccactcagtgcaagcttcgtttgccaagtccccaaagtggcctgacattctctgtgcaatgaacatttctccctctctaccatcccattcaccgggcaatagcagcaggagggagacaaagcatggg

SEQ ID NO: 340978 - DNA, 1000 bp, Homo Sapiens; identical to SEQ ID NO: 159717

SEQ ID NO: 340979 - DNA, 1000 bp, Homo Sapiens
tacatagcaaattctttattttcatattaacagtaaaacataaaacagaaacattaaaacagggcataaacagagttcccatggccctgttttcaaagcaggggcaagaatacatacaatgacaagacattttgagttcgtttaactccaaatcctcaagtggggaaaaaaacttagaggtagtgacaaaggaatatggtggggcagagactggtggagcccagaagactaaagcctggatttataaatgtgatgtcctacaacggggactgggaatggcatcagggtttttttttgtttgtttgttttttttgagatggagtcttgctctgtcaccgaggctggagtgcagtggcgcgatctcgactcactgcaacctctgcctcccagggttcaagcaattctcctgcctcagcctcccaagtagctgggactacaggcatgcgcaccactgcacccagttaatttttgtatttttagtagagatggggtttcaccatgttggtcaggctggacaaggctttttttctttggagaaatcactcacgatcgtatgaatttgcttccaaaacatccaaatttaatgtactaatgcaaggactggtaagacttaagattcacataacgtccctcatagttaagtctcttgcttcctactattagtggaatcaatcagcatcaggtacttcaaagaaagtcaaatcctaagcctgcccaggcccaaagacaaagccagccaggacctgaccacctgtatcctcttggtggcaatctgctgaagccagatgagttctgctttttaattccaatcctattctgccactgaaactaggcctgggcaaccactcttaatcattaacatatcaaaaggagtatctcctctgagaaaagagcttttctcaggttctagaagctagcttttacaaaagacgtcttcaaataggggccgggtgcagtggctcacgcctataattttggcactttaggaggctgaggtggg

SEQ ID NO: 340980 - DNA, 1000 bp, Homo Sapiens
tttttttttccaagtccagatgtaactcttgtcttttattccagcatctcccagagctccaatatgtacagactttatttatacacatataatatacaccatatatacttatttatagatattcacacaccagcccacacactcgcacacactcacacgcacacacccttccaggaggggcgtgtggctgccttggagtcccgctagggcccaaacaagtgatactgggcttgccaggcagttgtgaggttttgtgttttttgcttttaaaaagaaggccatttcctccagatgtgtcctccctctccccaagccctaaaactcctccccaaaacactctgaaaaaaatttttttaaaacaagaggttttcctttgctctgcccaagtagtttctggagagtccaggcccatccacaagtcccgtgcaggtcctagagcacgagagccgggcgtggccttggtcaggcctgcagctgtgccctctgaggggagaggggaggcgctatagcatcaagggcacctgccagatgaggagggtgctgtccgtctccccacacggggcctgcctcccactgctgcccagagcgctgccaaagttgcggtagccctgcccgccggagatgatggccacagagcaaatctccttgcggtgggcgtcgcgggcgcagggccggctgcgcacccagatgtcggggtcgtcggccatctcgtaaatggagccgtcctcctcgctgtgctccaaagctgcgccatcagcaggcgccggctcccgcatggagagcagcgggcccgggaggtgtgcggtggagcgcaggcggtactgcaagaggatgcccttcttgcgggtcagctctcggcccacgtggctatcgggcatgggctcgtgtgcctgcccgtctggcttgtcctcctcagcccggggcccctcagcctcctcctggtcactccgcaggatgtcaggggccaggatgctggtagccacagccaggaaggccacag

SEQ ID NO: 340981 - DNA, 1000 bp, Homo Sapiens
acttaacattatagtcattttattgctctagaaagtttagtttctaaaaccattggattacttacatagtgacaataagactagccacatacacaaaatcaactgtatgaggctgcttctccagcttagtggacaaatattacaaaaatacaaaaatagctgattatagttaagctatcaagtataatttttcatgtatttatcctaagaatatcccctttttatagataaggagatgaacaaaaataaaactaatgttactgataaattactaatgaatgtatttgagaaatccaaattacatgcagacagaaactggtcacaaaaaccattacatttctctatactaaaactgtacaatgttttaaacatttccaatcatgcaacggtaatgaagatcagcatgaatttcataagagttgatgggagttcaatgaacaggatttaacacattttacaacccaaatcaaagttgaataatgcatccaattcccctaaatttatctatgcgttgagactgaaatgcacattattcccccacaactcctccccctaccccattcccaatcaattaccttacctataaaaccttccatttaaccttttaagtcagatttgatgggtaaacatgtaatctacagtatactctccattattatttcaggatagacacacatatagtcagatgctgaatcttcattacattcctttcaaaaggcatctaaactgttgcaattgtctatgaaaattcaagcctaagaaaccaagaaaactggcagtcaagattctgaactaggtagttctacaaactataatacgaataatctatatgtccacattagtaaaagaaggatttcctgtttgagaaatgtttctcaatggctctttgaagggaaagctgtgtcactactgctttctgctttcaatggctaggtgaccccaaatatttatccaactggctaagaggcttacagttgagccttttaaaaaatactcaagg

SEQ ID NO: 340982 - DNA, 1000 bp, Homo Sapiens; identical to SEQ ID NO: 159718

SEQ ID NO: 340983 - DNA, 1000 bp, Homo Sapiens
ttttttttttttgtatttttagtagagacggggtttcaccgtgttagccaggatggtcttgatctccctacctcgtgatccgcccacctcggcctcccaaagtgctgggattacaggcgtgagccactgcgccccaccccattttggtgtgatctcagctcactgcaacctacccctcccaagttcaagtgattctcctacctcagcctcttgagtagctgggattacaggggtctgccaccacgcctggctgattttcctatttttagttgacactgcatttcaccaggttggccaggctggtcttgaactcctgacctcagctgatccacccgcctcgggctcccaaagtgttgggattacaggtgtgagccaccacaccaggcccatattttcttttagacatgcaggcaatgttgtggtttgttgttaagatgtcttaatattcctcttcccaggctctgaaacctagtgtgaaggtatatgctgctgaaccctcaaatgcagatgactgctaccagtccaagctgaaggggaaactgatgcccaatctttatcctccagaaaccatagcagatggtgtcaaatccagcattggcttgaacacctggcctattatcagggaccttgtggatgatatcttcactgtcacagaggatgaaattaaggtgaggctccagcaagaaaagaaatagcaaagcatggtgtaacttcttaggcagaagaaacttcccttaggagtagcaagtgacccacgggaacctgactaggtaacttcatgacatgggagggtaccctagatgtattaatgacaaccctcttgacagaagcagagtcagaattaaagaaaagctttgggaagcgtgtgtacacagtgataagaaaattcaaactggacacgtattctcatctgaactttataggtaaaccaactagactcccctttcactaattcctactcccttccatatcaacagtgtgcaacccagctggtgtggga

SEQ ID NO: 340984 - DNA, 1000 bp, Homo Sapiens; identical to SEQ ID NO: 159719

SEQ ID NO: 340985 - DNA, 1000 bp, Homo Sapiens
ttttttttttttttttttttaaaacattaaataattttattcttttctcatttacagtagcccagtggtaagcatgttagaaaacctgaagaaatttaaaagtttttggtttacaaaaagcatgtataaaaatacctgttcagacaaacaaagatctgatcattacattgcccagctttaagaatgccaaaaataactaaaatactgtcaatcaaatgagagggctacatgggtttattaaagtttattttaacaattttagctaagcagaatgtgctaatgtaattcaagttacagttactgccagataacataagagaaaacattgtgtgtggccacttaagattatgcctcaaacagatactgtttcgtgcgcagaacagagttggggaacacagctgggttaagtttcaatggtaagcagcaataaagatcaagaaaatccccaacttttctaataaccgctatacaatatgaaaaaaaaaatagtatctatcaccacctcttaacaatggacatcaaaattaggattgtaggttttctaagtgcttggataaaaaatgcgaacacagttaagatccttggttaattatctttgatttttcaaacccccaaaacataaaatattttgcttgctggtgcattaacccattagcaataacctgagctatcttttcctcaccaagtattttgacagtgcaaaatgttagtagtctcagtagacgctgctcaccacattctgtcattgcagcctgatgatgaaccatgtcagggaggtatcactgccaagagaaatgcacagcagcctaaaagatacatgattcactagcatgctggagtgtcaaaggtagataggcagttttatgcaaaatgtgaaatatataattcaaaatgcccacaagctaacagaaaatacagtattgaatcttttaatatcaaaacaaatacttattttgctactttgaacagtattccacatggacaagcagatcgcgatgct

SEQ ID NO: 340986 - DNA, 1000 bp, Homo Sapiens
tttttttttttttttttttttttttaaaaagtaattgcagtcattttattttacagactaaaaaaaaaaaaaaaaacccaagacagtatactgtagtttgttagaaataattttttatacactaggttataacttattcacatatataagcttattatcataataagaaaaggtttatatattttgggttttcttgttttaataaaataaatgtgctaaggttcctttttaatactttttgggaatatgttttgatgacagtagaaaatattcaacattaattcactaaacaaccaaagaagtaaaattttgatactacctccaaagttaaagatagcaggcatatcttaactacttcccaaaaagactagggagttaggtaaaagagtgaaggcatttgaggatttttcaagttccagatgaccagacagaaactgtaagccattggctacagaatgaatgatagcaaacactaaggtttttatgcactagacagtgtatgtaaacacttacttatcacagctcctgatatgagctgttaaccaataaatgagttccattcaggcattataaactattagatccttaaggcaattcctattttatggttttaggcaaatacttatagatacagcaatataaatgttagtttcctagatttggcaactgctaaaaacagtcttcagaactacattagatgctaatgatagaactacaaagactaattttaaagtgcatatcaggagataataaatcctgcagaagccttagcctctgtacatataatcataggttaacagttttacaaattcacgaacattaaattaatatggaacaatctaaaaaaaaaacactctttaagatgcatccagtttcttataggcttcttcaatgaaggttgacatgctcttcatctgtgatgaattatgaagaatatccaagtcctttagaagagcattctggtttggaattagcgccaaaatttctttctgaagtgtgg

SEQ ID NO: 340987 - DNA, 1000 bp, Homo Sapiens
ctaataaggaatgccaagcgtatccatcaccatttgaatagcttgcaggggatttgtgatttcttccatgttatctcttctcaaaacccaatctggcttaagtcttgaaactattctggtccttacaggtgtttctgggataaaaggaatgcttatagaagaattcttcttttgcttgtaaagtattctttcagtattcattttatgtttatgagctgtaagtttgtagagactgtaaatacggtcaacaactttggacctacttcgtacatcagaggctctatttgttgtcttcagtaaaatagccaacaaacaacaagtttttgtaaaaatgcttccgcctttgtctgcaactttattaccaggcttttctcggtatatctgcaaaagctccaatagtatatctatacaattttctacatcataaactgctgaagtagttttctcatacttagatacattaagcaagacttgcacagcatatctgatgacttccatacaaggaatactgcgattacaacttcggatcaaaacaaatattttagaaattgctccactctgggccatgttctcacaacaaagtggagacaatctagtaactacctctaggtgttttaaggcctcaagaatggcagaaaggtgcttatatgtcaaaaggtaatgaagtgcaagtgcagttcttttgtagagtttgttttcttctcgaatctccctattaacaacttgaagacttagtcgtatagctttaatttttgtacaatcatttttcttcctccaagaatagcctctccataatgcctgaattttaatgattccactagtgaatttttcctgctttttacggaggagaaaatggcgcactgctttctgtattactgatgcagccctatttcgctggctcagacattcttgaccttcatgctcaatctttttgatgctatgatatttctgaataaatctcttttcttgtaatcttgctcgaaaccatctctgaatacag

SEQ ID NO: 340988 - DNA, 1000 bp, Homo Sapiens
gcaaatctacactcagttgctttaatattaacatacatacaatggtactaccttcaccaactttttcatttgggcatcacaaagatgagtcttctgatgttctataagcaatatgtttatatgaaagtcagaagtttagcgaaaattcggcctaaacagtaataaatgaaaatggaatggaaatcaaagttcttaaatagaacagaaggctgggcacggtggctcacgcctgtaatcccagcactttgggaggccgagatgggcggatcacgaggtcaggagatcgagaccatcctgactaacacggtgaaaccccgtctctactaaaaatacaaaaaaaattggccgggcgtggtggcgggcgcctgtagtcccagctactcaggaggctgaggcaggagaatggcgtgaacccgggaggcagagcttgcagtgagccgagatcgcgccactgcacgccagcctgggcgacagaacaagactctgcctcaaaaaaaaaaaaaaaaaaaagacagaaaagtcccaatgtctcttaagcagcaatagcaccttcccaatttagtttcaagtttcaagatgagcaccatcctccatttatccttgtatttccagggcccagtgtctgcatgtaagatccttatccagctgcttgtttggagcctgctgcagggggtacaaggctgtccagctgttggcgatgtcctgtattaatcaaccattcataaaacttgttctctaccagtacctggaactgcttcctttgatcctttgtcaaatgagcctccttcacagttttctgccagatctgtatcttctgttctctttgacccagtgctttctgatatacagatggaagacccccgggtatctctgttgtgtccccttccatttcaaagggaataataaatacatagaattcacaaggtggtaaaagctggaagactcttgtgtcgctgttctctctgcacacaaccattggattatcccaatagttaggcac

SEQ ID NO: 340989 - DNA, 1000 bp, Homo Sapiens
agtgaatatttttaaattttattaatgacaaagcaaaatttaacacagaagtatatatacataggttgtattaaaactaaatgttttaactctcaaatgttttaactctcaaatagaaaacatacacatctattacaggaatcacaaaacttatctccataaggaaactttaaactccagaggcaaaaaaaaaaaaaattatctccaatttcccccatgagaatcaaaattgcaatttttttaaaaaaattgcaaattttaattttatactttaatacctttagttttaagacaacagttaacagaatcaattttagatacaggtattttttaaccttaatatttaaaagtccaaaattatatagaattaatccaaatcatatagcaaagaattctgaaaactgaatgcacaattggtcacatgatctttaatgacctgcacactaccatcctgcatattggtttcttttatgctgtcgaatccaggtatattgtgaaccgtagttttgttcagtaatgaagataggtgatctccatctgtttctttctcttcagttattactgactcgtttaagttatctttttcctcatttgaacaagtagcacttttttcttttataaattcagattgcatttttgactcaggttgctgagattttccaagtatcatttgagaaacatcaagagactcttgttgaaagcatgtaactaaaccaaagctatctatttgtagtgctttaactgctatagatgaatcagaatcagttgtaggggtgttacaatgttctatatattccttttcagttagatgactttcttcatttactctttcctcctttccttgtagctgatcagagttactacattcttgcaactttgcattaatttgaatcttattatcagtaacttgaagaacttcaattaatggtggggtcaaggacatagactgtttgaatggagagctcaggacctcttcaagaaactcattaacattttcttc

SEQ ID NO: 340990 - DNA, 1000 bp, Homo Sapiens
tttttttttttttttcagaacaatgtatttgtttattaaataaagattgcttgttacacagaaaattattttctttaattatcatacatagctctctttcacatcaggcagtagaacactgcatttacttcatctcaggatactggatacaagattaatagtcagtttgtctcaaaatatgtcaatgtgttctgtctgaaaacatgcagagggcttggagtaatcatatcattttacgaggtgctttagaaaaccaagctacaggtcctgaatacattccaaaaatcctaaataattaccaacagaagagagaactcttgccagccagtacactcaataaagaagtacaaaggtgcagacaatgtaactttaccaggaagcttaaggggtggcccagcttctcggcaggagtcagcaggcctggcagcctccatggctggcgctgctgtgtggaaacagggccatggtcttcttgagctcctggtagctccagtgcatctgctccacctcggctctgtgctgcgcccgcacctggctcagctcctgcagcaggtgttcattggtgctgaccagggagctgtggctctcctgcagcatctgcgtgagctcctggatcttgtcgtagtgctccaggtgctgcttcagttccacaatctcgccacacagcctcttcacacttgtttgaagtccagcgatctgcaaatttaacgtggctgcagtgtctgcactcttcacttcctttttcatactcaacaaaagcgattttaacctactgttctcttccaaagatttatctaaatgttgtctcaaatcatccagctccttgtgtgtgtggtgcagctccgccgtcacctcgctcatctcccgggcgtgctgctgctgctgctcagcaaggcggctttgcagggacttactctccagagccagggagccgacatcttcacccaccatcgcagagctgtcctgagctgctgtgaattcttcaacagatgacaagatg

SEQ ID NO: 340991 - DNA, 1000 bp, Homo Sapiens
gcaagctaacaaaatgaccatgtattgaactgagtctcccattctttagtttttaactctatttcctttatatggggtaataatcagttcatgtagaaaataagttatcgacatacttttttaaataacagcctgggtatcttcagcttcacgaaacgggtgtaacagttttaatcggcacgcttgagagaacctagcattcaatctgagagcttggcactcgcctcatgttcagggcgtgacgatgtatctcttgcatctgtctgatgcggtccttctgccacatcaggttttgaggcatagggtatctctgtgtgccatgcaagtaccggtatgggatcctcacgtgacaagcagtggctctacaacgaggttgtggcataggaggaagaagcatccacctcttcctctccgcacaatatcggtaggcttctttccgatactgtttatcaatatcatcactgtttttccagcctcctataatgaagacatcatctttgtaatagcaaatggctgctccttcgatgcttaggacttctggaggcaagctttcaaggatctcatcagacacttggctggcaatttttcttactgcctcttcgttttctaaacaataactcttgggacaacatgatgctgtctgataaaagtttgaattgaccacagacatttggaaaaagcagtaattgtcaataagcggcaaagattccacatcttgccactgtcgagtctctgtatcatagcaagtaattacagcctttaatccatcttcagtgtcccggtctacaggagtgcgggcggcaatgtatacaaaccggtcttcaatggctagtgctttgacatctcgaagaatctttggtgccgattccaagttgtgccatttatcaagctcaggattataaacagtcacatctttaaaaccaggactaaagttgccatgtcctccaatgctatagagcttccctttgacttctgttagtccaaaagaatgctttcttgt

SEQ ID NO: 340992 - DNA, 1000 bp, Homo Sapiens
ggcaatttgaactacatttatttttcaacaagtgggggcaatatgaagtgttttgaatgttgtgtgcaaaacgaatccatctcaccgtctcactgtcatgatttaacacagcaaggtagatacactggtttccagcattacaggcaacactagatgtactttttttaatgaataatgtaaacttgagttttaaggcagcgggtactaatgctgcacacagacttagctcggtgcccatttcagaaacgggtcagtcagcactcgaaacaagaaactgtgaggggagaaaaggggagccaccagtgtcatctgacaaaaacgatccgtcaaagtgttttccctttcacacgcacaaaatgaaatatttgaacatttagaaaaacaaagcacccatcccaccaacttcggcctgttctttaacaaatatttcaaaatactggtaaataatagtgactgctagcagaattccagtgccagatccaatggcccccaggaagtcagccagcactgacagggcgccaatgcacaaaccgccaaacgcagctgcggtggggatgtacctattaagctcatgaaccatagaggtatctcggtggcccctcattaccatctgctgttctttcagctgtttagctacatctttggctgaggaaccagacacttcaatccatgtcttagagaagaatgcacatgaccccaacatgaagatgatataaacaacgacatggacaggatcctcaaagatggcgcccatggactcaggaggagaaagatagtaacaaaggcctccaactgggtaagaacgtgcgggtcctcccccactgacatcggcccactgtcctagtaaatttactaaaaagttgccactaaatcgaacagacagcatctgggaaataacatacaggttggacaccagggccgactggaggatgatggggatgttggaggtgtagaagagtttgatggggtagctgctgtactgtcctcggtaacgggccga

SEQ ID NO: 340993 - DNA, 1000 bp, Homo Sapiens
aacatcaaatttggtttatttcaagtttgtaacaaaatatattctaggcaacttttcagacattgttttatagcatcataaaccccataccactgctgtcattccaaaagctgccaggacactggaagttatcaagtggtccagccctggaatacaggtagaattcacatgataggtgataagaaagcaatgtctgtgggccactctgatccctctttttaccttggtaggtaaggtatgatcttaagactatatgtactgagtcctattagtcagtgaaaaagattaaagtgacaagttatgtgctttgttcctatagctttgaagttcatccacctcaccagcaattggaaggtctcaggtcttgcaggctctacccatgtgtaatcctggggcaggtgtgaatcttgatttttttaagagattactcaagggagagaacaacagaaacggaagccatgagtactgccccaattctagattaggttagaggttagaataaattaactaatggggagtggtagtgggtagcagtcagacccaggagacagatttgtgtggtttcctgatctcagcaaggtctaaggaaaaaagcctccccgcccccccaccttaaatagtggcatcaagtcatgaaggccagtgaaacgtggttagtctcgtaaaatgacttccagttcttccaggtccttctggatagccaaatcctccttcgtgacatctggcagctccagggccaacttcatccaccatctagcttcagagtttttccctagttctctgtagcacttggaaatatatacccttcctgctttggaaaatcctggctgtagttcttcagcctttaggaagctctggagggcatcttccacagtggcactgagagggctttcaagcaaggctgtagcagtttttttttctagccagctcaggtgagagacctgatagcaccacctgccaagaagaaagtgagccatggggttttctggctggagagcaa

SEQ ID NO: 340994 - DNA, 1000 bp, Homo Sapiens
tttttttttttttttctgctgctcatagtttattttccaccaaccagtgatcagctgtgagtgatgtggctgtgacctatagctggtgcttggcgattacaaacacccaccagctggtggagcaggcgcctccctgccaggatgatgcttcaggaactttctgggcacaaagtgcttcttggtggacaatttttaaaaacacacagagccacgtgggtcacctattgtcaccaagagaaaaaagaacctcaaaatcagtgacgcgacaggaagaattcggacctgttctttctgaggaagttcttatttttcctgtaactgtatgacggcatcacaccttcctcctgaacgtgggggccatagtcactgactccgccagcctcccaccagtgtgctggtgtaggaggagctgcagacgtcctcaagcagaagtcacttctgcgtcctcagtggtaactcctgtccctgctcaagtcctccgccctcccccgcagctgtcttttcccttcgaaaagcaggatgcttgccgccatggccgagttgaggctgtccacaccaggcacaacggggatcagcagcctcttgccaccagtgctctcggccagctgcagggactccaggctcacgccgtaggtctccccgccaatcaccacagctgccggcgcctctgtccagtccgagtcgtaactctgaacctcaacatgaggcagccaatcttgactggctccggtttctacatcttcctcttcctcatacttgtgaaacttcatcactcgttgatcacacacccagccatggtcactagctttattagacatctcagcctgggcataaaggccacagttgtcagccacatagacccgagtgtcagggggcaggtaattgggcacggtttcccattccagattattgataatgggcatccggaaatgtgcgcccatacccgcccggagcactttgggctcccaggcatccacacagcctttggtgagtaacactt

SEQ ID NO: 340995 - DNA, 1000 bp, Homo Sapiens; identical to SEQ ID NO: 159722

SEQ ID NO: 340996 - DNA, 1000 bp, Homo Sapiens; identical to SEQ ID NO: 159723

SEQ ID NO: 340997 - DNA, 1000 bp, Homo Sapiens
tgatatttcagtatttaatatatacaaaatgtttctattgaacagaaccaaggtattcacaataagctgcagaaaaacccatgcaattaacaaagaatgaaatttataaattaaaaacattgtcgtctatacataatgtacaatcatgcatttaaaaatgaatactatacgtctcataagaataaattttcagtcaactgctgctgcatgaatatttgctaatgcaaatgaataaaatcttagtaaattctgcattaatattttaaccgccagaagttgaaacttttctcatttttcttgaaagctgtccaaagttgacatatgcaggaaaaattcaaattctttcgcatttcatttgaggtttttaaccagtaacaaacttcctaaacctcagtcccaacaaacatgaattaaacaaacaaacaaacaaaaatataaacacctttatcagttcagcaaaaattcaaataaaaatgttcaattttacttaaagtattttacatgtttcaccagaatatgcacgggtttaagaaagcatgaaataaaatgtaagttctgttactagttttgctttcacatctcagtaagataattaaatttcctgaaaaaccacgcatagcagccaagaatacatattatgaaaaaaaaaaggatcttacataatgaacttacaaaattgaacttacataataagtcactgtccttcagggtttgaaatgttatcaactttgcaaagagtctcttctttgaaattgtgctattatttcagaacttgtttcctcaatcaagaaatccagtgatgtttaaaaaaaccttcaattttctctgaaaatactaaatagaattttcatgggatggtgatctccaacgtgactgtagattttttattacagagtttgccatacaacttagtttctcgtgcatttcaaatagttggcttcctgaataattatgaagatcttctgaatccagctgaagagcaagagcactaatctgtgcc

SEQ ID NO: 340998 - DNA, 1000 bp, Homo Sapiens; identical to SEQ ID NO: 246527

SEQ ID NO: 340999 - DNA, 1000 bp, Homo Sapiens; identical to SEQ ID NO: 159724

SEQ ID NO: 341000 - DNA, 1000 bp, Homo Sapiens
aaagtgaaaaaatcttttacactttatgtaaatgatacttaagtatgacaaagaggtgataattcaagttcgtaactagtaagtcactaaaaagataaatgcattcattcatgtaccacaaaatcagagaagacacgaggacatgccgcagtcagtgaaatagccgagaaatcaacattttactagttattttgtcccaaactattaccatgtgtgtttggtatgttaacaatttaaatatccacattaggctaaacaacaagcacctgtcagcagtggaaaccaaaacattttgatgctaaaaaatatacaagatatttagacgctatttcattggttgtcaaaaacagtgactactgccaaataattaaatttaaaatattgtgccaggtcctctcagggaaatgtgaaaataatactgacgatctcattgtcattgctgttattttactggaattaaacaaaggccagaagttataaatttatgactgccaatactatctttggatagttacaatacagtatgtaaaattaaggatggctttgtttagaagactgccataaatcaacaaaacccaactgtgtctgggggacatggtagagaaaatggcaattttgagagaggagtgcttctaaaggcatttccttggaggctctgaggtttttttttttttttcacattaccgaaaggccaagtaatgtggtgtgattactataattcctacaacaaaacttccacttagaatagttacatgttcccaaactatttttcttctgtctgccatgctggcttctgtatcccatggtccactgtaatcttttggtcttctttttttgcagtacagcagtcctcgtgctgctatccattgagtaggtaaaccaccaattcataggtggccatcataatggctgtgtttggaatctgtctcactagatgagttgtcagaccacgataaagagacccataaccttcttcttgaacaagcaaagatagagtctg

SEQ ID NO: 341001 - DNA, 1000 bp, Homo Sapiens; identical to SEQ ID NO: 159725

SEQ ID NO: 341002 - DNA, 1000 bp, Homo Sapiens
gccaaattgaatcaaccccaatgttttatttaatttaaagttttaaaaggcagtggttaagcacattatgtatatatgtatatatatgaatgtatgtacgtgtgtatatacatacatatatatacaggaaaccaaccccttttcaactttagccactgatgagctaggcccactgtctagtgcatgactcactttctacttcttcataggaccaattctaaaagtaaaaataaacaccctttatcagtttaacagtaactaattgtgtttcttttttttaaataaataaagttactattaaactgatcacatatggtagaaacgtagaactcacacacacaccagcacacacagtccccaatttaaaatgtgatgtatgaatgacctatatgtacaaatgggtgctgctgactcccccaccccaagcagaggccatgaaagaactcccattactcagggagtccccattctctatgctgggatggaggatgtgtgtgttcctggcaccccgggttagacctcagaatgcacactccccatgcgctgatacagatggtggttcagttctatggtactagtgttcaggtacattagggaataaataggcatttgtagctgcctgagaactaaaccatcatttataactctttatagggagaaatgtattctgaagttttagctaactgacatacaaacttttagagtataatcagtttgtaagtctgaggctgtgtgtgtgtttctatatatttatacaaaattgatatgaagaatggggctaggtttatggagcagctgctaggcttccatttggtgagttctgatctaagaagtcgcttgcccaaggctttatttaccagctctttctgcttctcacgtgcctctggctgctggagagattcagaaggggccactcacacaagtgaggggaaggacatggctaaatcttctgctagggatcttggcaaaaagaattgccagattcaaccagggccgcttt

SEQ ID NO: 341003 - DNA, 1000 bp, Homo Sapiens; identical to SEQ ID NO: 159726

SEQ ID NO: 341004 - DNA, 1000 bp, Homo Sapiens; identical to SEQ ID NO: 159727

SEQ ID NO: 341005 - DNA, 1000 bp, Homo Sapiens
tttttttttttttttttttttttttaagcccaggctttattccagcctctttttgaggaatttgactgaaaagttccctccctctcggctgatgcgccgtcccatcctgggctcctagtgtagggctcctacccttggctccagcaatgctgatgatgaggtgctggggtccccgaggacaggaggcctccaggaaggaaccggcctcagtccacgccgtccagggactgtggctctgccctctcgagctgtagcacctgattttctatgcaccgaaactgccaaggccagcttgtgttgtacagaaatggtcgcagatcaaacctgttgtcctcagggctgtagttctcggcgtggtacgcgggtgtgagcgtggtcatcttgtgtctgttcatggagtacttggagaaaaaccgcttcactttgtcagcgacctgtctcggggtgcagatgtgtctccacatgccgaggagtttgcagaacatgctgtagggccccatcttggccaccttcctgagtttcccatagaccgagagctccgcatatgtcatccccatatcttcctcgtcggtctgggacacctgtccatcagccaagggctccagctctgcggtggccggcgccaacaggatgctctgcagggcaggaagctggaagcgctggatgcagaactggacgaaggccctgaggtccgtcttgctgatcccgcctatggggttgatgtccgcactggagcagtcgtacttggtcaggtagcccaggagactctcatccacgttggcggatcccagcacgaggagcccaccgtggacaccccgagaccagaggctcaactgagcaaacagataggcgaggaccatccgtattcgagcctgcacattttgcagcgccaggttttccctgctgcttcctccatgagctgcaaacagagggctcttccccgtcaccaggctgaagatgcccatgacggccttcacggctggatcgatgttgagactga

SEQ ID NO: 341006 - DNA, 993 bp, Homo Sapiens
aaaaaaaaaaaaaatttattggtgacgttgaagaaaagggctgaggggtggatggctggagctggggctacgtaggcggcccctcctggtcttcctgctgcatccgtgcgatcagctgttgccgctcggccgcctggcgcatgcgcatcatgacgaggctctcgtagtccctctctgacagcactgagccctttgacagtcctgagtggctgcggcccacggcatcctggggctgtccctccaaccaggaaatcttcagagggttatccaccaggccaacttcattctggacagccagctccgctgccttgacggttgcaaactccaccacagcagtgcctggcttcttactggaaagcaccaggttgagaacctcaccatacttctgcaaaagccgtaggaggacgtctttggagtagccaccttttgactcatcctccttcttgcacttccattttagctttagtttgggggttccttggccttcagtattttctgcctttcctctcaacctctggtcacgctcctggcgtatctgctcccggatgagcctctgctgttcctccagctgccgggaaccctcttctctcaggcgttcgatctcttgctctagtgtcctggtgctccggctctcctcttcctcctcactctcctgggcctgggcctgccgctcccgggcctccaggtcaagcttcactttcttccttttctcatcaagtttctgggtcctctctgctgcttgcttcttggctttcctgaccttgtcatatgcagccctggctgcagcatcggtcagcacctccaaggcctgagaaagctggtggaagagttcagctgctctgggattatctggatttttgtctgggtggcaggagagggccttctgcctatacgccttctttacctctttgtccgctgccttctcctcaatgcctagcagcgcgtacaggtccatctgtaagagctccttggtcactgccatggttccggcct

SEQ ID NO: 341007 - DNA, 1000 bp, Homo Sapiens
gcatttcaaatatttcaatagttttatttcgcaaagagaagcctaagaatttttttaaaaacatttccagagagaacactttataccataaaataaacttgtataatttgggaggacaaatcatctcaaatgtatatttttgaattatgtgccaattttataattagtacaaaaatgacagctgaaatattttaaaaatgtaaaaaccagtccaggcaacataactataccatcctgctgtaaaagtacttatatcgaattccgcacaaaatatttttgcaatatgctaaatttagttcttcaagtcactcttcactgccggctggcttttccattttctgttgtctccatcccattttcctctttaagatgttgatatagttcagctctgttattaacagagttcaaacgtccagcaaattcctgatgttttctggaattggcagtattgattctattactccacaaggataataacgacactggcccttttgatttttccacttgtggagtttcatccatttcaacaaggggttttttgtttggaggttctggggaatcaggcgaatcttttataatctcagcttcagccaattcttcttttccacgctctaagattccttttaatctctctgagtcttgccaagacttttcctgttcataatctttcactgctttctctgacttgtcctctttgtcttccctctttcttcctcgtttctttcgttcttcctcttctgggggtttgctcctgcatgccatcagacattccaagactctttgatgtttctctgagttgttgatatgggctctgacaagggtttctaattcattccacatgatacggtattgttcatctcttttagggccctttcctcttgtaccaactgtggaaataggtagaggatcattttttctttccatatcaactaagttgtatattgttttttgacagtttaacacatcttcttctgtcagagattctttcacaataacactg

SEQ ID NO: 341008 - DNA, 1000 bp, Homo Sapiens; identical to SEQ ID NO: 246528

SEQ ID NO: 341009 - DNA, 1000 bp, Homo Sapiens
ggagtcttcccatataaggcacaaaagggtctttttgttttgctttgttttaaagctttaataaattcttggaagattctggattgcttgaaattatttttagattatgctaaacatggagctgcatttacacaaaagttcttaaaaattgtcccaaaagctaatttttccaagtggaataactttagaattgaacatttataagattcgctttatgttttaaggagctctaaaatctacatcataatctaagaagtcttaattttgaactttaattcacaacgatcttctacacgtgacattatctcacgtgtatcctgtaggctctctgttacggttagctcactagaaagtgacctaagtgagcttagtgtttaatgcagcattactgtgaatttcctttagaaactcacttttatttgtctccagtctactttttcatctatttgtttttggttttttgttttttaattttgagacagagtctcattctgtcgcccaggctggagtgcagtggagtgatcttggctcattgcaacctctatctcctgggttcaagcaattcttttgcctcagccttcgcatcaagtagctgggattacagacgaatgccaccatgtctggctaatttttgtattttagtagagacggtgtctcaccatgttggccaggctggtcttgaactcctgacctcaagtgatctgcccacctcggcctcccaaagtgctgggattacaggtgtgagccaccacatccagcccatctatttgttttatgtaatctaattttctttttaaaaacatggtgaggtggcaaatgtcaaagatgaaccccaaaggaccacactttggcactcatgcccttgtgtagtcctcttctgcattaactccaagctggtctatgactttaaccaacagaacatggtggaagtgatgcaaagtcagttctatgactagcttttaagaagactggcaacttctgtttcctcctcttgagacaa

SEQ ID NO: 341010 - DNA, 1000 bp, Homo Sapiens
ttttttttttttttttttagttttttaaaaaataaatgtttatttcaagtatgaaaagtaatgtttaaacgttgtcccaaaattgtgttcagtttcacaagtataaaataagacttctgaaaaaaagtttacaattagttataaaacacttaagaatatattttgacattcacatcacagtgggcatttttgaaaaataaattttgctaatatagcttagaaaccaaaacatatttacagtcccatttaaataaacaagtccttaactgaggaacggtcctccctcaagatgggtagaatttcaaattgatttgtataagcattccttttaaaataatggtaaatctggttcaataaagtagaaattcaaataccttgtttccccggtgaataccatccatttcttacacatggctacccaaagttctcaagccattttaattaagcactttcaatgaaatacaatgaaagtgggaaccaaactctgagaaatctttatcatggcatttctcattagtttcagcgaaatattttgaacagaaaaggaaagaaatttcccagtggcaattacaaaaccacatcttgtaattattttacaggactgctaccaaggcttctgcttctcttctccaggtacatctgtttgtaggtttgaaacatttcttttgaatcttttactgggttttgtagcatctcaaatccatctgcactgaagcttctcttcgagagtcttgaattaacattatctctctcttggctgtctttctgtgtccttttctttgtagcaacaaattttaaccagtcttcttttgtactttttattcctgaaacttgcagaggggcttgctccttcctaggatgaggctttacatccttccgttcttccacagagtttgtattctttagtaagatatctggacataatttaaactccagcatgtttgatttttctgtgttacctttcaccggtaaaaaggtcttatgtttattttcctgtctc

SEQ ID NO: 341011 - DNA, 1000 bp, Homo Sapiens; identical to SEQ ID NO: 159728

SEQ ID NO: 341012 - DNA, 1000 bp, Homo Sapiens
ggctttgttccaataaagctttatttacaaacacaggctgtgggctggatttggcctgcaggctgtagtttgtgatccttgattcagacagtttagcaaggctgaaaagaacacccacacccccttgttacccacagatgggtgggactgtgttggccagaggctgagaggagggtgctcacaggggaacgtacagcatgtagaggccggaaggtgctccagcgcaccaagtgtgggaaagtgggacacacggggaagtttccagaaagcatgatgtcaagttggaggcggagcgctgctgggttgtgaagggtctcaagtccaagtgagggagttagggacttgggaggggttgtttttgggtcggggacctgggttcagccaggtggtgacctgggatggggtggggacagacaatgaagtaagctctgctctttagtattttgcagatgcttttctcaaactttcctgatcctgcaggcaagctaaaccagttctggaagaacctgcgggagtcgcagcagctctgatgggatgagagctgggtgcagactgtgctccctttggttatggacacataactcctgggccagaggctaaaaccccagggcccctgctgtccttcccgcagcttcttcttggtgtctcagggcaaaccctttcgagcagcgcctcccagtggccggaagctgaaatgaaggcagtggtgccacctggtgaatgactcgggaagctgtggttggccctgatttcttctttggagtctctgaaacgcttcctgtcttctgttcttcacgccccatgcccctgctagcgtattactgttctgtgacttccctgtgacctctgcagtactccttaccctgcatttggtctccaggtgtcacctttctgccatgttcctaacactttgattcctgtcttgaaaaaagcacctgctgcatcataaacccagggatgtggcagctgcagccggcttggctttgtgaggaaccaagtg

SEQ ID NO: 341013 - DNA, 1000 bp, Homo Sapiens; identical to SEQ ID NO: 159729

SEQ ID NO: 341014 - DNA, 1000 bp, Homo Sapiens
tttttttttttggagacggagtcttgctctgtcacccaggctgagtgcagtggtgtgatctcgatctcgggtcactgcaacctccacctcccaggtttaagcggttctcctgcctcagcctcccaagtagctgggattacaggcacacgccaccacacccagctaatttttgtatttttaatagagacggggattcaccatgttggccaggctggtcttgaacttctgacctcaggcgatccacctacctcggcctcccaaagtgctgggattacaggcgtgggccaccacaccaggccaattataaacaaaatattttctatatttgtttaatagaattttaacctactgcagttttaaaattacatgcctcaaaaataaaatataagtatttagtactgtctgaaatacgacttatacagacagttctagaagcatttcgataaggcagcaacatctggaagatatttaaccatttctttttctctgaaaacctttctgtctatagaaagtataaaattacaatataatctcagacccaactttctttccataaaatgcacacagaagaacagaacaaaaggtaaaagatcaaggtcatatacaaagcagaagaaagggcaaaagcatgtcttccttcctgtaggatatggcaaaataaaagcattttatgtgtttagttttgaaaataaaaaatattcaagtgtttttgttagatctcctttttttctttactaccactactatgtcctttttcctcttttaataccaccctttggggggcatgaatcaggtctcaaagcactttaaatacctctcacaaaagacttttaggacattactaaatgtcatacaacaattaatacaaaggtaaccttttctgagaaacaatcagagcattttaaactttaaaactgtagctgataattttcttacatattttgtaatcaataaaatttctctgtaatatctttaacaggtaacatttgcatttgattca

SEQ ID NO: 341015 - DNA, 1000 bp, Homo Sapiens; identical to SEQ ID NO: 159730

SEQ ID NO: 341016 - DNA, 1000 bp, Homo Sapiens
tatggccatatttatttatttatttttggccatgtttatctttgtagttaatctttaaggcacaaaataaatgtaaaagccagattaggaaagggagggggccattgcagatcttttttcacctaattaacaactcaggagaccagacaaaagaaacaacaaatagatcctttcctgtgttcgaattaacctattttaaactatttagccattttgttttttatttatttctttgggttttgttttgattctgtttgacccacttaactaaaatgatactatagatccttcaaaagcagaatcatgccagttacacatctcaaatcctttgatctacttacttcgtactttaagaggtaaatttgagaatgaaaatgggagactccaatgcaataacacctacataaggaaaaacacacataaacacccacacatattccccagcctcaaaactaaagcaaggtacacatttacatttccaaaccccaaagcctaaactgtccaggaaaagattctagctttgtgggctgagtttattttgcttctggttataaacaaatgtagtgtatacacacatctgtccaagaaatcttgcacaaggtggattttacatggggtatcatgcacaagattaaaaacaagaccaaaaggtggaaattttaaaagaggaaaatataaaggctccaaggtttaactgctctgggtagaagagatcacatctgttgactgaggatcacagaaaggcccaaaacgtccataaatatccttggctcgtactgcaaagtagtatttgctaccagatacaaactgggtgagagtacatgccatgggcaagggaagtgccttgacttccccaatctttttccattgtgagggcacagtggcactgggttcctcatggtaagcatagagatggtagctatcaacagtggcacagcttcgatccacctccaggacactccatgacagtactatgccattttgactctgaacgcgtgct

SEQ ID NO: 341017 - DNA, 1000 bp, Homo Sapiens; identical to SEQ ID NO: 159731

SEQ ID NO: 341018 - DNA, 1000 bp, Homo Sapiens
ttttttttttttttttttttttttttttttgttttgtacatactttttatttgttgaataaatgaatatttgtcaatatgtacataaccacatagagcgagcattagatttagagagcaaaatatttgggttctaatatgcaaagccacttaccagctatgagggcttcggcaaagaactgaatctgagctcagctccctcaactgtaaaactaggttattcggacctatgtggcctaccacacaggcttattgcaaggttcaaatgcagaaacatatgaaagtgctattatgaatacaacttagagcaatacaaacaaaacaaggaacagcaatggaatttcaagctgaaattcacaccctcggattgtacccatgtactgatggagtcaacaagaaagtgacaaaatagctgattactaatgagaacgaatatgccattcttctgagtgggaagaattctgcaacaccctgtagcttgtcgctgcaattaattacttcccaaacttcacaaagatgtcagagacccaccatcaataattctctcacagaagcacaagggccaaatgtcccacgtttatttacatatgaaatgtgtttcatacagttatgatggatggagtgcataacacctgacagcagcaagaccttttgaggaaccgaacattgactacagtatatcatgcaagtatctatatatacacaaaagaattccttttcttaaaaaaaaaaaaaaaaaaggtacaaaacatgttcagggataaatacaagatacaaaatgcaaaagaaaacacaaaacaaaaccaaaaaatagaactctctcagagaactataaacggaagggacagaagagtacctctgctgcattttaataaagcagaactaccgacgttaaatatacttcttgaaatggctgaactaaacccgggtggctcagtgcttaaggtaacggccaattgcaatacacaggcggctgcattgataagtcggtggttgaagtt

SEQ ID NO: 341019 - DNA, 1000 bp, Homo Sapiens
ggcataacacaatcaggcttttttttttttctttttccttttaaatataaggcaacttgccaacacataacttaaaactggtcttcagtcacattgcttcagatcactagagaatttctggctaacgaacagtagtggatagtgaacaaaatgcaaaaccttaaataagaaccatcagctgacattccccagagacaagaggaaaggtaagggcttatttcatctgtaaaaaataaaaaagcccaattctgcatctttaacagaatggtgcaaaaatttgtaacaaaacagtctaagtttaaaattacagaaaagtgtttctagccaactaattgtcgcttgggatgagacgtgctgagcatggagtggatgaaggtatgctctaagaatggacagagggcaggaggggcttgtttccaatgtaggcccagctccaggtgttagaaccatgctcatttggtaaaggaagtactcaaagagcttaaggctttgtgtttgttttttttttccttcattaaactgaggggctgcactagagggtgaatctacctgtggggccactcacacacaatgctactcaaacccacactacattcatacagaaacgtaacgtttaaaacttacagtgtagagcaatattcttagccagtgtagagagaaccaaatgcatttttttttttttggtgtttttaatcccaaactccaatgtgatcattccttacctacctaattcctcaagtaaggtagattttgtttttgttgagggggaaaggataggggctgtggggaggtgagttaggggacaggcaacagtgagaaagggatcttgggtatgctcaaaggtcactgtatttttctaggtttggaaaggggagtctggaaccaagatgccaatacaaagactttttccccccatatctcaagaaatggtcaaatacttccaagatgcccttgagatcaagtgtggcaagggcaagtgcagtggctgtgggatcaatat

SEQ ID NO: 341020 - DNA, 1000 bp, Homo Sapiens
tcatgcgttgctcaagttggtgatgctctgagggtgatgctgttgccatagctgtttctgttggaccgcaagctgttgagactggtctgaagttgataggagatttacaagaggagacacacaatttgccggaatgatcaaacctacaatccgttgcccatcttccgttcttagccgcacgatctgcatcttcacgtttgtgccactgacagatgctagaacaccctcaacttttgtccagacactcagcactgaaccacataatacataatatgtacggcaacgaagacctatttcacaaactagccccaagcttgcttttttgcaattgccgcgccaataagcatgagtacaagtatctgcagatgaattatactgatctaaccagtgcatcagggcatcatctgagacgaccttcttatatttcttttttagatcagcataaatttctaatttgagctgcttcccagtatttggtcgataaactaagaaaagtttctttttaggattcacttctttaactaagatggcagttttcttgttgttccttatttgcaatgacaagtaaaagccatcgtctggtcctgtcagctcagcccaaatcttggtagcttcctcccatgacattcccctctctacactaattgtgtataattctacgtggccagaggttgaatatcctggagtcagaaactttttaacatcacttttccgcactttttcatctccagaaccaagatctaagattcccatatcatatcttccattttttttggcattttgaacaactgcagtaagtgtgtccgcaaaatactgaaataacgcattctgctgatgcacctccatgcctaaaattctatttaagaattttcctatgttgttataatctttatcgagagtaagaattcccgagcgatcttctacatttatcaggccaacgcctatcagtccttgtcgaacatctttaaaaaattctccaggatagtctggaggtggtgat

SEQ ID NO: 341021 - DNA, 1000 bp, Homo Sapiens
gaggcacctgtgggactttattaggtaaacagaccccagctccagccacaggcttggaccggccagctgacagtgcggcctcagacacccccgccaggttccctcctccctcctctctcagggtcaccagtgtgtgaaagatcggggcatgccggccacagggggaagcagggttcaggctgccccacctgggtctggccctggcaggcgccccctcacctggctctgctgtgggagccgagaacaaagacatcacctgcctggctcctgctgccccgggggctcagccagcacccaccctcacagtggcctgggcaggggctggggtgcaaagcctcaccctccccctgtgagccagacggaaaatgcatctcccaagagtgtctcgaggggcaggaaggaggcctgcccctccctagccagtgcctacaacagggggtgccctggggggcagaacgaccgaccgccaccacaagacatcctgggggacagaggccctgggcacagcccagtccccatccaggagcatatcctaaatgtgcaggggccggcaaggcaggggtgggaggggtccgcggccaggctccgtgagctgtggatctccctgtggactcaggatggggagggctcgtccccacgcccaggcccttccgccttcagccagcacatcttctgctggtgctgctggacagcatcttgcacgcgggtgtccatcatggcctcggtcaggaccccgtcctcggaggcatacgccgtggcctgccaggacacggccagctgagcgatctcccggcccgacatgccctccgtcagccgagcgacctccgagcacttcctcccgtagtcaaactgggccagcttcaggcgctgctttccttctgtggccggcttaagaacatacttgtcaaaatacattctcaccaggcgctcccgttcctcctgccctggcaggtcgaagtggaccatctcattgatgcggtcattgatggcccagtcgaac

SEQ ID NO: 341022 - DNA, 1000 bp, Homo Sapiens
ttttttataagaaaaaatgtctattatttattacacaataattctgaccaccaacaaccaacggcgggggcgggcaggagagaagaacatcttgcttctcaacaaactttcctcccttgctttaacatttttgaggattctttcccaaacctattacacctgtattatgatggttacaaattttccaactcttccactccttccagtgcattatttttagtatcttcattaaacgggcaaaaaaaaagatcccctacttgtaataacaaaacaatgttggaaactgtcattaaatcaggataagtgaaaaacagatctgttcccagactcgcaggactataagtttaggaagtacacaaaaaaattaaaaattaattacacaataggatacattaaatatgtgcagctttttgtatgtgaatcatacctaagtagttttaaaaacaaatgatccaacccataccaccaactaataaagaacaaacgagtcatacaaaagaaaaatcacactttttggtttactcctacttgagttaagaacactaacaataaaatttgcatgcaatgaatatggttctctaaatacaacagatgaattattttacatacacatcttatttttatttatggagaatcggttaataaacacattttaaattcaatatattatgtatttatgagcgggaagcaaccttaaacattttaaactccagaaatatacaaaacaattataagtgaaataatacaaagtcccttgtgttttgatcctggagtcaaaccatagaaatctcaggttattaagagaactttgaaaaatattgtttagaatattaaaaatcatgtgtttgggggagggagggaattaacagcctttctttgccttaaaatactttacgttttatgaaattgcaattggaatgaagcagctcctaaagtagtcagtgttcagaggaagagaaaattgagcacaagagccaactaccattttactcaagtccat

SEQ ID NO: 341023 - DNA, 1000 bp, Homo Sapiens
aaaatcaatcagaaatttatttttcttatgtaagtacaaaacacctcttttcatcagtggaccccactcctaggcaacctggccatggtgcccggatgcaggcagtattcaagagtttcttccaaagtcaccagggtgaaaagccattctactacaacctctacatgaccttttaaagtgtacaacttataggacagtcctttctggagtactgtggagggtggatcaaagcttccagtgtaagtttattgtctggcgaaaacaccagagccaaaaattccaccaaggccctggaaagactgaagtcccctctgtctcatacagtaatcatccatgagatctcccggagcctgggtgatcattacgcccatgatacctgaggcagcgtggactctgccaggggctcctcagacccaaagtggagctcactttggagagtcggagctcatggccgttagcacctaaggatgtggctgaaaggcacagagcaagaaagggcttcagagaccaggcacaggttaattttagaactggagcacacgtgagagttgtagtttcaccaccaagaagcttattctctctaagcttttgaatctgcagcaacttaattgtgtgtgtgtgtgtgtgtgtgtgtgtgtgtgtttgggggaggaggtgaactgggctttgatagatacatgaaatgatgaaaaaccaagaaagagagctgggtgtggtggcacgtgcctgtggtcccagctccccgggaggcttgaaggatcgcctgagcctaagagtttgaggctccagtgtgctatcatcacatctgtgaatagccactgccctatatcctagacaacatggttagaccatgtctctaagaagagagagagagagagagagagaaaacaacccaaaacaagaaagatagattgatagattgaggcaacacaagcatccttaggaagagaaggaagatctgatgactgacattaacctgttaatttataccatggctctg

SEQ ID NO: 341024 - DNA, 1000 bp, Homo Sapiens; identical to SEQ ID NO: 159733

SEQ ID NO: 341025 - DNA, 1000 bp, Homo Sapiens
cagagctaaacacagtaatcatttattaattcctgagaaccattatgaatcatataatagtttaaaagagattcaggattaccactttcaaatatatccactgacgcttccaaagtagtttaatgaatgaataaacctatttgtttgtatataaatggtatacttggaagagctcaaaacttttgtattacttatatgtgcacatacattagacacttccctatcatcatttttactcccttttttcttagcaagccctttctttccaagtaaacttcagtcagactccctctggctgcccacaaatcctcaatcactgttggtccatgaaggtttactgcgttcatttaggtgctcactcctccctgaggctcattccctcctaaaacttctgagcaccccggaattactggccccatgtctctctctctcctttaccaagacagctgctgaggctgctgctatgcaggtctacctgcccctctctggcctctgtcttgctttaacacacaatgtgcctaccccaggtagtcagtatctggccccctcccatctctttgccaagcagagaagctatgaagaaagacaatcaacaaaatggtcctgtactctaggagcttaagcctcattgagatgataacctcaactcaagacataagggccatgctatgtaataaacaggaggcagcactaggtccaagtgaacctttcactcaatgacaacttaatttacgtacttgagatgttgtaaattctcctgtaattagatatattatggattcaaattttaagcctcctttatacccttccccactccaaaaaaaaaaaaaaaaatccaaattcaaacaagtcttctgaattatctaccacttgggaactttggtagcctatccagcatcttttcagaggagtgaataatcaagttatgtgagtatatttagattttaaacattttcctcaaacatattcaaaataattctacaaacatgtagattatcta

SEQ ID NO: 341026 - DNA, 1000 bp, Homo Sapiens
tgttgtttttttttttttttttcaaagagtgaaatttatttatttggaattcagaaattccaggttgtatgacatcagttactcaataagtgtgaattctccaactcttcttttaatcccattttagaatttaatatagagatctctgattggcaggaacactagaaataaatgttccatggccagtagtgcaaatgggggattgtaggttttgaaaaaccaccctaagccatattaagggggttggaagaaccatcgaagcctaaggcatagaagaaaatttggggttaagaaagatgaagaacaaaaaacagctttattgcttatacatgaccaagaaaaggaaaacatggcaaaaaaaaaaaaaaaaaaaaaaggcaagatgtgtattccttgcaaaagaacaagcctgctaacttgggaggaagggaaggtcaggacccaaatagagccaatttcctggagatggcctgttctactggcacattttcctgagtctgtgcttaaaacctttcaggtactttcagggcacagaaacaatgcatgctaaaaaatatatggccaaagctccttccaacaaagatttaacttgctccaggaacaaaataattgctttaggttaagaggtagtaattagagactattcttctccctttagacccccactaatcccaaaaataaaaatacacaccatggaacactgacaattgagtaccaaagtattaaaatttaaaataaatatcccaaaaggtagcacctgctcatagttaagggatagggcacctctgtccaaccatgtattttaagaccaagcactttattagaaatctgtcccgtaaagagaacaaatttagcagttagaactaaaaataccaactcatggaatgtcatcatagttgtatctactgctggtgtcttatactgtcatgctactgtgaagtaattccgtattacacatcaggaaagtaaggccaggaaggtgaacttacctgctctgggc

SEQ ID NO: 341027 - DNA, 1000 bp, Homo Sapiens; identical to SEQ ID NO: 159734

SEQ ID NO: 341028 - DNA, 1000 bp, Homo Sapiens
gctttcaggaaaggtttattgtggtgagtgccttctgtacagtcgactgcaaatgaaacgcagaggatgggtgcccagaagcacctgcggcagaggcgcacgggaagcccggggcccaggctcatgcaacacgacgctcaccgcggctcgggccgtggggccgtcagagaaacctttttaaaaaatggagatgaatgttacagaattggacaacccgaactgcttttcaaaaccagaggaaggaggttcttagccgttactcagataccagtgctggggagggaggcctgacttcagcaacagctgtgggtgggctggaggccggcgcagcttggggccccccacgccagctgtctcagccaccacctgtgcggcgcttgctccgaggggtcagcaagagcaactgatggctgccacttccaggccccgagagacaggcctcacgtaactttactgcagccgaggtccaggccgtggagggggtcctagctccgctgcattctgcatcccaagtgggcacgtggaggaagggtctgaaggaaggctccggagcacaggccctggtgttcctgtgaggacgctggacctgcaggagcggggagctgcagtgccacctgctgggtaccacgggccgggcctggggtccacgcctttgggttgggtgtgtctgatgtcttgccaagcgcctggtcctgtcctcttgagctgcccttgcccagcactgcactctggaggtgggtggtgcaggcagtggagggacacaggccagctcaagcccgctggtggcagggcgttttcccaccgggatacgggaagccacctgtgtcagggctaggccctgggatcgggagttacactaccctgtcccaagccgagggggccggtggaatgatttgagcagctctgggagtggggaaaaaagacgactaatttccaaacccgtttgttctcagataaaaagcagttttataaacccgcaatctgctccagattcaagcag

SEQ ID NO: 341029 - DNA, 1000 bp, Homo Sapiens; identical to SEQ ID NO: 159736

SEQ ID NO: 341030 - DNA, 1000 bp, Homo Sapiens
tttttttttttttttttgcccattgcaaagaacacatgatttattcaagacaactcgtcatcaacagcactgactcaaggaacaaaacagatgaaaaaactaaagcaaacgttctgaccctctggagtgagacccgctgaattcatacagctcaatctgtaagtgtccaagatccagggggcaggttctcaagcaggaagcctcaggcactctggctctgtggggacctcccttgggcatctgcttgagaatctggggaagggacattatcagggcaggtcctttctgcaggcggtgtcctgctgggagctcagcctaaccaaggcctggtccctgtgctcttgaccttcatctcaaggtcaaggagagggcacttgacccaactctgccagcgaggcaaagtaatggtgattcaagtagtgtggttccaggagggaaggtagggggcagacaagagtgagtgcactagagtcctgggcagtgtctgctgggtcccaggcagtggcccaagcttatgaaggggttggagaaggggctgaaccaccagctgacaagtcctggagagagggtggcccaggtgagcaggaagcatcatgcctctgcctcatcctggaggtcctggagtcagcccagttctcttcccatctttacactcaattccagtacagaactcagagcccgctcagccaggacctgctcgaaaaccaggcagttcctagaagcatggggagaagaggctgactttgatcttggaaaatgaagaggatcttgtctccaactcctttctcccttcctatacccatgcctcatccccagagcacttgccaatgtgcaatacatagccaggagtctgaataaatagtcaaagtctcccaaatactgtgctctgggagaggagacaggcaggtgcggaaatccaggcggcatcaaaggaaaagcctggtagaagagccacctggggaagcctttcctggcccaaagccgggcttggaagggcagc

SEQ ID NO: 341031 - DNA, 1000 bp, Homo Sapiens; identical to SEQ ID NO: 159737

SEQ ID NO: 341032 - DNA, 1000 bp, Homo Sapiens
caaagcttaaattttatttcaaaatggcatattttgggtcaaagtatgaaaaaacaagggcatagttatgtttttgttaaagtgaaaaaaattaggtaaagtttatgtaagtagactgatgacttttgaaaatatatcattaagcatgtacttaagtgtcaaaaacctcaagtcaaatcttacaatgtatttcaaaagcaaagctaaaattcattcactgtggttaaactgcatttcataaaatatctgttgaaataaacctcattaaaacataattatacagatattttaattgtatatatatcaggtacacggaataaaagtcctactctctagaacatgagaagtcaataaatagaaaagatatacaaagtggaatgaacatagaaatgactaagcatgtgatcttcacattcatacagtttttcaactaatcttttacaattaaaaagtcatttatttgaaactgtagagttgatatatgccatattagtttggaaccttacaaaacaactttagtggtgttatttatgtgtggagagaaaactgtgtatgtaactatcatgtttcaagggacatgacttaacagtgaagttttttatgttatagggaagaaaacaagtattagtatcagttatcttagaaatgctatctaaactagaatgacatttgttcagtatgatatgttctttccctaactccattctaattgcttaaaaactatcaagtgaagttacaaaagttaaaccactaaatgtggcatcttttcttacacaaagtatcttctcttagaaatgcggtatttaattaagtaaaccttcttggtgaccccagttataatcaaaagaggccacgaaactacagactactgacgaaaagtgtcagtgcagacactttccatcaatcaacaggcagtccaagggacgcaagagaacacaagtctgggtaacatgaatttggtaagaaagcaggctaaacctcctgtgtcttagtattcgaa

SEQ ID NO: 341033 - DNA, 1000 bp, Homo Sapiens
tttttttttttttttgttaatagcatctttattgtttcactggtgcaaaaaaaaaaatcataattgtgatgcatttcctgctaaatttacaatgaaggtgatacataaattatatagatcacaagttttcttttatactatttaaaacccaattatattgataaatatgtccagaggacaacatgggttcttaatggatggctgagtccaaatatgcaaaatatagcttctggttttgaccatggtgctttaaaattctcaaacatgcattaatatattctagttttagggaaaatcttacacatggccttatcttgcaatttaggggaaagcccaagatgaatttcacatacagtattcctttcttctaaattaatctcaaactggactagaaaacaagagacagacgcttttgggttagtactccccaggaatgaagaaaatacacaatcaacaatgaagcaaacaaacaaacaaaaaaaaggagagcttcattagtagccaagataagtgcttgtgggttttgtttttttttttttttttttttttacagatcacaggaattttaaattgcagatcagtcatgctacttggggtgatcagaaagacttgaacacttaccaagtgaataattttattaaggtcctgaaggtgagtgtccggaggtgctgggtaaaacacatcacaggtaagaaatgggaaacctacctcagcatttctgaaaggcacaatctatggaagggaaacctagcgtaataaaaccctcactggatgtacatggaaaggagtatggtgagctatttcctttttaaaggatgagaccttcataaattggcccctcggattctggtgattcccgccgcaagcgcaaatgctccagtgtgttatgaaaatgtttgttaatctgctctgtttcttcactggattcaagattcgggaggtcttctcgaatcttttggataagctggtttaaaacctgaattgttaccgcatcattttc

SEQ ID NO: 341034 - DNA, 1000 bp, Homo Sapiens
tgcatgttcccgtatgctttattggaatgctgtcaggtccgcgccttccacctgggccctcacacacagcaaggagaggccccagcaccggtcccaggcccacctgcccgcacctgcagaagggaaaggccatcaccctccgtggacggggtctcggccaccacatccaccttctgaaggtggcccagacacctccacgctgctgactgcacttcccatcaaaagggactccctggggcagagtgggccgtccccctacccccgaggaaggcaccctcctgggcggggacagaccttggctccatgctgccaagtcaaggtgctggcgtggaaacaggcacatgtggaacaccacatcccactgtccaaggtggagtccacccctcctcggagcactcagcccaccagggtccaagcagccctcgggagataccacgcggccgcccacgtctcagcttggagaaagacactcaaagacccccacgctcagctctcgggggctggcttcctgggccctttgtgctggctgctttcccggtggcttctcagcaccttgagcctctgatgccccgcctctgacctcaggtccaactacagcaggtggctgcttcggtgatcaaatccctccgtggcagccaaggacaccggccctccacaccagctaccaagagggctggtgcccacagggaggaccgggcgccaggagggctcgctgaaatctcggtcccatcctgttctgcaagtggctgagtccctagggtgggacgagcacaggggctgaagggcccaggctgctccaggagtgctgcagacggcgaccgggaagtggggtgaccagggagcatggccaaggccagagtgatgagcatggtggcagggaggagagcacctcacgtacaaactgcacgagcttcgggcgcatgcatggctggccaagactgagggtcacacagggcagacaagggagacgagtcacacgtggcagcacatcatccagtcc

SEQ ID NO: 341035 - DNA, 1000 bp, Homo Sapiens
aaattaaccagatctgtcttttaatagttaccagaatttagatgttaattccccagaggaaaaatgtccatggcacagtttttctggaaaagttcacatgtaggcagtgaagcttctgaagttaggcgtcaaattagtagtgacaatcttttttttaatcttgaaagtccctagttttaaagaaagtagaatccatctggggcatgtctgcatcacagggtatcactcaagagtcatcatcaggccaaaaagactctgaagggaaccaggagggtttggcccttgctgtggaaagatgctactgaaagtataagagaacaccctaatgcacgcgtcaggcacgaaaccgtaccatgccccgctaagacatgggaccagagaacacgtcaacgtcaggccgctccaggaaaaccatccacaaagacaacagaagctaacccgaggtcgacactgccatgaagagtgttggctgaaaccgcagttaccagtgtctttactggacgcgaacatccctaaggacacggctgtgctgcttcctaagcatacgtgaccacgatactgtctttccccgggtctccttagcgccatcactgcaccaggcccagcatgcctcaagtcctccagagccttctcctgagacagcactaggggccacgtcagaccccaggctgcagcccttcaccgtgcccgtccccggtccggtctgccctgctggggccggtgggtatcatggggacccctgtgtagacacggacaccggagagcgtgggacaggaggcgtctcagagctccccacccacacactcaagggtcagcgtcactcatgtttccttctgttcccatggtgcctccaaaagggtttccaaacaaagtcatcattgattaccctggagtatgtcaataagccaaacaccagcagccagataccaccaagctagtcaccactttaaaagaagatgagctggagaacgaagcagccctctgatggacccagtcagtg

SEQ ID NO: 341036 - DNA, 1000 bp, Homo Sapiens
acatgcatatgccttttaatattaagatttcattttcaaagcatttcaaacaatttgcttacatagaaaaataacagtatagttttggggggaggaaggggtgggttacggtccttactacaaacaaacaaacaaacaccacttgatttgcacttcttcactgttgtgcccagtgattgataacggggcacaggccagtatggatggcatgtccactgtgctgtagtccagacacctttgtttgtttgttttagttccttcaacctcttcctgctttgactgactttttgcagctctgttgcaaaattcaccatctttcctttcttctgtttgtttgtttgtttgtactatagtggaggtgtgactaagcattgaagaggctgaatgcaacaggaaaatgggaaagagaagtgcagggcctgaaaaacccattagtcatctgctatatcactgaatgatgcctaattcttatcagttacttataggtagtatacttagaaattaccttaaactttctagctgtcagtcattttccaacagaagctagtatatgcaataaattagaccaagtgaaattctttacaaagcatacaacatatgtaccaattctagacttcataattaaaacaggatatccacatcatagttaaaaataacaagtccccaaagtgacgagatatttaatgatctgatttcaaaaagccccggattgagatcccaaattccctatcaattaattacagtcttataacataaacaaacttagaaatttctagatggcaaaaggtttctcatgcatttaataccaaggtcttcaagaaatggtgatgtcaaaagtcatcatagtccataaagataaaacttctttcacaagtaaattgggttaaataactgatttttcaccctaacacactatcaaaaagagagagagagaaagcagagagtgaggtatagcttattagctcaaaatggttataaatactgtgactccttaagactc

SEQ ID NO: 341037 - DNA, 1000 bp, Homo Sapiens
tttcacttttcatttctcttttatcacagcatacaaaaaagaaatcaacagaaacacaccaaaacttttcccaatatcccttaaattagcagatttaaaattaaatcttgaagcagtattttgtgatactttgattcaaactctatttacaaattaaattgcacttataaagatagcaacatttctattttgatagtaggttattttgctttattgtggttgtatatctggatataaaacttttaaagctttcttgaataaaaatcattattttgcagtccataatttacttgcccactgaatgtctgaaccagtgttctctttttgtgtttttctgctctattttattttacaaatggcacataccatcagagtaggcacagtctgacactgcactcattatgagagacttattcagaaaaaaagtgtaaggaataaaatattagcagtcaaatcctttggttcatcttttcaaaaaaaatcaaccgatataattacaaatcattgataattcatctttttggttaaaaacaaatccaccaggtagattactgattaaaatgcaacactgctttaaaacaccacattcctattctcatcacactgttcaaagatgccattgtttacaactgattggacatgacacaggatacagtaaggcacaagtggatggtacaaataaaaacaaatactttaggacttgtttttctgcacaaatactaaaatatgtaccgttttcaagataaaataacaaaaaagaaatacatatttttgttatgaaatacctatacaaaattttaaaatttacaccatctgagctgccaaaaaaggtttaaaaagtatccatttttccccatacataaaactatctctcatcagtaggtccaagggaacttgggggattcaaaatatcccagcactttacggaagggaggaggataaaaattccccttcctgctttcctttaccccaacataagacaaaaacaaaggtcgtatgt

SEQ ID NO: 341038 - DNA, 1000 bp, Homo Sapiens
cctcttttaaaaactctatttggtgcgtgcccacggtgctgcgtcccgtcagacatacctgtatagatctctctatttatatatatatatatataaaaggttctttagcagttaaatagattccaatatgaacgtctcccaggacaaagctgcgtctcgcctctgggtcacacgcatctgtgcggctggggtgtatgtgccgcgtcacagcagtaccatataaatacgttgatttgaacgcagtttccctgtggtggtaaaaacacattcctgacaagtgacaagcagaagagtccggcagctgcagcgcctcactcggctgggacctcgtacttgaagatgacgctgaagagccggccgcccagccgctcggccagccacgcgttcttgatgacggccagcttgaggctctcgcagcgcagggctgcgtggtagtttgtgtggacagcacggcccatgccctcgatgaccaccagatccgcgccacgctcccgcaccagtgcggccagccccttatccaggcggctgaggtcgaggcacggggagctggagcccgtctgcaccagcagcagcctctcttcctggagcgcagagtgcacgacagggtccatgcccgcaatacgctctgccacgatgagggactcgctgtgggtcacgtcgttcagggcggggcctgagttgcacgccaggatgacctctgtccctctaaggagtagctccctgacaaaggggaagactcccaaaatgatgtctattccactgttatctgcgaaaattaaggcacatttatgagggggcccctttaatctctgaagccactcgctgtaggaatccacgagccagggtctttcttgtaacttcctctttgcttcttcaaacccaaagtaggggtcggattcaaggacagcagacacggctttggccccccagtcgaagacattccccgccaggaggcctttcaccagcgccagctgccgttcctcccagcccagcgcgtcca

SEQ ID NO: 341039 - DNA, 1000 bp, Homo Sapiens
aataatgactgtcccacactttaattcctcaatgatatgtggatgctaactaaatcagatgaaatgttttctttaaaattctgtatatatttaagaatttctaggaaatgattatttaaaatggagtttctaagtaattattttctttatagtttagtggagtaagaaaaataaatctaaaaaaaaaacatcaaatctaacctttatcaaagccatcgaggaggttggtaaaatactttgcaaaaatcacagctctgaaccacatagaatgctgatgaacttaaagctttgccagtttggcaagtcttccagtataatacttgttgtgcctcagtacattttaaatagacagctagagtttactaaatcctaggaatcaaataaaaaataaatgttttcttcactgaaggggaaggcttttatatcccaatagaaatagaggaatttcaagttttgatacaaaaacaattaaaacaagataaaacccaagtggaagctcagtccatcttttgaatattaacaaaatgaggatttttttaaaacttatttctcccattttgtttcctttaaacacatacactcactcactctctcaagaataggtagcacaccaaaactttatctgtgttataggatgtgtacaccttcatggtttattgtggttttccttaagttttatccttattaggatgaagttcatgcatttctacactactcttaactaaggctcaagagacaataaaaacatagaagtaattttttaataaaaggaaataaaataatcaagtactctgagtattttcctccattctcttatccagaattttaaggcctctgaaaaataatgaaataataaaaatagtggttttgagatctaaatttattaatattttggattccttttctcagccaaaagctactatctgaattaagcttttcagtttaaaagcctggaagaccatccttagaagacattaaaaaattacttctgatacacaca

SEQ ID NO: 341040 - DNA, 1000 bp, Homo Sapiens; identical to SEQ ID NO: 159740

SEQ ID NO: 341041 - DNA, 1000 bp, Homo Sapiens; identical to SEQ ID NO: 159741

SEQ ID NO: 341042 - DNA, 1000 bp, Homo Sapiens; identical to SEQ ID NO: 159742

SEQ ID NO: 341043 - DNA, 1000 bp, Homo Sapiens
ctgtgactaattcagacaatctatttgcttagaaaagctggcaaaaaaaaaaaaaagcacattacatgaatatgcttcatttaagtacatgctttcgagctgatttaaaaagaaaagttgaattatggtttccagagctttaggagtccatcttcactgtaggtagcaatcgggttctgatgagggtgatgtgcaataccaatcacatccttctcgtgcactgtcaaagttctctccagtttgccagtgactgtactgaaacagtagagcacaaagtcctcccctacacagtagatccattcaccacggggagagagggcacagcaaacaaagtccccaccttctcttttaccagaactgaagcttctgacaatctgcccctgcatgttcatgatgaccaccgtgtttgatctgttgcacaccacaaagtgctcagggtttttaggaagtagaatcacactgttgacggtaatatctgtccctgcggtgctgcccagggatttaaaggtatttgaacattctgtggtcttcatattccagatctttacagtgccatcagaggatgcactaataatgtaatgtccatcttgtgtaaatgttgcttcgttaacaaaggaggaatggccacgaaattccttcagggttttcccagattttaaaccatgaattctaattgtctggtcaaaagaagcactaaggatctgactgctatccttagaaaagcttagacaggtgacacccttactgtgtgccctctcaaatctccttaaacattgtccactctgaatcttccacaccttgatttttccatcttgggccccagttgctaacatttctgtatctctgctgaaacacatgcagaggacagcatcatccatcatcataaagttatcttgggcctggtacttaagatcctttctgatttttccagtagtaaagttccatacttcaatgaatccatcaacagacccagtgaccaaatactgaccatctggagaaa

SEQ ID NO: 341044 - DNA, 1000 bp, Homo Sapiens; identical to SEQ ID NO: 159743

SEQ ID NO: 341045 - DNA, 1000 bp, Homo Sapiens
gtgggcactgcatcactttatttctttggttttcaaacgttactctcgaacaaggcaaattcagtctcccacctgcctggccgctttgtgatctctcactgaagatgggcctccagctccgagaaggcgctcagcagaaaggtggaatccccaactgacagccaggctggccgaggactgcagggtcccagcaggtggatcaagcacccacaagcagagactctgggccataatctgcaaacagagcctgcatctcccagccttgccccacctggtcccacactccttgcaggggacaggccagcccctcagtgatctccagtgcctcaagatctccggtgcctcagtgccatcctttagaggccagctgtggttctttctatacatccctgctgctgctcctgctgacctggcaccttctcccttggggatgccaggcacaagctgctgatcagctctacatttgattttctttctttttttttttctaagagatgaggtctcactacattgcccagggtggtctctaactcctagcctcaagtgatcctcctgccttggcctcccaaagcgctaggattacaggcataagccaccacacctggcccccatattcgagcctaatgttcctttgggaaacaactgagtaaagaggatgccaacccccaaaagaaactgaagataacgttctgcccagtgggaccgatgatcatgctataacactccttttgtctccaggaaaagctgaaagcagctctagctaaccaacccccctctaaaccccctgacatacatacggcttccaactccagcaagggggccaaccaacccactcaaatcaaaaccaaaaactaaatcataacagtaaaaatatgaccagcaaacaacgaaagaggatatctctggtcccacagtttcctacgggagaccagatggctgatttctggcattctctgtcctggagccagaaaataacacaaatatacccttggacttaggg

SEQ ID NO: 341046 - DNA, 1000 bp, Homo Sapiens; identical to SEQ ID NO: 159744

SEQ ID NO: 341047 - DNA, 1000 bp, Homo Sapiens
tactttcattagtgctcatttattatttatgtagaaaagtttaaaatgctcccaatgagttcatcagttatcaagctcacatgagttaggcccactctcctttggtttttcatctcataataagtcagcaaaagttgacatttatcttactagacatttcccattagccctaactgaaacagatatcaaacaccctagattctcttcagtgcaaagtatctggagtcacagcaattttagagacaagctagtgcaatctagtaattttcatagtcgcagaaactgaggcctagaagtgatttgtacatgtgagcagctagaaccaggacaagaactccagaacctgggaccacgtgagagtaaaaagaaagggcaccgagtacaggaacaacaactgacacatttcaggtggaaaaaacaagtcacataactgaaaaccaaaatcacagttacataactattttatattagcttcctacatataaagtataaaaactcagctatacatgttatgaaattgtacaaacttacacttgtttatggcctaaaatttgtataaggacacacttatacagatttcataaacaatggccatttttagaaaaagttatatttgtccctgaacataatattcataatttgctttcaaaacaaactcgaagtaaggattggactttaagcttccaagctgatccgcttgtagcaggtctttcacctccggtaagtactcactgagctgaatgccatcttttaaaagtttctgtaagatcttcacaaatatactgtctttagatacttcaattggatcatctttgccatcagaactggaccagttatctctctgaagagctttgcaaaggatttccagttttagatcatttatatttatatcttcttcctcatcaatatattccaacaagtccaaagctttcttgaaatcatattcattagctcttctattttcttcacagatatatagaccaatgagttgtggtgcagt

SEQ ID NO: 341048 - DNA, 1000 bp, Homo Sapiens
agaggtgtcatgtttactttttatttaggagtacaaactgagacaaaatcatccttccagttagtgaggttttgagggatcatactaaagagaagacaggaaaacaccagtaatggtgaaggtcttgagaaaaggacaggacccgcagatagcgagagatcagaggaggccctaatttctttcctcatttcctttccaaatatcccaaatgtgcaatgcatcacctgagacagaaggcagaaagcatcaagctctctgtttatcccaattcaatgacaaccagaacttattttttttgagatggggtctcgttctgtcgcccaggctggagtgcagtggggcattcatggctcatcgcagcctccaactctcagtctcaagcaaccctcctacgtcagtgtcctgagtagctggaactacaggcatgcaccaccacacttggctcatttttaaaaaatttcttgtagagacaggatcttgctacattgcccaggcttgagtgccgtggtgcattcacagctcaccgcaggctcaaactcttggtctcaagcgatcctcctgcctcagccttctgagtggctgggactacaggcatacaccaccatgtctggctcatttcttaaactttttgtagagacagagtcttgttttgttgcctaggcttgtctcagactcctggcctcaagtgatcctcctgtcttggcctcccaaagtgctcgattataggtgtgagccgtggtgcccagccgacaaccagaactttccgcagaccttgtgcttttggaccttgggtatcttctgcaggtcaagccatcctgaccactctgagaacttacccagggtgactcagctgtcactccaggtcactcataagcccaacgggtagctccacccgtggacagctggatacacttgtgtctgttctctaaagtcatggatgacctgacaagagggaaaggaaagaggaaacctccacttccctgggcaagttggaaaaggg

SEQ ID NO: 341049 - DNA, 1000 bp, Homo Sapiens; identical to SEQ ID NO: 159745

SEQ ID NO: 341050 - DNA, 1000 bp, Homo Sapiens; identical to SEQ ID NO: 159746

SEQ ID NO: 341051 - DNA, 1000 bp, Homo Sapiens
cattataaaatgtcaaacatgacccagtggggttgtgattagcaattagagaaaccccatcctaggtaataaaaagttttcccaaatagcacctatatgtctttctgactgtggtttaatgagtaattaagaccattcagccaagatttacatttgctgccacctttaatagcactgatgaaaagtagaacttttttttttgacttctttttcactgtgcctctaatcaagaaatttttgttaaaatattaagggtttttaatgtttaaagaatgagacataaaaaagttgcagaaaataaatgataaattcttatttattgaaagacattcagttgaggaatagggatataactgtttgttaggtaagcttatatggcacatgattaagttccactaattcgtatttctgcattatgctttctgataattccggagcattatactcatgcagcagtggtaggaagtactgatgtttttttaaaaaatgtccattcttggccaggcgcagtggctcacgcctgtaattccagcactttgggaggccgaggtcggcggatcacgaggtcagatcaagaccatcctggctaacatggtgagaccctgtctctactgaaaaaaaaaaaattagctgggcatggtggcaggtgcctgtagtcccagctacttgggaggctgaggcaggagaatggcatgaacttgggaggcagagcttgcagtgacccgagattgcgccactgcactccagcctgggtgacagagcaagactctgtctgtctcaaaaaaaaaaagtccatcctcttgataaagcagtgtaacatcaggaagatttagttggggtcattgtctaccatttgagtatgcgataccctaatgttaagaaatcaagtctaagtctaggaaatttagaccaattatttttgatatacaaaacttacatatataaatgcagtagttgtacctggctttcagctatttttgtgttgacattttccatcatt

SEQ ID NO: 341052 - DNA, 1000 bp, Homo Sapiens; identical to SEQ ID NO: 159747

SEQ ID NO: 341053 - DNA, 1000 bp, Homo Sapiens; identical to SEQ ID NO: 159748

SEQ ID NO: 341054 - DNA, 1000 bp, Homo Sapiens
ctctgtgatttggttttctactttggtacacatgagctgtggctgcatctcatacagaagctgacacatctcgcaggaatgccccataaaacagagcgcaaacaaatcacccagcaggttcgcttcacctggctgttactgctgaactccctacttctaagagcacagaagagaacatcgctttgaatctacagataagcgagggtggggcgagcagcagccagggctgccgggatgggagcggccacagacacaggcccccgggtgtctgtcttgagatacaggtggagaagccgcccaagaaattccagcaagatgggagcagctgggggatgctccagcacagtagcctgcctacaggactcctctggctccctcagtcctggtagattctggcatgacaccaaggccagcagtgctggctcttggccctgtcactgtgtctgttttatcctggggccccacagcccctctcttgggcaggagctccgcccctccccttttcatcacccccttggtccccagcaaacccacagcgagacctacacaggttttgcccagctctaaaatgtcttgccctcaaaggcctggagattgaaggcagtatccagaaacttcttcagtgacaccaggtgagtgttcctgtttcctgtggctggtgcagccgctgggtcccggccaacataccatatgggccgtgcgcgcctcaggatggtcatgaagcgtgggctgatgtagtcatagtagcccatgttcttgtgctcctcctgacaccaggccagctccgcacctgggtacttctctgcctcctgcttgatcaggtcgaaggggaatggagagatctgctccaggcgcgtgatggccactttctcctccaggtcctggctgctccgctccttcaccaggtcatagtacacctttcccgtgcagaagatgagccgctgcacctgctcaggggcccgtgctgcggccccatcttcaggaatcacccgctggaagc

SEQ ID NO: 341055 - DNA, 1000 bp, Homo Sapiens
ttttttttgtttttagacaagatatttattttgaagttccaaatgacattagcagaattgtgatttttatgtttactgaatggtgcatgggataaaaaggggttctaaaacactttactagatcatccaaaccctacaatagacacttatgcatcaaaattcttgtaaaaggaccacttccctactccctccaccctcccctcaaaatacccatgttcacaaagaacaaaaccttacagcttaaccaacaaaaaacgtgtcatacaataattctaaggcaatggttctatgaagacaggagaggtagcaggctgaaccgcattcactgaccctatctctcagctgctcctcctcactagtcaggtttttcctgtgtaccccacttcattatttccatcatgcttacctctctgtttactggacattccccttgatctaataccaaacttagccagtctaactgtaactcagatgataatctgaccacttcctggtaagaacaaatggttaatgttgtcacagtgattaataaatacaaatatgaattaatttaacaatgaattacattttatcccatccaggcatgaagaagttaaaacctggactcactgaccctgtgttaaaatttagtgctaaatgtaagcaacaacactggagcattgttattttatcaagacacctgaacatagcaaaattaattttgttcatttttattaacataggacatactaaccaaatattatcatttaataaaatcaacgttacaaagaaactcactagcaaataaacaaacgatattcacttgactcttctcttggttgaatgattttctattaattagtagtacacagctatttttatcaatttatgcttaaactgccttatgatttcaatgaaatttcttagcttttacttgttgaataattttttcaattgggaatcttttcataattcaaaatagttcctgaaaattaatgcatccttcaatgtcttctactta

SEQ ID NO: 341056 - DNA, 1000 bp, Homo Sapiens
cactacagacagaatatcttattttattgtgtcgcataatcctttcctaaaaaaaaaacactgcttctccccagttacaagagactaaaagcatactaaaaacactttatcgtcattactaaatgcattaaatacacatcctaaatggaatatgctgtatatccgatgaaatacatagaacgttcatcaaggcaaaagaaaagacgtagccaacaatggaaagatggcacacacaagaaaaaaaaagaacagttctcaaatattgcagtaacttttcaatgtatcatagatattctatgacttttctatgaaacagaggaggaccaaacattatacacagtttgaagagactaaatgccagagaatctacagatattagcatccaggaataatttttattcctggcccattttctgcccactggaaaaaattgcattgtttttccttcccaagaggacacacaaaaaaattctttccattgttaggtccaatcttcaatactgttttcatggtggaacgcttgccatggttgcagaatgggaaggacaaatctgcccattcaaaaaatccacattgtgcttctctaggtagaggacaggcataaaactgcctgcccttgttttccccatccttcctcacaactcggaggatgcagaggcggttgtgtttactgcagcgagggctgtcaggatttaaggtacgagggccatctgtcatattaatttgaagttcactgttagaatatccagggttgcagcttttaagctctggtgatgagtagtgggctgttttcggttttttatgtgctggactaaataatttagattctgaactgattgtaggtgatatgtttactttgctggatagttgagttatatcgtttgttgtcttcttggaggggtgctgtatatcattcaaacacacactagcaggaggagagttttgaaactcctcatctagtatctggttttgctttgtttttctttccaaagtactggat

SEQ ID NO: 341057 - DNA, 1000 bp, Homo Sapiens
atataaaaataagtgtttattaacaaatgggctcagagtagaaaatgcagacagatgggttcactttaccatattttgggatcatcatcttattgcgtacagcactgtaggcaagtaaacgaaaccaaaggctggctcccctggccgaggcctgggactgatgcaagacagccagccagtcacctccgcctcccatgaacctcttggaaaacttctcctgtcccacttctgtcaccctccagctccttgagagagccagagttgagaagaaaatgagcctgaagttgaaagggaaagttcttgcctgaaacagtgctgggaataagtccagaccatttccctcaagagccacctcttcactccttaagccagaggacaccacaaagacacagttaatggcctctcatgccactcctcaggtggcttgtgagggcagccagtgagggactgcaggatttcagggaagtagctcagatggcccactcagaacttctgtaagaatttgaggacaaggtcccgcagtcgcactctgagcatctcgtcattgtcgcagatgatatgggtcgagtcttcttcaatctggatgagcgtctcagcctcctggagcaggacgatatggcccttggctgtgtcctccaccttaatatcactgaagccatgcttctccagggtctgcacgaactgctccacagggatggaaccgctcaacaaaggcttcaggactttgcagtctggtacgtcatcgctcacccgctttctcttcttcccgctcgtgggctgggcgggccgaggagggggctgaagcaagtgcttgttatctttggtgtgcagcacggccgagacagttgccaaggagatgccaggcttgatctccatgggcaccagtgaatctgcgagctctggcatgatctcgatcttctcgtaccgacgtttgaagggcagggcgagaacctcagcccgccgataggacatggcggggggctggcagtcgatcatgagg

SEQ ID NO: 341058 - DNA, 1000 bp, Homo Sapiens
tttttttttttttttttttttttttttttttttttttttttttttttttttttttttttttttttagcaataaaagcacagatttattgaagcaaaagtatattccacagagtgggagcaggctaaagcaagctgctcaagagccccagttgcaaaatctggggtttaagtaccctttaggggtttcctattggttacaccctatgcgccaccaatcggaggccgaagtgaaggctcccagtctccagactcttattctcctagctcaaagaaatccactgatttcctctgtagcatcttcaggttccatcttgacaacttcctctaaatccccaggggaagagttgtttagagactcctggatgccctgagggagcggctccagagcttgccttccctcctctgttttcacaacggtccagcgataggcactgttctctgacaatccttcttggcactgtttatcgactggtggaggccctgggctatgttccactttggggaaaacagtagcagagagaggagatagttcctggggctctaatttgggttctaggccctgaaaggcattttccccatcagccacagcacaagcaatgtccacattcatgtgggccttatcttcaggggtggatggtataggaagattcacagaattgccagaaacaattaagggtgagacagaggaggccacaaggggctggttcaatggacaggggaaggaagtagggttaaccaagagggtggcgatgggaatagtctggggactctgggccacagccgcattgacaggctggatcatgttacagccaccgccaaggctcacaatcttcacagtggtagcaggaacagtgaagataacagatgcagggtggataacaggggcaggtttgatacagcgaaaggccctggctccccttctttttgagggtctccgtctcacatatggctttcgaaacatggaagaggcaggggagggcatcattaccttgggcacagg

SEQ ID NO: 341059 - DNA, 1000 bp, Homo Sapiens
ataagatgtatccacagtgtggtttatttttagttatgtaattttaaaaaaccactttggtgtagatttctcaaaaatgataaccctgaaattaatgaaaattgtcattaaaagatttctagttttgcttttataaaaatcattatttcgaatttcacagtgaagaggtactaaattcctcatagaacatgaaattatataaaaatagaagacatagacatctttaaatctttaatcctttgattaagcagcaagcatatcactcttccaggccaaacactgcttaaacaaaaaagaaaaataatgacgtgcaaaatatttacaaaatatgcaaagcacacaataaagacatctcactatatacatgtgtcatattactaatgaagctaacgtttttctactgtgtgctctaatgcatgtaaatcaaattacagcacatccctcagatacagcaccttggcccatgtctgggatagaagagattttttaatgaatcacaatatactgaacagctggacagatgctggtgctgaccaacttgactgacatatcccacatactgtgtactgaaggtctactgacaagagacaagacaataaacgctgtaaaggtatagtatgcacatacgtaagacaatctaagtgctttaaaaaatgttttagatattttaagatatttaactgtcccctgtggcttttaaggaaaaaataagtataaattcttgaatattaagaattttaaatcagctaaattcagggccaagaactatttaagatgattcaatgagaaagaaaaggacctaacctggaaaaagagtttcaaatatgccagtacgtagggtatttatggaaatacacagtctaaaattaaaaattaaaactaatcaatgaatttaaatctatagcactttaaggctgtggagccaacaatagggaatactttgggaacacatgatctttcaaaacataaattagggccttagatgttgactattttgtga

SEQ ID NO: 341060 - DNA, 1000 bp, Homo Sapiens; identical to SEQ ID NO: 159750

SEQ ID NO: 341061 - DNA, 1000 bp, Homo Sapiens
gcagaagcaatgctaaggataaaatatcctgactacctttattgacatgatttgtgtttaccagctcattaaaatctatgtttcaaattccctggattttcccaagttccagactggtaaaaagtatttttacatacacatttgatgctcacattacaaacttaatatctataaacttgaaacttgttttgcacaagtctatggctttactacttttcaagacaaaagtcacatattaaaatacaaactactcaaaagcaaatagttgtcaagaatgtggtttacaagacagatcttacagataatacagactatattatgatttatctgtttgaaaacagaaagtagtgtattatactgaattctggtataaggtgcgcaggaaactttacttacaatcctttattttcataaggtaaacaccaaagtatttctcacatatattaccaccagattttttttaaaccaaattccggtttaaaaatcacacactgacaacacagaaatacgaaatgctaggaaaagtctagcatatgaaggaaaaacatgtcttatgcattctaatataattttttacaatctagcataaaggcaaatgcggtttttttaaaaatgcagtccatatacaattatagaaaaaacattagtcaagccacctaatataaccaatttcacagatagcactcatttaatataatgtccaaaaatttccaagtaagtgtctacgtatcagttagaataatgcccacaaggatctccaaactacaaaatatcagcaagtaaatgaaaatcacacatttctctttgaaagactgaagcttgactatgagttaaaaggcaacaactatgaactaactttctttaaaatgacttaaactgcccaatctagagcaatacatgtttcctagctatacatgcaaactggactgtgtggtaaaaatgactcagttacttaaaaaaagcagaaaagatccaaaataaccagagctcaagctaagct

SEQ ID NO: 341062 - DNA, 1000 bp, Homo Sapiens; identical to SEQ ID NO: 159751

SEQ ID NO: 341063 - DNA, 1000 bp, Homo Sapiens
gtaagaacttgctttaatacagaagacagcatatgatagacctaaaaatattatcaaatgtcaacttttttgaaaatttatttcacatttattactagtcacataatcctcaaaaatctaagttcacaaatgatcatcacatgagccctcttctccatatacacatttgttagtgtgaaaaaacaattttgtacagtattttagtagttacatgattagcaagcaacagagaagtagtgaaagctgaagaactccaaatgcattgctcataggacaaccactcaaacacaagcagctaggcaataaaggaaaatttcccatccagtcattgagaaatgctaaaggcattttatggtgacatgaatgcttaagttagtatgcaacctatagggcaaataaaactgctatataggttggtaattttgcatttaaatatttgtagtatggtactacccatttatctaacatttaataatacataaaattttaagtctgggttctcaaaacagttgcttggtattttggtatagtgtctgttatactcaaatgcttcattcagttatcttttcttctttcacaaggtttagtgggactgtgcaatgctggaacaataatccagaatgtcctgaatagtgaattccattgtaacaccagatccaggataacagcgagctatcaaaccttcaaagtgcttatactggcgtataaattcatcttgcatggagtgccacaccacctgaagtaagttctcttcttcacataaatgtttatcaactttcttgtagaggttatctagacctttttttacttcctttccagggtactccttaatgactttacgaagttcttgtttgttaaatgcaagttggtaacttacttcctcctcccttatgccctgtgccacgcgagcttcaacaccttcaaagaaatgatttagtttttcaagaggttgtcctaaagagtaaatgacataagactgaaggtgatctgtgtatttttg

SEQ ID NO: 341064 - DNA, 1000 bp, Homo Sapiens
tttttttttttttttttttctgttcagcttttaagatgaatggctttccacttgaaacctctgtgttgaaaccaactgataaatagactggtattcaagttactacccaactgagagaacttaactgttctcttgtctggtcaagattgaggcagtgtatctagttggcaatatctgttttaggagtattcctaaatgcaaatatttagctgagtattatttgttaagataatctagtgaacagcaatgtttaggacctatctataagagcctgggtcaagatgaagaggcacaatatggtttgctctctaaacggacttaaaaatccctgatacctttcctcctttcctagttatagtctgttcatccctaagttaagggtagcacagaggaaaacctttctgacaggaaaaaggtaaagcagaaaaatcactttcatcaatccaaactggtaactgacatttagcatggaatcaattccaaaactctcaacctcttccagcatgcagaccagccctcggccctggcactaaggtggagttaaggggtagggcagggagagttctatgcagcaacaggtctctttaaacccttcctggattgcccaaggtactgaatatttgggagcaccattatttctgttttctactggttcttggcttgaaaatatactccttatccccaatccttgcagccttcttatctcttagctgtgtgtgctggaagaaaggagaaagatggacagacatatcgttctggctgaagctggaacacagatattaatcctatattggccttgggccacaaaaaagccagaagtgaaaagtgaaaaacagtgaagtgagtttcttacggagaggagcggagcaggggctgtgggaaagcatcgaagagtgtgtgatgtgggggtggggtgggcagtggtgggtagtagaatgggggcaaaacagagatgattattgcccattttctcctaatctggaatgtgacttaacaagtt

SEQ ID NO: 341065 - DNA, 1000 bp, Homo Sapiens; identical to SEQ ID NO: 159753

SEQ ID NO: 341066 - DNA, 1000 bp, Homo Sapiens; identical to SEQ ID NO: 246530

SEQ ID NO: 341067 - DNA, 1000 bp, Homo Sapiens; identical to SEQ ID NO: 159754

SEQ ID NO: 341068 - DNA, 1000 bp, Homo Sapiens
ttttttttttttttttttttttttttttttttttttttttttttttttttttttttttttttttttttttttttttttttttttggattttttttgtgctttaatgttcgcagtcacacgaaagtggcatctccatcagcactggggcggccgcctcctcatcagccgacagctgcacggtccccgcctctcatccatttggtctgtttgcaagttactagatcatacaaaaataaccgctacaaattctctgtatctggcatataaaaactgagcaaaaagtatctcttaaagcaaaacatctcagaaaaaatacaacacaggtttaacttctgcagtactttgttcatataaaacactagtaaaataggcttcttaaaaattaaatagtgaaataccaaccaaattatatacattgttacagtacaagtgaatgaggcaaaatatccagttcttagtttcccaggtgggtgggggtggccttcagtgcgtggcacggagggggtgacaggaaggccacgttccaatgtcacagtcagcgcagaaagaggcttgcagcgggacaaacagatggaaagaactgagtcacacagggaagaccaggggctcctttgaggaagagtgaggtcatgtttttattgcttgctaatccgaggttttccctggcccgatgcccctctaggtagcctggatcccaaatgctgcagcccacgtagcgctaatccatgtcaccaagcagccacggggaagccacagctgctccagagaagacagaactaggcttcagagccctcaatatctgagctggaccgatcctggtctttcaggtccatcagggtcccacatggtccaactgacacacacgtttccccgctgacggccacgttcacctgagagcctgagggcgggcagtgtgggctcatggcactgggatggtatcactgtggcctgggggtggcactcagacccagccaaccccctcagcgaccacagtgcctcg

SEQ ID NO: 341069 - DNA, 1000 bp, Homo Sapiens; identical to SEQ ID NO: 159756

SEQ ID NO: 341070 - DNA, 1000 bp, Homo Sapiens; identical to SEQ ID NO: 159757

SEQ ID NO: 341071 - DNA, 1000 bp, Homo Sapiens
ttttttttttttttttacttattaaacatgatttattactttgggacaggagacgggagaaattgatagaccaataaatattgcacaggctgctggtggtggggagatccagaccgaggtagtttctgtagaaagggtgaaagacctgggcgaggaaggcacctgaggttgccgggagccaggttgggagcgagtcttggtggcgagggtggtttctggttcacctacctagcacaaggtctccaactccttcagcctagacaccctgatcagcagctgaccagttggcctgccatttaagcagcagcaattgatagcaagatcaggtttcctttagaaattcttattggttccttccctgcagcgacaaccggctgcccaaagttgatggaacccagcagctgtcactggacgtttgccaggaggcagggctaacggccttggtgcacatgatgggcagtttgcccggagcgggctgaaaacgacaatgatatatagtctcgggagggcgcagctttaactcttctacctggcggtttacagaagccagagctgagcagctgtgattggcagacaccctcagctcctcagccaaaccacacttggatatttatggtgagggtgggactaagaaatagaacagaagcagagctaaatcgctttgattggctgttcatcgaaggggcggggaagacttaacaactgctagctgctttgattggctgctttgcttaagcacacagtgcagcaaaaataatcacctgtcagttattggaagttggagtgaaaagtataataaccgtaattgacagcctgtcgtgaaggaggcggggcttagttcctagcctgctgactgggcagggaggtaggttctactcaggagatgttactgctgggcgtggcttgcgggggctcggaagtgatcggagccactgggtctagtttggggaaacccgggggtgggtacaatcccatgctgggggtcagggcctgcagatgc

SEQ ID NO: 341072 - DNA, 1000 bp, Homo Sapiens; identical to SEQ ID NO: 159758

SEQ ID NO: 341073 - DNA, 1000 bp, Homo Sapiens
ttttttttttttttttttttgagatggagtctagatggagtctccctctgttgcccaggctggagtacagtggtgcaatcttggctcactgcaacctccacatcccaggttccagcgattctcctgcctcagcctcccgagtggccgggaatacaggcacgcaccaccacacctaattttttgtatttttagtagagacggtgtttcaccacgttggccaggccggtctcgactgaaaatacaaaaattagccgggcgtgatggtgcacgcctgtgatcccagccacccgggaggctgaggcatgagaatcacgtgaacccaggaggcggagctgagatcatgccactgtgctggagtccagcctgggccacagtgtgagactctgtctcaaaaaacaaacacataaacaaaaaaagcaaacatgccctggtgcttccaatgtatacccaaagtttaacccaattgttgcaaccccctgatctaactggcttaaaggttaagggtgtgattgttttttcttctgtcctgaagtaagtcagttctagatcatcaccatagtagggccaccaataaagaattctaagcattatccactctggtggtggtgtattcataaatccttccccagtttctttaaaaaagcaaaaggggcaggaggaagaaggtacagaaatcacatgagaaacatttaaaaatacttttagtaaaatactctgtaccctgtcaaaactcctttggcacacagtaaatcatagtgaagaacaaacatagcagaattgccttagttgaggctacagtgtaagagagaatacaacttagaaggtaataatagaaaaatcatagcattttccagcaattgatatgacagtaaatttataaagaaatacaataatttcccagtgactcttaactgttcaggatgccagtgctaaaccaggttgccatacataattcaaagaaagctagaaaacacattccacatattaaattgaagataat

SEQ ID NO: 341074 - DNA, 1000 bp, Homo Sapiens
aagcaacgcacatttattaccttacagtcaagggggtcagatgtctgaggtggggtcccagaactaaaatccaggtgttggcagggctggttcctcctggaactccaggggaaaaatccatcccttgccttttctggcctctggcggcacttgcactccttggctcctcgtcccttcttccgtctttaaagccagcagcgtccccttgttctgtctctgaccacggctgggaaggagtctctgcttttgggcacacgtggctaatccaggctaccctctcactgcagatcttcaactcaatcacacacctacaaagtccctttggtctgggaggtaacactttcccaggctccagggattagggcttggacatcttggggactttattctgcccaggaaaggtggtatcagggagtctgagcatctgaacctccccaggggactgaaggaatgccttcagtgtcctcttcctcctcctcagcagctgtgaatccagaatagaggccatctacaaggtcacacctggagggatctggggaaactgaggtcacagaggtcttgcccaggaccccaggccaggccctgtgtttcttccacagatggccccttccccaccaccctgtagtgcactgcccagggggtggaagtgttttagcctggagggacaccagcttgaggactctgtagagctctgggcctagggggagggcgggcaatgtcatctatggggtggcttccccacaccaggggcagctttacggaggttaccttttcatccccccaagtcctgtggcaagtgaagatctgtttcctcatctcatagggtaaggaagctgaggccctcaaaggggcagtggcttgtccgtggagaagagtctgctccttccgacaagcctgtggctggtggtgaagcaggtgtgaatggtctgtcccatgagcaggagggtgggtgtgcggcgatgtcggcgtggtctccgcagagctctgtgcacaggcctgt

SEQ ID NO: 341075 - DNA, 1000 bp, Homo Sapiens; identical to SEQ ID NO: 159759

SEQ ID NO: 341076 - DNA, 1000 bp, Homo Sapiens; identical to SEQ ID NO: 159760

SEQ ID NO: 341077 - DNA, 1000 bp, Homo Sapiens; identical to SEQ ID NO: 159761

SEQ ID NO: 341078 - DNA, 1000 bp, Homo Sapiens; identical to SEQ ID NO: 159762

SEQ ID NO: 341079 - DNA, 1000 bp, Homo Sapiens
ccacaaaaatgtaatatacatttaatagcacattataaagttcctgaccaaagacgttgatttcctaattataatagcacagaaatcctttagaatttagtaaacgtaattaagactattcagaagtaatgaaaaaccaatatgataaaaacaaaaatcctccagtaaagaaggaacctgtccatttgagagaaatacaattgagaacttgcaaatgagacaagggaagatggcaatttggaactgcaatagaaataactatagcagaaacaaccatttaagaagttttagcagcaataagtatttattattctgaatgaaatgtacagttgacttttatataaaaatcatcaaaagtgctatattggattattttactattaatttaacccccaacagcatctattagctataactttaatgggtttttctttacttctgatacatcattacaactggctaacactgtccaatgttaaaatataaaaaatattacttttcaagataaagtaccaccagtgatgagttattaaaagtataaaatgaaaacagacgccagtgaatcaatgtattgaaaaaaattatcacagaatttcatagacatatgcgaaacccaaggtaatttagatccttggcagaacatttttatgatacatcttaagactgtaggttatttcttttggaggcaaatgtctagtgtgccaggcctatcttgatttttctcatcttttcttggctactttacagggtgaaccaaatactgtctaatgctgtgcactcccatgacccccaaagtgtttcatgtaaatagaaagctgatttttcagtctcagaagtagcccttagggttaagtttgtcgttaaagaagacatgagtcattcctcacaaaggagaagcccctccaccctcccacccccattcttccagtctgctccaacgccaagtctgttctctcccaccatggttctgggtgaattgggtgacaaagtcagagcacgt

SEQ ID NO: 341080 - DNA, 1000 bp, Homo Sapiens
atggaaaaatctctaaacctcttagagttttattagacatttcatgtacagaagttaatctagaaaaatacattttaaaaatcttcaacagaccatgctccctgtaacaaaaccttccaaaccctgtgttttattatacaaagcaatctacattagtaggtaaaaagaaattctcaaatttagcaatgtcattttccatccaacatccatctaatttacagatgggtttccactattcatactggaattagaattctgtaataaattttttctaatgttttctgtacatattaaataacccaaaaggttcctcttgtagtgcatgtgccatttagcaagtctattcagtatttttccagtaccattctcattacagtgatttgcctgtaaatgtagttaatatctaaaagtgcacacagttaactttcccaaataacggactatttctggaggaaacctaatattcacagaaaagattaccaataacaatgattagaaatgtagggttagaatgtactctgagactatacaacacaattatatacacaagctaaaggacattaagtctttagcctatatttacataaaataatgtgtgtttccacagggtcataccaataactcagtatggtactagatataattaggattgttagctacaattcagtatagcaagacagccctaaaatgccctgaactgacttccgctaactaaaactccagtatatcacagtgttttaagtaatattagtgtgctgcccaaacaagcaactaagatatccagtaaggatgctgtgtaacacagtaaaagacagcaagccttcaccaaggggttattttggggttataatgaattttggcacttaagactgccactgcatgcagaaaccccgaaaaagaaatacacaggtttcaaaatggatatacttcattttgtttaaaatgcccaagagcctttgcaacataactgaaagtattgttctatcaagtcatgaatctt

SEQ ID NO: 341081 - DNA, 1000 bp, Homo Sapiens
tttttttttttttttttttgctaaacaaagtgaatttattaagtaacaattcagctttcatttatcaacaatatgtaagtgctagattaaaatacctgatcaatatgagatgacaatggtgttctagtgaagacacagaaatccagtgatgaagccttatcatgagtaaatggatggtttccattagattttgtcaaatattgaatacagatatccattaatatctctgggctcgagggtcccaaataaaaaacactcgtaaagacagtcaagaggaaaaggaaaccatgagatatagagaatctggggtaaggcaagttcttgccatgcgcatcccctcttctgcttcatcagcaaattatctgcatgtttttcagagtgtatgttacttgtgtattttgaacctttttcactaataccatgctctgctatctaccaagtttccaatctgtgatggtctgttaggttacaataaatgtttcgatgacattaatgagctcatttgtgatcagtaaataggagcatgaactcagtgtaacatggagttgttctggcttctaggcatgggctccggaatagcagaagtaaaattgtaactctaaggaggaaaggaaagttctcagtcatttcagctctttcttagggaaataaaaggagtccctgcaagtggagctcctccccagagaggcatacccctgagatttgcatgattctgggccctgactggttgcatttcctcctgtgctcaaagttcctcttccacctgctctgctcagcgctcagaagccaataatcgcactcaattgtttctgtgcatttttaacaacccctgaggcggccttcaccacatgataagttgcctgcctaggctatccaagttacctctagaaggactattcatgtttttgttagtgctttagttacacagatgtacaatttttgagaagtttatccctaatcttatttttactgtaaactctttaatgaacattatggcaga

SEQ ID NO: 341082 - DNA, 1000 bp, Homo Sapiens; identical to SEQ ID NO: 159764

SEQ ID NO: 341083 - DNA, 1000 bp, Homo Sapiens
ttttttttttttttttttgcatttggtatatgctttaatttcatgcatgtataagatactctttttactttctactttaacactgaaggaggatagaaaacttgtaaatgagtatttaaaagcctgatcctcttaagaactaaaagcagaatcaagtaacagttggctttcataaccaaatacagtcatatgctggataacgatgttttggtcaatgatgtaccgcatatacaatggtggtcccagaagattataaaaccatatttttactgtcccttttctatgtttagatacttaccattgtgttacaattgcctactgtattcaatacagtaacatgttgtacagatttgtaccccaggaccaacaggctataccaaatagcctaggtgtgtagtaggctataccatctaggtttgtggaagtacatgctatgatgtttaatgacaaaatcgcctaatgacacatttctcagaacatatctccatccttaagtgacatatggccgtatcacattgttagctggtgcgctcttattctggtgcgctcttattctggtgcactcttattcttcctttcaagagaagattttaaaatgcaatgattactgtataaatgataactacacccactctctcaaggatggactcctgagagtggtccaagccagggttactgagttgtccaaagtcacagtcagaccaaggattgttttccactaattacacagtctgcacaatcagaatagcaggagcaacagtatcagagcaaaagagaggcatacagaatacattctaaagccatggcaaaataaacaagaaataataataatccaatagctttcctcattaaagtttttttaaaaacaatcccagcataaagttgcaaagacattaaatattgcttttaaaaatataaacagttattggtgaattataggtctcaattagctcaaaataacagtcttcaaacatactacatctgatctcagaatatccac

SEQ ID NO: 341084 - DNA, 1000 bp, Homo Sapiens
acatttgcctggtttttattgagtggatctctcacgacaaaatcatgaatattacactgaaaggcttattacattatctttgtgtagttactctccagtataaaccctgtgatgttccggttttgatgcctgggtaaaagcttaagcatgcacgttacatttgtatggtttcatcaaaaaagtttttgatgcctagtgagactttggcctgtggaaaatctctatcacatataattattataaatgctctttagtatggattctctgatgttgatgaatgtttgaagtcataatggtttcccactctcagtgtttttgtttctctcaagcatgaatttttgcaatattgtacaatgtgagaattgtgccagaagaccttgccacattcattacatttgttaggtttctcaccagcaagaattctttgaaaaatcctggtctcagattttaccttaagaccttgccacattcagtacattagtaaagtttctgtcctctatggtctagctaacggttattaagccttgaacaaaaactaaaggctctgctacattcattatacttgcaaagtttttctccagtataaattattgtatgtcttacagggctttaatgctaactgaacactctgccacattaattacatgtgttagatttctttccggcatgaaatctctgatgacgtacaagatatgaattgtcgcggaagagtttgccacattcattacatttgaaatgtttctctccagtgtggatcgcatgatgattagtgaggcttgaacgcatactaaaagctttgccacattcattacatttgaaaggtttctctccagtgtgaattttccgatgatgtgctaggggtgagtttagaccgaagaccttcccacattcattacatttataagctttttctccagtatgaattctccaatgatatgcaaggtatgaattttgactgaagactttgccacattcatcacatttgtaaggtttctctcca

SEQ ID NO: 341085 - DNA, 1000 bp, Homo Sapiens; identical to SEQ ID NO: 159767

SEQ ID NO: 341086 - DNA, 1000 bp, Homo Sapiens
aattggaatcagacatttaatggcataaaaacattgcatatatggctttgctgttccgaatgtcatgaacttaaaatccaaatatgacataagcagttttaagacttattttggccagcctccccaatcccaaaggagatttaaaagtaataatgtaaaaaagttaaggtcaaggtgttttaaaatcaacatctcagctaatgactaaccctttgtttcctggggacttctgctctactgtgaaaactgctgagcttaacccgctgttgaacaactggttagttattagttccctgggtgattgtccctgaagttaagccatgctctggggacacatgaggcactttaattggggtagttactttttccaggttgggtacaatgtttggctctcaaaagcaaggtaaacagtttacagtcaaaaggaatgctctgtgattgtgtgcctttgggatcaagggttgagatcttagagtattctcataaacatctgtaccaggtgctcaaagatgtttgagggttgtcaagcaagctgttcaacttctgcattttctgtggatatgggcacaatgacccactcagatttttctcctagtgtcctgaatgacagctcatctacacagagtgaaactccagatatgtgacaagcagcatgggacagatgctgacaatcagaacagatgctggatgtaaacaactggtaaggctgcactggtgcatgctggcagaatcacctgctatgcatccagggagcaaatgcatctgcatgctcagcatgacaccagcttacctccctgtgcaaatcccctcccctaatcagtctcatccaaatcttctcctgcagtagcagcttctaaagctgcaagggcctccgccaccgctgcatcctcgtccacaatctccccatccccatctccatcggagccatgggtatccccctgcctgtttcctgagtcaaccacaggcatggcatgaacaggacccttctcattaaagcaga

SEQ ID NO: 341087 - DNA, 1000 bp, Homo Sapiens; identical to SEQ ID NO: 159768

SEQ ID NO: 341088 - DNA, 1000 bp, Homo Sapiens; identical to SEQ ID NO: 159769

SEQ ID NO: 341089 - DNA, 1000 bp, Homo Sapiens
aagtggtggttgttttaagtcgtaagtttggagtcatttgttatacagaaatacattactgtagcatcattacatatacttttctctgtaacctccgttttcctgaaaaggaaaaatgttcttcaaggttctccagggtccactgtagtctggttcctgacgacttctccaggttttccattagacaggtaaagtctttattgtttattaatatgtctaagtactccatgtctatgatcgtcctcactttatcaaccctgtctgaagtttcaactgcattttcccctctcaattgggccaccatctcttaattttctactcttcaaggtctagcataagaatggcatttattcctaagacgtctgttctgtcaactctgaatttattcttatggccaagttcgttcgaaaacctccatgccccgtgagagtatttgtgttttgttttgttgttttttgctgttgttgttttgttttgttttgagatggagtctcactctgtagtccaaactggagtacagtggcgcaatctctgctcactgcaacctccaactccagggctcaagcgattctcgtgcctcagcctcccgagtagctgggactacagccacatgccaccacgcccagctaatttttttgtattttagtagacagggtttcaccatgttgcccaagatggtgtcgaactcctgagctcaggagatctgcccacctcagcctcccatagtgctgggattacaggcatgagccactgcacctggccagtatttatgtttttaaagtggttttgtgtccttggatatgagctcccttcatgtggagactgagtcttatacctgtttgtgtttcagcatctctcctgattcctgatcctcgtgctggccatgggagtcaagtatttatgttctaaataccaggcccgctcctgaaacaccagcttggttccatacaacagacgaaacttcattaacaaagtctggtcctcttggtcaggacagctc

SEQ ID NO: 341090 - DNA, 1000 bp, Homo Sapiens
tttttaagaactcgggttttatacaatagaatgttttctagcagatgcctcttgttttaatatattaaaattttgcaaagccctttgagctactgccttagtctacccactgtccttttgttatgaggtagaggatctcatgacaccatacacacaaacccatcattgcctgtgaatgcacgtagggccagaattccccagttcccgctcctctgagggttgatactgctgggaatgccaaccactccacaagcagagggaagccccctcaggcctgcaggaggagccgcagcagtgtgtccaattcaaaccagcagcaaagagcctgacattttcccatccatctatgaggaaagccatctcacagaacatggacataggcaacttgctctcccacaccaagggatgggaatctctcctacctatagtcatccctgcactcctgactttactccaggacccagggtccaactaatggcagagcccctcttggttccttcaaacaagaaaagcaatacctacggactggtgtacacttccatccttggttataacaggaatgttatcaagctgtcagaacaggatgaagtgctcccagtggatatccatcagggagggttagggacactcgtggcagcctgtctagcagcctgggctctctgaaagtccctaacttcctgaggggtacgcaaatactgttctatttcactatcagaaatgttctcatctccagtgacagtggagacagggggtacagggcagatccgcttcggggacttcaacatgcagggtggcaagagaagggcaggactggccggccgcttcccctggggtaaacctaaggaattatttcccacctccccttctccttgcccctgtccccaccccggtggctccttctctcgggtctccacttctgctgtcccatcccgaaaggcagagcggaccagtgactggcggtgctggagaaggtcaccgatgtgcttcaccacagaccgtt

SEQ ID NO: 341091 - DNA, 1000 bp, Homo Sapiens
ttttatgcaaaaaaatctttgtgtatttgataaagtcaacttaatataacaaacaaattgaaatagcttattaaaagtgtccgtatataaaaatggccttgtgatgtacagtaaaatgcaataaaaattatcctcctttgttccttccccccacccccagtaactaaaatggctactgatccacaactctttatgcttctatataaaagaaacgtaatgatgtgattaaacattttctaggttgtatgcttggcgaatgttgagggtgtcccggagcatcaaatctcgaaggcgccagagggcatctgccatggtggtgtgggcccctttgcttttcagccagtgagagggtaggcggctctcctgttctttcgacaaatggacgtcgcgtcttcgagctgccagtgtctgatcccacttgctaatgctgttggactccgcactgagtccttcaatgtatttcaggtaggcctctgagtgaagaagccgctgggtctttggcgggggagctacaaacatgggtgttgttggctgctgtatgacagggggtccagctggatgtgggccgggatatggaggtggtgcctgctgccttggaggccccaaaactcccacctgttgtccatatggacttccacccggtgctggagtccctaccataggggccactccttggttcatcacacccggtggtgggatgcccgggaggccaggcacacctggcggaagatggtggggtggaggccccccagggtgaagtggctgcatgctgcccatgctaacaaggccatcaactgggccctgcaaaggtggaaggcctggcggatagccacccatcatgccttcatattctgctttcttggctgtctcaagatttctccattctgtccccaccaggcggctgagctccccgaaagagtagtctgggtgttgggccttaatcacagccctcatctcactgctgaacaggatgtagccactcatgttgattttccgtttg

SEQ ID NO: 341092 - DNA, 1000 bp, Homo Sapiens
ttttttttttttttttttggaaattaaagtaaacttttaatgcatatattttaaaaattcactttccattttactattttaaagtgcatgtaaaattcttttccattttttggtaggtaattaatttgaagaagggaaatacaatgctttactattactaccaacaggattttacacaagaaacattagtaacttaagctgtggatcctgtgaatgtacaactgacacagattttgtaaatccatactgggcctggaacttatgttgattataaaagtcaaagggtaattttcttttaaagatatattacttataaaatattcccgaagtatgaattgtgcttttagtttaggatatatgatttaaattgatgcacactgcagatgaatgtttacccctgctgtagatttaaagaacagcatagatatctcaagaaccccaaataaaattaatttttcccctccttgtataactccttaaggatttacatcacaaagctaatcaagaaaccctctactttaaccaagcagtttgtaaaagtaagtagcaggatacagaaatcctcaaacctatatataggtaaaattaaatgacttttccctttaggtagaagtccagcctctcaaattgcatttgagaatcaaagttttaactgttgttggagactgtggattgaggatgcactgctttggagtttctcagtaactgtatcttctttcagtgtggttttgataacttcagatactccattggttccaaggatgcaaggcaaacttaaaaacacttcactatttatatcataatatccctgttggacagctgcacttgagaggtaagactcactacttcttcttggccactccatgtgagcactttgtcttctccttgctcgccaataacccatacttctttgcctgaagtctgtgccttcaaaacatttgtaataatatactgtaatctctgtgaatccagattacatccaattccgatcactcgattt

SEQ ID NO: 341093 - DNA, 1000 bp, Homo Sapiens
caccataacatttttattaaataaagggaaatattaggagacgatgtctgctaagataggaggttaattctttacatggtgagtgggtcacagagacaagacatcaatcgtctgttagcagcgagagagacactttaagttgccccaagagtacaaatcccatctatgagacagcagtgctggcttcttaaaaacagtaaaaccaatcaaaaagaaaagatttagaggttcagacattagaacaaatgtggccagagataccacagagcccttgaagggaaaggcctcactgctggctccgtagcaatgttgacccaaaaacagggcaggccagggagtggcagggcgcggaggggtggaaaggagggaggagaaaaaagacaccccaccagacctgcggcaagcgccactatgggattctgaagttagcgtcgccctccaattgcgggaaggggactgcctggccaacagggcaaatgtagagggccgggatgtctcagccagttaaggccccacaagatgctcagtgccaaatggaaggtcccaagcccctaaggagcgtttctaggagttgatatggtttttcctccggaaagcagatgaaggcaggaactgaggcatgaccagggcctcccctcagcagcttgggatgggggaaggagggcaccccaggggaggcagacacgtgccctcctcctccacccaccccaaaccaggggcttctaagccacctctcactgctcctggaggtccgtgtgttacggacgtttcgggtgagtttattttaaaaacacgcgcgcaggagacttggaaggagggtgagtcatataccaccgactttgggttcaatgttgatgagctcacatctgaatgcctgaaaccgtggggctgggaggcagtagagaagtgagatggagctgcacagggaccccctggagacctgggattccacccgccagcccgtggggactcgggggccaggcgaggaaaccaccccggg

SEQ ID NO: 341094 - DNA, 1000 bp, Homo Sapiens
agcagaagttgtgtttattgcttctctcttgaaaatcagcagcatgcgatgcaatatttggtgcagagttattgtttcaaaaagtgagaaactacttaggtttaactgaagagggaacatgatctttattggcttatatgcaaagtttcattttggttttatgcagagtttgcatagttcatgatttgtttctaatgaaaaactagatgtgttgccagtgactgtgaagaagatcaggtgacagtagcaaacagaaaaatctgaagaagaggcataacttttaaagtagaaaggtcagcaagaactgcttcagctgcagccagtgatgtcacctccatcaggttcactgctcggaaagcaaacacggcagctgccagcacagcaagaatttccagagagttgtatcctaggattctatcccataaaagcaagagctgatctgtagctaagtatccagagaaagctcgaaccatccacttaaatgatatgcgaagtggttgagccccaatttctcgtagatgataaaagagttggggaagataagtttgaagaagagtttcaaacagcagacagagtgacacaataccagaaggatgagaagagatggaatggagtctgaagaaaaaacgcacatacatctcacggaatatctgatacaatttggaaggttcatggtatagaaaacaaagtggtgcaacatacattgaaaatccatgaaaagggataacaccatttggtgggtaaaagacagcatattcttccagtcctagttttcctcttatgtatgattttggtggcgaggcactgttgaatgcaaagtgactcaacacagatgtatcccgggaaaaacaaagtaatacctgatataaataatcttcaaatacaaaataataatcatcattgcttgctgtcaacttcacatctttatagattagactgtccaccaaaaggtcatgttgtatcacattggtcttaagctgctcataatacaagacatcct

SEQ ID NO: 341095 - DNA, 1000 bp, Homo Sapiens; identical to SEQ ID NO: 159771

SEQ ID NO: 341096 - DNA, 1000 bp, Homo Sapiens
tttttttttttttttttttcagctttccaacccagctcatggagctttattcagacgggagtgacaacatcctgcttcgttcttgctgcccttgaaggggcaggccctactgagccatattccctagaaacccaatgccgaaggcccatgtttgacctcccactttattcaagtcgcctaggactagggctggggccttcctagaagccccctctcagaacctgttctcacccacccaccactcccgttgtcaggcccagggaggacccatgaatgacaaaaatcatgtagggatattccctggactgggaatcccctgccagcttcaaggacatatcatctgacacagggagaagctgacatctgtcatattcttctgcctcacgtacacacacacacacacacacacgcatacgcactcttaggctttcaagaaggaagtgatgtggcagagtgaccgctggcacgtgtcaccactccactgaaggatccactgaagaatgagcttgcacaaggggccgtcagtcatggctgccaacaattgccccatggcccaactatatgacctctattcttggctgaccacagccctgcccacgggcgagtatccatggtgctgattcttccagttgtcccaaaacaaatcttcaatgaattctgaggccccaaggcttcccttgttggccaagtcactgataaggttccacttgcctcaaccagcctatagctcttggacagggggagacagagtcagacgcaacacctgtcctgtgtcccagacagtgggggagggaggacacctggggcctcagtgctcacccgtggcacaagcctgagtacgttagctcttctatactaagtgcaccaggcttgagccccacacagggaagaagggagtgggtgggctgaggccttcagctacctgggagcccagcagtgttctcggccagagatgagaaggctcctttaaaccaaaaatgtcatggctctgcccccaccc

SEQ ID NO: 341097 - DNA, 1000 bp, Homo Sapiens
ttttttttttttttttttttttttttttttttaactgatgaattctggtgatattttatttagaaaaagataatcactgattttaagatcttaatttttctttcttgtaaatgctacactaattagacgtaagatagtattagataataaaagtatttacacattgaatacaaaataaatataaagtaactgaaaaacaaatcaggtttccattgacttattttgttttcccactgtccatcctctgtttcatttttctttgccttttgtaaatccgtttctttcttgctttcaaatcaacttttggctctggttttacccactgtatttctattggtttctcctcagctggtgttacaaaaacatctgcagtgggatcatgtggaagaagagtcttcggctctttctttctcagtttttgcacatctttcacttgctgtttctctctgtattttgcagctgtgatggatcttatgacacgccgatgcatgtttggtgactggtagtgaggattttcatataaagttggtcctccaaaacttccctggaaaatctttatgagatttaagacaaaacgaggtcctatttctacaagagcagcatcttcttctatgatctgaaagttccgaaaccatatcctattatccaaaatggtgaaagtaaacacgtggtccacaaatggttggcttttgggatgataccgtggtgtactaaagatctgaattaagagttcttttaacaaagcataatgtggtaattcatcaaaagcagggtcaaaagacaaaaggggccgagaacctttcaaacagtttccagtcatcttcagttcagcgagggtatgaatattttgaacaaggaatttagcagatggtccgtgaggtgaatttgaaagccacatatagagatcctgttttttcttagcttcaaaatagatgcatttattacagttcttcatttcacaaacctcgttaatcacaaatagcttatccttacgatccat

SEQ ID NO: 341098 - DNA, 1000 bp, Homo Sapiens; identical to SEQ ID NO: 159772

SEQ ID NO: 341099 - DNA, 1000 bp, Homo Sapiens; identical to SEQ ID NO: 159773

SEQ ID NO: 341100 - DNA, 1000 bp, Homo Sapiens
ttttttttttttttttttaaaatttcaaatatattttattcaaaattctccatttaggagaaaagatatataacaatgtttacacatgctttaataacttatttcactgtacaacttacattctgtataacagtacaataaaccagccaaagaaaataaccagttagcacttaaataagaatctaccatgtaaaaaacacagtatgggacactacaaggtagtatttatatattttttaaatgactgagctacagtacaacagtcatctagttcagtggttgtctaaaacatcaagctgtccacatctttctgattcatgatgggaaagctattatgacctttcacattcgaacatgtcattttgttgtgtaaatttggtgggtggggggcagaagggctctattacctttatccctttcttataaatatattttcccttttatattacttccagaattttaaataaaatatttatttgtgtttgtgtaactacaatgtcaacattgtgttagaattatattaatcagttattttatagccagcaaaatggtccaaacgcattaagaaaacaaaagataacttagctctgccaaagtagcacctaggaaaacagcacttcagtaaaatttctcctgctattccttatagcctattgcaggcaaacagcaacaacttcaaaaacataggcagaaatgcaagaaggaagtactcaaggaactattttctgtttctgaaaaaaagatcttattagttagtatattctctaaggcattttataatctcagagttgcaatgattgccaaagcaggtacatggtaagacttagcaagaagaaaacaagatgaaaatgactgaccagtgaaatctgaacttgttccaagtaattagattttctaaggagaaaaaaggcacaggaggtgcacatttcaatttggctcaaaaataatgaaaattaatttaaaaagttggcaacaattactaaaacataaaatacaattt

SEQ ID NO: 341101 - DNA, 1000 bp, Homo Sapiens; identical to SEQ ID NO: 159774

SEQ ID NO: 341102 - DNA, 1000 bp, Homo Sapiens
ttttttttttttttttttacattatcatagaaaagcatttaggttgtatttttatttatcactttacactggtagtctctggtaggtgtactccatagaaaccaaagaattttgtacactatttctttgtacaataaaagataaagtgtgcattaggtacgcttgtacatgacaatactgtacaatatttacatttctgatatcaccatgaaattctgtattttctatatacaacattgaaaattcttcagaaacatttggactatttcttataatcacaatttagtattatagaaaaagagtttctcagtaatctcttgaccattgatcactctcatcacacagagactttgattggcttttccagcattcattatccttcctgatcaaaaaaattttgtatcactgtttcttttagcaccctgtggtggtggtagctatctgccatagtctaaatattgatataactgtggctatatcaatacctatatacagatacatctgtgcatgttcctttaataaacactgcgcattagtggagtagtctctgttatctggagatcttcctcctcttgggtttggggggtctcatttgtctgtcaccctgtgggatttggtgtacagtcccagacattttgtccagttcactcatggcctcatgaatagcagcttctaaatggttatttagctttccactttttctgttccttttccggacacggctgtaggcttccaaaccttctgttagtgtcttcaacttctcgggctccaccttcccttcctcggggctttgttgacatgaattgtgaacgtcgtcttctcttactaattttccaggccaggaagtcagtcctttgatttggccccagaccaagtcgccaacattgaacgtccttggtctataatgtatcaattcatttgaagagggggagtctgggttccttaggtcatcttcactactaatgcttttagcatctgaagggctaggcacacacccatt

SEQ ID NO: 341103 - DNA, 1000 bp, Homo Sapiens
aatgggaaactattggtgcctttttaataagttgtggtgaggagagttcaaattacagcataacagaattcgtttcgtgaattaatgcagtctgtagtaagcatatcatatagcagtattatccagttaaagaaagatacagttgaaaaacattacgttttaattctccatgagtaaagtgataagtaactataaaatcattattgggagaacatggaaacagtcaagcataacgaacttacagaaagataattatctcaaaatttaggaagtacatgtacctgcctacccacctcttcaagcctatgcttaccacacgtgcaaaaatacaatacaatacaactactgcaattattactatcattttcttttgcccttaggtgaaaaacacctgacagctacatgctgagccatgctaacaaaactaaacctttcactttctttaatagtaaaattaccattactgaatcattgtcataaaaagtgcattcaagtacattaccacttattttaaataaacaccaattttgaaacaatcaactttgaaaagctgcataagttttttttttaatccctgattacatttctatttattcactgtggtagcctgaaacattgtatttttagagactaactactgcttaatttcttttttaaaaaaaacaacaacaaacctgtgtaatatagaacagcagtgaagcaagaaaaatgtgtgcttgtcacttatcttcaccatactgtacataagaactctgataaaatatggtacttgtgccacattagtatttgggaaaacataattaactcatagcacagagcacatggtttaccaacttactactgtaaaattcaaggtttggactttcacctcagttctgtattcaggctaccagagcatccccacggaggtcctcgggaggctttggacacaatcaatagcatgtatttttcatccaatagttaacaatgtgtgtaattaacactgactatgggactacga

SEQ ID NO: 341104 - DNA, 1000 bp, Homo Sapiens; identical to SEQ ID NO: 159775

SEQ ID NO: 341105 - DNA, 1000 bp, Homo Sapiens
tttttttttttttttttttttgattttaatccaaaatgtatttttccttataaaagaggtccacatactcactgtgtctactctacagaatttgtccattttattacaccacgtgtcaattcaagtttatctggtcactgcaaaaactcgtggctaatatgtgtaatacaacacaggaggaggtattgctcagttcaactactcttatttacttaaaaaaaatacagaaatgtttttgtccacttgaactgtagtccagacataaaagttacatgaaagttttagaaaatggagttattttatttggttgccacagtaccccttgaagccagttacttaaaatgctgaagttgtacatatttccattggtcaggagcagcattggtgaagcttaaacttctctctcgaaagtaatctttttttacttttttgtttgtttgtttgttttgttttgtttttagcacaactgcagtctttcgctttttttttttttgttcatttttggagtaggtttccttggtggtttttaggacatatttgttggtaaacctataacagttgcttttactttcagtgatgtacttttttcttttcctgcttcccagagatttatcagaggaggataaagctcacctaatgcaaaggttggtttctgtaagtaattcctcacatagctgtgtccaccatcacagttcatttctggagagaggcagctgataagacatatcacaccaataatccccagaaggcctccaagacaggccataagtgttgtggtattattcttttcatactctttttgatcagggtgcaaacctttggtggtgacatttacacatttttttctgtttttctgatagatggtgggaatatcaatacaaattttatactcagttgatggattcagatgagtaagattatataccttgacatcagatggtattcgagcactttgcgcagcatgagaattttcagtcttgacaaaggctgtccatttaac

SEQ ID NO: 341106 - DNA, 1000 bp, Homo Sapiens
tttttttttttttttttttttttttttttacttagtcaaaatttatttcaaggcctgaaaacattcagactaatcaaaatggtactactgtaacttcttataatacataatataaaagtttttgaaagatatagacacaattaacccctaaacaacacactatctgattctcaaaagcaatggctatttaacaagatgtaaaaggacaataacatatcaaagaactttcacacacctaaagatagcatttagcagcaagttagtcagacaaaacaaacacaaatattttcacatttcctatgtttgtttttaactttacttcataaagccactgataattgaggtttctttcaagtataagatttctaaaattaaaaactgtttttgacatatttttataaagaaataaaaagcaaaacgcaatccaactatttatatgagtccctcttctccaacagctttagatgtttttctgagtactttttacacagaatatttttattaaaatcagttctaattcatttatgcagattaggggaaaatgattcataataaattaactttaaaattaccttctatctgcttctacctctatccccccatcaccaccaaatctgttgctacagtgaactgtagcaatgtactgtttgagggggcccaaagcatctgtaatcttaatttcccacatattagttagtaggaggaaaaatccacagtatgaaggctatttaactaaaactttatgcttttccctcaagctgtaagtactctttagcattaaattacatcgtgcatatacaactacacccatttagatttgccttggaatataatttcaaggccttaaatattaaaaataattttataactatttcatagtttaattggctcttaaatagttttgctagggaggaaacattttgtgttctttaagaaattgatatgtgtaaatgtgttcacttaaatcttgagaaaacctaaggatgaagtctgttgtttt

SEQ ID NO: 341107 - DNA, 1000 bp, Homo Sapiens; identical to SEQ ID NO: 159777

SEQ ID NO: 341108 - DNA, 1000 bp, Homo Sapiens
agatgaaagagggtttatttattaatatatgatagccttggctcaaaaaagacaaatgagggctcaaaaaggaattacagtaactttaaaaaatatattaaacatatccaagatcctaaatatattattctccccaaaagctagctgcttccaaacttgatttgatattttgcatgttttccctacgttgcttggtaaatatatttgcttctcctttctgcaatcgacgtctgacagctgatttttgctgttttgtcaactgacgtttcaccttctgtttcaccagttctggaggaattgttgaacagcttacagcactgcctgaagaagtgatactcagagttcttgttctatactgattcatagctcccacattttcttcatctctgaaaggcctgaattctctatttaatgacgacaaggcaattagatgagggcattcatcttcatactcgtcagagccagcagggactcctccttgaactctctgaccatcttgcctgttgtaattttcagttctgtttttctcctcagaaaattcagttacagagttgttttcaacaacctgcccttttatttcttctaaagcttgattgaattcagtcatttcaaaactccgtgcatcagcactctcttctgataaactgtcttcctttatttgttcagggtctccagatgatctgcaatagcagccctctgattcttctagacagttccgttcactttcattttctgacctgtaaacctctgctttttctgccacttctccatctgaaaatgagaattcagatccctcttttgtttcaatatttttatcatctggacctaatggatgaagcagttcatcatctgcctgcatttcctttgtgtagccactggcagaaacctccacatcaagagtgtcttctctcctgatatccttaaaagttggaaaaagctcactttcgtagctgaaacgtttcataaagaaatctttaatgcatttaacatctctgtcaaa

SEQ ID NO: 341109 - DNA, 1000 bp, Homo Sapiens; identical to SEQ ID NO: 159778

SEQ ID NO: 341110 - DNA, 1000 bp, Homo Sapiens
tttttttttttttttctctagtaatgactttattcatgaatctataatggaattcaaaatagcaaagaacatgaaaatgttcagattaatatttattaaccaaatgcatcagaaaatacatctattttcacatatcaaaagtgcctaaaatgcatgtgagaatataaatattctccactttgtggaacttcaagataatgaaaaattgcttaatacactttgccacaaaaactcattacactgcaaatacagaagaaataaaataactcattacattgcagatacaaaagaaatcaaatgtaactggcaaaataaccatttcatggctaatcttttggtaaagtgctattttcacactgaaaaaaagaaattagaaaagattaaaaattttaaattctgaaccatcattctgaaagtctgaagcgttttctttagtattcactatgttcatcacattcatgtgttcccaacatgagactaaacactatctcaaaatcttaaaaaatctttccattcacagattatttcctggaagttaaaaattattacatcattgctaaatgaagcttttcacaatacaggcgtgtattagatacaacaaataatttttcattgttctaaacatgatctttggtttaaagctgtcccgttatatttttatagttggatggtgtggtcagtaaaagattcatacaacagcatactagttttatttgagccatgtaagaaaatagggtcaatcacctaagggcaatgaatggcatgttatcaagaatctggcgagatgaattccctgaaattcataactgatgtgttaacggaaatcagtgttgctgaacagtgatttactcatttcctttcctcaattacctctctcaattcattaacaacattaaccaatgagaggaaattagttggaaaattcactaacagcattagccactaagaggaaatcggctggaaaaaaaaaactaatctgaacaaaggtacacagatgcaa

SEQ ID NO: 341111 - DNA, 1000 bp, Homo Sapiens
ctagagagcgctgcgcttcttccgcagggggctgtggctgctgcagagtttcaattctgcatactgcaccttttgaacatcagacggtaccctagagaggaagtctagtagctcattattgtcgatggaatagggatttcgaagcttcttagtaaatttatttatgccccagattaaaatgatgtaccgcagtggaatgaaatacaaaatgatggtggctgctgccagaatcaaacaggccagagatgaaaggaaggggaccgtccagttaaatgtgttcttaatcctttctccaaaagaagctatttcctccaagacgttttgaacagttgaaacaatatcctgtaccatatagattctttcaatcaacccctttttctcagattccttgtcatcttcatcctcctcgtcatctatgtctgtgctctcctggctgtcctggatgctgctgaccttgcctttcacaggtctgatgaaattgtagacaaagatcagcaacaatgccaaggggatcatatatagttcaaaattccagacagtgatcaaaaataccgcgaatgctattgtacttcttaatgtggattcccactggaagcagcttttaaggaactgcattgtattccatattgccatagtgattcttttcacacggtccacatctcttgataagatctttttggacagcttgcggctgtcttcaacaaagcgcttttcccggggagtaaaagtcctaatacttgctttcaccggattatatataaggtccatctctaagtaaataactcctttaaaagcttgttctaaatctttattctttagtacataacaattcggttgtccatctctaatggacagcaagggaatggcaacttttccaagaaaatctgggggtttatctccatcttcatcaaacactgtcacttccaaaacatcatggatatctttaatgggaaatgtaaaaactttgttccattcagggttgaggtttttgtagacggta

SEQ ID NO: 341112 - DNA, 1000 bp, Homo Sapiens
gaaattgcagaaataaattttatttttaattttcagaagtaaaaaaagttataatactttaactgttaacaaggcttagctgatatccagttaacctaatactgcattaatgtttttattcttttcttgaaaatactcaaatacacctacattgtgctcttttaaaaaaaaaataaggatacttacatttaaaaagttttttgaggaagaaaattgtacaacattcatgtttttcatgacactgaatgatatatcaatttatctcttagaagaaaaagtagcataattaaaatcactggttccctaatcttcaactctctctccacaaataaaacctacctcttttcacaataaaaaagcaaaaaataatatacaatcaaaaggagctaaactgaaactctttatcccctttgtcaaaagataaattaattgtgggagatcaacataacaatcatcactgattttttttcttttaccatttagctctggttcaaaagataaataataatctataatccagaaatgtatacaaacttcttatcacattttcccttattctgtaaaaaaggaaaataggtttaatgtttaaaggaagcattagtgtgatattattaccgaaaaacaattttgctattatcacagctcaaaaagtacccacaggaatctttcaggaaacaggttactgtccatttcacaaaacgtgaaattaggtgatcataaatacacaagaaaaacaaaacattttttgtccttagttatattgctccctcccagcctgaaattcagatgaagactaaacaacttctgcagatcacatctatctattttagcaacttaatggaaatgaaaagcaatcttcattttaaaataagtatcataacaccatttttgaaacgcaaatgaaactctcatcatataagagaatgtcagtatcaaatttttgtatcttgacaattaggtaccataatcaatgaatataatttgaagctctcaaattatt

SEQ ID NO: 341113 - DNA, 1000 bp, Homo Sapiens
ttttttttttttttttactataaaagcaaactaactttatttgaataatctaaatagagaacaagggtaggtgaatgtgtagccagagggaaaatatcctatgtcaagtttcaaaacataacaagcaaaaataagtttatttctaaaagaaatttcagtgaaagaaaaaggatgtttattatgacataatatattgattcctaatggtggatctattaactgtttgtctaatctagtcaaaatatttaagctgtttctgcatatgtaaataaggcttaaaaattagagaacaaaatctgttctctaattttacctagtaaaataatggtaaagcaataaactaaatttacaaaggtttcatagatatgcctatcacaagtttaaaataaaaacaatcaggagagaagcatgtcaacaatgtgtaatttaatttcaacaatgtgtaatttaaacattaggtttggataacaactggtaacaaatcctactctggcttggataataactgctaacaaatgctaacttaaaagttttcatgaattcaatagctaccaatacaacctctgtcatccttctcaccttctcttacttaaatggtagcaaaattttcttgaaataaaaaaaaaatctgtttgggaaatggttttcttaaagtaaacagacttggatgcttattaaaaaattatctatatatattttaatatgcaaaaacaaatttacagatatctacacgagcaaaaacaattttctttacatttttagtaagctgcagcaatgaggatattttactttgaacacaaacatatgaaaccttcaaaaaagtccacattttcataggaagctactttacaaagaaaatacatgtactccagttgaaaatacaaacactgtctgctttatggtaaaaatcccaggaatcatattttctcattttactatgcagaatcagagttcgaaaaataataatctttctcttcttcatctaaagattccacagcat

SEQ ID NO: 341114 - DNA, 1000 bp, Homo Sapiens
gtcatttcaccttttaaaggaaaataaatcaagtaggtaggtaaaaattactgaactaaagagatactaaagatcagaagactggccaattgagaaaatcaagtttcatgattaagagtgactcaggaaggatgtcttagttatgaggggggcggtggaagacagtttatatctttgggtatttatggcaggtcagaattaaagatttaactttttcccttactctttacataaaaagctggtttatctgaaaaaagtatcaatctagacttggcaataaagtggcacttaggcactatattattgatatctacaatgacctcctggatgcacaagagaccctgaagggcttttttgatcagcaaaacaaaaacagaaaagcaaaaaacagttaatttttgtttggtcaagtttactcaaccagaccaccttgataccaacaatgctggagagcatttggcaagagcagggccacaatgccaaattccttggaaaggtagacttcctatgatactttcatggattggcaaatttgtggggtttttttggtagtagcttttgagaatgttagtttctggctggggtagtgacttacatctgtaatcccagcacttcgggaggcgaaggcaggtggattgcttgtgcccaggagtttgagaccagcctgggtaacatggtgagaccccatctctatttttataaaattaaaaaaaaaaaaaagatagagaatgttactttcctataaagccatgataccctaagtactaagacatgtctgttgttgtcctttccttcataacatttctcataacccgtaatttacttctcatctgtctcccctaaaagggcaggggccttgtctattctgttcattaccatatacccagcacttaataatgtctggtacatgtaagtgttcaacaaatattagttgaatgaataaatgaagtatgaatgaatctcatacagctcaacagacctgggggaaaagtgaagacaa

SEQ ID NO: 341115 - DNA, 1000 bp, Homo Sapiens; identical to SEQ ID NO: 159780

SEQ ID NO: 341116 - DNA, 1000 bp, Homo Sapiens
gacgcggggagagatttaatttacatagcagccacttggggtccagtcagagctggggcagtgggggaatctataaccccagagggtaccccccagacccccacccccgggagaccagtcctcaccaacccttggatgggctcccaaggttgtgcagaagatgctccagtcaaaaggatagagacatttgggaataaggctgtccccaagttgggggaagtccacggcctggagtggtggcctacatggtggcccaggggtctgagagaccagtccatgtcctgggcgagtcctcagcctggtggccctagaggaagccttcgcggcggaactgttcctggaggagggcgcggtactggtcaaatcctccttccacacgggtgacgccgcctccttcgcacacccacaactcccggcacaccagcctgataaagcgctcatcgtgggacaccagaatcacaccacccctgaaattgttgagggcacggcccagagcctcaatggtctccatgtccaggtggtttgtgggttcatccagaatgtagaagttggggcagggcatagtcatctgagcaaaggccactcggctcttctggcccccagacaggctggcaagaggacgcatggccagttctccggagatgccataccgacccagctggtgacggtactcctcctcaggccgcccaggaaacttgcgtgccagcagttccacagcactgacgtttaggtccagctgctccacatggtgctggctgaaatagccaatcttcagattcctgtgagcgtgtctgatgccccgaacaggtgccaggtcccccaaaagcagcttcagcatggtagacttcccagccccattctctccaaccacacagatgcgagactcgagatcagcagacacagagaggcgactgaagatgacgtgcttcggatcgtagtagaaatccacctcatctagctgcagaattggcggcgagaacttctcaaacccatcagggaa

SEQ ID NO: 341117 - DNA, 1000 bp, Homo Sapiens
gaataatattatgggggggggggctaagacgtttaaattaatattgttttcacatcaaggaaccatcgtcagaacaaagttcccttgtaatggtcggccctgtcagtgaaattttcattaggatgataatgtgcaaggagcagggagagaaaggacaaggcagtgaacacatgcattccagtggagggagaacgaggctgatgtgcaacacagctgaggaaaatttatagattaaactattcaaaactgctaagcagcctcctgtaccacataagtccagtagttctaagaaaatacagatatggtagaaaaagtaagaaaattttcaccacaaaaccaatagttaactactaacagagaaagttatacacaaaatatatctctcaatacagtgatcacacctcatcttagtcaaccgactcgatggccggagcagagcctgtggacgggggcttttgcacagcgcttctctgactcttgggctcagcctccaggtgcgctcccagggctcttttcgaggaagtgttcagctccttgtgagaatccagggcagtacagggctgcatcacaggtgttgctaaatccctgttcgccgctttgatggccgctttgatggatacctgctctttcaggacttccaccttctcattgagctcattcctttctgtttgaagagccctgcacagcttctctaaccgttccagttttatttgaagggccttgtactctttatcacggactgttttctcttcagccatttgcagaagtgctttattattgttttcccatttggtacgccaaattattgtttctttttccagttttttaattttctttgtcatcttttccatttcctgtctgaaggttgtaaacagttcattgctttttgccatggtagtctggaattcttcaaacttatccatataaagagaaagctgctgttttagttgtacttcctgctgtttcatttgttcgtatttgtgcctcgattctgtcgctt

SEQ ID NO: 341118 - DNA, 1000 bp, Homo Sapiens
tttttttttttttttttttttttttttttttttttttttttttttttttttttttttttttttaactcatacaaatttattttaaataagccttaaaatcagaattaaattgataaatgaagtaatctattgaaaaatgttattttacatccattctgggtattaccacaaattttaaaagtagaagcatagcatttgccagttattttaaaaaaccgagtcaatacaaattagtctcaaagttcttgaaaattaataagtgatttttctcactacttaaccatacctggaataacctttgaagaaacactactagcaaactttagacaacaattataaaaccagattgttggcagaggacacaacaaaatgtaagttagaaaattcataaacatacatttattcaggaaatacaattactagaatccttgatatttcaatgatcattccacattataaaatattcacaaacatgtagttttttaagtctacaccaggtcatgctgacattctttttggataagccataaccatttcttctattaaatgctataatatccattttaattgtaaacaaagtacttgagccagactacttaagtacttgagcaaaataacttaaaaaaatcttaagaggaggaggacaatgatattttttaaaaacatatttgaggctgggcatggtggctcacgccagtaattccagcactttgggaggccgaggggggtgaatcacgaggtcaggagatcgagatcatcctggctaacacggtgaaaccccgtctctactaaaaataccaaaaaattagccgggagaggtggcacacgcctgtagtcctagctactcgggaggctgaggcaggagaattgcttgaactgccttgaggtggcggaggctgaagtgagccgagatcacaccactgcacgccagcctgggcaacagagcaagactctgtctcaaaaaaaaacaaaaacaaaaaacaaaaaaaaaatttgaatc

SEQ ID NO: 341119 - DNA, 1000 bp, Homo Sapiens
acgtttcattatagtttttaatttgtatactttttgtttactcataaggcagaacacgattttaaatataaacacacatacataaacatacatatgtacacattttgattactcatgaggcaaaacatgttcatatatatttgtgtgtgtgtattttttcccatttgttttggcatttcccttaaacaggatgttaaaagataaagaaatagatttagtctatttttctgctagagagaggggcctcacacttcttgttgatttgcaaatgcccttctcctctttgtaagtataagaaatatcaacttctttatttattgtggtaaatatacataacataaaagtgatgattttaaccacatttaaatgtgcagttctgtggcattaagtacattcacactgttgagcacccataaccatcatccatctccagaactttttaccttcccaaactaaaactctgacccactaaacactcactctccattgccctcttctcccagcccttggcaaccaccattctattttctgtctctgtgaaactgactgctctagattcctcatataagtagaattatgtaatattattttttgtgataggcttattccactttgcataatgactttaagcttcatccatattgcagcatgtcagaatttccttcccttttaaggctaaacaatagcccattgtatgtttataccacattttatttatctattcatctatccatggacactgggttgcttccaccttttggctgttgtgaataaagccgctgtgaacattggtgtacaaatgttcgttcaagtccctactttcacttcttttggatagatatccagatgtggaactgcagatcatacggcaattctatatttcatttctaaagaaattgccgtatcattttccatagtagctacatcattttacattcccaccggcactgcacaagggaatccaatatctccacatccttgccaacatttatcttctgtt

SEQ ID NO: 341120 - DNA, 1000 bp, Homo Sapiens
ttttttttttttaaaggacaaatcagactttttttattaaaaaaatactttacaggaaaaaaaaaaactatgcattccattgtcctattttacaaagaaatagcttaacaatttaacacacttagacagctacaaaaaagcactgtgttaaaaggattattcacacaaatttagatttaagactattcattaaaaacctttttaaaacactcgttaatgtcaataaacaaactaaggccacacaacgcaaatagtccgccaggcaaatatacatttcatctatatgcaaagacctcttagataaataaaagccacaggaaaaaaagtcttagctgccaatcaaaatggagtttactcacagaaaacactattacatgaaaatttacaacatgtgatagtagtacataagtatttctttagagagaattgaaaagtgctatattttaagagacagtggtctcaactacatgcacaagtggatcctaaaaaatgtatgaagaaaatggaaggccataatatttatggagagatacttgcttttaaagcaacaaactttcaagacaaggataggtcccttacgtgctaaagaaaaacatttgtactgtgcatttcctctacttgcatggccaataaatacagctacgacctgtttgaaaaacaaaacagatgtgaacctctggcatgtgctagctagtgaaaggttcttttttaaaaacctgtagcaatgataaaacagattagaaagatacaaaattatcctaaaggcataaatgcaaataaattttttatggcaaatacagatgaaaatataatgggctaatttattaatgattaagaatatattcactaagcgttttcatggatttgggagtcttgttcctatattagctttcattctagacaattaatatttatatagggaaaggcaataagcaagttttttccagtcattaagtgtgacttttatgcctagtaagactgatgcaagacatcttttcct

SEQ ID NO: 341121 - DNA, 1000 bp, Homo Sapiens
ggggtagagttctgtattagtcaaggtaaatatactgtcttgaggatggggatgcaaacagtgctctgtagtgttgtagaaatcggattttgaaattatcagtacaaaaataacagcttgattaaaattaatttgtatctgataattgtttacaagttatgaaattcagtgatgatttacaaaatccaaacagacaatggatacctaatgccactgagctgtaaaacaaaagttatgctgacatctagtggtaacatacaaaaaatctatgctttacccaattttgatgatatcatttctcttcacaaatttcactcctttgttgatatactttcctgaactcttcaccaagcagatcaatatcatcctcttttttaaatactcctttagggagatagcctagtaagtttgtagcatgctctttaagaagttttagcctttcttcttcaataattgcattaataaatccttgccgcctttgctgcaactgccactcttctagttcacgttgtttgtctgcaaggaattgttggcgacgctcttcaataagtttttccacagccctcctgtgttccagctgcttcattctttgtttctgagcattcattaattctattcgatcatcctcagcaaatttagctagcatagtttttctaaagttctcctcttcctcttttgcagcctgtagcactaattccttcaaggccatttgttcttcaaaatcttgcttcatctctttttgctttctcaatttcttttctgcttcttcttttagcttgctcttatatatttcagcttgttcttcctggtataattcttgtcgcacttgttccaaatcttcacgttgccgcagcatttcttctaatttctgtgtcaacgcattctgaagctgtagccttttctcctcattttcttgaacttttgccatccgatcttcttctctttgctgctgcatgttagcaaactctatgatttttctgttttcttcttccatctcctc

SEQ ID NO: 341122 - DNA, 1000 bp, Homo Sapiens
ttttttttttttttttattttttttttttttttttttttaattctggaagatttttaatcaatttaacactattatacattagaggaaaaaattttgcacaaacattccctcacaaagccagtagtcttatatttacatagcatgattatggtaatttaaaatgttaatctatgatacaatgttacttcagaaaacatataataaaatatagttgtcttatagccatgctcccatttttgatgaaagctagttagcaaatcctaatgttagtttaatactttaaaaatgcataacagatattcagtcagcattataaaacctttaagacagaaggctgtcaagcagaatagacagagggctcatcatcacttatgtctgaatcttcatctactccttcaataaccgatttcttccctttacaacaggatacaattaatccaatcaaaaataccccaagaaaggcccagttaccaaaatagtaagcagcactgaagaaccagaacttgtgaaggaataggtatgtccgggtaacagtacactgatcttcaggagcatctgcatcacatctctttggcacagaaagggttgaattgcctttatgattatcagaagttatattagtctctattaagtaattttggcttccatacataacatattggggagcaagactataaatcatgtagctagtgtgaaggacaataagcagaagtatcatgcagagaaaaaggagtgcttggggcctggttctacctcttctgattttatataatctaacccaaaagaaccatatgccaatatttcgaattcctgccattgaagtaaaaataaagtacataataataattgttataagaatataatcaagagggaaaactgtttgtagtaaaggcaaaagcatattcagtggattactcaggttagctccaaaaattatgaaaccagaatctattccagctgaatgaagagctttatctaaatttgacaagaagagagaaa

SEQ ID NO: 341123 - DNA, 1000 bp, Homo Sapiens; identical to SEQ ID NO: 159784

SEQ ID NO: 341124 - DNA, 1000 bp, Homo Sapiens
aaatagagatgaggttttgctatgttgcccaggctggtctcctggactcaagcaatctcccacttcaggctaccaaagtgctgggatttacaggcatgagccacctctcccagtctcagttattattttaataaatgagactgaacgtcctcttataaggctcactcccttgttcctactacatttgctctgtttaagtatctctttaaattcttcagttaagatcatcccttttatcagaaacctagacaccacaaagtagctttctcacctttaattctccatagggatcactattatactataatatttgcatacgtatgtgtatatatgtatttgcttttttaaaaaggtaaaaatgctcttctcactctttgtcgatataggcacccaggtacgtagttagaaattaaataaaggccacaataatttcccaaggaagatcattaaaaagaaaaatcctttcttcctctaatatcacatagctggcctttatggcatgccagctaagaaaaaaggtattgcctatggtgacaggaagactcaatctttctctctttgggttgtagctgaatttctatcaaaagtcctagtaaaatatataactcctcatttgttctaagccaagtcttttcttcagttttccttcaaacaatacctttactttcccattagaatatgaagaattggagactgtgaacagcaaggtttggggtgggtatcagtcacttcaaatctggctatgcagagagagggaaagacatggcagaatagcaggggtggagggtgagtgaaatgtatcttcattgggagtattgaaagagagcaagtttttcaaagttgttgccggtatctcatgaaagcccaggctgctaccatggtgagggcaaacactggcaccagcaccataaatatgggaataccacttgggtccccttcacctcgatgtcctataggtccattctgcacctgtaacctgtgctgcactctcagagacaca

SEQ ID NO: 341125 - DNA, 1000 bp, Homo Sapiens
ttttttttttttttttaggtgatacaaattttatttttcatgctgaaatttttttacaaattttattgcgtcatacacaactacaagagtaacagttataactgaattaaaaaaatagcattttgggggcatttctatttgtttgctattatcataagcatgttttgttacatgaacagcaataataattacaattacagaactgctcaattcataaatgtagtaagtgtgtcatgatggaggctactacataatataaacagtaaatgcccaaacatattttcatattctatattatttattatataactagaatcaaggattagaatctaggtaataccatcattcaaatatctgaccaagtcaatcaagtgagcaagcacatcaaatcattttccaaaatctgttatagtttagttctaaagaaaaatataagatgaaacacataaggcatggcttgttaataatttatgcctaaaaccattatataataaaaatctgcatattttgcaacttggcatttgtttcatctgacacaataataaaaaagatgaatagtactatcagcacttggaattacccaactacagctgatatagtacctcccagacttctagtttctaaaattctgggtgaagtgggacaatttgaactataacagtctacatggtagtaatattaccttttggccactggctcaatactaatccttttttgttttttaatatataaaatatgctgaaattgtatctcttaaaacacatttcaattaatgtaattaaaaacagaagggtaacagcttccttttagaagacttaagacttagttatgaaaaatctgccatatttgttaaattaatccaacatttttagggtcaaatatagatcatactacatttttcaatttagagtctgtgataaatacttgtacaaataactataaacacaaccaaattacttttaaaaatggaaattaccatttttatctctttagtaacttt

SEQ ID NO: 341126 - DNA, 1000 bp, Homo Sapiens; identical to SEQ ID NO: 159786

SEQ ID NO: 341127 - DNA, 1000 bp, Homo Sapiens
ttttttttttttttttttttttttttttttggcagtactaaagaaaccttccttctcaggttcccagcatgctattttattgatgtaacaacattttcaataaagttggtaaattatcactatattactgtcttatagcaacatagcaagagctttagagatcatataagtataaaatgtgaatttaaaaaaacaatgaatatgcaggatttttattagggcaagcgtttccataaccataaatatttctttaaaacaaataaatgtcccaagatctctgttagtgatccaaactaaggagaaattagtaaaattaattataaatgaacaatttcagcatataaaccaacaagtcttttctagatttttaacactgtgacccaattgcattattttccaagttagaatgactaataatcaatgaatgtaaaagcaataattaatacagatgacattctacttttccacagtaaagaaataaacaatctaatatttttataaatcccattttatatcacaaaataacctttactaagcaaatttttttaaaatctcaggaactatagacatgatgaaaagatagatattttatataaataattcaaaaatactgtcaggcaaggaaatgtaaaatccttatttgagtaaaagaaaatgctataaagcaatgagttatcaaaatacagaagaggtattctaaaacaaatgaaaaaccaagatgatgaaatagtgacaactacttctaatgtgtaacagatactgaaatgccaaggtgaaagtgaactgaattatttcttaaagcagtggagaatatgtaactttcaaaaatgcaagaagcacagcaaattaactaattaacttaccacctccttcaaataaaagcgagaacctcttgggagaatttaagcaccattagcagacacatcttagagcagttaatgaaatgttttgtatttcagtagaaaactatttcaatggtgaaaatgatgcaggaatcaga

SEQ ID NO: 341128 - DNA, 1000 bp, Homo Sapiens
ttttttttttttttttttttttttttttttttttttttttttttttttttggttccccctgcaggctatattagaaatgacaggtagctgggcgcagtggctcacgcctgtaattccagcacttcgggaggccaaggcaggcggatcacctgaggtcaggaattcaagaccagcctgaccaaagtggcgaaaccgtctctactaaaaatacaaaaatcagctgggcgcagtggcgcatgcctgtagtcccagctaatttcttgtattttcagtagagacggggtttcacctttttgggcaggctggtctcgaactcctaacctcaggtgatccgcccaccttggcctctcaaattgttgagattacaggagtgagccaccgtgcccggccagaagttttatttccaaaccccaggaaggcattacaaataagagatagaaacccaaattaagctctgaaacaactggagacaggcctgcctaggtgatcaggagcatccaggcagcagggatgggaagcagaagagatgcattctggatagggacctcaccccagagcctcagtctgtacatacgtgtgactattcagggaccgggagttgagaaccagaaacccaccaatcctagtgttgccctgggtgggaggcagagaaggcagcagcacgtgaggtcaaggacattaccaagtctgaccttggcatttgttgcctgctctcatccccaacagtccataaataagttatccagcacatctcaggggtggaggcgggggagcaagccaactagccatagcctctggaagaaggggcaggccagcctggcactggggcagagctacagcagaatgcagtctgactcgtgcttcggcctctgccgacgctccccggctgggcgtccagatgtggctcctctcccctgcagtgacaggacccgcgtccgcatccgcactggctgcgctgcctgctgctgttgatactcctcttgctgaagctgctgggcca

SEQ ID NO: 341129 - DNA, 1000 bp, Homo Sapiens
gaattccgccccggtgctaattattcttaggggaggcacataaaaacatcatttattgttagaaatcatgacatgatacaaagtcaaaatccacttgtgtcttgctaaagactacagaaagccatgctcagcagcttcttctccaatgctggccagcagcgtacctttccaagtcacaaagcagttcatcccgccctcaaggagccgacagggcagcccagagcctcccactgacaagtgtggtcacccactcaagatactgggaaagatccctgttctagcatcacattttaatcagatttgtcaaaatcaggttgcttggggcaaaggctctttcaccgaggatgctagtcctggaagacttctccttcggcgagccgccagctcaatcttctgaaccaggctcacatcccagggatgggtcacaaaactgatgacggtgcctggcacctcgctccccacacggcccactctccctgctctgtggatgtaatcttgcagcgttggggggaaatcataattgacaaccagctccacaccagtgctgtccaggccccgagaggctatgtctgtgcagagaagtatgtctcgggagctcttctggaaggactggaagattcctaccctcatcaaggctggcatttgcccctgcaaccttaggtgttggattttgtggtcatccagaatatatcccagccagttcacagtgctggagctattacagaacaccagaacagttcctgagggaccagtcctttctgctctgtcacgatgcttgaggatgtgcaccagctcggccaccttatctgctcccttcagtctcagaaatgtctgtttcacatgaggcatgatacagtggagcttggagctggtgatggtggtgacagcatctgggctggcgactttattcagcaactggcctacaccttcgggaaatgtggctcctaccagcactaactgagctttgggattgaaggggtcttccaagtcagctgggcct

SEQ ID NO: 341130 - DNA, 1000 bp, Homo Sapiens
aaggataagcaagcttttattccgtcaagagaacaaaggtcaggacttttatcctggtggggggatggggagtccagattccttctctgatgaggcaaaaaaagaatcaagactcctgttcaagtaaagggcagagggtgagagctagtactcttattctagaaaggaagtagatacttttctttgataaaggaatgaacggtagactcctagtttgcagaaaaggtgggaaagatgtgacttgtactttggtaaggagatagggaaggaattaaggctattactctgaagaaagttggggggccagggctcctatttttttgctgaggagatggaagatcagggcttgtattcaataagaatgggaggggccaggggatgcctggcaaaagccttgcactgtgaggtgcaggtagaggcttttattctggtgagaggacatggactctctctctcccctcaggtaactgtgccctgtaccagcggggaggctggtggtaccatgcctgtgcccactccaacctcaacggtgtgtggcaccacggcggccactaccgaagccgctaccaggatggtgtctactgggctgagtttcgtggtggggcatattctctcaggaaggccgccatgctcattcggcccctgaagctgtgactctgtgttcctctgtcccctaggccctagaggacattggtcagcaggagcccaagttgttctggccacaccttctttgtggctcagtgccaatgtgtcccacagaacttcccactgtggatctgtgaccctgggcgctgaaaatgggacccaggaatcccccccgtcaatatcttggcctcagatggctccccaaggtcattcatatctcggtttgagctcatatcttataataacacaaagtagccacagaccgtgtctggtttgtatctgcacctggcaggggtcactccctgggcccgccctcctcgtcctccacctcctcctcttcctcctcctcctcctt

SEQ ID NO: 341131 - DNA, 1000 bp, Homo Sapiens; identical to SEQ ID NO: 159787

SEQ ID NO: 341132 - DNA, 1000 bp, Homo Sapiens; identical to SEQ ID NO: 159788

SEQ ID NO: 341133 - DNA, 1000 bp, Homo Sapiens; identical to SEQ ID NO: 159789

SEQ ID NO: 341134 - DNA, 1000 bp, Homo Sapiens; identical to SEQ ID NO: 159790

SEQ ID NO: 341135 - DNA, 1000 bp, Homo Sapiens; identical to SEQ ID NO: 159791

SEQ ID NO: 341136 - DNA, 1000 bp, Homo Sapiens; identical to SEQ ID NO: 159792

SEQ ID NO: 341137 - DNA, 1000 bp, Homo Sapiens
gactttaatgatgttcatttatttaaacgatctgtatgaatttggtgattttgtggatacgcccctgacagacaaggattcacagccgacggaagtcagggaggctccctgcaaattcttcatctccgcggggcctgcccgagccctgatcctgcagagccgtggggctgaggtagccgccggttgtggtccaggagtgcgtctttctggatgcggggcaccttcatttcaccgtagcaaccgggtaccaaaagtagaagcggatttttggaaaatgagtcattaggtcccaaagagaacctattgcaacatggactccataacgttcttgaggatcatcctgagaaactgatgtctctcgttagacaaaaatgcacgatttgcttgggaaaggggagtaaaaatggtgctggcatccattggctggctgggaacttgaaccagcagctccaacaagcgacatgtagaaaatgaggtataggccgggcgcggtggctcacgcctgtcatcccagcactttgggaggccgaggcgggtggatcacctgaggtcaggagatcgagaccagcctggccaacatggtgaaaccccgtctctgctaaacacacaaaaattatccgggcgtggtggcgggcgcctgcaatcccagctacttgggaggctgaggcaggagaatttgctggaacccgggaggtggaggttgcagtgagccaggatcacactactacactccagcctcggcaacgagagcgaaactccatttggaaattcgggggtgaaactgcagccgccgcgtcccgaacttcagaagggtcccgtcagcaccacagcagcttctgattgagcgcgatgacgtcactgacgaagccgtctgcgccgatgaagtcccccgcgatgatgttggtgcaccgtgaacccggccccgggcactgctctcggacccacgcgctcagccgcggaaggttgggcagcgtcatcttctccagggactcggacgggt

SEQ ID NO: 341138 - DNA, 1000 bp, Homo Sapiens
tttttttttttttttttttttttttttttttttttttttttttttttttttttttttttttttttttttttttttttttaaagtccaataactgtatctttgggggaaggttaaaagaatgtttaaatacaaaaaagaaagtaaaaaaaaaaagagagagagacaaataactctcctctagaaaaaagggcttgggagccctggctaggccaggcagggaggaagcaataaatagggggagaaaatggcaataagacgttatatagcccttctaacaaaaataccagaagggaggggtgagggacaaggctgtctgagggagggcaggaggtgaggccatggcttggtctcttttgcgcttggatggccgtcagctcagcatgaggcatctgaaagaactacccagattgcagaagagagaggtcccagcctccttggaaggacatgatgggggaggagtggagacaacagctgagtgttacctgtaaaactcgagaacaaaatgcttctttgatttgtaaacttgcactcataaatacaatctctcaaaatagaattcagtggatttctcaacaagtcttttcaacagtgatacacaatattcttccctttggaatcggtgctgttaaatagacatgtactatatagccattttccaatgcaacattagagtacagaacaggtattctgtggctagtgagtaatactgctgctgtagggtgcatacacgttaggatcggacgaggatcttactcaggattgcatcgtagtagggacagaagaccatcttgttatagttgaccaggcgagcaaatttaatagcaacttcctccagctctctctgaactggactgagtcccccagggactgtgggcaatggcttctgatgacccgaggcaaggtaggtttctaagaaggtcaggattcgagattccatgatcctgcgaatggggtcatcgggactggccacggcctggatctggcccttgagcacggtctc

SEQ ID NO: 341139 - DNA, 1000 bp, Homo Sapiens
gctcacggccatgatttattacagtgaaaggatacaaaacaaaatcagcaaaggaaaaaagacacatggggtgaagtcaggggaaactaagtgcaagcttccaagaatcctccgccagtggaatcacagaggatgagcttaattctcccagcaaccagttgtaacagcacttgtgaaacactgtcaaccagaaaagcttgttagagactgagtgcctggggtttttactgggagctggtcacaaaggtagtctctgcctggcacataccaaaattccagactcccagaaggaaagcaggtgttcaggagaaactatattgttttacagtttagatatagtaagctactttgatcagttctgggaatggtggaagccccctgaactccaagttcccagatgccaatcaagggccaaccttgtaaagcaggtctctaaggttaagtagtcaggtcggcttcattaacacttttttctgcacagcaattttatctcaacattttttcttcaatgcccataaatactcagtttcttgaattgtactttgaaccaggtttactatctgctggtttcctcattaatgagtcgaataagtctttgacacatgctcatcttatacacatgtatatatatgagtcatgttgtcaacttaaaaggtttgacagataataacctaatcaagctaaataaagtccagccaaaattaattaataaaaaacattaactaaataatatcaaggctcaatctacacctcactttagttatttaggaaagaaaaaaaataacctttatactagcatttcacactttcttactgactttagaacgtcttctgatttaggtggcaatcacttgcctagttgtacttagggcaatattaataaaataatgaatgtttctgcaagaaataatatataaagattaatttcctctttaattttaccaatcagaatattaaaaatactacatcattgctttagatgaaattccccatttaaata

SEQ ID NO: 341140 - DNA, 1000 bp, Homo Sapiens
ttttttttttttttttatgattttaatatactttatttaaaaagtacacagttttaaattggtttcaataggtttcaagcagaagggacactgcctaccacttgcggtcccatttctgatgaagggtgattatcatgtggcaaactcacatttgcatgactggcaaagtaaaaagatgatagataactttttgtcaacatatctttaagagtttatatcacgcacagtttaaaatcatgatgagatgctgatggttggactatattcatgtctcgtatgttgcaccatattttggttcacagtttatccatgatttagcatgccaagagaacatctcagtcagtaagagaacatctcagtcagtgtcaccttgagaagagcatcaaaagcagagggagcagaaggaggactgtctgggcttggagactcggcgcacccccacactcccttgcattctcctcaggatggaagccatgacaagattctgggcgccttctgatcttctgggcctttagacgttcacacttaagggattcattatacctgatttcaatgggtgccatggtgatgggggccacagattcacagaggcagctgctgtccaccaccaccatgaacaggttgctgcttgggatttgctggatgacaaaggacttggagcagtcttcacaagcaatattccctgtagtctccttgatggtgcgctcagagacgaatgctggatattcagtatcacaaggctccagggtctgtttcaatttctgggctttagctgtcatatcggagtgccaccaactgcagaggttaaattccaccaggaacaagacaagttctgtcatgatccattttactgcagagaggaaggcattataaggatccaggaggccatgggcgccatcgctgctttccttgttggctctacacatggcttggtagtcataaagggtaattcttttaaaggagcccattgttagcaatttgttcatcacagctccctcga

SEQ ID NO: 341141 - DNA, 1000 bp, Homo Sapiens
tttttttttttttttttttgcttttcaaatctgcttcagtttattatatttgtttctgtaagtttataacatcttttctaaacagacactaacggatctcttttttttcttcctttcttagccaggctaatcctaaaagggctctgctaaaggagatcactggaatttcccagatccctgccctaagcgtggagggtccttctcaaacactcttccatacagggccataactaagacaggcaaaggggctccacttcggctcctcaagcgtccatctcttgaaatctcataatgtctttcaggggcaagctgactcccacttagaatgatctgtgggaaaacataacgcgttccaaatgtgccactgagggagaagtcttcaaacttggtaaaagctgaccccacaggttctccacacgtttccaggtcagtggtttgacacttcagtaatgcacatatctgtaagtaatattggccttctactgtgtgcagtccatcaaaagcacctagggcatagatctcgtctgttcgcttctcagacatcttgtaagttaagtgacaacacagatctttctggcaagctgtgtaatttcctgtatttctcttaagcttggtgaaggtaaactcatcaaaataaatcatccccagaaaatctgactgttcagaggaaaatggcttgacactgctggcatacgcatgccagtcaacagctgcagggtaggtgggctcacggcggggccgagacttcagttctgatagcaacagctgaccactctctgtttccatgtcatagtggtacaccttgactgcttctggggcgtagattccactccctgtcatgtgcatgctggtgttgtgggtatttgcagcaagtagattgactcccatggccttggcccatgctgaatggaagggaacagccgagaggaggggcagcgtgttgtaccatgctgtggggtagagaatgctgtcaattgaaactcatccaccaccaccacag

SEQ ID NO: 341142 - DNA, 1000 bp, Homo Sapiens
tttttttttttttttttgagttgggtttttttaaaaagaagagaaaaaggcaatcatgcatactgccgggttcaacttagatacacgagctattgggccaccgaggaaaacggtgtggtagtaagcatcttgctactaccgcaagctggtggcatccatgagctatgggactggaaaaatttcacactgaggccaatttttctaactataaagttaaaaaggtctatatcctctcccttatttcagagggattgtgtggaaaattaccaataagaagagtcttgaatttattgcaaatattttcttcaacaaaatcagactctttaatgtgttaacggtctggttttgggccaggcacagttgctcaggcctgtaatcccagcactttgagaggctgaggctggcagattgcttgagcccaggagttcaagatcagcctgggcgacatggcaagacccctgtctctacataaaatacaaaaattagccaggcatggtggtgcatgcctgtagtcccagttacctgggggctgaggtgggaggattgcttaaacctggggcagttgaggctgcagtgagctgagattgcaccactgcactctagcctgggagacagagtgagaatctgtctcaaaaaaataataataaataaataaaaatttaaaagtctggttttaagtactttcctagggatggaagaatgaaaaaaatgagcttttaaggtaaagccctaaacctatggaatatggtctttccctataaagggaggtcccaggtctgagggacctctctctcgctgaatcccagtcaccttcatcttcttacattccataaagcatctttcccctctcttgtccctgggtgctgaaggatgtcacacttggacctgtcacttaattaaaatgaaacacgagatattgactaaagttttttccagtttctctgctccctcaaaatctaggggaaaaaaatctgaaaattatgcattcataggcgaagta

SEQ ID NO: 341143 - DNA, 1000 bp, Homo Sapiens
gaaggaatgtccaagaaatagtttattccaaacaagaaatgccaacttgaacagaaccaggaaatctggtgttcctagggcgacttccagctcctgcccctaattcgtgaactcagcccaataaaaaaaaccatcatcatcttaagagcctccagggtcacagtagggagaggagcaggccccttatttcctgggggaggtggggagcaggacggttgttgatggggacatgaagtaaagaaaagtgtgcaaaacaagtcaactgacgaggagcacacaatccagaaatagtctcggttgaaaggaggaaaacactgactatttcttttttaaaaaataaaaatataaaacctaaccatacattaaaatgtcttttaagaaatctaagagatgacatggacagccccaaggattgagtaatcatgtaaaaagtgaaaaatggaagttggatgaaaaaataaaaacacagtcgaacttcagcaggatgtaacaaacaaatatcaaagaccccaggaagaacatttggaagaatcctaaacaggtttgtttgcacagaaaactgacctgctgggtgagtgaaggaagaaagtatctaaataatgatgacgattatgctgacaaaaaaggccattctatgagtcatccaatgcttggggttacacacaggatcttatttaaccctgtaactcccctgcaatattagttttattatccctgtttaaaaatgaggaaactgccattcagagcgattgcatgctttgcctaaggtctcccagttagttagtagccagcagggctggattctgaacacaaacctgactccaaagtctaagctttccctgctcatcccaacatcttccagttcaaaggcaagcttctccctgagcagatcagaatgtagtttgctttttgtgtgaacccattttcctcctgaaataaactttctaagcacccatgcttcctattgtataaatagggagccgctccaccaataccgatt

SEQ ID NO: 341144 - DNA, 1000 bp, Homo Sapiens
ttttttttttgaaggcaagactgtacctttattaatttcctcatccccagaacttagcagagtacacccaacagagttcacaggtggtcaaagaggcagacaagtaaactggcccttaatgcacaacccagcaagtgtccttgaaaatgcacattttcaaggtgcttccagagccagaggagatagagaggactcacctccctatctgggcagtcgagaagcttcaggaaggacacaggcttacgcattgcttatcctttgattgggggatccaaaggaaagtcccatacaatgcatagattttttttttttttgagatagggtctcactctgtcacccaggctaagtaaagtggtgcaatgaggggtcactgtagccatgacctccctggctcaagtgatcctctcacatcagtgtccggagtagctgggactacaggcattcattaccatgtccagctaatttttttttctttgtagagatggggtctcactatgttgcccaggctcttctcgaactcctggtctcaatcctcctgcctcagcttcccaaagggctgggattatgggcatgagccatcacacccagccacggagaatcagagagtctcttaagagacctcccagctccttgggtctccattgaagcaaagagagaacatccagtgtatttctgcgtggtgcttgaagacagaggaaaggaacaacgagtcacagagcaggggacttggtgctctgtttctctaacatttcagccatctgagatttcattcagttcctctttttctttctgatacggagtctcgctctgtcacccaggctggaatgcaatggcgcaatctcactgcgcccggccattgactactttatctttcactcttcatttktgaagagtctgggtcagatgtttagcagaatgcccctaatgtggatttgtctgattatttcctcatggttagattcagattaaactttttttttttttttacaagatgccactt

SEQ ID NO: 341145 - DNA, 861 bp, Homo Sapiens; identical to SEQ ID NO: 159794

SEQ ID NO: 341146 - DNA, 1000 bp, Homo Sapiens
aaagttattgtgaagattttattgtctttatttttaccaaagatttcccatagtttgagcattcaaagcaataaaatataaaaatgaatcacagtgctctatgatatttaagatacttatatctcaaagaggttgaaactctacaggctgttcaaatatttatcaaatgcctttttagagaaaacactatgtacttaactacttctgcagggaagtaaaagtttgctgccttctccagaaacaaaataaatctgtaaaatatatgatttttagtgagcagaaagagccaaattagtgcttgaagtgaggcattagggaggagagatgggagctgacccttggagtatgggcagggccgagatgggggagcggaaagaggagggcagctacttcaggggctcggttgtattatcaagccgtttagaccacagggacattaggggagatccagagtacagactttgtgttattgatagtggggccatgcacaagtacttaattttcctgggtttcaccatctattatgcagtaataaaataccttcccctgtctaatccccaagaatattgaaaacaaaacaattaaacaagtaacaggtaaaaattccatttgaatccctgaaagatactcccctcatgccctaggatgtaacctatgccagtttatatacgtatgatatacatatcatacctgctaacttcttgataagaaacaagttctgaaagataaatgattaaaaattagtaaaccaaatgttatccttaagatttttttagttatagcttttttatccttttttcaaaccatgatgatatttgacacttaaaaaaatacccaaagttggctattgataaaaattatccttcaaaagactatatagaaaagaccagataaaatacattcaaggaagagaggcaatgtgaagttgtcaagcctgaagaacttatcacaatacaattatgggaaatgtctattttaggcataattctatgctatcatt

SEQ ID NO: 341147 - DNA, 1000 bp, Homo Sapiens
ttttttttttttttttttttctaattgagcaactttattcacataatttctacaccaagaactcgaggttatctctgatggaaccaatttcactaatatttactttaagggcagagaagtcaaccaagtcctcacagtctcaagaatcaaaaacaaaacaaaaatacaaacagagagcaagtgggaagataaataacactccgaaataacctagctacacacttttagtttccaatttttctagcatgaaatcacttttctcttccatcctgtaagacgtgttctctcctctctcttctgagttgggctgtgaagagctgccctggtctcccggtctgacggtgttgtccaccccatctgaggcacccagggaattgccctggcgtccggagccctggggttctgatagcctgggtctttttgcagggaactgatggtccctcgtgccatccctcgtgatggcacgagcaacacatgtagatgaaggagcctcaattgcagttgagcccagtagactttttctgcaccccaggggtgatgatggcaacttctggaaaccctggaagtgagggtctggatttaattttcctaagaagccttctgtttgatatcgaacttccatacttgctttatctgtagacactccaatacataaaggcactgtcatctgcccaggagatttgaggcaatacttttgatgaagcttgtcaaattcttctttaatttcatcgtaacgattccttccgtggcctggcacttctttatctgggactgaaagagttttgctgggtgacactgactttctaaatattccagaactatttccctgaacgtgaaggtcagatgtctgctgcgggcgagttgcgctgtgtgtggggttggtctttggaagtgatgaagatgaatcgctcttgggcaggcacctacctgcttccagagatcttttgcctaggttttcaaaagcctcacttaaactttttgcttttgctttgctggaagg

SEQ ID NO: 341148 - DNA, 1000 bp, Homo Sapiens
ttacccttataataaaaaactttatttaataaaaaaaattccccaaaccacagcaggaacaattaggtatgacaagagtgggagtgtttttctttgtagggctgagatacacaaaggaagcgggagagggcggagcgccaccaggaggctgcgggcgtggagcggggacaaggaggggtcggctgtctgaagcagtcaggctcagtcccagggtggctgggcctggcgtcggccatggccactgccaccaagggcagacaggcggggcaagggctcttctgggccatacttctggatctccaggtcagggtagacgggagagatggggcggactggagcttgctgggtggagtagggctcgggagtctctgcacagggaggtcacctcgtggctgtgccccaggactctgccttgcctgctcttgcactcaggagcatctttgggggacagccccccaccccacccaaagtctcctcagtgggaggcaaggccccaggccccagacgaagagcaggcagtggtgtcctgtcccttgggccccagctccgggctgccctactccatttgtctctaaggcagatttccatgtccccctccctccctggaccatgtggcctgcaggggcagggccaaccacactggcagcagtcacaaaacaacagactttaatggaaatcatgaaggagggaagcgggcggaccgggaaggggctgagtgacatcgcccatgccgctccctccgccaagcctgagcagctcctgatgccaccctctcctcacactccccagatcttttggcaggagggcagaaggttggaggccccttgttcagcatgcctgcagtgagcccagtgaggatgcggtggtagaaacggagctggggcagtagagtgggctcagcgggagtgagcagcaggaggaggtgttgtttaagccagaatgattcccaagtttccccaaggaagggctgtttgtctcctgggtctcggaggagtgggga

SEQ ID NO: 341149 - DNA, 1000 bp, Homo Sapiens
ttttgtacaacaaaaacagcttttaatatggaatagtccatgaacattttaaaatctcggaatggcttccctttttcaaagtcatgctttcttgcggtccacaaggagttggcacagaggagatggtggcagcggcgggtgaggtgagtggaggacagggcttctctcagatccgtgttagctggtgccacagactggatgggaggatgctctccactttctccatgacaaagtttaagggggcaaacaaagtgctgaggaaagcttttgcgaagacccccataagttccgggaactgatgtgtcaggagggccagcatggctgtgaaggaacataatccagcagtaaagagaataaagaagggaagctccttctttgggtaaactgagacttcatggaaagatggaagcagctctcggtctgctgtttctgtacagattgggtaaggataaaataggtgccccttttccaagggataagggatcatccgaaaagtgccttcccacgtacaatgcaaaagattcaaagccccttccactctcttccagtgtgcaagatgaaagaatgcatatgctattgcttcactgtctcctctcttcaggatatgttctgggggtaggattaagcttttcatttctagtaggtattttggcacatgaggattgaattccacagctctatgaatggcctctactgcattcatctctgctgtgctcagcccccgccgagatgcagcctcaggagagaatttgtcagagacagctcttgctttgagcaaagcagctgtgtagcatattgttgctgactttggtaagcttatatcatcatactttgctaagactgcctgaacatcagcatatgcttgtagttccagaagggcttctaaaaggttttcatggatattgaacatactcagaagggggaactccttcattaaatctctcatcattttcactgcttccctggtcctcccgagtcttctggcacacattgctagcct

SEQ ID NO: 341150 - DNA, 1000 bp, Homo Sapiens
ttttttttttttttttttttttttttttttgctataaataatattaattagaatttatggaatgcacaattcatggaattcaccagaacacaagaaacctttgagacagtgttgcagtattcacttctacagacaagaacgacccatcctatttcccctgcaaagacagctgtccttccctacgaaggattttaaataattctcactatgctgctcgcagcatcatccccaaagaaatattaatttacaaaataacccaatatccatataattcttttgacaaataaaaatcttaaattaaaaagcatgattctctccctctccccaccccctttattccaatttcaggtagcttggcactgagtaattgaacattaaaaaatcgagtttgtagacttcgtacagctgcgtttggtgctctgagctgatgttctggaagaattctgtggtcatttcatcagtagttctcgtagactttgcataggtggggaacttcaggtagctgcccactcctgccagctgcaggacgtaattagaatcctcttccagtgtctcgtacttgcccacgaggtcatagtggatgtggcagggatggcagagtgagtagacggtttgccagtgttcgttgaaaggctcctcccgctgggtgtgtgggtcgatgagataggccacaaactcctcgaatttgacatcgtcccctttgcgcagggcctcctgggtggcgttcttccgctggcgtttgatgatcttggtgccgtaccgcttgtggaaggagatgttgtacttctgggtgaacttgttgcggtaggcggacactagcctctcgaagggctcccggacaaacaggaacttcatgtagcttttcaagcggtggttgatttctgggatgctgtactggttcagggtcttcaggttggcggagacgtgtgcctcgttggccgggatctccatggggtcgctgtacttcccccgcccggtcaggaccatcatgagccgcttc

SEQ ID NO: 341151 - DNA, 1000 bp, Homo Sapiens
ttttttttcactgtagaaaatttatttgcctttccatggacaacaatcatttgtattattatcagtkttctacaacacgtagagttgtcaaatagcttaaagacaaggacaagtatagacccttctagaatcagataactcctagaaaggtcttctagacaatctgtagtgaagttaagtaataccttcaagatttcacaactgtaaactcgatcctggaattcaaaccagatctatatgtttctgtaaatccaggctcttttttctgtatcaagaagcttttggactggaagagtgtttttcagcaggaattgtggtattggccacccatcaccccatttaattaaaaatccctggcctcaggacctacagcaatgtactgaagaacttcagaacctcaattagccatttgccatcttgagagagtcttgtccatggttcaagtgttcccttggaactcctgaagggcttggagcttagtctgagccatgggaaatggccaaagagtctcaagattcccactgtatcctgtgccttggagcaggcaaggagaccatggcagccctggccccggtcagttcttggctttggcagttccgggaccaggacgctggtacagccggattatcccttcatcgtgtagccgcttccagacttctctctccagcttgaagtcatggtttatgtaaaagatcagccgcttccatgatgtatcatagtagtgatcagaaaagcgctcatggccctcagtgatgaagccataagcactcacctggtcacagagctgaagggcagtgagcagcaggagggccccagtggtggggcggtatatcctccagtgggcaccatccagggtcttagacctcagaaacctgttcttcatgtatcggagaaagtctgggtgcagcaacaggtacctgtccatgtgcagggcttcccgaaaagcttcctggggtctgtgcctgaaccagaaaaggttttttgacatcaccgtctgatt

SEQ ID NO: 341152 - DNA, 1000 bp, Homo Sapiens
ttttttttttttttttttaagataaaactgtaaacattctttttttttttttattaagaaagcatgcaaaaaaacaatgacaacaacttgtgagaccatatacccccttcccaggatgcagcaatgcaaagcattatgggtggtggcacaaaggactcaccaaaccagaaacatgaggagcagggactgaggagagaaaggttgggatgggtggatctataccaaataattactccttttgtccctctcctccactttctctcttatttcctcttataggcagtgagcttctgcagttttgcacacatcacccaatacaacaataatgactacactttgtgtccagcaatgctagaccaacaagaaaaagtagtattcttttcatttcatgaaggggaggggaaactgaggcccaaagggagtcaggtttgccctgtgccacgtagcaagactgggcttggtggaagggagctggaatctcaggaggcctaatggccaatctccagtcccagacccaaacttcagctaccctggctgcacgccagaattcttcatgagactagtttgcagaagacacagatgaacaaggggcatttgcatgtatgatcctacccttgcaaatcctgtatggatctgaacaggaaaagggtttagaaaagagaagtgatcatttacaaatggggaatattgaggagaactgatgggaagttttgtataggacacaccctgactggaaggaataaggaaggaaaagatgcctaaaatagggacactgggcaaaggcattttgccaccctctaagagaaattctcctttccccaatgggaaatattatgtcatacttcaaccccactaagtgccctccaacatcatgggagattcaagccactcgcacccccatttctttcttagaaaggcttcaaagaaataaagtgctctttagttaactgccctatcttgcccctttacttcagcctcactggacttcttcaatgaactc

SEQ ID NO: 341153 - DNA, 1000 bp, Homo Sapiens
ttttttttttttttttttttgttactggccatttgaggtatttattaatgaagattaaacatccaaagggcagtcctcaatgctcatttccatgattttaagagttgataactccatgtcatgattattgtcgcctttgacactggagaactgaacagattgggagggtgatgtgttaagaccacataatccatttgaaatctcaaccttttcagggtcactatcaccttcaatgacattcacagaagtttcccgatctgttaaactgtctgaaatacttggatgattttcatccaaagttgaagtttcaagatttgtttcatcattcacctgttgaattataaccccttctgaatgctttgatttataaataggcatgaaaaattcagttggtgaagggaatatctcgttctcatcctttggtgccgacaataacatatccaaagccttttggtattgttgacgttcctgctgaattgttacttcactttcattttttaattcatttggttctgaattcccagccttttcaaaatcaaatacattcaacatatcaacatcattttgctttaccgagttttcctccgatgtgcagcctaagtctactttcaggacatgcagcaggtggcgcattttttcctcctccaaatgtttattttgttttatatgtcgctcgaacagtcgttctaaaaacctgtttgaaaataaaccaagtttcaaaatttcatctgttacatcttcaatgaaactcagatacaacagttcttcttcatcagagtagattttacgagttgaagggggcttcagggaatactgacacattgcccttggtgaggaatgctgaagagcatcatccttaatctcatcccatgttgagtcatgcccttctaaaggtaaaggagctattttttctttggcatcatatgtcacacaattagatgcctgctttatgttcatttctgaatctgtcatgtttttagtctcagctgtccccaactca

SEQ ID NO: 341154 - DNA, 1000 bp, Homo Sapiens; identical to SEQ ID NO: 159796

SEQ ID NO: 341155 - DNA, 1000 bp, Homo Sapiens
ttttttttttttttaagcagagaggtatttattagagggtattatatggcatacacaatttccaggagcccacagataagggtttggatgccttcctgccaggaagagcacaagtagccaggacaaacacgtacctttacaggactattactgaggaaatcccactgccaccacttctctctactcagcacctgtgacaggcaggacaaccttcaccagagttgccccagatgaagaaaggcatcagctgctgtgcctataagatccactcttgccaagagcagcctcattctaggatgatcttgctccacccacctaactgaatgctcaccttcagacttccaaaagccaactgttctgttaccaaggtcattcacaaatgagacttctgcatagcaacaagaatcaatttaaaaaaaatgaagatggagtcaaaaaaaaagcaagaataatctttattccttggaaacacatttgtaaaaatgctatcaataagatgaaaagattcagaacacatttatttgtatgcagcacatacactgagcatcagaacgtctgctaaaatggaatacacctgtaaacaaatgccttagggagagtttataggtagtcagctccactgtgcaaggtatgcagctgataccttcttgctgaatagatttttgcagtagccaaaaaagatcagattttagtaataaaatatctcaaaggatgtcaaacattttttagagggcctaacatgggcaaaattacaattacatatacaaaaatggcacaagaatcaactgatttcacagaaatactaataaaacatttcaggtctattattaagagaaaaaaatgtttgactcagggcttgaaatgggggaaataaatattttggtacaagctttaacctaaaagacaacatattgatttctggttctaccaacagactagggcaacaaccatctcatcctactctacagaatgctttggcacaacttcaagaaaaccttat

SEQ ID NO: 341156 - DNA, 1000 bp, Homo Sapiens
tttttttttttttttttcagagcttttctttgtttttattttaaaggaaaaaaacaaaaaagaacaaaaaaaccaaaaaaaaaacagtgcaaaaacccattttccagtgtcagccttgcccacccccacccccaggccaccccagctgtgagcctgactcttcctcccactcagcaccccctcccccctcatgcatcccctaggggctggaggctccacttccctggagggccagatcccaggaggaactgtggggtggaaaaaacggaggggggggaacagccccagatccacctgccccccaggtctccagccaccggcaccaggtgcaccaggtactcctcttggctctcattaaccctctcctggtcatgctactagctggggaggggtggggggtactgatctgggggaactccctctgcacccctctttgccccggggccggctcggggctctcctcactgaggttggggggctccctccctccatcatgggggagagcagtgaaacccccaagtttaaataccttaatgaaagcaggggctggggaggaaggggctttagatctaataaattattagcgttttagtgtccgtgggagtgggggtggggtggggcaggatgtggcctccagggcccctccctccccttactggtgaatctcattctctatgaggctgtcctcgcaagactggaagtctgtgtccgtgagggcgtcgggtggcatcagcaactcctcatcttgggatgaggatgatgggggctcatcccctgagctcccaggagccccatccccatccccgtccacctctgagtcctgcagcacctgagcgatgtatttcgcagatttggggacagcagcagcagtggggggccgtccattgcttctggggtccacagtatctgtctccgtgtgctcaatcttgtagttgtgggcactgaggtatttgaagtgtccaaagcagacgtggcagagacagatgacgatggtgatgac

SEQ ID NO: 341157 - DNA, 1000 bp, Homo Sapiens; identical to SEQ ID NO: 159799

SEQ ID NO: 341158 - DNA, 1000 bp, Homo Sapiens; identical to SEQ ID NO: 159800

SEQ ID NO: 341159 - DNA, 1000 bp, Homo Sapiens
tattatatgaatattttaatgcaaaatgcttaacacttaaaattagcaaagcgtcatttaaattaaaattccatttaactaaagatggttaaccccaagaaattgtacagtagttgatttctgctatataatgccagtcctatgccatacaataagaactgcaacattagctgtcacttcctccattgctcttctggaccctaagggatgagggaggggactcagacacaaaacacaacccaaataaactgtgcagtgattcctaatagttataaacccaatctaagttgtccaaacagctgaagaataactgcaggtattgttccagagctgatacgaggttttgcttttacagcctggtaaaagttctgcactaggtgagaagtcacagtttaaggatgcatgttctgtaaatagttactacatatacacatttactgtctgtaaacactagaaatatacattagacagagtaccctcacaagttgggtacagtttaaaaaagaagatgaggtaacatgaatctcaaagtccacaggaatcctgcctgaagagtttgaacagctgcctgtaattcatttccaatgtgcagggagattaaggtttgccaaaactggattcactggctttcagcatagcaactgcatctttcactgcatggtagataacattcttcacctgtaatttatcttcgtgattggtatgagtctgtgacagatatcggaattcctgagtaagccagaagcagtgtttaacatgctctggagaaacaaaatcttcagccactttgatgcagctatataagttatgaacctgatgtggagctcctgccgggataaacaccacatccccaagaaactgtacaatagcccagccttgaactccatactcttgatgaagacgttttcttaatgatcggtctaaataccagctttgatcatgaataggatcgtggtctgctgggttttcttgaccttgctcttctgatacctttttaaga

SEQ ID NO: 341160 - DNA, 1000 bp, Homo Sapiens
ttttttttttttttttttactgaaaaccatttattttttatttatttattattattattattttatgagccagagtctcgctctgtcacccaggctggagtgcagtggcgtgatctcggctcactgcaagctctgccttccgggttcacgccattcttctgcatcagcctcccgagtagctgggactacaggcgcccgccaccacgcccggctaattttttgtatttttagtagagacagggtttcaccgtgttggccaggatggtctctgtctcctgacctcgtgatccacctgcctcggtctcccaaagtgctgggattacaggcgtgagccacagtgcccggcctgaaaacatttattacaacaaaacgtcagagctatgtgacagtaagttaccacaagctggtagggttgaaccggggcaggagtcgctggtacagggacctcactgcccaccccatgctcagctcctgcctggaggaacctctggctgacccagacacaggatggacagctgtcagaaaatctggacaacagctcggtagggcgattgggcagcctcctcctgtccatgcttctgcccaggctgagcctcggaggaggcctggttcctggtcatcttggggctgacgacaatgctgctgttggtgactcggggcccataccagcctgcccagtactgggtgtccctgcccccatgctggaagaggatgtagcggacaccccgggggtagtctgagaaggtgtaggagacctctgtccatgtggcattgttccactgttggatggtcacaggtgggggctcgaaggaggccaacacgaagtagtcagccgaggccagctgcactttgagttggtaggtgcagccacagtcggctctggcagcaaaccagtccttaaccacgatgtccggccggaatgtgtctagtagctcctcccagtagccctcggctacaaggtccaccagctgggacttgaggcacatttcgtaggatgtga

SEQ ID NO: 341161 - DNA, 1000 bp, Homo Sapiens
agaaagccatagaatatttattgacatggaaaatgttaacaatatacttctatatgaaatatgtaggctacaaaacagtatatacagtttaataccatttttatggaaagaaaaataaccatatatacaaaatcatgcataaaaaaaaaataatataaggatgtacataccaaatattaataataatggctatctctggatagtggaatcagagggattatgtaattttcccgataaattttcctgtcctccaaacagcatccgcttcatactattatttcttggttgtaattagtttgatataattctcttcagaaaggctctgtttcactatatatacctcaaagcatacttttgatgcagcttctgcaattcccatctaaaaagtagataacacttgctcttatattctggcatatgaagactatttgtaattaacacactataaaatatgtcaaagcaggccaggcatggtggctcacacctgtaattccaaaaccttggcaggaagatcgattgaggccaggagctcaagacgagcctgggcaacatagaaagaccctatctttacaaaaaaaactttaaaaattagccaggtgtaatagcacatgcctgtctgtaatcccagctacttggcaggctggaaggtcaaggctgcagtgagccatgatcatgccactgcactccagcctaggtgacagagcaagaactcatctctaaaaaaaaatttttaaataaagcaaaatatgccacagcatagatctgattgtagaaaattattatatggagaactgaaaaatctcctaatcaagacaaaaattttaaatagaggaaaaaaatactatctatcattagttcaagtttccattaagagtagagtgtgaagtagctccaagttcagagctggagaattttgcatctctccctcttaccagccaattgactttaggtaaagaatactagagttttttagttagtaaaatatagttaataattctgt

SEQ ID NO: 341162 - DNA, 1000 bp, Homo Sapiens; identical to SEQ ID NO: 159802

SEQ ID NO: 341163 - DNA, 1000 bp, Homo Sapiens
tttttttttttttttttttttttttttttttttttttttttttttttttttttttttaaaatcacataaaacttttcctttgaattaaaaaaatttatacaaatttgacttcataaacaaaaaaaactatacatcaataattaccataaggcattattgctcctaaagtatttgccaccaaaaataagtcattgtataattctcattttaataatcttaattacgacacaatttagatttattttctacctttataattttgttgttgttgtttgtttttgttttttkgggttttttttgagatgcagtctcactctgtagcccaggctggactgcagtagcacgatctcagctcactgcaacctctgcttcctgggttcaagcgatcctcctgcctcagcctcccaagtacctgggactacaggtgtgtgccaccacacccgactaatttgtgtttttgtttttgttgtttttcagtagagacagggttttaccatgttggccagcctggtcttgaactcctgacctcaactgacccgcccacctcggcctcccaaagtgctggaattacaggcgtgagccactgcgtccggcctctacctttacaattaaataataaaatcttctgggagttcatgatccctagaattatcattgatttaaaattattccatttttcaaatacttttcttagaaataaaaagtaaagtcattaaaatatgttaatttctgttacttatacatttttaaatcataggttaaaagactctgattgggacataagactgtatatatttcaggaatagtttttccatagatataattaataacacttaaaaataagaaaaatgttttccataccaactataagcttttaaaaagtacagaagcatatcctcaagatgtgaaggcactgggggatggaggacaccttgtttcctcagctcagagcttagctttctccttaaaggtctccttcatctttttgacaacagaaagg

SEQ ID NO: 341164 - DNA, 1000 bp, Homo Sapiens; identical to SEQ ID NO: 159803

SEQ ID NO: 341165 - DNA, 1000 bp, Homo Sapiens; identical to SEQ ID NO: 335905

SEQ ID NO: 341166 - DNA, 1000 bp, Homo Sapiens; identical to SEQ ID NO: 159804

SEQ ID NO: 341167 - DNA, 1000 bp, Homo Sapiens
ttaccaagatttaatgtacatttattcttaacacgtggaacatatagtataaagatttcatactgaataaatgatattcattaagccaaaaaaggaaaaaaaggaggaatttacatcaagttttagctacattgttgaaatacaaatatgcagattttatcactgaaaaaatctcaattgtgtttcttcatcagaacttcaactgaacctagaactttttcacacctcgattagaaagaaaacaaaacaaaacaaaaacccagaaaaaaataaactataagttgattggctgctgagacagcaaggactttttacagagacctgtacagcatcgcaccaagaggggcgatatctggcaagagattaaatagctgtgtctcgctttgtgcaggtcaccaacttgttaactcgtcatactataaaggggtagctgggaggaggaccaaactgtggggatccaagggtatgtgcaatgtacaacgtcatatatatacacacgtggcagcgtagccgctgcagctaaaggttaaaaccagttctaagaggtgatctcagggttattcatacaatcaaggaggagagaaagaggtcagggtgttgtaggttcacacatgatactttgggggaaaagccttttttttttttctcctcaacgtttaactaaaaacatttttaaaaactacagcttgctgctgacccagcgttttctgtttccatgtgagacattattattacagtatgtttacagtatcaggtgtacagtacagtacatgaaagggtctacactctactgcacaggcctctccagtgaacagggtctgttcacaactgcgaacttcttggctcctgcaagattgtgaatgtacaacaataaaccacacacagttcagcagtcaccttttttgtccttcagaatttttttttgtattttttttttttttttttaccattaaaaacagttatgaaatgtggcatcccgttgatgcaaggactgggaaag

SEQ ID NO: 341168 - DNA, 1000 bp, Homo Sapiens
tttttttttttttttttgaaaatgccacagggtaaacttttattttaaaatccaatcttttccccacacatacacaataaattaaacagaatccacagtaaatgtacattttttaacataaaaagtcagttactgttacttcatgatcacatgaggatcgtcacagctccgtgtccattgacacattaccctccttgtccttaactcttatccgaccggatctgtacttcgtttcttgatgaccgtttgcatatacggttttaacagtgccatctgggtattcccgtctcttgaactgggcagtatgtagttctctttggccattattaaactctatgagtttgttgccatcacgttgtactctgacaattgtaccatctgggaaaatgctttcttcttgtccatcaggaaataagtttttaacagtctggtcaggaaacgtgatttctttccttccatctgggtaatgtttttctatttgtccacttgaaaaatgtaaaacttccagtccctccgggtatgtcgtgtgagtggtctgggcagctgcatagtagtaaatcactctttggtctggcatgacctgcttcacgtcaccattaaagaaagtgacagtgatggtcttcccatctgcactcacttcctttcgagttccattgggaaacagtataacacggcacccattcttataaaccttttccacctttccatcaggatgactgatttctccctgtatgtcttggtcttcctcctcctctttatattcaggatctgggaagttcagtggttcaagtggctccctgggagaggcagcttgtcccttatccaaattgcctaaatcacgaggaggtgcagacttggatcttcgaggtggattgccttgcattggaagataatttttcttgtatttttctacctgggttcctgaagaaatctgactgttttgaaatcgaacagatgtgttcgcaagcttgtccttcttctccacctcgaggctgctctc

SEQ ID NO: 341169 - DNA, 1000 bp, Homo Sapiens
ttttttttttttttatgacaatgagaaaaaattttatttatgacgatcttgagcagtataaaactcagaagctccactgaggtgaaggaaacatggacatgatactaagcaaagcctagtcttttccataaaatgaataagaagtacatttggtggagtttgagaccagcctgggcaacacagtgagaccctgtctctaaaagcattaaagcattaatcctcgcatttcgatagggctatgtagcttttaagtaagcaatgttagaatgagttgtagagttttatttttgtgaatatagtgagtgacagatggcaattacatgaggatatttgaacgaaggtacataagcctaaacaatttcacctaggtaaaatattgatgtcataaccaaactatatggccccgtttcataaaggttactatattctatagagagtgaagaggtggcctttctatcccagcttaccctattcttgttattgttcaaattctcctgaagcttgcataactagctgccatcaggtaaatgctattggctagcagaagactgcagttctgttaatattagaaccagcagggggaacttgggaacttgacattaaaaatctagaaacagaattttaggatgggtctcgttagaaacctgaattgttaatggacttaagtaaaaaccatcccaaagaatttgagctttaaggtgataacgtcttttcagagatcatagcacatgaagaacccatggacactacacagactatgaacagttagcagaaaaagatctcgtgactaaagtggggatgacagcaaaaaaaaaaaatttacaaaaggaaaaaagttgagaatacaggaatatttacaagatgttaaaaaattattaatcttcagccaaaatgaggccccttcgcattcccaaaacctttgctttcttctcctttcgttcttgctcgcgtttcttccgttgctcttcctttgtctggagatggggttgtttgtaagttt

SEQ ID NO: 341170 - DNA, 1000 bp, Homo Sapiens
ttttttttttattgtcaattattttattcaaatgtttggaacttaaacacaaaatcatcattaagttttcacaaaatgaggcatctgtcgcttgaaaggcaaaaaatatttcagaaatatgtttacagaaatgtaaaaatattaggcatcaagacagatgtgaacgtattcagtagcttgtcttgtctgtcagtcttcctctgagccgaagatcttactgtactcactcagcatgagctcagctatctggttctggtagaccatgtggatcgccatgtttcctgtttcattttcagctcgcagaagggtaggtccaaatacaatccccaagctttgcgtggacatgaggttcttggaggctttggccactatcttagttagatgtccaaagaggactttcatggtgtcacgatttggcggagggagtttttgtacaagagattttacagcttcaattcttgtgttgttgtcttgctttttgatcgcttccacaaactgctcaaagaaactgtaagggaagagcggctcaggcagctcccggaaaaacatcttcagtgctccggtgacaacgtggatgtcctcccactggctgtcgtccaaattcagcttctcttcttggttgacaataaatcttaacttctgtattgtttgcagattgccactaactcgatatattgcatccacatctagacctcttttctcaacagcttcaatgcattgctttacaaaccacggaactgtggaattttcacgttcacacactttgtgcagatgagagccaaaaatttgatctttaataagtcctttttcttgcagagttttcagggaaggtcttcgggtaataaacttctttaatctgcttttaactcgatttttgtcgcttgtatcggaagcactgtgatgcagtctgaacattaaagattttctgtgctctggtttctgttcttttatatcactgtcatagtgacttagcaattcagtgctagaggatctttggatt

SEQ ID NO: 341171 - DNA, 1000 bp, Homo Sapiens; identical to SEQ ID NO: 335557

SEQ ID NO: 341172 - DNA, 925 bp, Homo Sapiens
ttttttttttttttttttttttttttttagattgtattaagaaattaatgtagctgaatcacatcctatttagtttccaggtcaatatgaaaagatggtaatttttctttgaaacttacaagtacaatctgcaaatacataattttgagaataatttaatatgttgacttcaagatacaactatattctatataaggtacaactctatatgtcagtattttaaagaaatggatccttacaagaccaaaataacccacaggccatgaggttggtttttccttttttttttttttttttgtttaaacaaatgtgcaccacgatgtttcaacaagacaaatgccataaatgtgaaagctgcagtttgcaatataccacatttagaatccagcgaaggtgaatcagacagaggtggtagtcattctaattaaacaatcaggtaacttcacgacaagctgatttgcagcatcaaaagtgtccatttaagtttcttttttcttgatgatcagagggcccacattgtctccagtctcttcgttatgttttgtgtgagccccatcacagaatgggaactttttggacctccaacaacggcagtacacagctttatctcccaaatcctccatgtcaaaagcatgtactatcttggggttgtctttctggatgtgaaggtttatcatagctttatttcgatgatctttaacataaaatcttttgtaagctagataaccaattgcagctgtcccagcagcaatggtaactgctgcgatccattcaactcgtacgctggaactggaagtcagactcatggcgccgtcgcttgcaaggcgtgtgcactaggataccgagctcaaacgggttcgcgcggccggcgagagtaaaggtgccagcggcgtactaaagcaccgactccgcgatgctaccgcgc

SEQ ID NO: 341173 - DNA, 927 bp, Homo Sapiens
ttttttttttttccaggaattcaaaacaatttattaattttacacttagatattggtaatgcacacagagagaggaaatctaaaagttatttagagcacctccatgattttgtgttgaatgttataaattttattttaaaatagctcaaaactatcttgcattttaatattttaaaataaaatctataatatcaaaatcttgagcatttaaaaaactgtaaaaaccatgattcaagtcaataattctgtgctttgagatttgattggtaagcatgatttcatttgtctatgaagaatctactctgttcctttctggctttttcaatgctttcaaaagtgatcattcctcttggcagctgcaatttactcttttctgtttccagtatgtcctcagcttcacctttcattctttctaaaagggttccatagcccaagtcatactggtaggtgaggataaagcttaatggaacaatcgggaccaggaaggctggcttcttttttttaatcgctccagctgttaaagagatggctgcaaggccaaaaaaagttccaaaatatttgaggaattcccgagaccacgcaatccgcatggccatttgtctttccctcatttcactctgcatgatgagctgcctttccagctgaagtcgagcattcataagcatgaactccttttgatttttcatgctttcattcatagattttgaaaatataaaccccattttgacctctttctgggccttgctctcctgggtctggacttgtagtctgaatgtgttagaggacgctcccaggtggaagggttaaaggtggaagccaagcaggaagaagagcttccttatgggaaaccacactgggcggcgctggtgccgggaccaggcgaccggtacgcaaacctccaggccccggctcctttcgcccgctgcc

SEQ ID NO: 341174 - DNA, 1000 bp, Homo Sapiens; identical to SEQ ID NO: 159808

SEQ ID NO: 341175 - DNA, 1000 bp, Homo Sapiens
ttttttttttttttttagtatttgacattgagatatttattttgtgaaacaatgcaagcgattttaaatccccacatactatttgattaagtgcaacatggtacagtcatgtgtaatctctttacacgatagtgcatctagtccttagcctttagttattgcacaacaattataaagaccagtgaccaggacacgtggactctgacaggcagatcggcctacacaacgaaaaatcagaacagtacaccaactggaatggtcaaacaatttaagtcaaatgttttaatggtgcaattaaaataagggttcaaacatgttttcaatatattaatttctttaaagtcatgttcaggcaaggtgctgtttaaaaaaccactattagctttgtccacacatgtaagttatcaaaagttacccaaggtaattttgacgttgaatgcagctttaaacaataaaaaaatggtattaggtttacttctcgaagcaaagagagcccccaaccttgtaaactaaacattctgacacaaatgcacaaaattaagttggcaacattaattttgagatgtagtgtgatgctgagcaaacttttggtcttgactcttgaaataattaaagagagcagttctccgttttggccttcaggaagggaaatctgcccatggaactctcccaatcagattaacaaactgtttcgattcccatataaacctggaggacacaggaaacgccagatggaaaaactggctctggctttctaaccccatcccatctgtatgagaggacccatcctgtcatgtgcagtgtttgatgttttcacatacgctcctgtctcaggaaaacattcaagattagctagcccccaggtggttgtacctcattggtgaaaggcttgggatggtttgatctcatggctttgcctgatgttcacataaatcccactgtccttacccaagctgatagcgtgttgtgtgtgtactatggctacttgcttcccaaatgc

SEQ ID NO: 341176 - DNA, 1000 bp, Homo Sapiens
tttttttttttttttttttaatgtatgatggtctttatttacaactttattggcaaaaaagaaaagggaaacttttaaacaatttaacacagggcattgtagctgatcctgtcagataaaagaagttccattttaaatgtccatctaattgtccaaagatacacaatactgaatctgcatacgcagtttcctttatgaagtacagtgctcatgttttaggcagtcttctaaacatacaaatacagaggaaattaaatcactcattaaaaactgtgtcaaatgaagggtattttaaatataagtttgttgtttctggtaatagcacatgcccaaatgaaaaccaaaagatggaaaggcagatacacttcttacttgggtggacagtacaacatcaatcattttctgcaatgaccattatattttcaatttatcatgaactactctgaacttactatgagatgtagccaaagtcagaagagaagatgtagggacaagatgccttttttgcaggaggtaactcctccagaatcagcataggaaataaacatcctgttgattctaggtggaaaggaaattaatgtagtcaatttcaactcgtgctggctgacttaattttttcagcgagggttggggcattcttctaaatcaaggtatttaattcttcttctagttcatccaaatcctctccagtggaaaagattttcatcaacaggaacagcatcaatggctccattttccggttccctccctctcgttgtcctcttccaagtcacttctttcaccattttcagccctacctccagaagcttcacttaatttgttttcatctttatctgaagtatatgtgctgaatctttcaagactggctacagtaatacctgtttcatctacatctcttgggatgtacaggcttaaatctatgtcatttacactcactgaatcatcaacctcatcaccacctgttccctgggtgtagcgggtatcatctgcttcctcatca

SEQ ID NO: 341177 - DNA, 1000 bp, Homo Sapiens
aacttttacgagaaagtgcaactgcagggtctcttgaatgatcttctagacagttccgcagaaaattagcagtttggctcagaaagtagagttcctcaggaggaattaaagttcttcctagaagaatacaaagcaacgtttcaggcagctttctgaaaataaaccattagcttatgcctacacagcgagacaaactggaacgtgtaataatgaaggctttcacatttgttgtgatgtgctttttttctcttaccccaggacctctagctgttctgtaatgttacataaagtagttatagcacttcgtccagcactgacagcaggcaggaagctaatcagcgaggagaaaatcggaagtgtgttcatgtgtttcattgtttttcaggtcaaatctcaatacttgcaaataaatcattaaaaagatataacagtttctctgttattttcaggacttcatgtagtgagtgggtaatcagagtaaagagggctttctatcagtcatcagtgatacggttctgtcacacagtcagattttcagcattttgttcggctgctgctagatgataaaggaagttttctgttgctggtggaaatcgtttttgctttagcgcctccaaattaaggactctcttttctccatcagccgaaacttctgaaaatggtgctaggttggtaaagatttctcttgtttttagagcaatatcctgtataacgtggctctctgatttctctggatcttctgcagactgaacaattagctgacccatttctttgtgcagtttgcccattgccatggcctcttttgcaaggggagcaatggtaatctcactctctgccagattcacaaacacatcatagaggtctggtctgttgctcacctccaagtctacaaatccagcgacgtaacctgtgcacatctgcagggcttccagctcatcggcgttgaggtgcacgtaagagtgaaggatggtccagtcctgtcggtgccacaccagggcag

SEQ ID NO: 341178 - DNA, 1000 bp, Homo Sapiens
ttttttttttttttttagtttgtttaaagactttatttgaaaccaatgtcacagcacgttagtcataaaaatcatcagaatcatcggtgttatggtttctggggcgtaaagcagcctcaatttctgagttactgtcatcagactcatcccagagggcattagattttgaattgatcacgggtttctttttgttttcatgccttgacaaaggacttccttcactagatgaaaaactagcttccgaagcaattttgttagctgtctttgtctcgaatgcaccgctgccaatattcaaacctgacaagtgtgacacagaagcatctgtcttttgaaacctgttttcagtttgatttgtattatcctgaagggtggccttcttcagcaactgataggcttctgtttctgtgattgggatatctgcagccacattttctttcttgctcttgtctccacagccacttgaaacttcttgttcccttgtaggaacactgttgagccatacagcaggtttggcttcctttattccactattgtcattcagaatagatggcaagctgcaagatgattcactactgtgaatagctgacctacggccacactcttctgtaagggcttttctcaataatgctgttgcctcttctttgacagaattatcatgttctttcaaggtggcaacatgctgacccacctgtgccctcggtacgtctgagtctggtgtttgtccaggttctcttgttggtgcgttagtggaggattccttttctgaatcaggagagcttagggtttgcaaaatacaatttttttcagtggatagggcaactctttcttgctcagcatggattaattttaaggcctctattccatcttctccctccatcttgccacctggatttggctgtggttctgggctctctaaaatcagatcatcttcacttattgaaatggtaaggtctctgctggtgctccaactttcctcctcctcttcctgcatttttctgaa

SEQ ID NO: 341179 - DNA, 1000 bp, Homo Sapiens
ttttttttttttttttttcactggtcataccacttttatttatattgttatctatgttacattgtttattcaatatagaaaaaatatgaatacattcatagtattctcttttaatttggtaattccacattgtcaaatattgactgtttttatattgggtgtcctacccaattaaaaaaaaaagaggaagaatgacctggcagacagttcttgttgtgccatgttattgatataacagcaatatcatatatgtctcttttttaaacacctagttttgaaaagaccaatgattaaactactgtttactggctcagggaaatgttttaagaaatagaaattaattcattctttccccaagaaaaactttaaggtaaacatcttaaaacacctaagtgatgaaggagaaaatttgtattccttaaaaaggggtcagtgctgaaagaaaattgcatggtagaccccactgcacaacggttctgcaccaaaagaaaaatgaggaccatattaacataattatgttggagagaagaaaaacccacacttagaagtcaggtttcttttaaaactccttgttacaaatagaatcaatgattatatctcagacataataatgggtcaaactcacaaaatcagtgctacaaaatacagtatttttccatcacttttagttgtaatgtacactatgtacagaaagataatactacctattttaaactaaatatagatgaacaaacagcttgttaaaaaccagaatcagggcttataaatagtgcagaaaatgcaaacgccaaaaaaacgatgcctcctatgattgtcacagttctgacagagattttctgtgctatcattcttcctccaattactgccaatcccgtgcacaggcagtgccccacagttccacccacggctacaccataggggtcctctctagctgccaatacaattgtagttagttgagagcgatcaccccattctgctaagaatgttaatgtaagagctt

SEQ ID NO: 341180 - DNA, 1000 bp, Homo Sapiens
ttttttttttttttttgtagaccacaaaatccacttttatttggtagtttttacatctatggccaaatagtattgggttgacacagtaatctagagtttacctctgaaaaaaagtaatgtgagtctgtctaaccatattttcctaactcaacagtaggatcatgatggtaaggcaaatgcaagttatttttaccatgattctcaaatgtgaattgaatgttacagtagcaaatacttttgacctcttgtgatgagtcagaactagaacttaattctttgactttcacattttttaaaaagtgtattgctgggatcataaacattttatgttgtgcatttttattacatttacttttgaaagatagttgttagaaggttagttgtttttcaggaaaaaaaagaaatctgatgtaaaaatgcaaatttatgttgcaggatgcttcatgagtcccttcaagtggtttaaaactacatcaacagtagttgtttattactagttggaaattccagggcacacaaatgaatgtccaattgtagaatcagttgactttccatgtcatggctaccactgtttagtaggtaatttacaatagaaaactaattattgaaaagaacaaagttccaaatttgtagtgggtagtgaggtacatctttttttaaatgaagggccatttcccatgaattttactccagctgtttggagcagaagaaaatgattgatcataccctttcttgttttcttgttccctgatacctccccacttttgttctttagcagcaacactcagttattttggtaaattatttccaggtaaaacagaacaaaaattgtatgaaaagtaacgccaggaataggttttgtatagaagctctccttttaaacactgctctttggttataagctaagaattattattggaattgacagcaataatttttaagccaaaagtgtatattttagctaaatgttccagattacgcagtaaatacccaagtgagt

SEQ ID NO: 341181 - DNA, 1000 bp, Homo Sapiens
gggatcaactgagaatatgtttatttaaaagcaattttaaatattaaaaaaagtagaaattaacacatacagtactgaaaaactgtcacattaaacacatgtgaaatgacaagtgtactgatgtttgatggtaacatccagatgagaattcggcatttaactagtggcactacaggattcctatacaacatgttgaagttctaggcaataaaaaaataaatagcaattgctgttcaacagtaaaataagacacacactatttgcagaacataactttcccctctgggggaaaaagaactaatttgctatttttttttcataaggttccatatcttcaaaatactatataatgtacaaaattgcagatagtggcttactgagtttaagatcaagatcagacttaaactcaacaagatcaccaaaggtatttctactgagttttcctatgtcccacagtaagctgggttagagagaactcaaattcctgatggaaaacaaaaccgaacaaaaaaactagaaaaaaaaggtgttaaaaatgctgtgtaagttgctgcaaaaggggaaaaagaatagacactaactccatgtaattttagacatgcagcttttgtgttttttttttgtttttgttttttttttttttttgaaaaaaaccagtttattttgagatcagtgaaaagagtctaggccacagaaaagaacagctctttaatgcaagttaaaatgtgtaaatgaatgaccgggacactgagcaacctcagatgcagacttccatccggacactggtgtggcttcagtaccgaggctgctaaagctgccagtcacaacccagcatgtcaactggttcctcatgctctgtttggtgtggaaattcacatgtgccctgacactgaggaagcaattgcttaaaatcactttccaataacagctgataaaatattttgcaggtttgtcatgcaaggtttatttattaggtggctattcaaagtttgtatagcaa

SEQ ID NO: 341182 - DNA, 1000 bp, Homo Sapiens
ttttttttttttttttttttttttttttttttttctggcagctctctcagcaggttccatttatttggccggtgctaagatcagttcaccctgatacctgccctggggggtgggtcacgtgatcattctcatttcacagatgagggctctgtatgtggtggggtgagattggaacccagtctctggttggcgtggctgagtgaaggtgtaaagacatgagcctggcagggaaagggaggggaaccgtctcgttattggttgggcatggccatctgcacaggctcctgtagggcccgggtaaggtggggaatctgatcagggcagggagaagaggagtgagctgtggaagctgccttcagccacagcagacggccacgctgtccactcggccacggctgcctggcctctgccatgccaggcccttgaagtcgcccaactcgcctccacgctctgattggagaagaggcaactcctttccaggagtctttgactaaaggggctccatgcaggcacaatttctagagcgaggtactttccacagtgacggcctcttgccggttgccctgggctgctgttgatttctggctctccaggtcctggatagtgtcagggagcggaagtccctgggtctccgggaggaagaacagcacaaccaggctggaagcaatggagataacgccatagaggagaggaggcagcaggggcagggcttggcggctcatcaggatcaggggacccatcatagcccccagccggcccactgtatgcagaatgccatctgctgtcatccgcactggcgttggaaagagttcagccttgtagatggtgaggcaggttaggcttatcccaaaacatccctttcccagcacagcaaagaccacacgcagggtctgcaaatcttgcggcaccagcatgttggctagaatggcgaggccggccatggcctgggaacccgcctggatggtgcggcggccaaggaaactgagcaagagggcagtgg

SEQ ID NO: 341183 - DNA, 1000 bp, Homo Sapiens
ttttttttttttttttttttttttttttttaggttttcaaagattttattaaaaaaaccaaagatatataacactaaaacaacaccagcggacttctccccacctcccagtctgctgatcagtaccctctctcccagggctccacctggatggtcctgaggcccaaaccctgcctctcagctgcctcctgccctacaaactggtgactgctctcatccagcttctgatctgtttcatttaagatgattaaaatactcccctccccaattcgcttaaaaataattttcaaagattaaaaatttcatttgtgtgtgtgtgtttttttaaataagaactttaaatgtgggatatctccttcttcccctaggtccagttgaggactctggggtgcctgcctcttcaccccaggaagccagctgccacttgatgccccttggaaattttcaggaagtaatttctttcaaattttccctgcagtcacaaattccacaaactgcttgcataaacacgctgtcttcattataggcaccactcctcagctctggaaacctgatctctttctgtcaactagaccacatgcttcagattccctttgatgtagttgaggatttgttggattcggtggggctcattgcggtctggccggcagcttggcgtgatttccagcacataatcaggaccatatgctgtgaaaaactcatgatctgggatctcagaggatagtgttttccctaggatgaccccggtcaagtatgtccagcatcgagccgtgttggcaaggttatagcctcctcctcccaaaatgagtgttgccaactgccattgaaggatgtacttaagacacttgccaattcccactggagtcatgttaaaggagcacatgggatccccagctattgtgtcagctcccagctgtaagaccactgctttgggattaaaggcttggtatacttcctttagtacactttcacagatctggtaatatttttcatcttgtatg

SEQ ID NO: 341184 - DNA, 1000 bp, Homo Sapiens
ggttatgaagggtaaaacaaaaataattgcaagaactaccgtgcccttctgaccccatgggggccttccctatcccatgattccattttggggagtagaggtagggagggggcagcagttacaagtgctttgagctgtcaactcacattttactttgacctggttgggcaagaaaggagagacaaacttccctagtcaggtatctaggaagaagcctcagctactgtttctgtttaaggtctctggggtagctcttggagccaacagagaatagatggggtaggaatagggatcctggccctatccctttggattttgagttatacctgggtataggaagcagcttcttcgcaatgcctgtgggatctgaggatgacagaaaaacctaagctgtggggtggggcaaatgctataaagtaccagtaggttctggtcatcaatgtggtcctccctcctctctacattattaacccttaaggtgaagcaatggagaagaaaattaattaacctgaactgtcttggacagaaccctttcctctccctctccactagctccaaggcttattaagtacctaatgtcaacaacatggccccattccccttgcccagatggacccttcccacccctgtctatacccagagagcaggaggcaggactgattagctccactggatcccagatgcttgaggttctcattctttgagggtcactttcgaaagctgttttctgggataaacaaagtacgccttcgcagtttcctgcctgatccttcctccagcaagtaggtcacatcaatggcattttttccagggattttttcaaggagattgagcaagatctggttgagtcgttcccgttggttatgccgtcgttcctcaggggtacaggttgactggggttcttgactactttcctctgtttttttttcaccctcactgacgttagcagtggccccttcccgttctggctcctccaggctgggtatctcattggctgctt

SEQ ID NO: 341185 - DNA, 1000 bp, Homo Sapiens
tttttttgctttctagaaactttaataattcaaaacactgagtacaatattgtatttcataccatatagcacaaagattaacacttttatatatctgttattctagtttttaaatgaataaaatgaaaaattttcaataacctgaattttggaaaaaaccttttaattaggagtttcttaccaagttatgatttaatatttatcagatgtgtaaatatacatgatagcaatttttaaaacttgtaaatagttggccttacaaaattacaacacactgtaaataaatccttcccacattttatacaaactacatgattttgatatacaaagattctgtttttattacactgacaatgtacaacaaagactatttacaatgcaaaaagtatataaaccacaatttaacagtctgctactggcagccactatagtttaggaggtagctttaattaaacgaaatgaacagaagccacatttcccaacttgtgttctaaaaataatttacataagataaaaattcattatatgcacagtatgtacagtttaattattaaactgcaatctagctggatttttttagtatattcagaataactaatatggcagtgggtttgctattgatttagcacactgttcaaaaaacatattgaacaattataactttaagactccacccagtaataggtctaaagcccatagatgggaatcaagtaaaatttttaatttttaaagacacaggactaagctttattctttcttcttctatttttattaataacatattatcttgtttaaccagagttcaacctctgagctattgaataggctcttttataaaaaatagtatggggaagatgtatggaaatttccatttaatagcacaggttcaagataatccagctcactaagaaataaacataagtacttcgtgtcataattactccccgtttcgtctaattaaatgcaagtattgaccacagtttactttctatataatcca

SEQ ID NO: 341186 - DNA, 1000 bp, Homo Sapiens
gggtgattcatcttttatttggttcaaataaattgccttctagaacagcagaacactctaattcgaaagtgactcaagccctgtcttcatctgaaaatgaatgtctccccggagactgtggtatttgtaactcagggtttttggaattctgtttataccttaataaaaacataatctctttatctaaaagaacactattgctgctgctttagaaatcaattatatggtaagaaaattaagatttattccatctagtttgctttctcatatccccaaatatgtttttacttactctgctagttcatatcgaaacctccaattcctgctgttatcagtcactacaaattcttgaagctgataaagatagtctctcctcttgtcttcatgaagcaactttagaaaatcatacaggtgtctaagaactcctattcgcacttcatccagatcctttaaaaatccattgaagataggcaccaggtcagctgctgttaactgatccccaagaatcacagccagctcgtgaatggagaaggctagggctcgccgtaccttccactgtacatcagaagccagtgtttcatatgtatctttcaggcagtgccaattttgcctgcccagggtcagtgccacccctgggaggctgtaggcacagtgtttggctatgtcagtatcgacagtctgggctcgagctgggtcagtcatggacacatactgatctagcagcggctgagttattacatcctgtaatttagatttattctcttcaagtggggtgggatcctgcctctggtcagtctccagatggtcactggttccatttctgggtccacctggatctgggctttgtaatatcctggccacaaagagctcatcctgagatgatgaggccgccagagcgatctgattgtcagaggcagagctgggatgtgaaatggacacttcctttaggcctgctgttggcttgctctcagcttcattcacgcagtcgagctgtgcagct

SEQ ID NO: 341187 - DNA, 1000 bp, Homo Sapiens
tttttttttttttttttttttttttttttttaatataaaaataaaactttattctgtctcatcaaaagctaccagctgctgaagcaaacatgaagggtggcgggggggcagggattctagggccccagagtaagtagaccacactgagtcccttttggtcctcctgcctggatagtgctgagtggaaggggaggagctgggacccaaaggtcttggcttaggtgtgggagcagagaacatgagacctcattatggtcctaaatctccaaaggctctactggacaaacaagcttgatgttaagagagaggggaatgagtgacattgagaaacaagatcacccttgaagagctgtctgctggagagcatacacacgatcctggagctgggcctcttcctgatgcctttccagggcttgcagccctgactgctgcaggaagacctgaacagcctctggctgatacaggaacagcagatgcagcagctccaaactctggcctactacttcagtgtcagaaaaggctagtgtgtgcagcaaggcgggaagcaggggccctggccacagccgctggcagtaagcaggacccttttctgcaacattgcacagaactgtgagcaccattacgctcaccacgttagatactggcaacagctgtaagagaggctcaatcagatccagggagagcaaggaggtacagaaactaggactgtttgcagtgaggttgttgaggagccaaaggccctcagggagcagactgggctgtttctggaaaaagaactgcagaaggataaataaggctgccacaacacgctcatctctgagctgcatttgccctcccacagtctccactgctgcctcagttagcaggttgcttagacatcgaagcacggggcatgccagcagctccagtcctgcatcctcgcttttctggacagccccagccaagtccaacagcagcaaccccagagtagacagagccccatggccaatgagcagaggat

SEQ ID NO: 341188 - DNA, 1000 bp, Homo Sapiens
ttttttttttttttatgttttaaatttattttaaaagttaaaatcaaattgtaaaaaggcatccagatacagctcaccctcagcctttacaagcatattatacaacttatataacaatatacacgtgaatactgactgcaatgataccctctgttcaaacaagaacattgtttttcccataagaaagggattgctcagacaccaacctggtgttcaagttctgttgtgacctatttcatacacatagctgttttaagttaatgagataaataaatctaccctaaatgagccattaaaaacatcagtttcaagtgctttctggttcttattaataaatactttattcttttctttgttagaaaaaattaaaaagaaaagcaaccttctataaagtagaagtatactcctaaaagaatagttattaggacataaccttaggaggaacacaagttagatacagcaccttccacccaattagagcagaattttatgaaatctaaggcatgtaaattttatttctagcttttgaaaacctaaatcaaccatctcccacaacaacctcccaaaagtgttatgtccctaacataataacatcttaggggaaacctaaattacttttagctacagctcaagcttcaatacaataattcaaccaatttacccaatctttagctagtatcaacattcacttaggtcaaatgatatttggaaaaccaggttgcccagatggaagaatctcctgaatgaaacctttgctgtggtaatttgcataggggttgacctttcattttttttttttttttggaaacagaggtgggtggattgctagtgctcaggagtttgagaccagcctgagcaacatggcaaaaccccatctctacaaaaaatgcaaaaattagctgggcttggtcacgcacgcctgtagtcctagctatttgggagactgaggtgggaggactgcttgagcccagggaagccaaggctgcagtgtgccgcgatc

SEQ ID NO: 341189 - DNA, 1000 bp, Homo Sapiens; identical to SEQ ID NO: 159812

SEQ ID NO: 341190 - DNA, 1000 bp, Homo Sapiens
ttttttttttttttttttttttttttatatgtagaatttcatttaaataagtcagtcaacaattttttataaagtatttaacacttcattgtagaaacataggcaaaatgactatattataaccaaaatgaaaaatactgttcaatttaaaaaatgtacttaaacaagaacctgaaaaagtttatgatatgcataacattgttcaagcaaaattgcactagtattacataaatcaatagtttataaaggcctcaatatggcaaagtttagaaataggtagtatgcatgcacatagtacaacaaaaagtcttcttataaaacagcagtttttttaatgcttgtacaaagggataaagagcaaccacatatttaacatatttcatctgttaggttaatacattatgacagctaaaagtcagtcatgtctatcagaggaacaaaaagccctccaaaacttgtgaataaatcttttgtgcctttaaagatatttgtataaaaatgctatccttttatttttatatacaacttaaataaatcgcactcgtttcaactcaaatttgaagataaacaaaccaaacgtgaatggggtccatgcgttctgtaaaacccagagaaacctgaataccagagcaactggcacagcatttcgactctccacttttgattatgggaagatcattgttcttctacaacttggaaggcccttgaatatattttggatagggcaaataatgggttgctcatattaaatcttgaaaatatttgccaatcactctgtatactaaaatgtctgctttgccctttgtttttgacctagcaaagaggatgcgttcacgtaattgaaattctgtcaccaatttgtgtgcttatatgttattctttagtgttcagtgtagtgtaaggggttgggttaatcttccacaaaatggatgtgactgggaagaaatacctaagatgcaagtacccaatgccctgttgtgctctaggctggctatttatc

SEQ ID NO: 341191 - DNA, 1000 bp, Homo Sapiens
tttttttttttttttttttttttttttttttttttttttttgccatttctcataagctgaatttttattttagcatttttaatagcaatgccctattaggttattatgagggatttttccagtaagacatatttttcatcccacaaggctgacttttcaaaaatcactgtttacttataaaaatataaaatttttaatctattataaaaggaaatagatttcagcacaattattaaagacaatagagtatttagaaaagttcacattgatcagtattaaaatatacctcactgaaatatacttacttataaaaacatattgcctttgccgtgtgaaaatctggtgtttagttctctagatttttttattagggcttttttctgagcttcatcaaaccgattaaccttgagatctttatcacggtcaaatggtattctctcttgaggcttatttttgtcttcagcagccttactctttaactttttatgatgtatgtccataagagattctgatctttttgattcattgtatgaagatacctgctcagccagtctcttatctcttcctgataatatatgttcttcatctttcttactggatgacttccttgcttcttgtgtttccttagctttcctttccctatcagctggagtatctgtccagattgatcgatctccagatgtgtcatcagctcttctcttaaaagtccttggcccaagaccaaagtctttcatttctggaggaagttcagtcatccatgactctcttacaatgggtttagatgaatcatcatctcctttggtcagtttttctttcattctctgggcccttttttcaaactctgtcgttacattatagttaactggtccttttgcaggcattggtccaataatatcctcatcttcactgctgtctgtttcctgttgtcctggatcatctctgcccttgtcacttttctgtgtagatttaatgaaaccaggtggcaatgcaggacctatta

SEQ ID NO: 341192 - DNA, 1000 bp, Homo Sapiens
ttttttttttttttttttaaatgttctcggctttattataagctgcggctagtgagattcatacaatatctccttgaggttacacaggttctactgtttctgcataaccaagaaggaaactggggtgtgcagaagtagcattaccacaaaacagtaatattatcaataaccaatacttttgataatactacaatatcctctaacactgactgaataagtactatgtggtaggcaactgctcttcttatttatttatttgagtcaggatctcactctgttgcccaggctagaatgcagtggtgaaatcatagctcattgcaacttcaaactcctgggcttgagcaattctcccacctcagcctcccaagtagctaggatcacaggtgcacaccattacacctggataatttttaaattttttgtagagatgcagtctcgctatgttgcccaggctagtcttgaaccctcggcctcaagcaatcctcccgcctctgcctcccaaagtgttggaattacaggtgtgagccattgcacagggcctaggtcctgttctaagcacttttacatgtcagttccttttaattcttagaacaaccatatgttgttacttagtaatatacccaaaatttgaatccaactttcataattctttttattttttttgagataagagtcttgctctgtcacccaggctgaagtgcagtggcataatcttggctcactgcaacctctgcctcccaggttcaagcgattctcctgcctcagcctcttgagtacctgggattaccagtgcccaccaccacgcccggctaatttttgtactattttagtagagacggggtttaaccatgttggccaggctggtctcgaactcctgacctcaggtgatccacccaccgcggcctcccaaagcgctaggattacaggtgtgagccacggcgcccaacccaattttcacaattctttccactggatttttgatgtatgtaatttccctcta

SEQ ID NO: 341193 - DNA, 1000 bp, Homo Sapiens; identical to SEQ ID NO: 246532

SEQ ID NO: 341194 - DNA, 1000 bp, Homo Sapiens; identical to SEQ ID NO: 159813

SEQ ID NO: 341195 - DNA, 1000 bp, Homo Sapiens; identical to SEQ ID NO: 159814

SEQ ID NO: 341196 - DNA, 860 bp, Homo Sapiens
ttttttttttttttttttgcagaggagcccagagccttctcctcctcctcctcctcctctcgcctcatctgtctcccggcctgataccagatacaggttgttgatttcatcgtgggtagcaagctagtaataaatttcaaagtgctttctcttttcatgctttttgccaataactgttaccgccgttcttattctctcccttaactcattgtctttgggggagttagacaccaggaggtgccttgtcggtcatatttttcagcacgtcatcaatcctatcatcttcaataacaacccgcttgctccggccgatctggcccagcttgggcggccgcttgttctgcccggcgccgaagaagttgttggtgtcctgcaggcggcaggagaagatctggcccacgtcgccgccgtcgccgtaggggctcagcttctcgtcgccgtagggcagcacctccgacatggtcgcgtccgggggctccgccgcggcgcctcctccgcccgcgtccccgcccgcggcggacagggtcagcggcgctggggccgggggcggccggccggggacggcccgcgggctgctgcggcggtggcgccggcgagaggccgggggacgccgctagggcaagagcgcggcactcgcgcgagcggcccggagagcgcccgcggctgcgctgcgctgcgctccggctccgcgcgcgagtggctgctgctccgccagaggcgagcaggactcacatcctcggcgcgctggggctctgggcgggggccgggccgggcggggccgcgagccgggagggaggagacgtccctgcgagcccggagggcgcgggaccgaggagggcgcaccccgggtgccgggcggg

SEQ ID NO: 341197 - DNA, 1000 bp, Homo Sapiens
ttttttttttttttttgcattctattttactttattgttacagtttaaacaaattcagaaacgtggggtgtttctggctacttgagtaaaacgcactgcaaacgcaaagggaacaacgctgtaaacttaaatgatttctgaacagctcaggatcctcctggaggggatccttttcatctcacatattgattctgaacactatgttggcacctgctcccagaaggtcccttgacactggagcaagtcagaatatcttaatatcatagcttatttaacagcaggaaagcaactttaacatagacttgaggtttaggtagatctggtattatctagaacccaggcttaaattttgcaaaaagtttccaaagagcataagaaagtaaaacagaggtaccagaactgaagacatcattaacaaacaaaatatttccactcctaaccaaactgcaaccctttcagtatagcctgaggtatttttaaacatttgtacaagctaaagatcattcacagtttccaaagctgctttttactgagatagcttcaaattttcacaatatgtgactttcagacatgttttcatataccagagtctctgccctcagactcatggaaacatcagagatatttagtggcagaaaatggttcttctagtgataagggttctatttcccaattattgtgctattcctaggatgtgattaaaaaaatatgaaatttgcaatttgtataaaaggaaaggaaacttgcttaaaattcaaaaagcaagtccagtctggtggaggtatgtaagatattaaataatagagtcagattctttcttgaacattccagatgaacttgacagcagagagttctggttttccaacattttctccatcttttcttttccagtggttttactgatctctctttgcttcttactatggatccacgggataaaacaaagcacagcacctccaataaggggagggactccagcgaggtagaatgccacatcata

SEQ ID NO: 341198 - DNA, 1000 bp, Homo Sapiens
atctctcataccggctcaattttaattttaaagtgacaaatgtacaggtggaataaaattttaagcgacaccctccaaattccttttatatgacaagaaggagctgaatgtaattttacaccattaccaactaaacagtagttctttagcaataattaggaagtcacagcacaaaaacgacaccccagagttgtggtccatttataaatagattttcacctaggcttcgttggaagaagtgattttatatctatcctcaccaatggtcaaagtgggcacaggtgggctgtttctatactttgagcaaattatgcctcactagctggcaatgttttgcgggaacctggtccgtgcagctggttcaccttacctgcatggtctgatctgcactttgaccctcctaaggaagatccctggtctgagtgaaactctcaggtgccatgtaaccaaataagggtagggtagatctgacaggtggcctctgctttaacccagcagcttacaagttttttgtgacttggggaaaagaaataagcagtaatggctaaagactgaggtaaccctaagttcgaattgtagtctacctgtcatgaataaaataatgactaatatccctccaaacaagctataatttacagtagtagtccatacaaactgtaatccacagtggaactcagcgaagttcttaccaaaacatcacttgagcaggaaaccctttgtaatatggctgtgcaatgagaggaacgatcctttggaagggagctcaatctgggagaatgaggtggaaaacagtggggagttctatgcctttgcagaccctcaagtcaccccggattactggtcagagaagctggctgtgccatgggccaaaccagcagcattctcccttggcttctgttgctgcactgaggctgccggggacacagaaggatttagttttctttacaagtaagcactttggtgggaaagcattgcaaaagttgtcaacagaaaatcatta

SEQ ID NO: 341199 - DNA, 1000 bp, Homo Sapiens
tttttttttcgtttctatgaaattactcgtatttatttagtttttctccttcaacaaaaatggaatcaactataaaaactcttgcatcctactttttttcacttactaaatcttagagagttttctgtcaaaacatattgccctagctcatttaaaaaaataacatatatcttatcagtttcctgtgaatagccatttagtctgtttcccatttttattaaaacaatcagtgcccatgtttacttttttttttgagagggatttttgctcttgttgcccaggctggagtgcagtggcacgatctcagctcaccgcaacctccacctcccaggttcaagtgattctcctgtctcagcctcctgagtagctgggattacaggcatgtaccaccatacccggctagttttgtatttttagtagagatggggtttctccattttggtcaggctggtctttaactgctgacctcaggtgatatgcccacctcagcctcccaaagtgctgggattacaggcatgagccaccacgcccagccgcatgtttactttttaaaataaaatagaaatatggcaactagctttgtaagttaaaggaaactcagtttcacaataacttattagcttgagcacacatttgcaccaaagccagtcacaaccctaaaagttctataatgttggttgtattatatacaacatggactgttcttgctgtgaaaagataaaatactttgacttttgttacctgcagtatatgaaatgtgtttcctttattttgatttcttgggccgactgaagggtaaaatgtccaagctgaaatatcactgccaagcaagttcactaaacccagctacaacggatgcaaagggttttgactgacgtgcattcctctgatatcttccaccttgaagtctctgatgaggtagcaaggcaaaaaagttaaatctctctcccatcttctttggattcattaacatatcatatccttgaagtaactgctgcct

SEQ ID NO: 341200 - DNA, 1000 bp, Homo Sapiens; identical to SEQ ID NO: 159815

SEQ ID NO: 341201 - DNA, 1000 bp, Homo Sapiens
ttttttttttttttttttggctatttatttatttattttttaaataaagattgggtcttatctcactctgttgcccaggctgatcttgaactcctgggctcaagcagtcctcccacctcagcctcccaaagtgctgggattacaggcatgtgccgtcacacccagccctgcttgttttaaaaggggacttttttttttcttaatggaaaaaaatgaaacagagagccaaaagcttttaactgttgtttttttcttttcttcaatgaaagcctctcattttgaaaagacatgtttttcttcaagcaacaaaggtggtagaggaaattcctcaactttctcaacgagtcatgtaacgttacactggcctccataaagcaccgattaagaaagctaaagaataagatgttgtatttcttttaaaataatttaaaatatattaaattttcctaaggcaggttttgtttgaatgaggtgtcttgattagataactacatgccactgaaggagaacagtacttttaaggagctatttttgtttcgcagtagagttgaaaccagctgattaatccaatgaagttaaacagcagagacagatctcgtacataagagtatcagctaaagtcatgactacaccaattctttacacaattaagacatctttgcaactgttcaatttaagtactatggtttttagataatcgagaaaaacacagttgtaccttaacatctgttgagaaaatacaaataaatatgatgctaataaatggccactgataactcagtagccatctgaatagtcatgcggtttaagaatacatccttgtataatctgacatacaaatttgtcatttcctgcacatgcacaccattgttaaaaaaaaaaaaaaaaagccagtaatagtgtctggatcggtcaggagcacggcctctgagtcccctgtaatttagttaagctaaattaatacctcataccaaatggctccaggaaaactgtcctgcag

SEQ ID NO: 341202 - DNA, 1000 bp, Homo Sapiens; identical to SEQ ID NO: 157387

SEQ ID NO: 341203 - DNA, 1000 bp, Homo Sapiens; identical to SEQ ID NO: 159816

SEQ ID NO: 341204 - DNA, 1000 bp, Homo Sapiens
ttttttttttttttttttcaagggtaactaactccaaaattctttatttagtaaaattgtcacatttgatgtcaatggaatacacaaactcaagtgtgctacaaacaagatgtacagagcatcacagctctgggcagtgcagctgagtgcacctgcctctcatctccccgctgaagtggcaagttcaagcttttgtttagcccagggctgcctggaacactagtgcccagcaccattcctgccacctctgcccccagagcccgcacagggctggtgaaggctgggtgggtgaacctgggagagcgctggcagctctacaaaattcttcctcctgcccgtagctccctccctccacccactccagagctgcagggtccctaaaagtttcttaagaaacggggctggggcctgactgggctggttaccaggggctgccctgcaagccatccatcagaggagggagggaagacctgggagacttccagggccctaccccaccacatctgaacccctgggaggagggaggagatccagggagggccgggcccacccccgcaggactctggctggcattggtcaccaaggcctccagacactccgggcaatttgggctgtggtcaggctgcccagggctgcgggcaccaagtcgggcccctcagcaggagcctgactcagttcagcctcaggggcctcctccaggtcggagcacaggtcgtccccaggacccggggggctgggtattggggatcccggagcgccccccgcaggccagccactccgtccaggggctctaggtggccccgccagggcgtcccccagcagatcctggaagctgctgccctcacgcagcggcatggactcgagcagatggttcaggagctcggcagcgacggtagcgtcgatggcctggcacgtggacacgaacgtgtgcacctcgtgcatgcactggatgtagccggcagcgaagcgctcgctcgcttccgcctgcagctgctcgcgc

SEQ ID NO: 341205 - DNA, 1000 bp, Homo Sapiens
ttttttttttttttttttttttttcagggatccgaaaacgactttattgaagatggagttggcaagacctagccccacttcccacccccagagccgttcctgtctccctcactcacacgctttccacaagctctgcacttccctgcacctgcctgggtgccctgggaagggctctctccccacttatgaccctggggtggagaccgagcgcccaagcaggctggcctgtttttaaagtgctctgacatgcagtgctcctgtcggaagggtgatgagcaggccacaggagagttcctcacgccctgccagccccgtgcttgggctgggcttcctctgccccagagctgaaggagtaatgcaggcctggagcagtgattctcaacgtacattccttggcgttcatgctactcctctttctcccctggggcctgggagatgagacctctgggtgtttggtttttgttttgtttgatgcacccaggaaaatgagagcaagttccaggaagcgaagtgagaacacgcagtcagatctgatattcccagctctccccgtcctccagacccctgttgattatcccacgcaggtctctcctcagggtcccttgccgaagcctttcccaattggcactgctgcgggaggtacttcgagacactgagggcataggaagggacaggtgggggctgaagggacagcccagctctagtttttccactgagtctttgtccaaatcctcagagccccgggtgtggaaggcctgtgcgtagcgttggatccgctgccggttgagatcttgcctgtcttccacccgcaggaaccagcggtctcccaggccatactcccgtccgcagatcccggagcgaggccacaggcagcgaggcagcttccgctccagcatcaccgtggtggccacaatctgggccctccacagctcatcccgctcatgggccactcgccagtgagtgtcgcccatcatggcaatgaggaggttgagcatgagca

SEQ ID NO: 341206 - DNA, 1000 bp, Homo Sapiens; identical to SEQ ID NO: 159818

SEQ ID NO: 341207 - DNA, 1000 bp, Homo Sapiens
aaagagcaaaagacaagtgctttattatgagaactgttcaagtaaaatttcagtgtgcaccagtgaaagtgaataaagatttgcatcaatttttttttgaatgaacactaggttaaaaaggggctacacattttttttttcaaacaccaccctttgctaaggcaaaaaaaaaactcacttaattttaaaacataactgttacagaagaaagctacatcacagtacagtacagaacataaaattcaccctagtctggaagccattatggaatggcacatcacctacacttagaccttctaatgtaggttggaattacagtatttatcacagctttattttctttaaactgataaaatttgaatacactttctgtttttcaggagtgtgcagatggggcccatatgttggtattacagtaattacaacagtaaataacattgcacagtcaacctccaaggctaattcagtataaaataacaagtattaaaatgtacctttactagtggttttacatcgcatatatcactaattatgaaagaaaagtaggcaaatgcccaatcacaaagcggcacattataggcataatgatgtggaataaatacaagaaatctggcaaaatatttaaaacaaacgagttacatgggaacaaactgaacaaccacataagcataaatcaatcatatactgttataaatagtatgttttgctcacaagtctcttaagtacttatagatattacagtggcaggggtgaatgaagaggatagcaggagaatgaggcaaatgttcccaatgccagttaattcctgaggtggcattatttcttaactgatgcattgatcaacactgtaaagatgagtttgtgctgtgaaacagtcccaatattattatattcccgcaattaaattgcggtattctgaaggcagcaaacctacgtgacagtttatgttataatagccagataaagtatgttttttttcttttaaattttgttgctacag

SEQ ID NO: 341208 - DNA, 1000 bp, Homo Sapiens
gaatgccaaccagtgcccttttgtgtactgggacatatactcatgtgattaaaacaggtaacatgaactctgactttaaaatgtattgtagatataaatgctctaagctagaaaaggttttccacatccacagtcaatgatgggagcctttcattcctcagaaataatccctttttaggtcatcaagaaagggtacaactgctgcagctcatgatgcaatatcttcatgagcccagagcacatacaaatcctaagggaactaccatagtacagcgctcattcttggcaccagaacaaatgaaacacactctatcctgcacacacctgccagagcaggccactttcctcttctgtgagatttaaaaagctccccaaaatgttattactcccatccccaatacacagaaaatagggaaaaggctgtttccagttcttggcctttaaacaactctaaatgtcagtactcacagtggcatattacaaagtaataaacagtgctcaattgagggcaaaccacatattgagctaatgaagagctcactgtggttaggattcgatcaaacgtcatagcagaacataagcacattttatctgaattctggaatgaatatacatgctgcaataacattaaaaaagcatggcagcctgttccaaaccagccagaatagttttgtgcaaattagtgggtctttgtgtgtttgaattcccaccacctaagggcaaactcgatatgcatactaatgacctacaattatcaaattaaaaataaaaatgctaaaggatgccagaaagaacatcagggaaagaccaactctcccttaactttttacaaataaatttaaacggtaaattagaaacacaaataaatgtgagtggctctagcattcaaatggagtaaatgaattgtgtaggagatgaaccccgtaactttttgttgttgttgttgttttaaatttcttgatcagctcttagaagatgatgatgtttatctccctgttct

SEQ ID NO: 341209 - DNA, 1000 bp, Homo Sapiens
ttggattttgtcttacagtcatctttattatactttataaatgagatttcatttatataaatcaggaagctaaactaaaatagaaacactagatttaaattctgatttgaatactctgatcaaaataacaaatctcacactgggaaaccatctatcagcaagcagagagctactgtgtgtccttccttagaagagtttgaacaccgagaacccacagcatatttgcagtacagtaacagcaattcctttgtcattatcacagaactttaattttcatatactttgctgggaccaaccaaaccatcccatatatataaccatatccatatatatatatatatatatcccacatatatatgggatggtatatatatacacatgtatatgtatgtgtgtgtgtatatatgtgtatatatgtatacacacacacacacacacatatatatatatatacacacacacacatatatatatggagagagagagagagacagtgtcttgctctgtcgcccaggctggagtgcagtggtacgatcttggctcattgcaacctccgcctcccaggctcaagcgattctcatgtctcagtctcccaagtagctgggattacaggtgtgcaccaccacaccaggctaaccattccatacattttatacaatcatttttaaaaagaagcatgaaccatttcggttttagagaattaagtttttttaaaaaagagactcttaaaaaaaagtcattatatgaataaaatctgctttgtgttaattccgacaaatcattccatcattgagtctgtcaccaattttttttttttgaaatggagtttcgctcttgttgcccaggctggagtgcaatggtacgatctcggctcactgcaaccgccgcctcccgggttcaagtgattctcctgcctcagcctcccgagtagctgggattacaggcatgcgccaccacgcctggctaattttgtattattagttgagacagggtttctcca

SEQ ID NO: 341210 - DNA, 1000 bp, Homo Sapiens; identical to SEQ ID NO: 159819

SEQ ID NO: 341211 - DNA, 1000 bp, Homo Sapiens
tttttttaaatcagacaaggtaccattttattccttataaaatatatttcatattgttgctgtaaaaacattacatttcacatttttaaaaaattttttaacagtaaaaataatacttggaagacagctgaggaaaaaggcgccaataagacaaactcacagatgggatttatctccctcttgctttttttttttttgcccctggtaaaagtcagaacctgggatgaccagaaagtaacaggacagatttctcccagcaaatcagtctccacaaccaaatgaatattgttctccaaggagtcaagctatagactcacaatgacaacgtggccatggctcaaaacactctctgaaattacaaaattgctttctgagccaatttaaaagtcacatgattgaatccaagctattttactttaaatggtccttttgctttgcacctgagacctcgcttggccacagacgtcattcgctggactccctgggcactaaatgagtgtctagcatccttaaggctgctcaacacacagccccagactctgaatatgattccaagaaatattctgaaaaaagtcacatcgctggaataaacagtttcccaagataactgctttgaaaaccagtcccgttagtttctaaaagcccacctacggcaccttccttccatcagagtctgctgcccgggtgggctgggaaggagggagatacaaagaagaaagtaggcatgatcactgggtcggttcccaagccaccctcaccctccaagaaggcatgaatggaacaaccccgagaacagagcacgtgtgaagaaccaacacgacaggcacgggatggcagcacgggtggaagggaggcaaggaggccgccagtgccaaggaggagagggggcacaagcgcaggcagggaaggtggcaccaaaacctagtaagaacaaagcaaaaccaccgtggtttccacactgctctctccctttattcctctctttcctgccctgtatacc

SEQ ID NO: 341212 - DNA, 1000 bp, Homo Sapiens
tttttttttttttttttttttttttgagcctcacagttttattttctcctcgttatccatccttcctttcagcaccagtaaggaaaaagaacacctctcttcgcaaaatattttatcaggtgtaaagacttgtttttcttctagggaagaaccgtctggatatatatttgataatgtttttaccaaaaccataggtgtgcttaccatagaaaacccctaatgtcccatgaagatacaatacagaaaaaaatacagaaattaaaaaagtttttataacagtatttctaaatctcagcaagttaaaaagcaatagttaaaaagcatcaagattaatatacttaaaacttaaggtggttttggacaaatgaaaatgaacatttccttcctcagtggcccccgcgccttgtggcttcctttgagactgggcctagggcaggaacagagtcttggtatgggcctcgggtgacccgtgtgcccacccctgctaggccttagatgccacagaatctgagatccagcaatggttcactttaaaaaatcagtggaagggcctggcctgcacacaaggcccgggagtccataggcagccacaatgagacacgtgggtgggggggtcccggtcttggtgctgagggaggtgtgcgggggcctgggggccgcacatccttactctggacgccaggacctgactaggcagaggcgaccttgtgatgacagaaaatgacttgcctaaggccgcctgtgaggtgggaggggaggagcatgcagccctgactcccacgcctgctgccccgggagggggtgcctgggtggggaagctatgttggggtctggtgtgggggccctgcccgggcctcaactgctctccctgtgcaggcagtcggcaggcggctcggggtctaggggtccagggccggccggcccagtcgcttgtgtgagcagagtaccagctgcttctggaagttgggggcctccacatcatgaatcccagtcaaggctc

SEQ ID NO: 341213 - DNA, 1000 bp, Homo Sapiens
tttttttttttacccaataaaatattttattcaagaacaaaattaaatgtgccctttgcaaggaagatgacaaaaaatttatatgttccaagagtgatgaaggaaaaggtatggcttaattctaccacctccatagataactgtcattctagccacagagtcaaagaatcagactattacgtaagattctacacacagtcttcctttaattataataactaaaaccttctgaattttactttaaattaaagaaatgtaatttcacatacctaattacctaagcctaaaatcatgtactagaacaagggctcatttcacttattatgatcaatgactgccacctagtggatataactttcctcaaatctctatattgagatttcctagtgcttacacttcagcttttacggatgacaacttccattcaaagtggcttttttagaaattaaaaaggagaagcaagaaactttcacattgctttatgtatcttttctatgcattagttatgaattagttttttatttagattggaacattacgtacttatttaagaagatggcataaacttaaagataacttaaaaataaaactattctattacaattcctttaaatcacaaattcagaagcactgtttctgaatggtgaaaaagatgacatacaaactatatagttcaatatacttcaatacaaacatgcagcttcacttaattatacatacgttttatttaaagaaaagcaaaacacacaaccacagcatttcaattaaggagcttagaaaaatttcaagtgcgttcttggttctccagttaccattccaataaaaaactttttaaaccaaagttaaaattaagtgaaaaagaaagaagtcccagtaagcagaccgaacaatacaaattcaaaatactactctatcttcttgtgttcgttcccaccaaagtgtgctgtttaaagttccacaactattatcttcctcctcttgttctttagtgagttctaca

SEQ ID NO: 341214 - DNA, 1000 bp, Homo Sapiens; identical to SEQ ID NO: 159821

SEQ ID NO: 341215 - DNA, 1000 bp, Homo Sapiens
ttttttttttttttaaatctgacataattgggatttattaacatgaattaaaatgcccaaccagtgcttcagtgtgacagtatatttaaaataaaaaagaaattaaaggtcatatactgtactactttcacaaagatcacacagttttgcaaaagacttgtcatatgtacaatgctatatatcaaatgagaaaagctgtaagcaattatatacgcaaaagaaatgcagtatttacagtttgtcaggagacattagaaatcatctatacattaaattacattttgcttgcaaataactggtaaaacaaaatgagccatgtccacaccaaaatataaaaatctgtattgcatttttatacctaagatgcattcacagaactgctgctgacaggaaagaaaaaaaaaatcctcatagtgccattacttagctgagtacttaatgtgtatgtataaaataatagaacattcactaaatgaatttaactaaaaaaaaaaaaaagatcatacagcatcaaatcagcatcagatctgccagaaaaaaacagctggaatgttcacttacaaaataaagatacctaatactggcttaacagcacattttttaaaggaattttaaaaagcaaaaatgagaaaaatacaacgaaagagcactggtgttttttatacaaaggttcatgtacaagctttaaaaagtaccttaacaggtacatatgaaatatacagtttatcttacagaacatttaaaaaaatgtttttggagtccattttaatgccaccctgacccatggtaattgttttgaaatgttggtggcacctgtgctctgtgaattggaatctgtccaggcactggagatgcctgctgaggtccttgaaccccatgtggcagggccacagagccaggatgaggacagaaccctgaagcagtaggtgttggaatactgtttggtccttggggctggagatgaggacctgtgacaggtaatggacaatgtggccctgtt

SEQ ID NO: 341216 - DNA, 1000 bp, Homo Sapiens
tttttttttttttttttttttttttaaatgacattacatcttttgtattatccaatacacagtagatactcagaatttactccaatgaatgcatgttaaaaggatttgtacagacacaacactcttactttcaaagagcagaggaacattttatatagtgaacacatacacactgtggcaatgtaaaactacttaaggaaggaaaaatatccccctccccagccaggtactgagacctggggctaaaattttttgtcagtcagcccccatccccatcccttatcttcgagtgaccttaccaggaaacctggctttggtggaaaggaaagctgtggggcttggggagcctgatgccttttcttttgggaggaaaggccacctgcacaatccacaggacaggagtggccagcagctatcctgagctgaggctccagaagagttcagatccaagagagcaagggatgaatggaaggaaagtcccacccaccttcatgtgtaaagtgattggcatttactcaaatctaaatctactcctctcctccctgcaatataccattgagcatgtgccagagtaatggttctgaacaaaagccaacacagatgtcagcctgggggcactctcagcctaaggaagcccctacagccgagccctcagccctaatgacttaggcagtaggttaggcaggagatgtagagttggtctggctcactgatttcactgtggaaatcttctactagaatttgcaaagactagatattggggaaaggttcattgatcttaagatcccaagacacacagcctagtacctaagaattttagtatatgtgggagacagaagtggagaaagctaaagaattacagccatgcctcccaaatgattatgaaaaggagggcttgtccaagctacctctgggccttaaggatgagatgagggtaggagtagggggatacatgcacccagcctgttggagaatccaacatgaagactattgtcccttg

SEQ ID NO: 341217 - DNA, 1000 bp, Homo Sapiens
ttttttttttttttttttcctttagacatttacaggtatttatttgagtaagagctcataaaatatatttttataatatgcacaagaaaaaatacatttgaatgaataaaaaataaaatgacaggaggtgacagaatttagtgtttataaatgaggtcataaagaactttaataattcagagaagaagttcaaagtgtatttaaaagttgagaccctgctttacaatattttataattttaaaaaaaggcgtttaaaggtgataggtgacttaataattttccactttcaaaatgggtttctagacactgttgttcatgaaccaaaaacaaacaaacaaacaaacaacaacaaaacccaaacactttggcaagcaaagtattattagtacatagcagcttcataacagtttacttttttaatataaagatttttcaatttacacttgtaggagtagaaaaaactaatatgctaagtctgtaagctacgcagcaaaaataatgatcttaatgaagccagaattctgtgaaaatgtgcaccacactgcatatatagtagctgagtaaatgtaaaccatgtgcttattaactcttctatataaaatattgaacccccaagtctcacacattgcctcctatgtccacatcacttttctgaagacagcctcatgctttaagccaatatatatttgctatttgaaaaagttctcatcctcattactaaaaatgtttctgtaaaggccttagacatttttttcagtaccctagtaacaagtcatatcacgatcaataaatgatcacagcctttcgaaaaaactactgagattggagaatgggtttctgtctccaacccctgaaagacgttgctgcttcaagacctacagctccaagaagacaactcagaatttcttacttttaaaaaaatattgtcatgaataactgaataattagatttctaggaaaatgaggcttttaaattaagatttagcaaaatcaactata

SEQ ID NO: 341218 - DNA, 1000 bp, Homo Sapiens
ttttttttttttttttttggcttgttttttaaataaaccaaagtcaaaaacaaactgagagtgtgtcctccacagctcttcctactctcctaggcttgcccgcgtgccctcccacccagcgcctctgctggaccacggtgcagttcgctccagaaggtgggccagggccggggaggtgcgcacacacccctggcatgctgggctgcctgctggagggtgctgctgctccgtggagggcagcaggcccaggaaggggtttcctctgctcgcctaagttacagcacaatactatgtggacgtttcattgaaaattttacttgaaaaaataaaattccagatactcaggtgagacacaaacccactgttcctgctttgagacctgtgaattcttgtgggacagttccactgacagcttgcgttcccgaggtaccagtcctcagtgacctcgggaaccccaaccacttaggtcccaaagccacaagggtgccctttgtcttgctgggaagctggctgagggcctgccagggctggaggaccagctctcccgcacagggttcagggcctctcccagaaaaaagaggttttgaagtgaaaaggcaacgaggggccagagggctccccaggatgggtcttttggaggtagatttgatgcccacaacgcatgcaaggctaagacccccaacttagccaacgaagcccatggcctcagaagggctgcagcttgctcaggccgtgggccaggatgcatgctggacggttctccaaataaaaaagccccaagggtttgtctacactgcttacctgctggggctgtgagtggggagacggcggcctgcctagggctcctggtgccaggctcaggaagagtcattcattgcaaagggccggcaagtgaaccagggccacctctgtccccagcctgtgagaggagcagctagccctgagaagggcaaggatgaatgaggctgaccacgtcacaggagtcctccaagagtgacgg

SEQ ID NO: 341219 - DNA, 1000 bp, Homo Sapiens; identical to SEQ ID NO: 159822

SEQ ID NO: 341220 - DNA, 1000 bp, Homo Sapiens
tttttttttttttttttttttccttgcagtctttattgttttattttgtttttaaaagatggggatcttgctatgctgcccaggctggtctcgaactcctggtctcaagcgatcctcccaccttggcctcccaaagctctggggtgacaggcgtgagcccccgtgcccagcctccttgcagtccagacagctgactcaggctggggaggaaccagggcaggcaccctgagaggtggtctcagtggggtaggtggtccaccagcctgtgtcggagaatcagactccttaagttcacggtattcccagacgtctggttttgcctgctccatgaatgatacatcaagacactgaggcccagagggtggagaggatgtgtccacagtggcagagggagcagggctcagtggcattggagcaagccttctggcacccactcagggcctggctcccagagcaccgggtctcagtcactggggcttaggccggcccagacgggcttgcagctcctgcatcatgccagggtgcgcgaggccaaacccgtgtcccaggggccttctcctggctggcaccggggtcccatcatgcctcagagggcttggctccaggggttcctccagctggaggggtctctgctcaggagctgacagctcctcctcaggagggttgggggctgggggctcctcctgctgctcccaggccggagtccgacgaaaagagggccgggagcgacgctgtgaggagcttctcgagaggtgcacgcgactccttgggacagagacgtctaggagggacccggggagcggggcctcgctccagctgttggcagcacctcctctggcactgcccatggcctcagccgtctcggcttccccgactgactccggcgcagcttctgcaggggcctggtgtgttggctgctcctcctggcccctgacatgttccaggctttctggctcagtctccttggcctctgccctccggcccccggtcaccatgagac

SEQ ID NO: 341221 - DNA, 1000 bp, Homo Sapiens; identical to SEQ ID NO: 159823

SEQ ID NO: 341222 - DNA, 1000 bp, Homo Sapiens; identical to SEQ ID NO: 159824

SEQ ID NO: 341223 - DNA, 1000 bp, Homo Sapiens; identical to SEQ ID NO: 246533

SEQ ID NO: 341224 - DNA, 1000 bp, Homo Sapiens
tttttttttttttaaaaaggcctattagggaagtatattataaacttcattacagagggatggccaagaaagagagccatgactcctttctccatttttataagacagagcacaagttgcattttgcaaggctatggagttgtattttttttccatttataccatttcttgttaaaagtaagacttttttttggttgcatatgcatctacagactctaaatgtaggcaaataagaactatgagaccagtaagtcacttttggctacttctgttatgctgatcaggtgataaaaatctgggattcatattaggagcccttctgaatagtttaattcctttacagcccctattagctgtcagctacaccatggatattgtccatgtgcactttgaggtagtcattccttgtaaacttcttatggcaaaactggcattctgccaggggacgattgggattatgagtcatcttgtgtcgaatcagcattttcttcaggctaaaagccaaatcacaaacatcacactgaaaaggcttttctccagtgtgcgtcctcttgtgctcatccaggcctcgcttctggctgaaggccttgctgcactctgagcacttgtacggcttctccctggtgtgagtacgaatgtgcatcttcagtccatcatttttactgaatcctttttcacagtaaggacattgatagggacgctcacctgtgtggctccggatatgaactctgagtgtaccactgctggcaaatttctggccacaatatggacagattttctccttttctcctgtatgtgttttcttatgacttctaagcactgaaggtgtaacaaaggccttattacatagctcacacctatacttcttgtgtctttcatgaaccacctggacatgaacatttaatgtatccttcctcttaaaggtagcatcgcagtgatggcacttgaaagtcctctcactgttatgtattagcaggtgtctctgtaaagaaaatggggt

SEQ ID NO: 341225 - DNA, 1000 bp, Homo Sapiens
tgaaggtaaaggttgttttgattttattttgtgcttgctttctaatgaaaatttagttaaaaaatcagaatttgatcaaagacttggtctccttattacctggtagggaggttatagggtggtagctaaccctcacacaacccagacctcagtggctcttagtatcggccaccataaaccaaacgccatgacggactgaacaggcatgggccaggtgtttccgggctccccacatctgcagcacgcgtgggccaggtttttccaggctccccacatctacagcacgcgtgggccgggtgtttccaggctccccacatctgcagcacgcgtgggccgggtgtttccaggctccccacatctgcagcacgcgtgggccgggtgtttccaggctccccacatctgcagcacgcgtgggccaggtgtttccaggctccccacgtcacaggtcttaactctgcctcgcaggggttttggaaactgttccttcactttgtgggaatggctttcgtttctctggttctattttaggtgttcggtaatgtcgtacatcttaaatcttttttgaaaggaggtggagtataaaaacctaaacgaatagtgaaaataatagaggattcttattggtttctctggggctggggtgggcatggcttttctcttcatttgtggcttatcttcatgtgccccctcaagctagtgagaccccagcatcaccaagaggcgcacgcaggggtggggtgcagggacggggcctgaggctcactcctgcctggtgtcgtgtcggtgcctccttccaaggctgcagctaaaacccctttgcctgaatggagcccctccctcagactccacaggaagagtcggcgctaactcaacggtgcgtgtgcccctgggtgtgggggacagggttctggggccagcgatctggaaagaggcacgttctgaatttgtgttgttgctcgtccaaacattgcacactcgcgtgtttctgggacaccaaagt

SEQ ID NO: 341226 - DNA, 1000 bp, Homo Sapiens
tttttttttttttttttttgaaaagtttactgaaaacttttattgtaatcaaaaagtgacataacagggttgtaatgaattcagcaaatcattctgctgatattttagaacttatatcagcttttgccaggcaattaaaaaattcaaatgtgaaaatttcacattacagtaaactccaccccaactaattaatggtggttaaaaataataggccctagcaaaacctctcatgttacatggtcacaactcacaattctgtacaaaagttcgtgttataaagctctgatgtaaaaatcaaataatcaagcagcaatattttaagtgcagcacagggtcttccatgtcattatttacaaggcttgaatctctttacattataacaaaatttaatacagatgacttagtaattaagtcaatttaaaaaatctgtctttttacacagtgacagatttcactttttggtcatctttctccttctccttctctttatctttgttcttctttgacttctttttcttgtgtttgtgtttttggcttttttccaattccacttcagtgcctgcatgtttcttatgcttcttatgctttttatgtttcttgtgttttttcttttccttctttttcttcttcttcttgctgtcctgactttctgctgagctggcactgctactgtggcttcgggtctggcttccagaaggactgtggcttctgctggggctgacgctggggctgctgtggctctgattcctgcttatgcccacctggacaactgctgctgtgtccaggctctcttttgctttctccactattttatctttcaggtccttagaaatgtttcctgaagattcctcttcttttacagaaacattactttcactgtcactttcattatagtctggttcaaaagcagcttcatcagtttctctagttaagtcagaggaaagtctagaggaatgacttaactggggtttaggcttgacagtactcttgtcaatttgcc

SEQ ID NO: 341227 - DNA, 1000 bp, Homo Sapiens
tttttttttttttttttttttttttttttttttttttttttttttttttttttttggggcattagtagcattattatttttcatgtatttgcctttatcaaactataagctgtggagttgccaatatactccattgtgattatacactgatttccatcacctgcctttttactatcaactcttattagattaaaaggaaatagacttaaattatagcaggaggtcagggctgctggatagatgttggctcagagaatgtatgtgaagacaccaaggcctctcctgtatggacacaaaatcatataaccactgtgtctgagctgggttgtggatagtcttatttggcagagggggatagccattatattctatgaaccttgccagctgtactggcctacacagttggaaagtttggaggcttttgtccgcatagacttgctatgatgaaaatgacagaagtttctagaatgaaagaggttgcaacttggcagcttgcaagctaaatccagctgcagacgtgtttgtttaaccagcaccatttaaacattttaaaatcacttcttgatatttaaaaatgagaatgtttctcatgaaaatttggatttcaaaaaatgtgaagaactggtaatcctggtttagcattcttgcaccgcagcaagcagatggagctgaacagatgccctttttaaatgcggcttgggcactttagtttgccacagctcccactgctcccagctgttttacatcgcttgtgtgagaggcctgtttcactcatttatatgaccagttgagttttgtgacactggggttagtttagctctgcctatttatttttttaatagagatggggtctcactatgttgatgaggctggtcttgaacacctggtctcaagagatcctcccatctcagcctcccaaagtgataagattacaggcatgagccactgtgcctggccagctctgcctttttatgatactgaagatctaggcttcatttgg

SEQ ID NO: 341228 - DNA, 1000 bp, Homo Sapiens
ttttgaggaaaaaaaatgacaatgtgcttttattttttttcttgttaaaaaaaaacaacattggtaaatcgttttcattaaatagacctttgtgattttactgatttacatgagtggcactaaattacatgatttataaggcttgacacaggaaggatacactgaggtatatggtaagaaaagggatatgaatactagagaaatgttaaattgataactaaggcacactttcggatgtgaatcataaatctaccactgtggctagaacagcctatatgtacatggattctgaaagacatgatcagttgctggtaaaagtagagagggcctgggcttctgccagtcccctggtacttcccacaccacttcagagaaaaagcatcatgacacaagcacagtagatggtagaggcccccagcactgagtcaggtgaagctacatggttcgctgtttagttacgtttccagtacttggtttaatttcacagtgagggagtcggttggtgatctctaagaaatccccaagcacctggtgttgggaaagtccctcaaataaagaagtgttcttttctttttttttcctctctctctctttctatttatttattttttgagatggagtcttgctctgtcacccagactggagtgcagtggcaggatctcagctcactgcaacctccacctcctgggttcaagcgattctcctgcctcagcctcccgaatagctgggattacagacacccaccaccacgcccagctaatttttgtatttttagtagagacggggtttcactatgttttgtcaggctggtctcgaactcccaacctcaggtgatccacccatctcagcctcccaaagtgctgagattacaggcgcaagccgcagcgcccagccaagaaatgttctttaaacatcacaaataaacatactgcatcagggacttgtagggacaagactgattaaccaggggctgaaatccccatatcagaaaccccagaca

SEQ ID NO: 341229 - DNA, 1000 bp, Homo Sapiens
ttttttttttttttttttctttgagtatctttttaatgacttaaacaccagcacggagactcgccatgtaaacggcctcatttctgtgctctgtgctttgggagggacagggacaccatttcccacctcggctgagttaaaacctgtcttgtaaattaataaataatttcctaacacggcaaaaaaaaaaaaaaaaaaaatccaaacgagacctagtttccatccagggacaggatatttctggacacccccggtcactgctcctcctaagggcctggccgtggctactgcagggaggatgcagtgagaatggcttccctgctgctgtttgctgctgtctacgctggccaagaacctgctcccgtctgcctgggctgatggagtctcgctcttgacaaaaatcttgctggggcaggtcctctggcagccccagcaccttaccctgagtcacgggaacctgagactttgtccaaacctcggctggaaggctggtcttggcactcgacgtcttagctagtggatttatcgcattaagactgtacttgggcctttttcatgatgacttgggtctcaatccttggagcagctgaaagaacagctcgggccacctgtggatgcacccacaatgaaatcagaggccacgtgaggtttgcaaggcagagtggcctgcagttttaactcgggcactatggcaatgcagacccaaaccaattgtgccagttctttgctgggtggcaaagtgttttcaggctttgtggtcactcctgatttctgtttggaagcacagttctctctctaaggagaatggaaacttggaaaggcctgtaaaatcggaaagcctgtaaaaggccgtagagtggagatgtataaaaatgtacggtcacccatgttttaggggttgacaccgtggacttttatctcgctcaccaaattcctcacacatacagctcactccctgtgccctcggccatctcaggcaccacaaaatcctcactgcttg

SEQ ID NO: 341230 - DNA, 1000 bp, Homo Sapiens
ttttttttttttttttgaacaataatctttattagtgtatttttaaaggtacatataatcctgagctacagcatttatacatttgtcatttactctttgaagtgtacatgtattttgcttcaaattctgtgatgagtacgtttttatactaatcagtatcataaataatttaaaatattagtcttatctctggaatcaccaatcaatttactcagatgatctcactgtctaattctactacatttaaagactgtagaacatttgtgattaagcaatttctttttcaaaactgcaaagatgggcagtgcgagagctgattccataaatttcaatgaattcttagaaaattatgttgttctttatttctgatctattttcttgaataatttgggtaattatctgatcagttacctttgagaagaatagtaaaagtacctctaatctcaacattttagctactgtaaaatgtcataagcttccttcaaatataagtagtacataattacctcaataagaaaaatttaccatgatctaagggaaaggggcacaacccaatgtaaatatatctttggataaatggttaagtattataaaacatgttatgtgaaatacttcctcaagcctctataaaggaatacatagagctgataaacattaaattccataatccagaccagatcttttataaatggtaaataaaaaggcaaaaatgaaagacaaaagtcctgtgatctttgagaaaagacatttatccaacatctccaactgtggacaaataaatattcgttcttgtattttaaattattaccaaaatattttatctttctacaaacaacaaaaaacaagcaaacagtatctagaaattttttttcctctgacaagaatgtcaagtctttgaagttacactaaattttttttttttcctgaataaggtcactataatcttaggttaaagttacagtaagcagttcaagcaaaatgcatattgcttaggttttaa

SEQ ID NO: 341231 - DNA, 1000 bp, Homo Sapiens
ttttttttttttttttacgttacagtagaatgacatgtaatttattcatataactgacaattaggcagtactcaaaattcatttaaataagcaagtggttacacaaacatctaataatactaaaattgatagtcagaaggtataaaataccatgggtatgaaatgccatggtaaatactattcaacagactacaatcataattccaaactaaatcatggtttttaaaatgatttttagcagttctggaacaatttgacttttccctttctaagcaacttacttcttccactgatacaagacaaggtcgttattttcaagaaatatcgcagagtgacttagcttaggttgctctcttgaaacacattttcttgcaaattgttttttaatattgccccttgacatagaaaacaaactagtcagcacttagttccccaagcaaatatgcttggatcagaacagtgccagggtgtaacccagttccgcaagaggcaggcagtgaaaaaccttttgcagcttttgaaatatgcttatttcttttctgaggcttcaagcatcatacacttaggcatccaagccaatgaagttatgggaataaaatagtttgatatacagatgactatgacacaattgcaactggggtgaggggaagttacaatataattctgcagtacttcaaacaaaaacagctcctacctaaagttacttcttgtaagcctcatgaagcatagctatgtttgcaggaacagtttggcttatcatgtgtctgtctgtactattttatttatttatttatttatttatttatttatttatttaattatttttgagatggagtcttgctctgtcgccaggctggagtgcagtggtatgatctcggctcactgcaacctccacctcccgggttcaagcgattctcctgcctcagcctcccgagtagctgggattacaggcacccaccaccacgcccagctaatttttgttatttttagtagagacggg

SEQ ID NO: 341232 - DNA, 1000 bp, Homo Sapiens; identical to SEQ ID NO: 159825

SEQ ID NO: 341233 - DNA, 1000 bp, Homo Sapiens
atttaaaatgtttactccaagaaatatatatataaaaaaaataataagacaattacagcactaaaccaggcaccttcgaccaaatcacaacctcctctttgattccccttcacgctaagcctctttcaaattctttttcctgagctggaagaccagtcagatgcccgcagggtcagcgccaagcacattcccaaccgggcaactgtgtacctttctctaggagtgcacgacacccttcccccacaactccttgttttaaaggatttaacccattaggaagcccatgtttcaatctaagccagaaggagctgcgggacaaggcagtcttcactttgaaggtccctttcctgctccagtccctgggctagggttctagaagaggctggctgccacgtttacatgaggccaccgaagatctaagtccagctaagcccagggaggctcctgcaaaggctgggacctcgggtgctgcgtcctcaaccctctcggtgaccacggctcaaaggagagacctcaagggtgccaggagcacaggtgcctgggctgcattccaggaaagagacctgtccagggaaacggatcaggctgtcgcatggaagcttacgtcagagatggtggttttggggtgatttggacaaattaggttagtttagcaaagctctgaagtagcagaagcttctcccctggactactgattgaacacagaacaagagatgcgcgtggcgtcagactaagtcttagagagatgcaggccagtctcctcccacagggccttgggactggcaggacagacactgctacatgccctccaagggcaggagtcacggtaaggagcgactggggtggaaaatagggaaaaaagcaacaacaactacatcatttttggcattttaacatggagacagtgacaagtggtaacaaagcaaaagaaaaaaaaaacttgaagagaccaatatttaactttcccatccacccaagtctcacacttaagttctagtcc

SEQ ID NO: 341234 - DNA, 1000 bp, Homo Sapiens; identical to SEQ ID NO: 246534

SEQ ID NO: 341235 - DNA, 1000 bp, Homo Sapiens
ttagtaactatgtactttaatcttcaacattcataattgcacaaagcatcactggtcatttaaataatacatgtcaattaatctaatgaagaaactggcaaagtagaatgttaaaagcaatacctcgagcacgtaaagaatgtttgatattaacacttaacatgcaaaacgcagattagaacagctcttttgagcatggttatttaaaatccttaccaacagggcaaagcaagcactgtggagaaatacacataaatatatccaacctgccagatctctcaggtgagtgcacaccaattctaacaggtctggctgacctggctttccacatatatacagtggtttctaatactccaaagttgtctgacgatgggaacgcagaatcggaacaaggagggaagaccatttactttcaaaatagaatccggcagggaagtctcaactcctgacaagtcacctttaaaacagcataaccagaactttcttacagagaaaaatcttttttccttaaaaatgtatatgtggcaaaaatggctgaaaatcttgtccatgctaggggaaagctgagtgtggaaaaatgtgcatttttctatctatgctgtaaagaaaatacaaagccagagcattttggcattagcaaaggctgaactaagttctcaggcaataaatttatggggaaacatgacaggctcctcattaaagctatgtgtacgttggctgaattttatacaagattcttgaatcttgtggaaaattgggcatggcttgacatctgaacaatgtccctggtttgtttgatttctaaagcatcggaaaatgttgcactttggaaatcaagtagagaagaataaacacactctaaaacagaactgggctgaatctgaaagttatttttccatatgtctctatgagatatttattacgtttatttctcatacaaacacagcccccatgctagaaatactgtggtgcattttttttttttttttttttttttttt

SEQ ID NO: 341236 - DNA, 1000 bp, Homo Sapiens
ttttttttttttttttttttttttgacaaaaccagaatgttgaatgtttattgcatcaaacaacttgatcattatcattagtagcaagctgccacacaattgcaaccgctgtgtttttgccataggcgcccgctgggacacccaagcaggaaccattgttgaagcccgtctcaaggagctggcatgccctatgccggtcatctttgcaaaagccacccccgtggacagacaagaaaccaaacagacctacgagtgccctgtgtatagaaccaaactgagaggccccagctacatctggaccttcaggctgaagagcgaagagaagactgcaaaatgggttctggctggagtggctctgcttctagaagcgtaaggtaacactggcattcctctagcctctgctggagtgcagtgaggattttctagcatgttgctgcactgttcccatgcacattattctgactttttagtaactcacacgtgcattcttttttcaacgctatccttagagtgaaagtcagaaaaaaatactagaaactaactcagggctgagcgtggtggcacacgactgtaatcccagttactcaggaggtaggagaatcacttgaacctaggaggcaaaggttgcagtgagccgaggttgcaccactgcactccctcctgggcaacagaacaagactccatctcaaaaaaaaaaaagtacatcataaaagtacatcatatgtgaacatgcaaaagcaatgcagccggaaagaacggagattttaatttttaacaaacaacaaattaaattattagcccttaaactctttcaaaatataaaagcagcaggccccaggtgagtcctgaaggaagaggctagcactctgtaaggcctccagtgtctacaatgttgatggtccccttttgttcagtcaagttttaataaaaataaaactgttctacagttaattgcactttgttcagtgtaaatttccaatgaccaagagcaggttaaacg

SEQ ID NO: 341237 - DNA, 1000 bp, Homo Sapiens
tttttttttttttttttttttttttttttttttaaaagtgggttcagcttgtttattccctacttttgttatcttaaaaacaatgattttttgcatgtaatagaaggtttttcacttaagatgctattgagtgaatcagtgaggggttcttagagttagtattcattaattaaacatagaatattagctaaacagttctgggtacactgcaatgcatggtctatggaagactagatgtttggctgaagatgctttattgttgcattatcaaaatggttatagttttcaattaaaactgtaattgatttctatgtataaaacagctttgaagttgtaaatgtagtttccaatcgttagttaatgctacattagttagcaatatttgaaaattttattggtataaaatgttttaattactaaggctgtttgtaggctgcatagtaagcttcaggatcatcacacgttttttccctgtaattggtgggataggaagcctttaaggtctcttgcttctcatgggtgggctacaaggagcagcagccatcgtggcaggcttgtgatctttttcctgctgacacctgctgcttgacatggagaagttctgcacagaaagcagtggcatccttcatgaggtggtacttggggcagacactgagagcattgtaatcgtcttttgtatcaatctctctaaagtagaccaccacgtatttgtgcagatgaatctggcttcttagatcactgcagaaaaggttaaaggcaagggggaagaggtcttgagagttctcactgggactgccctcgctcttgccacaggtaccatcgcacacactgttgacgtcattggaaagaaggaagacgactttgtctgctgccttcttttgagtggcaagccactgcactggacccatctctgctattttctttttctgccacttttcaaggatgacctcacttctgcaatggttttgaagaaattcagtgaagtaacaaattgtgtgat

SEQ ID NO: 341238 - DNA, 1000 bp, Homo Sapiens
ttttttttttttttttttggtaattaattttattgattaaagtattacaaagttctacttttcattttttcatgtacaatgtattgaaatgaactaaactcaatcacttataatataaaaagacattattatgtattagcagggtgatgcttcataatcatgtattattcctacctctaagacaccagtctgtattatagaatcacagctgtcacctgtgactgtcagaaacagaaggtgcaattgggattcttaggttggtgacagaatagcactggatccacaggccagagactaggagtgcttatcaaatgaggttttaggctctgaaaggaaggaatgagaaggtgtgccgggacaaggaatagccagttcccataaaacttgggaaacgtaaatttctcaaaagtagggtccgacacaattttttagttactttttgagaaaatttaaaaataaatacattgaaatgctgattagagagcgaaagtaatttaggttgctttttcaatctgaggttgttttaaaaaagttattgtatgaaaggtattaaaaaataaaaaaattatggtgaatatgttggcaggtaagatttgaagttctttcagagaagataaacggcatggcaattaagctttaataatatattagttttaaatagatatacatataaaaatacttcaaatgattcatctcggattgaacactcttaaaaattaaaagggtcagccaggcgcggtggcacacgcctgtaatcctagcactttgggaggctgaggtgggcggatcacgaggtcaagagatcgaggccatcctggccaacatggtgaaacctgtctccactaaaaatacaaaaattagctgggcgtggtggcaggtgcctgtagtcccagctactcaggaggctgaggcaggagaattgtttgaacccaggaagcggaggttgcaataagccgagatcatgccactacactccagcctggcgatagagcgagactcc

SEQ ID NO: 341239 - DNA, 1000 bp, Homo Sapiens
gttgagctacagtttaattgaaggaattgtactaggctaagaattttgccagctcaaaatactggtttaattctttctcagtggtgattgacgtctcaaaccagcaagaggtgtaacatgaggggaaggggctggggaagagggaaaggatgtaagaaacaaaagaaatagttagaatttggggtgtccaaagcaaactcatgatcccacctagtgagaatccatttggaaactgaggaaccaaaggctttgggctccaatctgcagccacttctttgatacgactttgggataggtggactcacccgaagtattgttttacatgtactatttgcctcaatttccctgtgatggttttgtccatcacctcatcctgaaaaaataaatgttggtgatgctttgttccacatattcgttcatttgaactcattattcccaggaaatatccattgaaattcaaaatatcatgaacttccaaagggttttggcctgctcgcactgcacatctagggcactagtagcctcatccaggatgaggacccgcgggtctcgtacaagggcccgggcaatggccagacgttgtttctgtcccgcagccagctggcttcccttctcccctacatctgtgtatattccatgctccatttcctggatgaagtcatctgcgtgggcagcctgggcagccgccatcaccttatcatcttcgcagctctgcagcccataagcaatgttgttcctcacagaaccggagaacagcacaggctcctgcccaactgaaaccacctggctgtgcaggtagcagtgttcatactgtgagatgggcttttcatccagcagcacctgtccccctgtgggctggtacagattctgcagcagggcagccactgtgctcttcccagacccattgggtcccaccagcgccgtcacctcaccaggacgtagggtaaacgtcagccccttgagcacaggcctgtcagggcgattgggatatgcaaaggag

SEQ ID NO: 341240 - DNA, 1000 bp, Homo Sapiens
ttttttttttttttttttgggattacaattttatttctgttataagttttaaaagcaatcaatcatccatcagagataggcacaccaaaatgcactcagtaatggtataaccaagatgcagcagcagaaaacaaatacattaagcatgaagccgaaaggttcagtttctttacctctccatttcttagttcaatttccttgcttaaaaggtttaaggtaaggtgacggccttcatccagggaattccacttctgttgcatggccaaagcattggcctctctctgaagaagtaatgagttgctcttggcctgctgaagttcaaggctcaaaaggtccccagtactggaatgctttctatgaccagataaatcagtaacaatgaatctgtccctttcaacatagtgtgctgatgatgtggcctcgttgccatatgaactccaccttgaatcaacagcattgacataagggacataatctgatacactgatgggcttagtcgcacttccttgggaagcagtggcctggacaggatctgtggtatggtaacctgtacgggaagatctggaaatcgcaccccattttgagatgatgggtccatcactaaagggaattattggatcttcttcttttgtccttctctgggtttcaaataaatgtactcttctcttaacatcaccactgtccaggtccattaacacagcatttgaattagcaatgacatctttgggctctgaatcaatggcatttatacaggagcctatggtgccacaagaccagggagaataatgggaaagatgatcttcttcaaattttgtaccactcacactctctgagaaatccgcacgaaagtctacactgaacagaggagaaggtggtgttggtgactgtgttgccacaggaagagttgaagagacaagaggtgctttctgagtgtggtactgtgcccactgatctggctttcttcttatctgctcctcgcaactggtcttcaaatgaccac

SEQ ID NO: 341241 - DNA, 1000 bp, Homo Sapiens
aaggatatattcctttaatttttggaactggaaaacttctttaatccagtctatgcttgtatgacacacacgtccaagaatccaccacccacccaaccaggggctcaggcccgtttgtaagcaaccagctacgtaaatgtgaacgtggctgttaggtagcatcttccaacacttaaatgaaaaaaaaaaaatcatatgtatgcatatgtgtatatatatacacaaacatatatatacacacacaaacatatatatatatatatatatatacacacacaaacatatatatatatatatatatatatatatacacacatatataaaaccttggcattcttagttctggcccaagatagtaagtcacacatttgatgccactcaccaaccgtctagcaaatgcaggctgtcatttaagggcctccttgtctcggtcgaggctgtcccctggggtgaatggtgatggaataccaggtcaccagaaagaacatgctcacctgtggaactgcatttccaatagatgcgtctatatgcatatatgtgtattgtgtgtgtgtatgcgcacatgtgtgtaatatgtgtgtgacgtgagttgccaaagtagaaaacactggtttattctgctcatactaagcatgttaaataaatcagattttgtaacctataacacaattcttttttttaaaaaggaacatttaagatcttcaaaaattgctacagtacaaaaaaagtgtgtgtgtgtgtttgtatttatatatttatatatgtatattaaccagaaatagcgactctatcggaagagattcccacccctgttttctgtaagatttctctgcgtgattcgctgggccccggctctgtggccgagcctttcgggtcagtacatggcacataatggtattattggcacaggttcagaatcgtaggacgaatcctaggtttcggatgcttcctcccgtccctttcgctgggtatcctcgtctctctgcctctggttcctttc

SEQ ID NO: 341242 - DNA, 1000 bp, Homo Sapiens
tttttttttttttttttttttttttttttttttttttttttttttttttttttttttttttttttttaaagattgaaaccaagtttactgtttcttgaacagaataggaagaaaatattttaaatggctgagctggtcattagactattactcatttatcttaaaggcagaaacttgtcaacccaactacgtgaaacagagaagcatgatttgcttaagcaggcgacattagagttaggcctctccactgaagcttcccgaccgtcagcacgtggcagacaggatgcgcccatcattccgcaagggagaaccggagaggcccgggagagtccttggctgtcctctcatcgaatgatgggtgccgagcgatcattcgtcacagtcgggcggagtttcacagtggcaaaggggttttctccgctgagaaaaggcggctttgcagtcccgttggcatcgttaggagccgcggtctcgggcttggacgctggggccttaaaggtggatgtcgtcctggccgaatctgctctcctgtcggcagctgcccccatggacaagcattccaagtagtcgggtggggggatgacaacactgctattctcagacaagttcacggtgctgatgcttctcactggtgtggggcttggcgtgggcacggtcactgcttctgtctcattttcttccagcaacttcgtgtacgacgacgggaaccaacccctcgccttggacacgtcgtgttctccatagagccagccatccttctcctcggggatgagcagcgtgatgacatctccctgtgcaaagctgagtaaggtcttgttggagcccgcagtgtgcgggaagatggtcttcactttctgcttcttcatcatgttcagtcccgttgcaaccgaaactgatcgctgtaaactgggatcttcggaagtacctgttgaattatttaccctttgtgaattcggggcagccgtggctgggttattaaacatatcgatcaagggactgg

SEQ ID NO: 341243 - DNA, 1000 bp, Homo Sapiens; identical to SEQ ID NO: 335774

SEQ ID NO: 341244 - DNA, 1000 bp, Homo Sapiens
ttttttttttttttttttttcaggggtggggaacactttattttaaggcatattcatatcagcatataaggcatattcatatcacaatggcacgatctcagctcactgcaacctccacctcctgggttcaagcaattctcctgcctcagcctcccaagtatctgggattacaggcatgtgccatcatgcctggctaattttgtatttttagtagagatggggtttcaccatgttagtcaggttggtcttgaactcctgacctcaggcgatccgcccaccttggcctcccaaagtgctgggattacaggcgtgagccaccgcgcccggccttttaaggcatattctaaagattgcaccccaacctccaaaattaaaaaaaaaaatctctaaaaaataaaaagtgatttcatctcctaggccccaatcaatcatctaagtaaagctttttctttggtccttttatcctcaaagtcatctcttgttcccacaacccactgcacctgggaagctggacagcaggcccagctgaaacaaggaggtctctttggttcaggttggcactaaggtgcccagtggtcagatgagcagcctcaggtttgcaggagccagtagttcctgtcttgctcctgggggtacttccagaaaagccagaagcggataaagctggtgacgattcctggaaagttggacaccatgatatagggatctctgagtcgaaacccatagaggcaccaggaggcagaggtgagaagggtagcaatggtgagtgggtaggagagacattgggttgatttagtttgaatcaccttagccaagtcagccagtggtgagaggtacatgctgatggtgaagacactgcagaagaggcccaactgctgaagccgggcctcagggttgggtaccaggagccaaaagtagccataacccaggagaaggacccctagcagggttgcagtctgtaggagcacaacacgcttccgagggcagtaatgcagatatg

SEQ ID NO: 341245 - DNA, 1000 bp, Homo Sapiens
gggtttgtaaaagatttattgatcacataaaagcaatgaataggagatgacatatatctaactcatgattacaaaacttttagagacaactaggttaaatatttcatgttttggctaagggaaaagaattcatgatctcgttaaagaagttcaaagtcaacactgatattgtacaactaccagtgcttttctaatgatctagaaatttgctataaatagctttactttttgctagttaatcacttactatgattgggttttatttaacagtgaggactaaagaggcagaatccttttttaaccactggataaaacagagacataaattaatgatgggtgctaagctttacattttatgttaaaaagatggaatatatttaagtggattgaatatatttcatgaggagttggacatattaaacccccaaatctgtttaggaagttttgtgagaaagtgtgtatatgccttgactcactctggcttacttttaaaatggaatacatttggcactaaataaaataaatagacaagcaaactgtgagactaagctgctccatctgagttgcccatcttgacttacaattcatactatttcttagttcttgactgagcacaaacagacctaaccgtatagcacttctgtgatgcatgaaaatagaatctagagctaagatactgcgcttcactgatgagccaatcttctattctgccaaaatcatagttacaaatgtgaaattcattcaagaaattcacatttttaacaaatgcttatactttttcaagttttcttgctagatatgttcttggttttgtggccagctaaaatatgatctttgaattaaggaaatccatataaaagaaacatctattttataggaacctcatttcacttgaaactttctttaccaaaacaccaaaccaaaactttgtcaccaaactcctggaacaaagcactggtggctatattttagagtctctgatgagtctgaagtccactca

SEQ ID NO: 341246 - DNA, 1000 bp, Homo Sapiens; identical to SEQ ID NO: 159826

SEQ ID NO: 341247 - DNA, 1000 bp, Homo Sapiens
gccagtgtgttttctttagtctttatttatttcagaacatttccttacatttaagtatgagtcatattaagtttagctgcatttgctcataagtaaattcataattataactttagtcaaatgtatttaaacaaacaaaaaaaaaggtttaagtagtaaaataatatgctttctctactcagccagccaacaagaaataggaacaaggaaatgatgtcttctggttatgaattaagttgacataacagtgctacacctcgtccaatccagtgttccttgggttggtcagagggaagagtcatggcaatcacaaaattcgtggaatggccagtggtggataatactcctctccgctcacttgtcttatacaatggagcaacataacttggccgttttggtatatctgccctcttacagggctttagccacatcacaggcactgtatcataaagaattttgggatgcgattctgcaagtttcttgatctttctattccaggaagctccatccagaaataatccgtgaatgaaaacaccatcctcaggaggatgcttgtattctttgtcttccatcacttcatagtcaaacccaagaagatcaataggaattgtgtatttcctggcgtagttctgctgggcaccggtcaggaaggcttgtgtgaagaagaagccagaaagccagaagactggaggaggaccaacctcataccattgctgcaagaattttagtcttgcaaggaagtcattcacatagctgccaagtggtttaaggcttgggtaggatttacccatccacatttctggaattttgacattcaaaatgctgctaaccacttcttcaagatctgtagacatgactgcaagccccttgattgctttttgaatatttacgcacgaatctcttatggtcttcagtaacttattgaaccgtcccatctcttggacaagtacagtgttcatgctctgagtataagttgttgggtacctcctcatggcagcct

SEQ ID NO: 341248 - DNA, 1000 bp, Homo Sapiens
cagcttttcagaagaaacgttttattatttttttgtcgaagaaaaaaagccatataaatattagagtataaaacttgcgtgagacacaggaagagggtggggtgggagctacgtgactatgcgaagagaagcgcttataggagaagtcagtacgggggagggggtcgccttagcgcgtggacacagcacaaaacacaacacgggccgccgcgggcagatcaaggacagacggctgcgcggagcccgccgcccgctgcccacccgccatcacgtaaaagcacaccgcactacactactggctattctacaccagccgaaagagggagggggcgctacactactgtaagggcaggtctggggttctctggcagccccgctggatggccggggacccaggggcagaagggggtgggagaagaaggtctatgcacaaggaggcactggggaactttaaccaggctatggccactagggggcgcactggggacctgggcagtggccttcacggaagagaaacggcacctggcaaggtgaaggactgaggcttcaggagggcaggggccctgttgaagaagccccatcctgggctgagactttctgttcatttggtccctgccctagctccctgcctccccaacccagggactaagaatggcctggctggcccacccttcctgctggggctccgctgacccttccaccagtggcacctctggagtacccagcacccacagaggcccctctgacctctcaaggggacctggtcctaaacctgcttcgagcttccttggactgaaatgccagtttaatccattggtcctgttagctcagcccaaagctggctgcctgggctgagccctattatgtagtgggaagggtccagcctagttattggtttatggctggaatctggaggatgttgtcagtcccctgaggacatacagagcctcctccaaggccttgataacttgatgtgtcaagctttgtccatgcccccacc

SEQ ID NO: 341249 - DNA, 1000 bp, Homo Sapiens; identical to SEQ ID NO: 341248

SEQ ID NO: 341250 - DNA, 1000 bp, Homo Sapiens; identical to SEQ ID NO: 341248

SEQ ID NO: 341251 - DNA, 1000 bp, Homo Sapiens; identical to SEQ ID NO: 341248

SEQ ID NO: 341252 - DNA, 1000 bp, Homo Sapiens
ttttttttttttcagcaacgctttttatttttattttatgctttgatggtgtctagatttaagttacatatataatgacattagctcttaatactttagtttgcatatccaaataattgagaatatggtcttgcataataccattatcacagcaaaaatagcaataactccattaatataacattttggccaaataaatgaaaaaccagaaaacacagattacatttccacgtcattatagccactaataaagatttttaaagaaactgtgagaaaaacaagagctataatcatgcatgcaactacagtacaaccaagaatccacaaaagattatgcaaaaagtaccatcagcttgccaagaataaccaaaaattagacatttaaaataaattgttttattgaatgttaagtccaaagctatttcgaaagttctcgatttcccccatattcctaccagtgtcatgaacttgaaaattggggataatcggcttcagaaatttgaactcatttgtcccggaacctcctgtcagacacacctcgtattggtagctctgggacagggtcccggtgccgctcacgtccaccagatgccctggaaagggaccctcgggcaccgagcagcgacccaccgaggccgccctgctcctcctgcacagccgcaccgccacgaacaggagcaccgagaagaggaagagcgacgacaccgaggccaatgccaccaccaggtagacggtgagggagtcggcctgggcctgggccggggccgcctcagggagcggcaggtagggctgggagaagccgtccaccaggagcacgtgcagcgtggcggtggccgagcgaggaggctcgccattgtccttgaccagcaccaccagcctgtgcttggccgcgtcgcgctcgctcagcagcctggcggtgcgcacctcgccattgtgcgcccacacgccgaacagcccgggctccgtggccttgagcagctggtacgacagccaggcgttc

SEQ ID NO: 341253 - DNA, 1000 bp, Homo Sapiens; identical to SEQ ID NO: 159829

SEQ ID NO: 341254 - DNA, 1000 bp, Homo Sapiens
tttttttagaatacaaagaaaatttacatttattataccgcaaaaaaactcatacatttataaataccagtaacatgcatagaattggaataagatggttactttctaataaaaggagacacctccaatgggcaaagcagtaaaaaaggactttccacaaattaaacgagactagcctcagtagatccttattaacacttaagtgaattcaaagctcttcctgaaactgggatttgcctcgctaaccctctctgcaccctgagcaacgaagttggggataattggcttcaggaacttgaactcatttgtcccggagcctccagtcagacacacctcgtactggtagctctgggacagggtcccggtgccgctcacgtccaccatctgccctggaaaggggccctcgggcaccgagcagcgacccaccgaggccgccctgctcctcctgcacagccgcaccgccacgaacaggagcaccgagaagaggaagagcgaagacaccgaggccaacgccaccaccaggtagacggtgagcaagtcggcctgggcctgggccggtgccgcctccgggagcagcaggtagggctgggagaagccgtccaccaggagcacgtgcagcgtggcggtggccgagcgcggaggctcgccattgtccttgaccagcaccaccagcctctgcttggcagcgtcgcgctccctcagcagcctggcggtgcgcacctcgccattgtgcgcccacacgccgaacagcccgggctccgtggccttgagcagctggtacgacagccaggcgttctggcccgagtcgccgtccaccgccaccaccttggtcaccaggtagcccggctcggccgcccggggcaccagctcggtgcagggcgcggagccgttctgcagcgggtacagcacgaagggcgagttgtcgttggcgtccagcaccagcacgcgcaccagcgcctcgctgctcaacgccggggagccgcggtctgcggcgcccacg

SEQ ID NO: 341255 - DNA, 1000 bp, Homo Sapiens
taaatggcataggtttaatttttttcctcagtcatcatgaacacactttagataaaccaaagggtaattacccatattagtctatatttgtgtccatattttggccaatataagcacataaaatattgaaatattaattgcaaatgtcaacacagaaaatgaactaaattactttcatttgagtactatatccctaaaaagatgatatattactatttattaaagaaaacacattcttgtctatccttaaaactttgttaactatagacaaagctgctttgggcatattatagaacacattatatgaatatattcaacaagggaaattataaaattggtggtttggaactctctctacattgctttataatgtaaaatttgaatggagttattttaataagctatttgaaatcactattaaaagacagtgaatttctttttgctccccattagaaaaaaaaaaggcggaattaagactgcgttggcaagccaggatgaaaggagaatatgcaaggattaactacagaaaaagtagaatcaatatataaacaaaatgttctatcgactaaggattctcgattgaaatacaaaacattcagagccacacaactactttccagtactgttaatgaaacctaagccatccctggatttgatattttgctctattcttgctacttgccttgaaccagaccaaaaaagacctctccaatggacaaagcagtaaaaaaggactttccacagattaactaagacgaggctcagtagatccttattaacacttaactgaattcaaagctcttcctgaaactgggatttgcctcgctaaccctctctgcaccctgagcaacgaagttggggataattggcttcaggaacttgaactcatttgtcccggagcctccagtcagacacacctcgtactggtagctctgggacagggtcccggtgccgctcacgtccaccatctgccctggaaaggggccctcgggcaccgagc

SEQ ID NO: 341256 - DNA, 1000 bp, Homo Sapiens
tgcttctccttaacttccgagaatttctaaaaatttaatgatcatctatgattctctttgatattatgcatttaaaactaactattctttttcttaaattttcctgattcaatagtgcactataattaatagaaaacttttaaaaacaaactttcaaatcaggaaaatgtattacaaatgttaagtatgggtgactgcagaaaatctacaatatgaagaaaataattaactaatgatgcaatcaaaattatgtaatattcctactcaggaccattaatcttttttctgggaaatgaaagtcatatgttctgaagaaaggagaaggcacaggttgccctttcaattttgttttccgcttgagtttggacagatcagagcattagtaataatagttgaaaattgacccagaaaagcaggacttttggtgtataagaaaataaaaccatagataaatatgtacattattatttctaaatatagaaaagattggacagcagtataaatatgataaaagacttctccttaattaggcagaaacttgccaggtgatatctaatgacagaaaacagtatggaatcggagcagggtcactgacccagagtcagacagatctgggatggatgctcagttttgtcacttattagttagtggaacttagtgaacttactgaatctctaagaccatctatttgttcattcctaaaataccatgcctcatatgcttcttctcagattaaaagtgttaaaatagtgtatgatgcattaaaagcattttttaaaaatgcttaaaaagatactctacagtctatgcttctgagactagggtaggtacactcatacagctttctaatcaactcaggaagtctcagtagagattgaaaacaatggaaagcaatttaaaatatctcaaacaagacttacatttaatagactgtatattaagcataattgtttgacataaaacattacacatatacatttcatgctttgtgaagggttct

SEQ ID NO: 341257 - DNA, 1000 bp, Homo Sapiens; identical to SEQ ID NO: 159830

SEQ ID NO: 341258 - DNA, 1000 bp, Homo Sapiens; identical to SEQ ID NO: 159832

SEQ ID NO: 341259 - DNA, 1000 bp, Homo Sapiens
tttattctttatttttaaaatttatgtatgttcgtgaggcacaagtgcaattctgctacattgatatcttgcttctcagtcccacacaaggaagctgtctcacactttattagctgtgagagacaccccagagccctgggcactgtcagtgactgcagcctgagagtagctccctctgtttctatctgagctcttcttcctccacatcacagcagcgaccacagctccagtgaccacagctccaaggacaacaaggccagcaacgatgcccacgatggggatggtgggctggggagactgctcccatctcaggatgaggggctggggcagcccctcgtgctgcacatggcatgtgtatctctgttcctctccagaaggcaccaccacagcggcccacttctggaaggttccatcccctgcaggcctggtctccacaagctctgtgtcctgggtctgttcctccccatcccgctgccaggtcagcgtgatctccgcagggtagaagcccagggcccagcacctcagggtggcctcatggtcagagatggggtggtgggcaacgtgtgcctttggaggatctgcgcgctgtagcgtctccttcccattctccaagtatctgcggagcaactccaggcactcgccctccaggtaggtcctgaactcctctgcatattcctctgcctcatagaagcgctgggtgatctgagccacggtgtccgccgcggtccaggagcgcaggtcctcgttcagggagatgtaatccttgccgtcgtacgcgtgctggtgatacccgcggaggaggcgtccgtcgggccccatgtcgcagccattcattccctggagggtgtgagacccagcctcgctctggttgtagcggcggagcaggttcctcagggccactcggtcagtctgtgcgttggccttggcgtaccctgtggtccactcccaatactgcggcccctcttgctccacccacggctcccgcggctccatcctcgga

SEQ ID NO: 341260 - DNA, 1000 bp, Homo Sapiens
ttttttttttttttttttttttttttttttttttttttttttttttttttttttttttttttttttttttttttttttaaaattaaaaagcttcattccacagcttttattctataagaacataaacatcgtctttttccacgcacagcagcaatacaatattaatttattctgatttaagattagaagtaaatagagctagaactaacatttataataacgatagaatgcatttgcttaaaacaagattggcaattcttcataataatagacatttatacagatttgtatttataggtttttttctttttctgcatctacaggtttgacccttttatgcatgtaacttcacagtataaaggaaatccaaacaatgtctcccttctctagtttattccgcttaccccagtcctcctaggcttctgtgaatttcagaaagcaaaaacaaacaaaaaaaaaaactttttgttcaaggcgatttaaaaaaacaacttcacaagatagggagaattgtggtgtgcttgtcacatgttaccagtggtaacaattttaatgacaaaaaaatccactaattccaaatgcataaacaaaactacattatttatctacagccagaaggatatggaaatttagaggtaaatgaaacattttagtcaggcaatgtaagaccttacagaaactggaagagaagtccccttctcttggtaattctttttttttctttttaaagctgggatatcttacagaggaaggaaaaattaaccttttttactttctttctcactttttaaatcagccaaagtcaagcccgtttgccaacctgcatgtccatgcctgtaagcccttctcttggccaaggaagaaaggaagaaagaaaaaagaaacccaggggcctgtatcccctgattaaacacagcacagcactccaggcagacatgcccggtggcggctcctttgcaccattgacctcaggccagacacctcagcgccaacaatggga

SEQ ID NO: 341261 - DNA, 1000 bp, Homo Sapiens
tttagtcctgttctctctttatttgatatgacaaaatatagtttcaggaaggacccagagtcaataaatagttggacaacagcaatgggtcaggagggcacagaaattcgtggcagggactatgggacagcaaagggcctctaggaccacttgctggggtccagtgccaggaaaccccactagttgagctagctagcaggctggggctgccggcctgagagggcatgcagcaggcgcaggctggggaggttcccgggttttggggggaagaggttgtggagataaggtttggaaagcatagagcaactgtgggggccctaggccgatgctctcctttcatatgcaaatcattcataagtgaaaatctagtttagtcgctacaaggaagcaccccgagtctagggccagactctcgccagcctttggctgtctaacccgtccagccgggaacaaaggagagggcgaggttagagggtccggcgagggtcctgtggcgcgggccgggcccaccttaactcgggagggccgcgctgaggctgggagccggagatacggcccaggccaaggttcgttctgcgccagcctgtacgccgcagccctccggggaagtcctgcggagcttgccctgggccccgggtaccgagctgagccgagctgaggggagatggggcagcgccgacagccccgcgggaaccctgggtcggtagggatgcggaatgccaaggaaaagcgcttttgtctgtggggcccgggagcccagtgctccagcacctgcccccgacccgaaatatagagaggaaaggcgaaaaggaaaggcgcagggacaggaaccggctaggggcgcgctctgcgggcctcccccgctgcctctaaagagcctctttgcttttcattttggaatctttcttccacttcatcctgcggttctggaaccagatcttgatctgtctctcattgagacacaagttgttggcgatctctatgcgcctgcggcgagtga

SEQ ID NO: 341262 - DNA, 1000 bp, Homo Sapiens
cccgagttttttttttttttttttttttttttttttttttttttttttttttttttttttttttttttttttttgtccaaaataatttatttaccagccttacaaaaaacatgtcggcaagagaagaatcagtcccgtaggagcaggcaaacctctccttccttccggtggctcccctaggacctgccggagagtggagagtccggtgggggggtccccaagcccagggtggacgaggaaaaggtcaggaaatagaggattgtcctgagccctcctggccatgggggccgacccagtgggcactgaggcacttgtgggcaaaggctggaggcccatgcccctttgtggggggcgagagctgtcctgggagggccaggtggggagggagggggtgctgagggctgcttagggagaaaccagccactcagttggtctctgaggcaaggctcctggggcggggctgaggggggatagctgggggagtggggaccccactgatagcctcaggggctcctccctctgctgtggcagcccccaggtccacctgtgcagggttactcaaagagactgggctgggggaggctggacctggggaggccgggctgggggaggctggtgaacgccggctttggcgccgggcaggctgagggggtgtggggggtaacgggggtggcactgtgggggctcggaggctgctgccaaccagacgtcggggcagggcttggggggtcccagggctgccagagccagggggcaagggcggggctggaggggaggagcgggagccggagacctgggggggcggcatggtgggccgggctggcgccgggcgcttggtcctccgagccatgtcctccactggggcagctgtctccgggggactcctggtgaccttgggggaggctggtctgggaggcacctcagactctgtcctttccttggtagctgctgaagccaaggctggggccggagctggagctggagccggagccggagccgg

SEQ ID NO: 341263 - DNA, 1000 bp, Homo Sapiens
ttttttttttttttttttttttttttttcaaaatatttatttcaagtagaaattgatataatgtactatatacaggaagacaccacatgtaagataagtaagtcaaaaagtttcaggaatacacgtttatcaaaatattaaaaactcaaaataattttacatcagatactttaattaaaaatagtgttcatgggttaagggtagggttaaaaaaataaaaaattaaaaaagtagtgttcatctattaaaataccaggccccaaacagtcaccaactaagaagagagacggttctactccctataaattcatacacacaggcctccttatacagtcatcacatacatttttatctaattgtctcctaaaaatccctatctttctgttactcttttctttctttttttttttttttttttttttgagacggagtttcgctcttgttgcccaggctggaatgcaatggtgcgatctcgactcacggcaacctccgcctcccgggttccagccattctcctgcctcagcctcccgagtagctgggatcacaggcatgagccatcacgcctggctaattttgtatttttagtagagacagagtttctccacgctggtcaggctggtcctttttgttactcttatgggaattattcggcgggttaaaaaaatttttttttaataaatacatttttttttggccgggctcagtggctcacgcctgtaatcccagcactttgggaggccaaggcgggtggatcacctgaggtcaggagttcaaagccagcctgaccaacatggtgaaaccgagtctctactaaaaatacaaaaaattagccaggcgtggtagctcatgcctgcaatcccagccacttgggaggctgagacaggagaatcacttgaacccaagaagtggaggttgcagtgagccgagattgtgtcactgcactccagcctgggagacaagagcaaaactccgtcacaaaaccaaaccaaaccttttttt

SEQ ID NO: 341264 - DNA, 1000 bp, Homo Sapiens; identical to SEQ ID NO: 159834

SEQ ID NO: 341265 - DNA, 1000 bp, Homo Sapiens
ttttttttttttttttctttttttttttttttgaagttgaggcaaatggataagtggccatatttatgtgttaacaatcataaatcagttaacttctatagacaatcctggtgagaaatccaaccagctgatatctgcaaaagataattcagtcaatagattatcctatctacaaataattttttcatctaatcactatggtcaattttgtgttatttaaatggggtctctgtggagaaatgggcaagttactcacctctttctgccttggttaatacctgcataggattccacagtcacagactgaatgcctagcttcagccaggcatctcacagataaatctattacatgcaaaatgaaccagatgaaatagtacagacgtatccaagcaaacatatcaccactattatgaaaaacaatttaaaggccgttcagctcagatgtgtgctcagtccaagagggagacacattattattgataatcagtctcacagggaagttggacaccccctgccccgctacagtggggatgtatttttatggattaaagattaattacattaaatactgaattttggaatgagtgctaaaatagataatgtgatttggtcattaagacactgaagcaggtttttattttgtatgattactactgttaccagttgagttacaaatggcattgattcactgaggatgtgtcttgtcaactgcttcctgcttgacctgcaaatgccaagttagtcaggagtaggcttaaataaaagtcactgcagttcagcctgacttactgattactggggctggtttcttaccaaaactgtgggaatcggttattccaaatagctaggtggagtcaggcagcttcacgtggccgttgctcttgactcctcagtccccaactcttaacccatatctgttttcttgtctatgcaatggtgaacctgttctctctggccttaagattattgctgaattttttactgattgctggtgatattt

SEQ ID NO: 341266 - DNA, 1000 bp, Homo Sapiens
ctagaaataatttggtctgggtctaagtgctaatatcatgctgccaagtctctttctgaaaagcataaaagcaaaatatcccactcctgcaagcaaaccaaccacaagggtcgtgccaagaacttttggggcccttttcttggccacccggaatgctgttggcagcactgcagagattaatatattgttgacatgtcctaaaaccttgttaaatgtttttctcttcaagacacgctcgtaataggtttccaagtttggtcgctttccgtttccccagtttctccttgcaaaccccaggaacttcagtcgatgcaatgtgacagcgagtgagacgtctgccagggtgaaggattcaccgcagagccaaggttgctggccctcttctggggtttcttcatttcttctttgcaattcagtttcaacctgatccaagactttctccaactcatcaagaattttcttcaaatacttgacattgtcatgatcaagcagctttgatttaagtcgtttctgttttgcaatgtatgcttcttgtaaatctgggttttcttcagcaagtttcttcagctcagactctgtgtttccaatttggctacgaatccttgtagttgcataagccgggatcatggagtccacagttaactcaggatgtaaaatgcagccatgtgtataggcatccattggcaaggagtcaagcagctctcggtaatgttgtacccgtgggtaatacatgctttctttatcaggcattaacctgggtgttctttcatccaggaaagtctgttcaagataatcaatgatctgagtggcctcacaaattatgttttccccgtggataaggacaggcacttctccagttgagttcaaacgcataaaccaaggctcattgtgctcactcaagggcagacttacatcatgtccctcgcacttcaatgccttttcagcaattaccaagcgcaccttttgagagctgaaggaatgcgtccaatggtacagaatg

SEQ ID NO: 341267 - DNA, 1000 bp, Homo Sapiens
ccattaaataaccgtctttatttagaaacgcagaccccacacgtttcaggaatcctgagccccagtctggctttgtcaccccctgactctgtgaggttgagtcagctgacttgtcaggacccctttgtaaaatgtatgaggttttgatccaagtagagttagaagtttaaaagttcgcccatttgtaaaattatggggctcaactacattttttaagcaggcttccaattcttaaaaacaactacagcaataaaactagggtgagtctatgatttcaggcaaattctaattggctgattgtacgttagacctttttcttttgcatctaaaattaaatgaactgataccttcatgtatacacttgatctctgttaagatggtggacgaaaaatttgttagaatagaaaaaaatacatgaagagtgaaataacatgatctcttcagaatggccaaattgtgctgagatggtgatgaggagccgctctatgtcctgaggcatcttctaagaaaattctctggctggtgctttctgagttcatcctcctcggacctcactgctctcacatttttgtttgtatttcttcatcctctgcctggttgacctgtcctggagcgtggggtctgatcgggttcttggactccacgcactccacaagcccatacgccaccatggtcaggctcaggacccccagcagaatgtagagcttgacgtgcacgcacaaaaacatgctgtacccgaaggcaatgacgaagcccagggcctcccacaggcggtaattggcgaaggcagcttccttgctcttctcaaacagaacgccgtagagagcattgttttgtgtctgccagacggcatctgccacgccccacaggccagagaatacgaagaacactgccagatggtcagcacgaggtctccacagcagtagggcaatcatgcaggacacgtgggtcaccgcgcccagcacgtacagcacagccctgcccgtgtactgcgagacct

SEQ ID NO: 341268 - DNA, 1000 bp, Homo Sapiens
ttttttttttttttttttttttttttttttttttttttttttttttttttttttttttttttttttttttttttttttcaggattaagcatgtatttattttagttcagttaaaacaaacatacattgtttcattgaaacggtgtagcactctttgccaacaagccatactagaattgttggcctctaacagtacagtggggatatttacactatatacacaaagttaatacacccaggttctcaaaggtcttccattacactagatcacattttatttcattacactagatcacattttgattactgcattttgaaaatgtattccttatttaaattttaaataagagatctgaatttgtaccaagatttcatgaaaaaatttgatgttgtttattgcaaatacaatttaaacaagttttttttagtgtttgtacacaatttgtcaatttttcaatattcaattttctgtacaggtacttttgggacaattcttatagttacataatgtgaattcatcaaaatgcagttaagaaacttacaggaatatatacacttgaacccaagacccaaacctgacattatatacaacctatttacaaatacatatggacagacaatatatgtacatagattatcataaatattgaaaaataggttagctttaatggattaatgttgttctataaataacattacagttgtaactgaaacatccacggaagacagtaatgcaaaatgaggtgacaagacagtggttttaatactgaagactgctcattaatgggaattcattgttcaggaacctcaaggtagacaagatagctcccagaaaatcatccattggaattttccctaggcacttgattttgaaccttaaatagccagaggattggaggagcttcctcacattaatttgctgtagagaaaagaattttttttccattccttcctggttgccacagtatcttctcccatacaaaaaaaaaaaaaagtctgta

SEQ ID NO: 341269 - DNA, 1000 bp, Homo Sapiens
ttttttttttttgggagtgctaactggattttttatttttatatcaagacactgtgtttaaaatttttacaaaggacaaactccatgggtttccgttagtgttttaagaacttttctttaaaaaaaaaaaaaaaccaacaacaacaaaaaacaccgcctttttgaaagagaaatgacagacacaaaagactgtaaagaaaatggggcgaatttctgatagcatttccccaagggcagaggcaaaacccagatcagacctgggggcccaatagtgatgtggcttccatagtacgttgttcaccaaatctaaggtcacctggtctggccaggccaatgctgttggcctttggggaagcaggtcaccctgcaggctctgcagccctccacacggacacagagagagttggagatctctcccctacgaccctccagctccatccagtgctagcccctttctccttccaccccatggtcttgcttaaatctgtttccttcctgggggtcttgttccttggtctgattgtgtgagcactgggggtcctagagccagagagaccttcgggcctgaagccctcccttccagaggctcttagcactcatgggttggaaaagcatttgttccaaaattaaaaaagaaaaatcaacaaaacaagacccagaaaaaagaccaagtcctggggaggaagagctatcctgctctttaaagctcccaagtctggagttggtcggtggtgcagttccaagagaggccgaaggcgagcaccaagggggtgtccagctgttgctttcaggccccccaggagtgtctgtggtcagattcagggagctggcttcagctgctgtttcatgggtcctcggtttaccgaggactcatctgcgtccccatttaaagggtttgttcaggtttacttccgtatttgtgtttttgtacatgcgggtgcatgtccacatctgtctatgtttgtgcaggtggatctgctgtagggtgtgggtgcgtgcg

SEQ ID NO: 341270 - DNA, 1000 bp, Homo Sapiens
ctaagtggtccgcaggttggagcctggggggttgctgatggatttctgcaaattgctgatgttgaaattctgcaaggaggcagttcccacaggttggaactggccaagtggctgtggtgctgggccacccgtcccactccattgagcgccaaatggggtagctggaaagccatactgctgtggggggcacatagacttggtgaagtgacctagagaggtagctgatgctgcagagatgggggcagagccacccaggttcgaggtcatggagatgcacagttgcccaggtgcagagaacttccttgccattccagggccctcgtaattcatgtgccctttgcttcctctcctgcctgagagattcatggcatctcgggcccaattgtctaccaacttgtgcaagtcatctgtgaatgtgcccttcctgctggacgtcatggcaggaggctgagcttgggcggcttggctgttcactgttgccccaacagtgtttgtgctgctggttccttgacctggagcagaaaggcttggtactgaaatggcaccatcactggtgaaggctgaatagaggttgtcactggagggagatggcttaaggggctgtaacagctgattctgcccggactctgggatgttgccaggagggtggagggtctgctgggggtgcaagactgaagctgcactctgaccagacaggttacctgaaagctgggggcttttattccccaaggaactgcttcgactagatttgctgcctttgcttttagtgggtcgtcgtcttctccctgaaaggggagcagctgggggaataataacagcagggggcaccttgcccagtttggtatacaaagattcaatttcatgcttctggcgactctgcaggtcctgaatctctttgagatgtttatctcgtagtcgtcgcagctctaactttaagtcttcatcttcgatatctgactcattgtcgctactcatgtaagaggagttaaatgaattacta

SEQ ID NO: 341271 - DNA, 1000 bp, Homo Sapiens; identical to SEQ ID NO: 159835

SEQ ID NO: 341272 - DNA, 1000 bp, Homo Sapiens
tttttttttttttttttttttttttttttttttttttttttttttttttttttttttttttttttttttttttcatgtgaggtatttattttgcagccattcagttcagctgtccagtatcaggttaccaaagacaaattttcaagctcccagttaatccccaccaaagtttctactgttcggctacttcaggatggctaacatttggagagaagaggatcccccaggtagtctgtacataattcagagagaggacatcagaattttccatggttctatttcaggtattaaggtaccacagtgaagcatgtcatttgactgtggtggcaaagggacggcactgagcatgcctaacctattccccggcatttcagtccaatcagcgcatgctcgcaatgatcatccatgggtgaaaaggaagagctgaaagacacatgtgctgagcaacatttaatttctgcttgttaaacgggtgattaggcgccagtgtggcaccatccagacactgggaatttgtgccactccatcagttctgctggctctgctcattctgctttcctgcagtggatgccacttcccaaagaaccatgctccaaaaaacaaaagagaatttcctcattagctggacttggctgcagcaactgtttggtttggagtagctgtagttgttgggagatggtccatctctggtgcatcaaaaaagtatgccaagcagcccacagaaagcagcatatggagcaacacaattgtcacaattgtggccaatgcaacgcgtcggttatcctcacgaacagctggccaaaatgtcattgccaagagagatcctgagatgcccagggcaatcatgactagaatccaacgaacagctttctgggggataatccacagtattgcggtggggatataaatgaagagggaatatccatagacacacacaatctccagaaatgaataggagacgatgttcataactttgctgtttctccacatgaggaaaccc

SEQ ID NO: 341273 - DNA, 1000 bp, Homo Sapiens
tttttttttaagggaataaaacactttattttaaaaattcaaatatccttcaaatgaaaactcctatccatttattgagcacccagagtgccaggcactgtacaaaacattagaaagacttgttcatgctcttttagagcaaaattcactattccgttgcactttgcatgatgctgacattttagatccattgtcataaaatgaccaagatcttcaagacttgttcaagaaacaagtttccaatccatagtagaaacagatcatgcaggttaatgcagaagtcaactggtgatgtctgtcaactgtttcacttaatgtcctctccctctgaaaccaccacctcttcctcctctgaagcccccacctccacctcctcttccacctctaaaaccaccgcctctgccaccacctctgccacctcctcctcttcctcctcctcggcctcccctgccaccacctcttggaggtcctttctcacctggaggtcgaggtaaaaacctctgcagtggcagcagcttatatgggtctatataaaacttctgtagttttttaaaggatgaagccttcatgttttctgacaacttaactgaaaaataaaaatctctgagttgtccaaatatttcatccacttttccaatttgttctttgttttctaagtaaacaggagcattgaaataaggcaccttattttcatctgtggtacatttacaaactatgtcatcttcacagggatgcaggaactctcctaataagactacacgttctggaggtccttggtcttggcctttgttaaagcctccgcggccaccccctcgtccaaatcctcccctgccgccgcctctgaaattgccgccgcctccaccgccgcctccacctcggaagtggttgctgctgccgcctcggttgaagccgccacctccaccacctcgattaaagcctccacgacctccgcctcgaaaagacattctttctcctcccggcgccacgtgcccctctggcc

SEQ ID NO: 341274 - DNA, 1000 bp, Homo Sapiens
tttttttttttttttttttttttttttttttttttttttttttttttttttttttttttttgggcccttccccttgagatttaaacttcagcattagcaacaactgagaacaacccatacattttccccaccggacccctgtgctggtcaaacacgtaacaacacaaccaggacagggcgcctgcaccaccattcgggcacagagtcagctcaacaacagcgtgggactactcatctgatgactttactcagcagtgcttggggctgtcgggttaaaagtcttgacacgtctggggtcccaaccaaaacacaaaacgaaaaattctttttttggaaaaacgctttcagacagagcattattccctggaacaagccttggtcattcgtgtgttttaaaaataaaaagcgcagcgagaacagaggtaggacttaatgttgccatccgagagttttctgcgaggccaagaatgagctagaacgtgtgccgcggtgaggctgccaccaccaggactcttctgcaggatgcgaagggaacagtctggatgtgtgcgcctatgtgtgcacgttcttcctaaaacatggttcttcttgaagacacggtgggagcggagttttgtgtctcctggccggcggctcctggttctcccaggccacacgactgacagctccccttcttgtgctgcatgttggttagtttcttctcctcctctctatggcaagagtaggggaaaagttaggatgacttcactcgtttaagggaaatcaagatgtaaggggtcgatccaaatccacagtgaaagtgagggagggatcatatgaaaatatccgcccagcctgacgcagcaaaaggcgggtcagcttttgctcatccacgaagggctctttaagttttctggggcgggtttccctgatggtttggaggttgcagctgggtccctcggggttccctggggctcatgcaagaaggaagattcactcaaagtggtgtcctgggagtcag

SEQ ID NO: 341275 - DNA, 1000 bp, Homo Sapiens
tttttttttttttttattgcaaaaaaaaaacaaaacccatttattgctatttggcccctgcgttcgtgcctccatttgccagaaaatgagccaccggcgacaccaggagaggcaggagacccccagcccttgcacaaaacccactcccttggatgctgtcctcagcgagggtggctgggggccaaccagggggcccacccgcagagtggcagaggaggcaggttgaccctgcggacgttgagctctgtggcgaaggtcctggccttctggtagaagaagagcgacttctcacggtccaggaggaagttgtggtagatggtggccagccgcgtgtagatcttcagctgtgccttcttgttgcccaggtccacggcggccgccagcgccagctggtagtacccggctgcatcaaacgggtccttcaggtcgtagaagatgatgtcaccgagcaccaggtacaccttcacgtagtagagggtctcctcgtcaaactccagcggcgagttgcagagcgacagggccttgaggtagaagtgctctgccagctcgccatggcccagtcggtgttgcagggcggccagccggtggtaggccacgcgctcgttcagccggtcccccagggtgatgctgagtgctagggccatgtgggcaaactccaagccctcctggggctcctccagcgtggccagcagtgccaccagcttgttgcacagccgcagctccgccttgcggttgcccgtagtcactgccaggggcagggcccggtcccggtagaaggacacagctttctcccgctcccaggccccgtcgaagaagatgtctccagccgcctcaaacagctccagccccaggttggggtcgcctgtgtacagggccacgttctgtgccacctggatgtagaggtccaccagctcgctctgccgcaagatgtaatagatcttccctgcttgcagccaggcatgcgcctccttctctttcttctggaggtcaatgaaaatcc

SEQ ID NO: 341276 - DNA, 1000 bp, Homo Sapiens
ttttttttttttttttagttctacccatgtttattgctaccagctggtctccctccaccctctcatatttacacccaaccccttccccaaagctagcttttaccaaagttcctggtaggaggtcaagaagtgtgtccacttagccggcagtcctagatgtagtggacgctgtttgtccccaggccagttgggcaccaggaagggctactctggggattcagggcatagacttcgtactggggtcaagggaggcccccactcacagatactctcctttccttctggggctcaatgtacaccaaaaccttcagaaagcaaagttggagtggtggacccccaatgtcaagtttagtgctctctttgcttgtgaggacccacacaagtggccaactctggactcagatccacagctggcttccgagaggcaattctgtccttggaagccaggtttgaccatctgtaatcagccttgtgagaagtctcgtttgagggggccagggatggaacgggagggcgcatatcgtatgaggtatgggcattgtgttaagctgggggaagttgcagcttgtcctgaattacatggagaggaataaagtgggtgagtaggaggagccatttcatctgaaagcctgaggcccctctggtcccctcgataaaccccactggtgtcccaggccacaggtaacaggagaatagacatttaatgtcacagaatgtcagagcaggcaaggccttcagtgatcaccctttctaaccccaacccgtcctaagcctagaaagaggaagccacttggttcaagtctcataagatttagtggccaaacctctaagaaagctagggagaaggaaagtgggaatggtacctgtggatttcttcaggccttatttaggggaactggatttacccatggtcagtttgggttcttttaaatggccagcttccctagggtttttagactgacctgaaacattgacttggcccccttttcaggagcagtgc

SEQ ID NO: 341277 - DNA, 1000 bp, Homo Sapiens; identical to SEQ ID NO: 159836

SEQ ID NO: 341278 - DNA, 1000 bp, Homo Sapiens
tttttttttttttttgatatttcaaaaattattttcacacatgattatcatacagtattacaatgtattatgtgcaaaattccatttaaaaaatcatttacaaaagtacaacacagtatgtgctgagggttctagttcaacaaaagccaaggctaaaaaaggtacaaggtacaaagccaaccaaatgagatgactatgcatctttacacagtacaataacatgtttttgtaactacctgtgttacgtggatacaagaccctcatagtttgtgcacctgcaaactggttttatttaacataagtttaatttcactgcaggttctgataatgtagattgatttttttgtgcattttcaaattcttctccattatatagcatcttatttaactcaacaaaagccacattatacattacttggtttctggtcccaataatttgatgctgttaagttttaatttgtatggaaaagggagaaaagtgttcttcttgatttttattttcctcaaggggctttcaaaattgtttctacaagcaaatcacacatggaatagattttgccaaacctcactgcatatttacagtattttaagcataggtggttccttctatctctttttctacatcttttgaagagcctgaaccagcagactgcactcctcagtcctttgttagagttcatatttctctctctacctctctctacattcatttctctccttattctcagcatcatttgtttaaaaaacaaaacagcaaaacaccactaaacgtgaacaagagaacagtacatccgatttccaaaggcattctgtggccagtgtcaggaatacgttgctttaagaaatccagcagtctctccccacaaagttgccaaaacatccagttacagaagagagactttaaaaatgcaatactctcaaatccagcaagagatttatttttgaatattaaatgttaaaatcacatgcataattatagaatattttaaagttacaaaaa

SEQ ID NO: 341279 - DNA, 1000 bp, Homo Sapiens
ttttttttttttttttttttttttttttttttttttggaataaaatcctttgttgggtaactttcctcagccataaaaggcaagagggggccaggcactggcatttctgcagagctgtcacaggtcctctgtggttttaagagaaggggaaaaacagttacttttaccccgacagcacctgaagcatgagagtctaaaaccctccacctttgcaacttacatatgccctttcattttttaactccaagaaggccacataaagatttacagggggctcttcagtttcttttgggaagttactgatgttagtctattctctaacttcttggtctagttaccagcaaggtagaaaaaggcagcccagcccctgttaaaacacagcaacaactttatctgaaccaggatggaaatctctccctttttttgtcaacagagttggctatataatatatatatatatatttatatataattttttttcttaatggagatttgatcccagcctggagtgacttcggttgggaattaaagagttttggcttctgggagtaattttgttttcccaattctcagtccaaatgcttacacactggaaaattccaaattaaaagccacagaaaaggaaaggggtttagaacacattatctctttgctcgtacaaagtacaaggcgtttgtttttggatagtacttcacattctgtttcttgtccatgagtcctccaaatatgatgagttcacccctgccttgtaccacggtatgcaggctggtttcaggaggtccaaccacagaactgctattaaatactttccatttgacccgccccttctccttggtgtctttaatgtccagcacgtacatctgcatgggcttgcagttcatactctggtataggggtttgccaacatttagggactgtggagggtggtggcccaggcggcgagcaatgggaggtaaggaatgtccatctccttgggcaggccctgggcgagggatgggca

SEQ ID NO: 341280 - DNA, 939 bp, Homo Sapiens
tgactaatgggattgtttctatatttggaggccttcttgcagacatgtgatttgagtttattgcagagaatggtaataggaaatgggattgtacaaagaaaagagatggagagaaaactggatgagggtttcgcactgggtgtcccacccacaggcctcagcagccctgccacggatctgcccgattctttcgcatcaagaagttgatcttgcgagccatttccatgttgtagatccgccggcacctttcatagctttccctctgtcgccggcggcatggcttctcataataccgccgatgcttaatgtcctcaatgagcccatccatagtgaggattctgtttagggtcctgtatgcgctttccacgttcccttcctgtaccatcacagtcctggcgatgaacttcagatgttttgccatgaccttggatttaaaccttcactctgtagagcctaaaggatgatggagaaagggcgaggaaagcagaaagagaaacgcaacataatacaaactacaccgcgcggcttatttaggatttggaaattcaacatgctcagggacgcgcgagatggagcacatggaagtcatcctagaaagtagacgtgaatcgttgtctcttattctcactgccagtccaaatcctcgcatagagaagaaaagagatggcagcagggcgttaccacaaagacgcgtcgccgggcatgagaaggacacgagcgacaaggatgcgccacagggtcccaaccaccacacatagttccaaaaggggttgagttgggagttggggaaggactctttgttggtctttggaaaagggggcgaaagcccgcaaacctgccctctcgccaagccagccttcctttccccaaaccctgcacaactcctcacctcgcgcgctcagtacctagcccaccggaagggttctcactaccggaagc

SEQ ID NO: 341281 - DNA, 1000 bp, Homo Sapiens
tttttttttttttttttttttttttttttttttttttttttttgctgttgccaactgtttattcagggccctgaacgggtggtgcgtggacatgcaacacactcgggcccacagcagcgtgaccggccgctcccaagccccgggcgcacaaccacagccaggagcagcccctgccaccactgggccaccgtccagggccccacaggaccagccgaaggtgccccgggccgaggccagctgggtcaggtgtacccctagcctggggttgagtgaggagcggcacccccagtatcctgtgtaccccaagttgcccaggaggccgagggggccttgggctccatctgcactggccaccccgtgccaagcatcacagctgcgtgagcaggtttgtgtgtgagcgtgtggcggggcctggttgtccccttcctaaggcgtaactgctataagcatctccacctctcccgctcgggaaaaagccacagagcctggcgatgtcctcaaggggtcccggtggctccagtgcacccagcacacctcagcgcctctggctggcaagccaggagaagaaggtgcgaggccgtgggcgaggtgcctggaggacgcgcatggtgcgtggggagcgccaggctttgatggtggcgtcgtcgctggccgtgagcagcagctcctgctcctggggactgaagaccactgagttgaccacatcctcgtgccgcagcctggccagacagatgttgtagtggcggtcccagatgtagccgtgccggtcctccgccccgctggccacgaagtccctgctgacgtccaggaagatgaagaagcactcgtcgttgggcgtgtaggcgcggtgcgcacgcagagcccgcctcacctcccgcatggtcttgaggtcgaacaccagcaggtcaatctcctccgcgattggtggcggctgcatggggtcggccaccaccgcaccgttgggccaggcgcggctgttcacgtacaggtacctgttgtc

SEQ ID NO: 341282 - DNA, 1000 bp, Homo Sapiens; identical to SEQ ID NO: 159837

SEQ ID NO: 341283 - DNA, 1000 bp, Homo Sapiens
tttttttttttttttttataaatatgtaactgtatttttcttcctgtccagaaactgttattgaataaaattcaggtatattcctccaaaacccacacagttcagagattttcaaacaccaggtttccatttgtattaaaatgggcaagataatgaaggcacaggctcactttgtatcaataaaggacatcaaacacagtcatgaggcactaatgacataagcaatcacaaaaagcaagtgttcaaagtcttcagtaactcttctccctttaacatttggcaaaactcagtccagatattttaatacctcagaaagaaaaaataaataagagtagctacattaaaatgtcagattacttataattagtctttagaaatataagggataaaatgaaaggaagagaacacagatttcctatattcttggattatccttcctttctgagggtctcagatgtctctatgcatctgccaaaatgccagctgtacctgaagatttaagagatttttggtagttgctggcatggtccctcgacacttaaagtttatatcacaaaaacaaaactaggttggtttcagctctttagtcctttgttaaaaaccataaatcaaatttggttatttaaaagtgaccttaaaaagtttaaaggaaaatatatatattctatcttcccaataagaaacagattccatatttatacttaaatggcaaataaatatattttaaagccaagcaagttcctctcctctatacaggctaagaaaacagagttattatatctttattgctgatgatcacatcactcatcaagaactagtttcacaattttaggagacttttttcatgacataatataaaagataagggtctaacttaagtctgagcaggcagaatagagctgtgctcccaacatccctatcacaaacatatgacgaatgaacaacaaaacaactgaatctgtttacatcataaccattgtctatgtgatacacaactgct

SEQ ID NO: 341284 - DNA, 1000 bp, Homo Sapiens; identical to SEQ ID NO: 159838

SEQ ID NO: 341285 - DNA, 1000 bp, Homo Sapiens
ctcgagtttttttttttttttttttccttacaaataaaaagtcctttatttcatatcaaccatgttcctagaaatatgaaagtattaattaaaatctggaagtgtataaaaaccttaagcaacagttaatgaaagtaaaactacaaaaacagtctctactaacttagaaagttgaagttttttattaggaaaagacattagaataggaaataacgtagattacctcttttttgatgatcctctgcaataatagcatttaaaaatataactactttcctctgtataatatccgtacataattgctaactttcctgaatttccaaaacttttgtatttaatgactttcaaatacatgtccaaggaaatgtttcatttaccattgcaaacattgatttattaaataaagtagaagtccaggctttataaaagtcagcattacatttctcacagagaaatcaagaaaaaaaatttcctatcaatcacagatagttatcagcagtcttcgtgaagtcttccaactaatatttcattaaagaaatgaagtgggagctgcatttacagatgaggctcgtgctttagccattctccgaaccagtgcttcttgtctttttctctgaatttcttcaggagaacactttctatttttctcttcttcctcttttgaagattgtttcaaagattcagaaagtttcaccaaagattgctgtccaacagcttcctccagtaatgggttgacacctttctttttctccacaccctgtgtaattttggtatcagacatacttccagttatacaattttgattaaactgagaaagaatctgagaatttttcatccttgtaaatgtaaactttgaaaatccaactgttgtgttaaggttgctctgagcttcatctgttacagtcttatggcatggctgattagtactcaatttcttcttataagtagtaatttctgtattcatatgatctgaagttacattcaaacttgaacttcctgg

SEQ ID NO: 341286 - DNA, 1000 bp, Homo Sapiens
ttttttttttttttttgatagaatgatttattttcccattacaggtaagtcatgaatggcttgttctgaggtatgtttctgagctatgaaggacacctactagaaagctccacacttgaagggttctcttaaggtggtaacattttatggctggacagtctctgcaggtaccagattccccgttgtatccaactgcatacatttacacgtgcatgcagacacagggcactctgcatggtccctgaaccaactaagcatatgtccagcatgtccaccgtgcctgcaattatgacaccatgtaaaccagttgttaaattgggctaatttttttgtccttgctcaagtccactttttcatctgatttggttcctccaggacagctagaaactggtgttcccatattaatgagataaagcgcacatcgaggaagtggttttcgacagccaggacaacttgtgactttagatttcgttggtgagccactcacaccatactgactaaaacctctgccctgatgaggcacagctgaacagctgtaggagattgacttgccacagaaattgcaactcacaaaaacttgtgctaaaggcttggaactgggatccaacttactcctgtgaatatcaaattcagctcgtttatgccaaaacctccaggcatctaataaatttctataattctcaatccagtactgaaccctttcatctttaagaacatctaaaggtgaaccctgtaacatacagtaacttgctgtttgaacatctccagttctatcaacataactctccattaagtccactccatctttagtaaggcctgtaagcaaaattccttccaaatttccagcctctttcatttcattggtcaacttttcgatgtatctatttaactgagtatcactaaggaatttacaagcaaatgccactctgtcacgtactgcaactttgttttcatacaaaactccatcgtaagatcctgtttcacttgtcagaaatgcaaa

SEQ ID NO: 341287 - DNA, 1000 bp, Homo Sapiens; identical to SEQ ID NO: 159841

SEQ ID NO: 341288 - DNA, 1000 bp, Homo Sapiens; identical to SEQ ID NO: 159842

SEQ ID NO: 341289 - DNA, 1000 bp, Homo Sapiens
tttttttttttttttttttaagaacatcaacatttatttaacatgataaaaaaagaaatgagatatgaacatttgcatttaaacaatagtaagtagcctttaatacattacatgtgctcattgtataatatatacacaatgaacataattacatttgtacacaaactaagtaccggatttggaaacctgcttattgctgtacacatgtattccaatgaaatataagcccagtacttcaaaatacctacactttgttttttttttttttaagaaaagataagcagtaacatttgtgtttaagctgacaggagtgtggcagtaactgctgacattgcaatctgaccgagaaagaattatagcagaaaacaggacatacttcacttagcaataaaatggcacattttaaatacatatatataaaatttttacaaatcaagtgtgaaacaaaagcactgcagtagctaaaatgggaagaaaaaaagaaaacaagcttcaatggaaataataactaactttagaaaatgaaaagcaaaaaaatatatatataaattcacctagacttaagaaacatcgaaatctggaaatcagcaactaagtaagctctggaaatagactgcacattaaaaagcacctttacttatgtgctctgaaatcatagcagcaagctggtgtcagaataataaccttgagattacgaagtgtacatatgggccattaaagctgttttggaataaacattttccagaagtgataaaatgatgctctgtgaccaaaagcatcagaactatgaatttcatagatttaaaatatactgtacaatatcttcttacactgctgaaggtccatgtctttagctttgaatggtttcaacagaagtcagtatagttcttctaagactacacacacatgaaatgtgatccttctgtgagctgcggctgagtggatggaactggcgatgccgaggactcaggagatggggacagacttttcactgccattg

SEQ ID NO: 341290 - DNA, 1000 bp, Homo Sapiens
caaatgcaaatagtctttattatgagaaagcagtgttatctaggaaagtcacatgctggtttctttctaataaaatgacaaagcaggtttcttaaataatttacaaagggcagaaattgctcttgaacagggctacccctcctggcacatccacagtgctctgcactgagcatataaataggtacccgtgagcccagggtcgtaagcctggaaatatctcctatgccttcctccgagtccctggtagggaaaggagggatgagagtggggccctcaagagccttggcaccagaaacacagtgggtgagtgactctgcggatgactccccaaaaaccaggcacccgggtacagagctaagagctctcaaatatctgatgctagcacttcatgttatagatgaggcaaatagaaggctcaaggtcaagtgtacgatgagtttctaagctcaagagtcccctaggaaagcagaaggaacaattctccccctctgcaaggtctccccaagacactctcaggctatggcaggcagtcactgatgggtccagatgtggctggagcagggggctctgggccccttgttaggtgcttgttagcagtggcccaggggtactgacgactcccgggggttttttccaggaagcacacggggaagcatagacatccttgagtatgaagccttggcggtcagacagggcttgtttcctgcaggcacttcctcagtcatgaatgagagagacgatgtcaccactctcttccgccataatggcttcatctagctcttgggacagcttctggagatgctgaattcccgcccccacaggctctaggtcactgtcagactcgctgggagagcagaggggctctgttgaggagtaggggctccggaaggcagcctcccgccttgatcgccgtaatgggtgggcatgtgagcccatccggacagagaggcggtgatgctccttctcccaggggtctgcggctgagtgggcaggggcggct

SEQ ID NO: 341291 - DNA, 1000 bp, Homo Sapiens; identical to SEQ ID NO: 159843

SEQ ID NO: 341292 - DNA, 1000 bp, Homo Sapiens
ggcagaagacatgtttaataacattttcatatttaaaaaatacagcaacaattctctatctgtccaccatcttgccttgcccttcctggggctgaggcagacaaaggaaaggtaatgaggttagggcccccaggcgggctaagtgctattggcctgctcctgctcaaagagagccatagccagctgggcacggccccctagcccctccaggttgctgaggcggcagcggtggtagagttcttcactgagccgtgggctgcagtctcgcagggagaacttctgcaccagccctggctctacggcccgaaagaggtggagccctgagaaccggaggaaaacatccatcacctccagcccctccagggcttcctcctcttcctggcctgccagttcacctgccagccgggctcgggccgccaggtagtcagcgttgtagaagcagccctccgcagaagcctgccggtcaaatctcccccctataggagccccccgggaggggtcagcaccaggaggggagggggggtcagggccagcccccgggggccctgggggtgatctctgtggtgacagggcaggattgaactcctggaaatggactggaaagaaggcctgccagccagagatggcattcatgcgacagcggttgaggacttcgggcccaggccttgtccacacggtggtaaggaagaagagagtgtccacagggtgcttcttcgagaccacgtccatgagtcgcacctgggaaggggcctctgctcgcacagcgagccaggccagcctcgtcccagggtaccgtcgctctaactccgctgctgcagccttcaccccaagaaatgggtctggagctccacggccaccttctcgtggcccgtagaccagcaacagggtgagcaatgcatgttctcgtggctccaggacattggctgcaaaggcctcgaggaaagccggggctgcagcagcttcagccaccaggagtggcagcaccagctgcactcgggtg

SEQ ID NO: 341293 - DNA, 1000 bp, Homo Sapiens
acacattaaatgtaccacagtttaatagttttgtgatagttcaataactgtcatttgctttaatctacagaattttaaaaaatctaaataaaactattacgctggccagataaaatagtaacaaaaaaagtaaagagatataaaacaaactgtacactattacaaagtagtggttctctgtatgtctatgtgtatatatgtatatataaaactatacagatacatgtgtgtatataaacatacatatgtatatatacacacatatacttaattttaaagttaatcaaatggttatcaaaaattaatatacaacaaagattcctgggaaggtaatgcttatataaaataaggccatgtttctaaaaatccctcaaatcagtccaagataagatttttaatgaagaacataaaggttaaagaaattctttctctccaggttagctgtttttccctacttgttttcttcttgctttttcctgttgttgtccatattaaacttctttgtgctcttaaaggcccgccatcatgtgaagtggccacgccccttatggacaaagtcaagccaccaactcccaaatgtatcagtgcagctgcttcagaggaaatcactgaaaaataaagaaaaaccatccatgcatggctgcatccagtgtacctgtaatcctgaagaaaaggtcctaattccttccatgctgaaatgctagctttggtttcagagagagactttattgcaactgtgaccaccgtcactggtgagcactgctgttcggcccccagcggacttaaaagactggaatgtggtagtggcggtcgttctcggtcagcagggagatctccggccagtccctgagaggctcctctgggtagcagacttcaaagtctctggagttaaacttgaacagtctgaacacttttatctttacttcaagggagtatccaagtataaacatatcaatctgctctagtccacatgtgtcgcctacagaattcaggtgattca

SEQ ID NO: 341294 - DNA, 1000 bp, Homo Sapiens
ttttttttttttttttttttttttttttttttttttttttttttttcaagccccagctggttgctgtatttggtggagttgaccttaaacaacgccaaggaacctcacgtagaagacccccagcaaagaaaaaggcatcagatgcttctccaacagcctgaggctcaggctcctgggcagacagttcccttcgtgtaccaggaggacgaaatgtttaaacggataaacattacaagcgccagctcctcaagcctgactgctcttccgcctctctatccccacatcggttgggctttttatcttttgcttttcttttatggcagatgcctttccatcggcatcccagctgtggctggggacgttttgggaagtgtgtttggctcactccgagagaacgaggtctcaagaggaagtgtgtctggcttgcaaagatgtccctgggcctggacaggaccccgctgtgttctgcagccctcgacgcagtgggtgagtgaggccttcctctcctgtctctgctttcctcattgcctggcgacgctgtctggctgccctcgagggtggagcaaatcctgggacatgttgaaatcctccagggcagccagcaggagagcccagccagcctgcgtctcaggtgcggtggctgcgcgttccactgcagcgtttcaggagctgactttcctctgggtggctgtagatctgacttctgtcacttccagactctaattttgtcattaatatgaaaaggttcctctcatgttgcccaaaagcattttccttaggtttctatcgtcccctgtccccttcacgcccagccccaccccctcccgtgcccagggcctctgaggaggtcccctcaacccctgtccggtgtcgggggcccgacctatctgcggaagccgaagccgtcctgcggcgtctttgggcccttcttgccttccctcagggacttgggggaaggcatctccaccgtgcccccgtagggacagctctccgagccggg

SEQ ID NO: 341295 - DNA, 1000 bp, Homo Sapiens
ttttttttttttttttttttttttttcactgcaaccagtacttatgtttattactgtacctaataaacagcccagcgtggtgattcctattcacttagtagcctccccatctagaatatactccgtgatctttcttgatggccagactgtgtaaaattcatacagtgtttactacagggatccccaaatattgttagttgaatgaacaaacacacatttcaaggagggcactacagtgagtagatgaacagttttctgataggagattgtacaagtaatgttttcaccagtgtattttaggacagcagattcagattaatgcgctgggactgaatgcaaatagtaaaattacaaatataaagtaaaaatttggaacctttgccaaagaaaggaataataaattgatttaataatttgaaagaactgtaaggtttaggttttgttcttatttttagtgcgactgagattggagtctgtttgtagacatatctgaaaaaagtgaagggggagatggaagatggtaaatgccaaggaaaagatggaaggataaatcagtgtaataaaaaggagcacttctttttcgccaacagaagtaaaggtaaaggttaagtgtctgagttaacgaatggattgttgacctctggggagggtgctcccatcagctcagctttgtgacgacctaagaatatcccttccacacctttcctgttccaatcgttctggctgcataaaaccacctaaatcaatcaactgttacacttcccttagtgctaggacatattcatataactcccacgtattaaatgaaaatacatccatctaaaaataaaacaacacgattgctgctacaccaagaaaggattttaaaaaggcctgttcacaagctaagtgagggccagaggaaaggtgttcgtttaaactgaaattcgagctgcgataacacctcctaatgcaatcaaacgctgttgcagcacacttcttaggagatcgggttcaacgg

SEQ ID NO: 341296 - DNA, 1000 bp, Homo Sapiens; identical to SEQ ID NO: 159844

SEQ ID NO: 341297 - DNA, 1000 bp, Homo Sapiens
cccagccctcaggccactttattgctcaagagtggtcagtctggggtatctgcatgcctgaactccatgatgatgtcgcctgtgtcggggtgaaactccactgcatagctgacagtccgtgggccacccagcagtgctctgggatctggggcagggctgaagaagtagacggcctgcttgcagtgggggttccagcagcagcccccctcggggtctgcaggctccaggaggccagtgctgagcgtgcactccggggtcaggtggtactccatccatagcaccgctgcgtggctctgcccgggccttctgagctccacggtgccctcggcacacaggggctgcaggggcaccggctgctggaagtcaaaggtcaggatctgccagggctcggagaggctgcggcatgggtactcccacagcgggtggggctcagcttccctgctctccctgaagtccagggcacgcttaatcatgtcgtccatgatgtgcacgtcgaagccttcgcagtcaccacaggggctccggatccgccacaggtccctgaactccacaaccacagcgtgcagcgaggctgcctggggcatcaccatggcacctggccccaggtgctggtccacagcggtccgcacgtaccagaagtagaggttgtgccacggcagcaggctggtagtgaagaacggctcgcccaggaggagagagacctttctgccctgtaggtcctcatttgttaataattccggccgtttctctatgatgttaattttatcttccaagtggttagccttgaagatttttctcaacagtttgtgagaagctgctgaactctcgactgtaaacacctgctccacccccaggtgatgggccagcacggagagcaggctgccatcgctgacacacaggcacacgctgtctggcttcagcacggtcctcagagcctggacgtaccgatcagttctgtcctggtcattgatctctccaaaccgaggccggttccagagca

SEQ ID NO: 341298 - DNA, 1000 bp, Homo Sapiens; identical to SEQ ID NO: 159845

SEQ ID NO: 341299 - DNA, 1000 bp, Homo Sapiens; identical to SEQ ID NO: 159846

SEQ ID NO: 341300 - DNA, 1000 bp, Homo Sapiens
tttttttttttttttttttgcataataccaaagaatttattgtaaatgtagtggcaaatacattcagaataatcatcattaaaaaggaactagaaaattatacatgtttaaagtatgtgcttttttcccaccacctttaagttaatggctagtaccaacattttaagtaatgaaatacttaatgtgatgacccattttcagataatttcatgactgtatcttcatcttaatttttaaagcagttgaccatgaatttcagtttcagttattctctgtttttatcaattccgtaatgatctgcagaatcttgtcattttcaagggacatctttggattttcaagcttttttcttaaaactgaatcaatgagaactctcagctgcttgaaaatgacagctatctttacaggggcctgaaaatagatccagccatcaatagaaagaagacgttctcggtgctgaacttctatatcaccaccaaaaagtaaaactggaaaaggggttattagggtagtttctctcaaatacactctggcataccttatcttctcctggtataagagccatccatgagtttgcaaatctcgatttactgaggatgggtgtacttgtgctttgccttgggccgtctccacaatgcaagccaatttttctgtaacatccactgactttgtatagattatcttccccacattgtcatacagtccagccaccagtacagctttaagaagggcaatttcttggaatgagagggtctgtgaggctctgtttccttcccagctggtagaagttgtggaagatgaaaatcctgctgccttaaccaactttattaactcctgctttacatcctctagggttaacagtgatgttctattaagaaagttcctccggcagtatgtgatttcagaacgataacctccttcttgtcgtgctttcttccatcctagatatgcattgtagatcgtcaggtggtctgaatccgccatggccaaagctgatttt

SEQ ID NO: 341301 - DNA, 1000 bp, Homo Sapiens
ttttttttttttttttttgctgtgttccaataaaactttatttacaaatcaggctgtggccagatgtggcccacaggctgtagttgttggacctctaccgtagaccatcatgaggcctggggttcttcgagaacaagaactccttggttgattccccagggtacggcagggccttgggaacctgggtgggttggggagggtctcagaaggctccttcctttggcaacctgacttcttggaagctcaggtttagctgacgccccagcactgggccaggggggctgaggcaggagatatggggaaggctaggagttgcctgaagccattatcccatcttaggcgacaccgactcctaggcgccctccagagccaagcagcttgcgacttctggtaggcaccggaatcccctgggatgcttgttttaaaagtcctgggccgggcacggtggctcacgcctgtaatcccagcactttgggaggctaaggcgggtggatcacgaggtcaggagttcaagaccagcctggccaacatggtgaaaccctgtctctactaaaaatacaaaaattagccggacgtggtggtgtgcgcatgtagtcccagctactcaggaggctgaggcaagagaatcgcttgaacccaggaggtggagcttgcagtgagccaagatcatgccactgcactctagcctgagtgacagaatgagactctgtcccaaaaaaaaaaaaaaaaaaaaattcccagaccctcggccccagaccttcccaaaggaggctcagggattaggtatctggctgttggtgacacaggtggtctatgaaccagttctgagaaactgtcccgcgtggacagggggtagatcccatcagttctcaaaggaggccaggatgtctcgcctcctgaactccacaggctggtagaagcggggcttgagggacagcaggttgggagcttgaggactaagtgggccagtcctgtcctaccacagtggggggaacagtcc

SEQ ID NO: 341302 - DNA, 1000 bp, Homo Sapiens
ttttttttttttggacttatagacagttccttagctttactttaatttttcttttattttcactgacagaaaaattttctggagagtacaatcaagatagtgtattattagaaataacattaatagaagcttggtcagaaatgataatagtcataataagcatctctctcaccaaggcattccacacagagagatcacagcacaataaataaaggatttctcatttgccacacaacaaataaaacaattgcagtaacaaaaatatgattttataaatgttcttatactaaaaataaaagcaaaaatatgagatcatgcactggagacaaaagctaaaaatgaatagttataacaaagaaagacaatattccaaaagattaaaatgttcaagtattgtgagaggaaaggggagattcaaaatagaatgggttcagaataagtcaattatatttactaccttaggagagacactgacacaactgtttttatccagtaatattttatgccattagaacacatactgttatccatttaaaggacagattccatttccttggagcatgtttcatactacaaggatggaataaaatttattgtttaccataattataagtagataataatattgtgagagaaatattctccggaacaggccagtgtgatggcctggaatagtaggggcctgggagtcaggaaacattgactttaattctgttttcatcattgtctataaaaagttcatttgagatagtcatctaataaataaccttcaagatatttctcagtcctgaaataaactttcactttatctttcgattttcctataagagttcaactattggggctagtagaaagtagagaaaataacaataaaatagcttaacaattttaatgattcttaatttctaaaaagttattgaaaaaaagtgggatcacttaatggaattaagaattgtataatgcttcagtggggttgttcatacaacataataattcttcc

SEQ ID NO: 341303 - DNA, 1000 bp, Homo Sapiens
ttttttttttttttttttttttttttttttttttttggaagcgaacatttatttactttttttccccacacaattcctaacagttcaattaaaaatgagaggtaaagcactagtgctgaacaagttaggaaaattaagcctgaaatagtctaaagataagacatagtctaaacataacagaattcttctaggcttctatagatgctctcactgtatacacttaggcacttattcatctttatctgcaagccccatttctaccaacggcatatgaactggatgctgttcatcgtcatataatgtcactatctgttctggtgctggagccatggacacagcatagagttgttttccttgaagacagtctatcatagcccacagtgcctccatgctccatttgggacaatatggtattcttgtctcccctagatcccttaagggaggtttaaaccctgccaagagaacctttatggctcgagctggataccgcataagatgagaaggaatttggcacagtctgtttaatgtcagctttgcagttgatccataatcaacaaattgtactaagatagataaaggattaaattctttaatggcaacaatcttcgctctataccataagccatcatcatattctgcaaggcaaggcatttctgttctaaaatccgtcagaggaggaagcgcctctaccttcttattaaccctctgcagtgcttcatcaaggctctcggattctgattccccgctgactccactatcatctgtgtcactatgctggttagactggttagaagtttctatagaatcaaggcaaatatacacttcattaggtgagacaacgtgcttaacttgaacagcatagagttctcctggggaaggcagagatgaagacaaatatggtggtaaaagaggagtgtctgtttcagccgaaagcaattcctcaaaccttatttcccattgtttctcttcatactttttatcatgatctgatcttggtttt

SEQ ID NO: 341304 - DNA, 1000 bp, Homo Sapiens
tttttttttttttttttttttttttttgacattttttggcgtttatttaaaaataaaattattttctctagagcatgaaggaaaaatttaaaagtatttctgctgtgctagttctgtaaaaagttaaaaaatgagaaatggcggcaccattttataatcctgtgtttttcaaggagtggagggtcaaattgttaagaaaaatatttacataagctattagcaatcataattagagtgtcatagaattctgcatgcagcgactaaggaggaatccctagaagtccaggtgcttcttgcctccggccatcatgccacagcctgggcccagccgcttggcggattctgccagatccattttgcttgagcggctcactgtgtctgacaagtctggaggcaaatgcagtcgcctttgcaaggaagctcattaaaaatgtggaatgctgtaaagaaccttctccccatgcagagtctttctgcttgagtaagtatgagaagcctggaggataaatgttcctctcttgtctcaagtagttgtcttgcacccactttagacttgttctctttgaaatacaaagccctaggccgggcgcggtagctcatgcctgcaattccagcactttgggaggctgaggcggatgaatcacctgaggtcaggagttcgagaccagcctggccaacatggtggaaccccatctctactaaaaatacaaaaattagctgggcgtggtggtgggcgcctgtaatcccagctaccagggaggccgaggcgggagaaccgcctgaacccaggaggcgaggccgccgtgagccgagatcgtgccactgcactccagcctcaatggtgaatagcttcctttttaatttaaaagctaagtctttgacatctgattcatcacagatcaagttattaagccgaggaatctgccgtatatgaatcaatccatgataatccttatacaatgggttagtttctctctcagaaccaataaatgattccaga

SEQ ID NO: 341305 - DNA, 1000 bp, Homo Sapiens; identical to SEQ ID NO: 159848

SEQ ID NO: 341306 - DNA, 1000 bp, Homo Sapiens
ttttttttttttttttaaacaagtgttggagaccaacttttaataatacatatttaattttcagaaacatatgctaaccatcaacaacatgatcagggtttcattgccccagatgttatttcattggtacattatattgatatttacaaaggctttcaaattcaacaacacaaaacaaaacagcttaatttttaaaaactacaatgctttaaaaaaatgtaaacagtttaatttttacattattgtaaaaaagaagactcactccttaatgtggcttaatttttttttaagtgagcaaagcctggtgctcatggataaagaatgaaaataattctttacatagaaacattgtgctccagtgtggcaaagaaaaaaaaattatatgtacacatataaagaaaagaatcttaagcccacaatttagaccacaaaaaaatcttgtccccaaattgagaaatttataaaaaccatttacatatggttgttgacctactggaaacctatataccattttcaaaacaataactcagtcaaaagataccacttttattaaaaatgaaattttgtgcaaaaaaaaaattgtttaagctagaaacaagactatcccccctagtaagaggccaaaagagccactgaaataatttaactctgttagatttaatgcatgtaaccaaaaggcacatacatgtgattaatatattaatatcttttcatgcagaaacttgtgcatgttcataattatacaacgaaaacacaaacataacaaaacataaagcctaatgtttggcaatgttattctagccatattcctttctactctatcagcccagggtttcctagatcattaacactgcctctcaaaaaatatattatatttgaacaactttcaataaaaattaaaaaagtatgttagcctggaacactattttttcagttttgatacatatagaaacttactgatatgtttattttaaatgccatttcaaattaagatacattt

SEQ ID NO: 341307 - DNA, 1000 bp, Homo Sapiens
ttttttttttttttttttttaagtggcttagatgaaatgtctttttattttttggttatcagataaccctttgtgaaaatattttcctttgcattctttaactagctgggcattccacagcttcactgttggtatcatctgtgatactatcaacatggcagctcacagactgggcaggccccaggaattcttttttttttggagacggagtcttgctctgttgcccaggctggagtgcagtggcgcatattcggctcactgcaagctctgcctccagggttcacagcattctcctgcctcagcctcctgagtagctgggactacaggcgcccaccaccatgcctggctaatttttttgtatttttagtaagagacggggtttcaccacgttagccaggatggtctcgatctcctgacctcatgatcctcccgcctcggcctcccaaagtgctgggattacaggcatgagccaccgcaaccggcccccaggaattctttaatggttccagagagttctctggctaaagactgctgctgcatctgttaggcaatgttgacaatctcatcagaagtggtgctaccactgtgtttcatgtttttgtgtttctttctttctgtcggtggttcctgagggttgtgacgatcagggcagaggcagaaggcaccacctcaatctgggcctgtctgctgtggctggtcagtttcactatcatcctcagactcttccagtcaatggttggtgatgtcatcagcaaccatttttggagacagacccagggagctgaccttgggggccagtgcagatgtggcactgacttcaccactggtacacctcagatatacaactttgatctcgctggggtcaaacgtaggtggctgcggttggttgaactcaggttcaggatgactgaagcaagttgcacttggctttctctgagccgaaaaacgaaaggtgctcaggctcccagcaactcatgcactttattgcctcctcttggaa

SEQ ID NO: 341308 - DNA, 1000 bp, Homo Sapiens
aactttaaaactactatattatacaatagtaaagcagcagagtaccttacttttatataattatataaaaacttatttttatattgttacattgtgaatcacattacaatttagtctccttttcaatagaaagattttctaaggacatgatttggagccgtccacatttatcagatgccttttcattaattttttccatttttgcaattcttgatccaaactgcatggcccgtttgggcagaagagcagaggctgtaagaccaagttccacagctgcaaggcgtaaaagtaatttttcaccaattcctcggggtaaagtcaagtttgctttttcccaaatcggcagagaatttagaaaggagacaacattttcatccaggaaaggaaatcttgcttcttttccatgatcaccaataactctgtcatcacgaccaagatttctagaagaaattcgacccagttccatcattatttccttattcaatccttccagcccatgcgactgaaagcggacacgatgacgagaataacctgcaagttgctcatctgcaccaattccagtgagaactacctttgcattgctctgataggatttcactccttcctgggccactaaccaaccaattcctctagaagcaaaccagactgcacagccaatgctatcatccaaaactgtatccaatggccgaattaagtgacatattcgagttcttcttaatttctgcagttcttccatagaaacattaatttcaacaaaattccaaattcgggaagggctaacagcttgtagttcctttagtcccgcccttcctgtgattcgatctggtacactgacatgtttattaggactgtcagcagcagcagcagcaacatctttagagaattcttctgaaggtatttcacatttatttttctgtttattcccttctctgttaaaggtagttggcatggtcttttcttcagctatgaaagctacattaagaagatcaattggttcatc

SEQ ID NO: 341309 - DNA, 1000 bp, Homo Sapiens
ctaagatagtgaattattacaaaagccactgctctctggaaaagagagcttgggcctctgatggtatttcaatctatatgtatccgtcatgcagctatcaactgaaaaataggtagttaatgaaactgtctcatttggacaggtagaaatagagtctagttctggttggcaaaatgcatcaatggcacctgagtttgcctgaaaatcgttagttgaggagctggatggacagtttggtgtgttgccaaaacattctctcacttgaaatgtttctttatgtctttcatcattcatatgtgtactcacttctaaacttggttctgaagctgtacttaaactgtgcttcggaagatgagaggtagctttaaacacctctgtaagtttgacatcaggtgtagattcgcttttctctgactgtggcacactggttatagcatatttctttggtggcaaagggggtggtagattctggcaaaaaagttttggcatctgacacccatcagatctgctggctgaccgaattatacattctgtggatagagagttctcaaagtaacattgatccatgatattttgttgctggatgagaggagcagtttctggctttaacccaacagttcttaggtgtgaagaccataatgaagatggttcattactgttcactctcttcccagaagcagagttatcaacgtgaaaaggcaaacctgttctctcagaattttctatattaagccactcagaaaatttgcattcattcggtttttcaagtttctgttcatctgactggtggatatgttctcttgcattatggtccttgggtatttgtagactggatgaaggaaataactttccattgtcttcatgtacatgtgatctttttatcaaatgattttttatttgtaaatgtgattctgggtggaattcatgagatttatagcctgcttccaaattcctgagttcttttctaaagccttctaagtgatgttggctctgaagggag

SEQ ID NO: 341310 - DNA, 1000 bp, Homo Sapiens
tttttttttttttttttttttttttttttttttttttttttccctctgtagtcgtctttatttagagcagaattcagactcagctggtatcccccagggcaaccccaggatggggaagggctggtctgtccccacccacttctccaggatcctcccagcccccaggctggctttccctccaactgtcagctgcttagctgctcatctggggattggagctggagcatctgtcaaggttgtctccttgacaaacagcttcctctttggaaatggcttcactcaggtcctgcaggtcatcgagcaggacagagagggacccttttatggactccctggtgggcactgctgctgctacaggtgcagatgctgaacactctggaggcctggggctggacaccacagatttcttcttatccagtagggaaggaagaactgtcaacagtcgctgctgcttgtaacgggagaggagaccttcctgctgcaaggtggccagcatgaggttcttatccctctctagctcctgcaagcgccgggccagtcgctgcccctcctccttccgggcctcctcctgcagacgcctgagttcctggctccgctccttttcctgggcggctctgcgctgaatctggcgtaaggagaccacggccttggcatgctccctccgagcctcgttcagcctcctctctgtgtctgagagttgctcccgcagccgagtttccacttcagccaccttttcttgcagggcttgcccgtagagttcctgctgctgggtcagctcctgccgcagactggcagcctcctctgtgctctcctgctggccctggcgtgctacctccagctgcagccccaagctagccagggactcctgggtctgctgcagctcctgctccagctgctgggccaccttgctcagctgctgccgctctgcctccccttgctcccgagcccggcccacctcctgctggatgaggcgggcactcagctgcagttctgcatccag

SEQ ID NO: 341311 - DNA, 1000 bp, Homo Sapiens
catgtcatcatgaatttattttcaggcaatatgataatctattaacactcagcatactctgaacttacagaataagtaccacgccatacttcctcattaatgactatcattttacatgagcttcttccacaatcacaatgagagaacagattgctacatgtttgctggtaaatgcattcagtaaggcactcaaatcctagacacgaactaaccacagaacgctcttccctgctttaataaattgaaacatgatctcatttccttcattttcaatactttttatagaaagacacgcttgtcttgaacttgtctaaacataggtttatataaactaatccattatcattatagttataatcaaggaaatgatttcacattgacggttttttaggtagggataagcgaaagcactgcagcagtttctgagggaatgtcttctctgtggttccccatacttagtacaatgcctggaatgtagcagggactaaatacagtgaacaaatgggcaaacctttaattcccagggatctgctacatattgccttgactggtagatcatttctccaggagaaaggaagaaaccaaaagacaaaaacaatctttttaaacctcacaggattttcttagaaaaaagttttaatttatatatctagtgcaattctctttataaaatatatttcataaaaaatccaaagcaaaagccctgtcattcatttatttcaaaagacaaatcatttcagtacttcttccttgaaatgcctgcaatttcttcctctggcctcagagacgggcattggctccatgctttacaatgtcaggataaaaatccaggagggagaaatcttgttgtaatggatagctgttttcatctaacacaaaaaggctctgaatctttaatacacaaggttctgcgctgactgccaacaaggagtggaacaggtctgccacgaccatcccataggtgatctctgaggaaggaactatcactctgttgaggcag

SEQ ID NO: 341312 - DNA, 1000 bp, Homo Sapiens
ctgtgtccaaatgttgctttatctttcggcacgaaagatcttcacagtatcaaaagtaaagaattggaaaaaaacaaaataaaaacaaaaacaaaaaaaccaaacacaaagagagcagtgttgggccagcagtaccatcagccctggcccttaggccagcccagtccacgggctctgagtgtggaggctgcgtagcaccaggaagcggctctgctgaggtcaaggggccccagcacagtgtggcatccgttcagcttttggttggtccaggatggtggggagcacagagggtcttggacgggtaggtggggcacacggagggaaaaattatacgccttcagctggcagtcagggcctcaggatgccctgaagcagctcagcctgggcagggcctcactgagctgtgctaggagtggttttcttgaggctgaagttggtccagttcacagcaactttctgacgagtctgctttgcagaatccaaacagaacctcttaaagtactccacctctcggtcagtctcatccatctccaccccgtccatgtccttgggcaggaacacatcgtccaaggaggaggctggcttctcctgcttgttgcggctccggcggctgcggcccttgccctggggcaagctctgtggccttgctgggcctgggggctgcacagactcctgctcctgaggccgtgccttggcctcgcctggccagtttcgccaggagctgcccttctccttctcagttttgggactgccagcccaacctggtcctggccggctcccccggctcccctctccagcctcagcacagctgcctactttgggaagctctaggaccctgcctggctgcttggggccagcgacctggcccttggcactgggaacctctaggctggctgggggccggggggctgggcttgcctcgctcttcttggcctgactgccctgcctcttgcccttctgtggcttcccacctgaggacacaggctcaggcagctcctgc

SEQ ID NO: 341313 - DNA, 1000 bp, Homo Sapiens
aactgttttaacaaacatgtttattagaaaagtaaaaaatattgcataggtcttaatacttgaacatcaagtgtattcatgaacagtgagtatcttatcttcatgtaaacagttctagatggaagacccagatggcactcctcccggggaggggttccagcccccaccctctcagcccctcccctgccagctcaactctgcagtacacgatgggggaaggcttaaacgcagctgccaggtgtaatttttcaagtgtcaaagatcccaagtgatccctgacacccaccccttcctactcttacattcatgcgtctgtaagatagctgcctacaacaggtcagtagtgatgctccgatcagaaaaacaagatacaaaacaaacaacaaacacacttggtcccttcagaccagtaagatacacaaaccacctccacgacctccgacctcccccctccctccggctgctctgaggagcacgtgcctcttccttcaccctgggccgggctggggcgggagcagcccagctgctctctggatgtcacaccactgttaactgtcagtaacaaaaataataaggtacatgctacacacacatccagctggaagccttgttggcccctaagcctttgtttcatgctacagtactgaggggtatgtgtccccaatgcacagccacccgcacacaactcaatgagcttcctgggaaacactattcccccacctccaccttaggtggctgcctcagttttccaaccacaggaatcagtccctcagctcctgcctctagtctccaccccaaaagttcagtcgtctctgtcttggagggcactgtcggccccctcaggttgaagttcaacactcctcaatgagcagctgttccgagctgtacagcttcttcttgatgactcggaagccagtgctcagcgtcagggactggctgaagccagggaggaagggagagttggcggagctaaacagcccctggatcttgggccagagtc

SEQ ID NO: 341314 - DNA, 1000 bp, Homo Sapiens; identical to SEQ ID NO: 159851

SEQ ID NO: 341315 - DNA, 1000 bp, Homo Sapiens; identical to SEQ ID NO: 159852

SEQ ID NO: 341316 - DNA, 1000 bp, Homo Sapiens
ttttttttttttttttttgcatacaaatgtttatagcagctttacttgtaattgtccaaaactgcaaagatcctaaacatccttcaactggggaacaaacagtagtaaatccacacaatggagtgactcagaaataagaactattaatatactgagaaatatggatgaatctcaaatgtattactcatagcaaaagaagtcgctctcaaaatgctacataccatataatttcatgtatataacagtcttcaaaagacgaaaatatatggccggacacggtggttcatgcctataatcccagcactttgggaggccgaggcaggaggatcatgaggtcaggagttcgagaccagcctggccaaaacagtgaaaccccatctctaccaaaaatacaaaaattagctgggcgtggtggcgggcgcccataatcccagctactcgggaggctgagaccacaggtgtgagccaccatgcccggccaacattctgagattacttttttttttcatttggggagacgaatcccttactagcagagctgtattgagggttaacggtggtaatgggtctccagggcttggtgcagtttgtactcaacaagtacgtaattctctcctttggttgcccctgaatacaagagtggtctcgtacttccctgcctgaacagtccacagccaatggcactccagtccttgtcacatggttccactcttaggatgtaaattaggaggtaccagcttgagaggcagaggcaaaggtaaggttaagatgcagctgtgaggctgggcacagtggctcacgcctataatcccagcaccccgggaggccgaagcgagcggatcacccgaggagggggagaagacacacagtggggaaagcgttctttcaatatgcagatgcttcagggagaaccaaactatttcactggtattcccccgtaccaccggaactggtgcttggagcggaagggaagtgagatcagtcgattagtcaccaacac

SEQ ID NO: 341317 - DNA, 1000 bp, Homo Sapiens; identical to SEQ ID NO: 246535

SEQ ID NO: 341318 - DNA, 1000 bp, Homo Sapiens
agttataatcccattttttttaaaaaaaggaatacagatattgatcacatcaaacattttcattgagaaattgacacggacactaatgaggtttatcatggatggtctcagaagctttcctgtgtatgtgaagcagaactacaggcctttttgtataagttcctgtacatcttgtccatgctgttctcaaagatgggtcggtgggattttcccttataagaggctgccctgttggaccagtattcaccgtcatccaaatggaaagtgccacgtggctgctgacatgagctatactcggggtcactgtcataggcagagtctctacataaaagacttcttttcagttccagttcatcatctttctctaggtctctctcatcatataaatgtctttgatgagcctgatgtgatttcaagacattttttacccggtcatggatctcatcgcagtttgaaggtgaacaccaatcagaatgaaatctttccctgagagaagctctatttaacacagggcttggagaatgctttggcattgttgagggtgctgaatggactagcaaggtcctcgctgaatgccggggcttactacacgaccttgggctcaaatactcttcacatttttctaaagagtcatcgaagtctctcccatggggtgtcctgataaccttataatccttgggtcggcagcagccaagatgagaatgatcattgtgcacccttgaccatccatctctttcacagtctcttccagaagatcccaataaagtatcagccctgggacttgggggatcaacatgtctaatcacaaatggaggtttatctgtttcttttttgaactcatagggtcccagatttaaatgggccagccgccgcctggtgtcttcagatagctcacacatgcgtctttttgtgtagggagatggagagtgtgattttgaagaaattgtaggctgttcgtagttttttgcatttatacagtatttacttctctcaggtgact

SEQ ID NO: 341319 - DNA, 1000 bp, Homo Sapiens
tttttttttttttttttttttttttttttttttttttttttttttttttttttttttttttaaacataccctttattaacatctaggtaatatctgtaatattccttgctcctcatccccaagtacgctattagctgtccatccttctgggtagaagtgtactttcgttttacttgttgatttttggatgcatgctgggggaggaaagcatattgtttgtagtcaccctagagtgctaaggtatattattccccagtaattctctcaaggtgggcatatgcaaaacataatctctaaattcttcaatactaagaaatacctttgttttacccctaaaatcaaatgccattttggctggatataggattctaggattaaagcctttttccagcagaactttgaagacattgctccatttacttctagcatccagtgtgtccagtgataagtctgctgtcaacctgattcttgttccttggtaggtaatttctcttctctctctagaagcccttattattttctctttatcactagaattccaaaatttcaccaagatgtgtctaggagtcagtctcttttcatcaattttactaggtactcgacaagcactgacaatctcaagacttgaacctttctttagttctgcaaagttttcatcaattatttccttaattatgtcctctgccctattctcataactctccttttctggaattcctatcaaacgaatgttgcaacttctagatctctcctctatatctctttgcctttctttactaattatctgtttggtcatttgcattgtatccttagagaattcttcaatttgatcttctagactgtctattctttcttcaagtatgtccattctgctactcagatcatctactgaattttcaatttccaagacacctgaatgggaacttttcaaatttccaatctcctcttttatctctctgatgctattaatcacactacttctcaagttttcttctgtttc

SEQ ID NO: 341320 - DNA, 1000 bp, Homo Sapiens; identical to SEQ ID NO: 159855

SEQ ID NO: 341321 - DNA, 1000 bp, Homo Sapiens; identical to SEQ ID NO: 159856

SEQ ID NO: 341322 - DNA, 1000 bp, Homo Sapiens
ttttttttttttttgctgaaaactagttttattttaaaattaagtgcatagcactcatctaattccattggtgtagactttagcaccatacttgctatttgcaattaatgtcgtaacacagatacattttggtttgcagtctgtacttgagtagtgtttatttagtggactttggtaaagcccttcatacatattaatctcttcacagtacacatttaatgatggtccagtattctcaaaaaaaaaaaaaaagcctactttaaagactaatcaataaattaaacaaaacaaaacccacacaatgttcccccaccccccaaagctagcagttgtgagttgtatttatattgaaacctaatgttttaaaaatagttctggttctccaaccaccccatcccaccccgggtatgcagcaatagtaatcaattattttattctaccctcccaaaagattattaatccagtgttctttagctttttaaaatataaattgggaaagtgttattaataagcttttttaaaatgcatattcttctataacaagaatggcatataaaccaatcaataaaagtatttgacaagacattaagttaccacaggcactggctgttgtttcaagttgggatctctatcccaatatcttacattcatagcattattgaggtagttaaaatactgaaaattggactccaggttgctgggttctgaatgtgaatgtgaaagatatattctcttttgagcctactttcccccaaataattcaagttttcttgaggtaagaactaccaaaatccaattagcagccttctttaaaaaggaaaagtgatgatactttcagaaaacaattttcatgcttaaaaactgccatgagtgagtgttcttacctgagtggtttttcattttatctaccagactaataaatccacatcatgccctatgtactctaaatataaaagttattttctttttaaggaaaggatatttctctaagcattgatac

SEQ ID NO: 341323 - DNA, 1000 bp, Homo Sapiens
ttttttttttttttttttcccggctggaagattttgagttttatagcaaaccgtattgtacagacccggggcccaggggcccagcccggctgggtcccccgcttgcccctcgccgggctgcctcttccctcccccaagcggccccattctcaagcctctcgctatccccaggccccacccctccggcctttggtccgcccagccctccccccacccgcgcacctccctgttacctgaggtatgtggatagatctcccctcccctacatggtaagccccggccccccggaggcctgcgcggaggggcgggacctggcccggctcatccccggggtcccgaagccccaccccgcgctcgaggaaggggcagggaaggagggccagcagagtctgttactaggttcccatggcaactaagagggggccatttccagccttagcactggcatcgggaggtgtccgttggctgctatttccatggcaaccaggagtggcagttccctgggcaaatgggatacaagtttccatgacgatgaaagagtgggaagagccaggctggaggagtcccatggtccccattcttgggctggcgcccccagccataatgcgggtccggcgggtgccgccgctcaatacagtaaaacaagaacaagcctgggggtggcgcagtcccaaatgggcgcccaccggcccggtctcaggtctcagtccaagctggtccagtcccctcacaccccggctcccccaggtccgagattcccccggttcaagtaacacttcagtacagatgaatgttcaagtattgtgcggagaggcgggcagggggttggggcgcccctcgccactcccctgggccgcgagctgaagagcggctgcccgcggcccccactccttgcaatagctgccgttttcagtgacgttcaaggagtcagggtcagggggaaggaactgaagcctggggaggggggaagcagagaggtgacccccaagggggtattgct

SEQ ID NO: 341324 - DNA, 1000 bp, Homo Sapiens
ttttttttttttttttcagattttcatatttagcaggtgatcttacaaagatatttttcaataaatggattatgtttttcaatgaatggatcttacaaagatgtttttcaataaatggaaggaaagatgtgtgtgcttggtttttttgctgagacccaaatgttgccagtgcaatcccccaccaggggtacaggtcaaatcaaagctgaatgaagagctcatcttcgatgtagctttccaagctttcagaacgagacaataataagtgagcagcttcctcatctattttacaggtgaggaaattgaggccaagagagaggtaaagagtcgtgctctagcccatgaaagaaggaagcaacagagcccagattcaacttcaggtgtttctaactccaaagcctgaaccaaactgccttcctctgattggcattggtacctggaacttcacctgttccaaggagctgatatttgcaaggtgccgtggctgaggcaggagaatcgcttgaacctgggaggcagaagttgtggtgagccaagatcgtgccattgcactccagcctgggcaatagagggagactccgtctcaaaaaaaaaaaaaaaaaaaaaaaaaaaaagcggcaaaaggcaccaagacccagtgcttccctgacctctgttccctctaaatcagcatctatcacagtagatcaacctggataaagccaggattcacagcagaagtggcacctcagacaccaaagcagctttccttctcaaagcttttaaacatcattgggaaaacttagagcaaatcaaaccaatgtttttcaatacatggaaggaaagatgtgtgtgcttggttttgttttttgctgagacccaaacattgttagtgcaagcccccgccaggggtgcaggtggagtcaaagctgaatgaagagctcgtcttcaatgtagctctccaagctttcagagcaagacaaccatggaccatcctcttcttcagactggcctgtcttct

SEQ ID NO: 341325 - DNA, 1000 bp, Homo Sapiens
tttttttttttttttgcctaataatcatttatttttcatagaagatgagcacaacaggacaaaataaaaacaggaattgtgtaactggtcatcggaataaaagttttgtgctgctcagggattacacagtgttaaaaatattcaagaatgctgcagacaaaattgtatacgaatcactatgtatccttcctgattcatgacattaaaaaaaaaaagcttaaagaagtgtttgatgtttcaaaggtaatgatttcattacaatctactcataagattaaaccacaaaaactatatttaaatggcattaagggtctgaagtctatcttctggagaattaccaggtattacatcattctgtaatatagtgtgagtctgtggtatttgggtatcagtccattttacttaaaattacaaacatgtttttacactcatgtgcagggagcagttttttttatcatttggccacttagtattttaagtggtcaaagtctacaaagtatgccaaagaatatttcatctgtgaacctcaatatgcatagatttttttcctgatttagaaaagatcaaaggtgctaaaccttagtaaaactgtacatttatccctatgcaattttgtcatttaaattaaatggaaaaaaaactagttccaaagactgaatatgagtcccaatattatttatttgctgcagccccagcacaattttaagggcacattgaaacccctgaaaatagaggtttataatagaaatactgataaacctttaactactagaggaaggcattaacagattccaataaactacagtaacacgtaatgaatgaatatatagatgattctgtctttgttatctttgtcaaatccatgccatcttaaaccctaaccagtataaattatactttttctggctgtttttaaaatttttatctattattttaaaaattattttctctattttaatcaaacacttgaagtttttagaaaaagatacctatgttacat

SEQ ID NO: 341326 - DNA, 1000 bp, Homo Sapiens
attgcagttcactttattgcacgtcaagatattgccttttttttttttttaaacaaattgaaggttcggggtaactccagagtcaagcaagtctattggcaacattttcccacgagcatgtgcccactttgtatctgtgtgtcacactttcgcaattcttgcaatatttcaaacttcttccttattatatctgttgtgaagctggttctcccagacgttccctgcaggctgtttatgcagcgcccatccgagatgaacccacaggacactcaggatcccagactgcaggagtcgtctgggatcacaggcggggcagagcaatttgtcaatgtttatgaggagtcctccttggcagcccagtctttatcctcactcacgtggaaatgagattcgacctctcctaatcacctggtgcccgaggagcaggtaggcgcctgtcccaagcctgagtttcctgggaaatctacatttcagcacagatgggttcccagcagcttagtgctctggctgtccttaggtcactgaatcatttcacccgctagttttttgtttgtttgtttttgagatggagtcttgctctgtcacccaggctggagtgcagtggcgcgatctcggctcactgcaacctccacctcctgggttcaactgattatccctcctcagcctcccaagtagctggggttacaggcacccgccgtcatgcccagctaatttccatatttttgtagagacggggtttcaccatgttggtcaggctggtcttgaactcctgacctcaggtgatccgcccaccttggtctcccgaagtgctggcattacagacgtgagccactgcgcccggccttgcccactggttttatgagaaagagacatgggagccttttccccagctggggcaatcatcagacagtcacatggagtcacagaaccatcttgcaacagcatcccaagacctggccattgggcaggatgtgggacttgtgaaaggtcataaatgacc

SEQ ID NO: 341327 - DNA, 1000 bp, Homo Sapiens; identical to SEQ ID NO: 159858

SEQ ID NO: 341328 - DNA, 1000 bp, Homo Sapiens
acatgttttttttttttttttttttttttttttttgtctcgtggttccttccgtttacgttcactattcccagattgtcttccacttgatggagaggcttgtgctggctggccctgctgagcctgtgtagaagcagcagcagcagcagctgctgcttgttcctgttcctgatagtattgagaagcccgtctgtcctcttcctcttggagtttctttgctagttccaaatcactgattccttccgggatttgttcccaattgatctcttggctctgctgttcttgttgtagagataatgccataagataatcctgatctatctgatcttgttgtcctttgtatacagtttcaggatctgaaggaggtcgaagatgaaattctgagtcacagaaatttccatcaccatctacgttgtgtaggctttcccaaacaactttctcttcagtaagaaacccctggtccgttaccaacaaatacagttgacccttgtatttggtcatggtgctaaaatgattattccgaaagaacacacaaagttctccttcctgaaccgttgaagttagttcacataatccatggtatgtcagttgagtggctgtgttatttagaaactgctcagctacaaagcccaccttcactaaccagctcactattgtctgactgtttacaagagatgatcttctccactagttggttgtagctgcagttaccaacagcttttacaatgtcatcaatatttacatccaggcctgtctgtagtttgtgcaaaattgccatggcatcactcatattctgttcataatttaaacgttgaatttctgaaatttcttttggctttgcatcaagcatgtaatctcctaaatattccatcagctgctcagcagttatgatttccatcatcggtggaagtttcaccttccaggccaggagcaaaacattgaggatggccagcaaggggcagggtccgttctcattctgggtgatgatgggtgtgttctct

SEQ ID NO: 341329 - DNA, 929 bp, Homo Sapiens; identical to SEQ ID NO: 159862

SEQ ID NO: 341330 - DNA, 1000 bp, Homo Sapiens
ttttttttttttttttttactgttcaaacagcaatgtttagttgtacaacacataaagtctagcaacaattacaggaccagtttgagtgtctgtttgcttgttttcaattgggaaatttaactgtaatgtcaccgtaagattggctgggactggtaacatttaagaaacgggttgttcttgcatcccctaggcgtgggcctcttgctccatcaggacttggttgtagatgaatggcccacaagtcaccagcctttgagcaagttgtgtccaggtggagacaggaagagggtgggcaaaggggaattctataaagacacagtgtgtggggcagtggcagtcaacattcgcaaacattcatgcatctgatggggggctttgccctcccttgggtattttccattagcctacagtgaccacctgtggtcaggctaattcattactcacattaatggggaagggggttgggggtaggagtaggtagggtaggtgggaagagatccctcttattgctgagtggacagaagggtgctagtttttccttagcgtgtacatattgtgggtttctgggggtttgtgtgtgtgtttagtttttgtttgtttgtttggacagaagaaagtcaactccagcaatgtcttcttaggaaaaccactcttcctcagtggctgcgttatgaggtggggaggatgtacaaccgcactctgggacagccacaagtggtgattttttaaaaagtgatcctagcccttgctccccaacatctgtagtgacccaccctcatgaatatctttaagtaatgaaggagacacccttgtcccactttggggctcacacagctgatctcaatgaatctagtaagcagaaaaattgctttcttgaccctttaaggaagccaagagtagctcatgcagatgaatgggtagggagcaatgccattgcccttagagatggttacaagtagctgggatgggcttacaagggcagaaggagctcttgatgag

SEQ ID NO: 341331 - DNA, 1000 bp, Homo Sapiens
ttttttttttttttttttgctttttaatgttcttatttatttaaatatgaaaaaacatttcatctcttcccagttcatctgaaaggaggtcccctgggtaaacataggaaagcagttctgcaggctcatgaaggatgctcggctggaggtcggggggagcatggctgctttccccagcatagcccccatgttccccaccctctttgtgccccggatctgcgatcctgagtccagaagagctcagcaggaagtgggaactgagaagctgttgggagccaggagggccctggaccctctgttctctgccccagggcttcagccaccctgcaagcccctccggacaaggcaacgtcagcccaggtagaaaacttaagagtccctcctagaaaaccagtgatgtgctggccctttcagggacacaggccccttcagcttcaccggagatgagaaggtgccacccgcaacagggctgctggtcacagctcagtgcgcgatgccttggccacaatcaccagcttggacagctcagctttgaatgccccgggcctgtgagccactgctgttttggtcacttcaaattcctcagttttcagagggacatcactttccctttcaaatgcggctttagagtaggccatggcgtactcaatctcagcgccccgcacctctgccttgaactgtgtgaagtacagataggacttcccctggggcctccagatggtgcaggtgaagtgctggtggtcttcgctggtccccagactcatctgccattgctcattggtccctccttgagaggcgtaagtgaacatacacgtatatttgtcccccgggcccacgttatgggagaaggaatgcacgacgccgccgggccgcacgtcaaacgccaccgtcgtgggctcggacaccgcctccgccggcctcagcgccacggcccctaggagcagcgcggcccacaagctcgcgccgacgccgttccaccctccgctgggcgccgccatgt

SEQ ID NO: 341332 - DNA, 1000 bp, Homo Sapiens
ttttttttttttttttttcatgggaagaatttttatatgggaaagcggataaaactttcattggactggaatgtttggagaatgttaatttccaaatcaggaaccacaaactgccctctaataagacatcggctatctaagcgtgtgggtgccccctttctgccagcagttctggttcttaagaaaatcaccataaatcagacatgaaaattctggctccaaaaatagcattttctttgtgcaaataaaaacgtgtgtatcaagtatgatgttcccccaacgtggacacactcagttcctcacaaagccaagcccactgcagctgccacatccctgggcttacggtgcagcaggtgcttttttcaagacaggaatcaaaatgttaggaacacggcagaaaggggacacctggagaccaaacgcaggatgaggagttctgcagaggtcacagggaagtcacagaacagtaatacgctagcaggggcatggggcgtgaagaacagaagaagagaggaagcgtttccaagcctccagagaagaaatcaaggccaaccaaagcttcccgggtcacagaaccaattcttttaccaggcagtaccactgctgtcatttcagcttctggccactgggaggtgctgctcgaaagggtttgccctgagactccaagaagaagctgcgggaaggacagcaggggtcctggggttttagcctctggcccaggagttatgtgtccataaccaaagggagcacagtctgcacccagctctcatcccatcggagctgctgcgactcccgcaggttcttccggaactggtttagcttgcccgcaggatcaggaaagtttgagaaaagcatctgcagctgagctgccagttcctctgagtcctcaaagaccaggccattttcttcatgtttcaccagctcatgtaaacacttgaagttcacagcacacacaggcaaacagcacccgaacatgtccaccaccttcatgggcaggtcc

SEQ ID NO: 341333 - DNA, 1000 bp, Homo Sapiens
aaaaaaaaaagaaaccatggaatcctcttattttactggttagaggtgagctgccaaaggtactgggtttcaaatacagtaacagccaacttgtttgtggtcagacttccagtgacgtcaaccttcagaaacttcaacatctgtgaactctgggggaagcggggaagaagcaggaagcccagagcctcctggaaacactggccaaaaagcccatgcatcccttcttggaagccaagcagatctgacacataggaaatactggctttcctggcttccccaagaaaccttcagctttgccctggaggtttccatcagcgagcaggaggtgaagagcagaagcctcagaaagcaggttagaagaggaagagggtgctgggttggcaagaagtgacagccccatattgtacgggaacatattttgtatcatgtgcacaagataaagaacagctaaagctgttttaaaagtatagccgggggacataggggtaaaaggacccaaacgctacaattgccccggatagctccactgacagagcagagagcagtaaaaaaccatcagtgagaacagcataatatcctataaaaggccaagccaagccctacacatattgatagctcttaatgatatcactgcaccgtaccaaggtataaaaggggctgatgtttataatcatgaccatgactcatcaagaaaaggttaaatactctccagtatactctgtttactaaggcagggaagtgcgtaatacattttagaaagatttccctcaaaaaaaaatatattaaaattttaaagattcagcacttaaagggttaatcctcggttatctgaatattcacatacattcctcattttacaacaatactagtaaatgaggcattacctttttttgtagtcattagtatcaaattattggcaccattcagttttaaggagaggggcaggagagcaaactatacaatataacataaaaatacagttctgatacaaatatatgag

SEQ ID NO: 341334 - DNA, 1000 bp, Homo Sapiens
aaagctttaacacttttattaatattactataattcataaatcatatatattatggcatacaaaatgatattttggcatatgtatacagtgtgggatgattaaatcaagctaattaaacatattatcaccttacccataattcactgtggtgagatatttgaagttttaaaaacattttaaaaactttcctttgaaatatggagatccatgcttgaaaattaggtagttcatgtgatatcttccacagacaagaggggagatgctccttccatcatttaggttgggacttagtatctccagcagtgtggacaggatgtaaagaaaattcattacgaagagaaatagcaactgaaaaatctcttctacctcaggtgatgtgattgggagaaagtaaacatagaatgatgacagttgaggacatttgtgtttcatgacctttttttttttttctttacctagactaagatctcaaggtaggagtcttgttagagaacttaaaataaaatccagagtcacagggtttttttttctatattgcatttggaactccagaaggaaactgtctttcagtgttccctccatatcaaaaaggggcaacagccacacctgagtcagattgataaatgtcattgctgtgtggagaaaggatctgaatttagtgccccagagtctctttcagcttctgtgtggtatagaagttttgtagaagttcttgcatgctctgtggaaatacaggaaggtgacagacagtgttagagaatcatcatgatgcatgctgagagttgcagagtagggaatcgtgaacacggtcatagtgattatagaaaaaaatcaagaagcaacattgtctttcagatctgagtacagtaaatgtgtgagcccttacactcttgtaagaatatataaataacatcctttcctatacacatttgtttaaactagccctgataagttatctctgctaaagcatgtcagaaagggcctgctcttactcctcct

SEQ ID NO: 341335 - DNA, 1000 bp, Homo Sapiens
ttttttttttttttttttttttttttttttttttttttttttcccaagggaacttatattatccagctctaagccctcccaagaaatgagccagtgagcatggggcatggtggtgggggtggggaagcacagtctggtttcactgggcatcgaggagtgccaggcatctactgctctgtccctggataagtcaggctggtgggaagaggcagcaaggagggaggacgtactttgtgaagacagacggtgtctcctctgccatgttcctgcaggcgtcaggggctctctgaagcctgaactggggagtaggaaaggtaagaatggccagcaatcagggtccaagcccagtgtcccttctctaggcccaaggccacagggcccaggtaacccagccctctccaaaggaaccagaccgaattaagccatctgctttctatgccagaccccagcagaccattcagccaagaagcaagctccccacactctcattcccatcaggtgaggggtccctggggctcaggcccttctcagctgccctttgacagtgacataggttggtccctgctgttgttggggatgtccatgggagcagaatgctcagacacaaagccggcactcatcataactgtctccagctgcccccgtctgtatatcctgtcccttcttcacagggcctcatcacatgaaaagaagcacctggaaagggcagtgcttaaagcgataagacttcaggggtgggatatagaggggatgggggtgggaccaaaggcccacctctcacttccttgccatcctgggaggtggtggggaatgcagaaccaggttcaggggagggaaaggggctagcatgaaggtccagggcaggaatgctgagggctcttcagcctgggcatcacccagtgctgcctcccctctttaggagttataggagtatatggagctccccaccgaaggaaggagacagcgggggccctggaagtagcagatgatgaagacactc

SEQ ID NO: 341336 - DNA, 1000 bp, Homo Sapiens
gcaatttctgtttccttactttcacttgtctttgtttttcttgtattagctttaaagtaacttacagggttaaataagagattgatccttattttaaggtcccctcttaattgaaatttagcaggatctaacttctctgcaccaaataaagggaggtaaagaacagaccacactaacacctatcttaacactattaaaattaagaacagcattctagtgtcttttttcatagaattttattcaaagttctttttaagttattttatattttattttattttattttgatggagttttgctcttattgcccaggctggagtacaatggtgcaatctcggctcaaagcaacttccacctcctgggttcaagcgattctcctgcctcagcctcccgagtagctgggattacaagcatgtgccaccatgcctggctaattttgtatttttagtaaagacggggttacttaacgttggtcaggctggtctcaaactcgtgacctaaggtgatctgcccgccttggcctcccaaagtgctgggattacaggaatgagccactgagccctgcctcaaagaccttatatctagaaagaagctctattttgtctataataggcccaaatggattaagtcaaggaatgtcgtggaggaaaaggctagacactaccaataacactctaatagctgaatataaaagccgcacaatataaacctctactttgtgattgctgttgttttttcaactggatggcactgggctattagccattaaaaatttaacaggaacctcaggaacctctgatttgtttatacagaattaaaaggagcaaattaaatattttcacatgatcctatagaatgactaaattttttttttttttttggtttccagactaaagcccatttacacacgcttaatatcttgcagtggtttttcttctaaggctaattaggggtttatttatcatatcacttacaagagaaacattatatttcaaatagg

SEQ ID NO: 341337 - DNA, 1000 bp, Homo Sapiens; identical to SEQ ID NO: 159866

SEQ ID NO: 341338 - DNA, 1000 bp, Homo Sapiens; identical to SEQ ID NO: 159867

SEQ ID NO: 341339 - DNA, 1000 bp, Homo Sapiens
ttttttttttttttttttctctctccaagtccttcctttaatgtcaggtagtgcttcaacccaagcacaagcagtatacataccatagagaaagggacctgagggcatctgagtcatgcatggtgtggtacatacaaaccttggcccagcccaaaggagcagtcaagggcctggaagaaagatggtttgctctttccccctcctcctctctctttcctaccgggcttaaagtccgtggaagagaaagtttttaatcagtggaactgataaggcctcagggccgtggagggtagatttggttgttcagtaatataaaatgtgtttaagaaaaaaaacagcccaggcttcccagcagtagcccatgtgttggctggttcagcagcctgacctctacatctagacaaggaagtgaggagggtgattgctgggcattggtgtaggtttatgacggagcagcataagattttccgtgccctgtgaacacgtatacaaacattcatagccccttcccctcagccctgctctgctgcaaggaagctgctgagagtgagtgacagctgggcacaaagtgtcttgtgagaccagctatagggtctaatgcagtgaagtcagtcatttaggacctattttcacacaggggcaaggaaaaaccagaaacaacttctctcttaccctttaaactaagatgcttcattctacacgattacctgaaacaaatgtctcaggtcaaatcacaagccttagcttctgctagggtttgaagtctgggaaatatataatccagctcttctctttcagtccaagctctagcttgtcagcaagactgttgcagaagatctatccttaagaggcagaaacatctgcggtgaggaaggcagctattgaaggtattccaggagcatgagactgagtttgcagagctgagggttgtcaatttccttttctactgatatcttcttcctttagagcaaacttcctccttaggacctcagtgataagc

SEQ ID NO: 341340 - DNA, 1000 bp, Homo Sapiens
ttactcaccacaaatattaaaatgttcaagtgcacttgtttaattaataaagcattttatatgcaattattaagtgctaatcattaggaagtttacgttgttgaggcaaatcactagctcagacattaaaaaccattataaaaatatagctacaaggtcagtatcaaattacccttccataggacagctcaaggacagcttctatgtgatactagaaacttttttaaacacccaaatccctctcaaagcacagaaaacctcaagagcagtgacatgaaggtagcttgaaacacaggtaaggtcctttccaacaaagaaaataggtggtgtccacagcatatggtgattattagttttaatagtctgtggtaaattttaaaggtagaagttaatttgtcaggccttcggctctgtcttcctccagctcttgggcttcctttttcgtttccccgtccttcacctcctgccgggaaacgggaaatttgtccttgttgttttcctttttccatttcattctcctgttctggaaccagatttttacctgtctctcggtgagggctagggcgtgggaaacctcgattcttcttttcctggtcagataggggttaaaaagaaattccttttccaactctagagtttggaagcgactgtaggtttgtcttcctcttcgtctaccaggagctgcttgtggtctcatccacggaaacatttgagaaggagacgagctctgatttaagtggtctgggtcctcgccaatattaccactggacgatttacagtcaggatattgtaccagctcggcctcttgctgggtcgtaaaaatcggctgtctctgtaagttatcgtatccgtaaaacttcgcgggctccccgtgacaggcaatcccgccgcaggggggaggtggcggcggaggcggaggatgcggaggaggagggggggcggcctggtaggcagcggccgggctgcccccgccggggtggaagtactcctggccccggcc

SEQ ID NO: 341341 - DNA, 1000 bp, Homo Sapiens; identical to SEQ ID NO: 159868

SEQ ID NO: 341342 - DNA, 1000 bp, Homo Sapiens
ttttttttttttttttttttttttaaaagcaaaagacatttttattgagaagtgaggaaacacacagatcagagaagcaggttctaaagggatcgtatccacagttattcttgtaatcaattagccagaatgaatggatgttctcaacagaattctgggacaagaatgaatgagttcccacattttctggttcatgtacaaatgaattacagactcaaaattctgaaaaagagattaccattatccaacaatgggtaaaatgctcacctgtagctagtggaacggatacctgaaagacactaccacaggaagcaccccagagaggggaggtatttctccagagaaaacaggggtgctcatgtcaatcaatggacaacaggcatggaactgcaaaatataataaacgttcattataatgagttctcttaagcggcagccctgtaataaatgccagatctgcttatgaaaaagaaatcaaaagataattagcatttaatatggaaaatactgggggatattattccacaaactatcaaatatatatatagatagatagaacaagttacattaaaaaataaagtacaaaaaattttagaaatactattcagtgttaactcaggaaagtcacattaaatatccattaactttaagactctgttccctgcgtttttcctgaacattatttacatatttttaaaaaaacaactttatactccaccatgaagtcaactgttcataccaagattttattttacaaaaacacagcttcaaatctggaatgtgactttccatggaacacactttcaatgggaaaatgcttccttaatttattcaacttataaggtgttcctagtgtaaattctctgaatcttcatgatgatactacaacatttgatacatttattgctccacattccttccattattttcatctacaaagatttgtaacttatttctgaaagcttttacactcatcccaaatatggttggtctctctcct

SEQ ID NO: 341343 - DNA, 1000 bp, Homo Sapiens
tttttttttttttttttttttttttttttttgcaaactgaatcctgctttaattcaagcttgtggagaacaaagtcctacagaaacattccacagaattttctggaaaagagggatcacaacaaccctgtaaaaaggagactgagagtaattcatagctcaccaagttctctccgtatcaaatttccagaatacccacaagatttcttcaccagctcagtcctgactcaacctcttcaatctttatttcattagaagacaaagggtcatattatttaaaattattctagtctcaagaaatttaaagacttgaagtagtagagcattcaaaacttaaataactttaacaagaaagccagctgatcttaacaagttactctgctagtaaatgggaaatagactgaatcatcctagacataatttcattagggctgcaaaccacccaggggagagtagcacaattataccattttgtaatccacattcacaagaagtttgctacacaaatgaagaaaactttgtgcccatagacaacttattttttaaaatatcactccccaaaagtagccatgtttccacttttgttcccttttccacatcaaaaataccaacttgatttcttcaggaggaatggacaatccaagtttatacagtgggctggaaaaagaaaacactgaaaagtctaaaagcacaaaataaacaaagctgggagggaagacagtaagagttatttgtttctaattcattctgaaacccaaggcttgtatttaccagtcctttctgctaaagtcatccagctactgaagaggagagcctggaagtaaagtctggaggaaaggtagttgactgataaactgtcctacaggtgacagtcaaggagagaagaggtagaggtttggtggttaatgaataagttcctgactagccagctcctcttcttctcttgacttagatcaaccaatgtagatgcgatgaaaatcattggcaccaaaagcagcatt

SEQ ID NO: 341344 - DNA, 1000 bp, Homo Sapiens; identical to SEQ ID NO: 159869

SEQ ID NO: 341345 - DNA, 1000 bp, Homo Sapiens
ctgttatagattttatttgatactgtgaccgagtctacaagttcagacccacatgtaacggatttttgcttcatggttgtcagaggctagtgtgcattatttctgaggattatatccaatgacacgacgcagaaaacacaaatggacggacagacggatggacataatcattaagacaagagactctaaaacgtgccttagtgtccacgtgattgatctaaggcggggacccttctaaggtggggacccgagtgatctaaagcagggtggcttctagccaccaggtgccgactgggctgtgtgcactccaggcgccagggacgggaaccggcttggaaccaacgcctgccctcccaggggcgacctccccattcccgaccagcctctaagtgtctgctcttcatgaaggaccaggtggcgacaaggctgatggaagcagcggaggccagcggtggcactggacacacccatgccgcaggcggtggggaaacaaagtctgggcgaagtggctcctcttggctccttaacactgtgcgtggagaggcagggcaggcacgaggaggggaggtgcgaatggagcaccgttcatccggggattagccaacccgagtctcctccctccttggcagctccagaacattccctctggccgacagccacagaaatgagtgcctgccaagacacatggaggagaaagaaaacaagacaccaaaaaaacccaaaaaacaaacaaaaaaacctccctccccaggaacaaatagaactcctggaccaaggtcacaccagatccggaagacaccctgcaccctgcgcccagggaaaggaaacacagttcaacgtctggctgctttgctcaagggaaactgccaccctgccctgagactccaactcactggccgttagtgtctttttttttttaagttttttttttctttttaatacccaaaccatccattttcaaagctttttttttaaaaaaattgttttttgattaaaaaaa

SEQ ID NO: 341346 - DNA, 1000 bp, Homo Sapiens
tttttttttttttttttcatccataaacatatgtctttattctctttctgtacatatgggcaatgataaagcttaaagatgcatgtcctaagaaatatgcaaaaacaatgaatttacataaataatttatacttcagaaaattaaagttgaaaaatattttccacattattagagttcacagtatttaaatcaagctttcccacttatactccagactatattgtcttagcagagagtgataaaatctaatcaggaataaaatgatcaagtttctgtttttattcagtgcacgagtagacgctatttcagtatcaggccgcgccaagtgtcgaggctgcagcctctcatcctgacccttcccctcctgagtggctgtgacccagcagaggtcactggcgtggaatggttacagcgtcaccaaaccactccacggtggacacattcaaccgagcggtaacatctggtggtctgatgcctcatttccaagtaatactttttatagccctgaaaatggaaaccttggcatctaaacaaacagagctgaacatgtgaacactaggacaaggcactgtactatggggtttggtttctttatgggaaaggtgtttgcatagattgctagctatttagtgtgcaggaaaacagagcccccagcgtgcatggctttgtgaggggtgaagctgcatggtgctccctcagccccaagagagcgcagtctctcattctccagccccagccttgtgggctgtcccgctggtgctgtcctttagaacccctacaggagagttttttgctcaaaaagctgcaggtcaaaacggacccagacctccccggtggggacctcatgcagcagcagtcggcgggtcatagggcctttgctttcctgttctgttcgaatttttgccactggaatttcagtacgacccaggaaatcatctggtgaaaactggtctctgtcaaacagggtgagacacagcacgtcttggtagagatccttaa

SEQ ID NO: 341347 - DNA, 1000 bp, Homo Sapiens
ttttttttttttaaagtgaaagcaagtttattaacaaagtaaaggaataaaagcatggctactgcataggcagagcagcccacctcccttttttgttggagagctgctggttaaacttttgttagcacaccactggccagaggcaataagctactagccccaggccagatggctaccattaacatagtttgtttgacccacatgatattatttaaaacaaacaaacaaaaaagctgaatggcaagccgacatttacaaattgtgagaattcacataacaacctggaattcctcattctctgaaggatcagatctggccccatcagattttcccatggcaacactcagttggagctgagccactgtagagcttcaggtggggcatgcacccttacttaaccaccatcccaccactccctgttgtcccccaaaccctgcagctaagtgccaaatgccatttatccccatgcctgcactgtggattttctctgcccattcttcatcccacagcagcacaaactgaaccatatttttagtccagaaatctgaaacctcaggcttgatttataactaaattagctttccttttctgttggtttaagtcccattaactcacaagtatttctcaaaagacttacttaaaacatatgtgaaagggctttgaaactattaaaagctaccaaatggaagatatttataggaggcatatactttctatcatcatttaattttatactttattaataaaaattattaaaattcaatttgttatattttcagtaactaatgacaatgaatatattactaatcttttcacttgtcttttcttgctttcctttttcctcctttttccccttttccttattttttctttcactttaacattatctgcagtacaatgtcagtaatgaggtcacatttttctattaaaattcatactttggtctttgttttggcctaatttaaacactgacatgggctcatgctaattagcctgaatg

SEQ ID NO: 341348 - DNA, 1000 bp, Homo Sapiens; identical to SEQ ID NO: 159871

SEQ ID NO: 341349 - DNA, 1000 bp, Homo Sapiens; identical to SEQ ID NO: 159872

SEQ ID NO: 341350 - DNA, 1000 bp, Homo Sapiens
ttattttgtaattggtttattcagattccaacaatgagaaatgctccacataaatgccaaagtttgctgtatagcttaaataaactgatcggaaaagaaaggcatgtcccatgttactttcacacgtgaaaacaggaagtataacttggtataaccactagaaaaacaaacatctattctgctttttattaaaacattttaaaaagccatccattaggtcaataatcagtaaattcaacccatcattttcttttgcacatgtattggtcatggaatttccaggtaaaaatcttatctgacagacaaggtccgctcatgtgatttagtaatctaaggaattcgaatctttgggcctaccctgagctcctctttgtgccttggggcatgggttctggggccttcttgctcatctgactcatttattgtcatgtatcactcctccctgacattgctttgtgctggttacatgttaaaagtctgtcttggaagtaacttctttttttttgagacagagtctccctctgtcgcccaggctggagtgcagtggtgagatcttgactcactgcaatctccacctcccaggttcaagcgattctccaccctcagcctcccaagtatctgagactacaggtgcgcaccactacgcctggctaatttttgcatttttagtagagacggggtttcactatgttggccaggctggtctccaactcctgacctcaagtgatctgcctacctcagcctcccaaagtgctaggattacaggcatgagccaccgcgcctggccagaagtaacttcttaggatcagagatctttaggtactttgcatcccaaatttctttattttgtgaccagaagaaaatattaaaaagaaaaaaaaatttttaaaacagttccattagagcaaagcatcaaaaaatcctgttccatttgaggtaggatgttagctgctcacactgaccctgatccccaaggcttcgtagaatcctcctgctctga

SEQ ID NO: 341351 - DNA, 1000 bp, Homo Sapiens
ttttttttttttttttttttttttttttttttgtcctgtttgttaaatccctgctgtaactctgatttatccttaattttcacattggcaaaaattaagataaaagtaaggcaccaaaaatcgccctgtataacacctctctaaaagcctcatcacccatcacaggcaagccagaaacttgcagggaataccctctctgtgtaagactgttgattgccgcccctagacaggtgtgtttcattatgttacatcctattttcatctgtcacacaagactgttaggtacaaatacttaacagcaccattaagccatttcatctagctccctgtctttagtcttttatttaaaaaaaatattgtatcatatagaagaagcaggtatctttgctggttatattgatttgcttaccaaataactccctaattaactggcaaacatgtagaaatttcttagctagtgacaggctccttggggggcaatggaaatattgcaagggcacattgtcccccaatctcatctactgatcttttccgtaagaaaactatgatatacttttaagcattaagtcaatagtttccttggtaaaaatcaccacatttataagaagctcgctgatgcctgctatacagatgttttacgcaatctgctctccaggcattaaaacgacatggcatgttcatggcataattttatctgttgtacaaaactacaaaatccattcaaaataaaatttacgagagctaactgatcatgctgtgcatgcttcaaagttcggtgagaagatggctcatattttacttcctttgctgcagcacagtttgttacttggtggtgaagcctcctttttccgtaaggactttttccaagattcatttacattgtttctttcattatatccggtctcaaaataatcataaaattggcctttgcactcaaaagcaaggtcatttcccacaggttcgtggctgagggggccaccatctctgttggtgtcatcat

SEQ ID NO: 341352 - DNA, 1000 bp, Homo Sapiens
agtttgttttcagtagagacaaggtctcactatgccgcccaggcaagtctcgaactgctgggttcaagtaatttacccaccttggcctcccaaagtgctgggattacaggcatgagccatcacacctggccaatttttctaaaagtctgaaattaagtcaaaattttgaaaaagttatagcaattatggcaatctcaattatgggtaaatgtgtgtcacattatctcctttacattttaagtatttcataattaaaaaaaaaaagcagagaaaattgtttatcagaggaaacctcagaagagatgaggcagtcgtcagcaagtagaaggctccctttcaggaaactgaaaccgggtgccaggtggctgcagagcgggtgagagcttagcccccacctctccactggaacctagtgaccccatgcagataacaacctgcccaactcttcagccctgacctggcatcatatttatctataactggcagttcttctctgacaggatagattaataaacattaaaacacatctaaaatttatttacctgttgttcatgcaggtatgctagtgttcagtcagcatttgtaagacattcgttgtaaacaaagcactgaattagacagaatagatgaacagaaagataaacaagatctggccaaatgttgccccaaatccatacctgatggagacaggaagggcctttagtgcttgtgtgtcagtggtgatactattcactttcattttttttctgccacatttcattttcataccaattctggttagtgggtttcatttattctcattttacagatgagaacgaccagagatgttagcttgcccaaaattactcaaatactaaatgacaaagctaagagtatcatgtccgaggtaacaggtctgactccagagttcatgttctctccttatcatcctattttataagtcacaaaaacatgaatacagcaaaatttcacttactcaacactcccggggatgagtcat

SEQ ID NO: 341353 - DNA, 1000 bp, Homo Sapiens
tgagctaaggtgcccggtagctttaatgagcaccttttcctcactttgtccctccctctctactcttccccttcccgtcttgacaggtccagcctgccctagggctcttaaaccgcaggtatcaatccttctgtccccttagccgctccaggcgcctgcgaaggtccgggggcaccttggccccagctgccagcagctcgcgcagcctctgtttgggagtcttggtgagcacgaaattgcaggggaaggggccctcttcaaaggtgacccgacagttccgtgtcactgaatggtagccctcggcactggcagtcaccatgtagtcccctggggtcagcagacgccaataatccccgccccacgccgtggtcacgtcatggttaatcccatccacggcaatgacagcgtcagcaatcccaagctccgtgtccttgtccctcaccactcctgcaatgcccatgcgcacctgctccaggtaggtgaggagggcgtctttgttgttctcccactcctggggcaattcattctcgtgagggaacttgtcacaggacagctccacagtgacctcaaagcagttggtgtgtaggtagctgaagtcattcatgctcccggggaccgtgtgccagtcagccccgttgatgatgttgccgtgcacggagaagtcctggctgtggcagggtcggcggctggtgtcctgcatggccagattactgccagcatagacagtgctgagccagcgaaacacagcatcatctggtgtgggcgtgagctcgcgggcagcccacggggtgcgagtcatgtcgaatgggtaggacaccacgagctcacccccgtggaggttggcacttagcacaaaggggatccgcttcatccacttgattactgcccgcgtttcaggagccacggtggcattgggcagggtgtagtaagtgggcaatggcaggtgatggttggggacgatgtggggcaccttcccatcgtcctgtgcttcccacagtgg

SEQ ID NO: 341354 - DNA, 1000 bp, Homo Sapiens
gccatgttaaagttgtattaagtttcaatacaaaacattccaaaaagtgaaaagtgatctataatacccaagttctatgttcaactaccacttaaacaaggaaaacattttctaatatcattctgttttacaaccagtataaacccagaagaatcaagatctgattctttttccacacgtctgctagttcagtaaactatttatcaaacaggtgtctggtcattttaacatactccttgctttgaacaatattcattcatatttggtacaaactctatatcctatatttaggatatctaaatattttaaatatttaggatatcttaagagccaaaaggtcctcacagaagctttaacccaagtaatcataagaatatggaaggattcggctaagacaactatggaagtgtaacaaccacataaatttggtcattacccttgtggtctgtgattagtagtagtctgccaaatgagagttaaaaatgttgtacttactatccctagttgcaaatgttaaaacatgacagtgccataattacaacaaaaaaaattagaagttgagttagttcctctaatccaacaactcaagtctgtttcctttgagaacattacactattggctctagtctccaaagcaataaactaaaacttgtttccaagacggggaggtaaagcaggcttataaaacaatacagcaaaagaaagccaagtggcccaattgtttccagtgtgtttgccatcttagcatggttgttactttccagatgtcactcataagttttattctacaactaaactgtttgtggataagccaccacaaaaaaatgtttcacttactgacaagacacttcaccagatagagctaccacttatatccatcatttttataattcatcttaagttctaaattgaagagttgtccccatgactttagctaaacaaaatgaaacccaaagctgtaaaatctgtgtaaaggaccacgagaacctcctgactacct

SEQ ID NO: 341355 - DNA, 1000 bp, Homo Sapiens; identical to SEQ ID NO: 159874

SEQ ID NO: 341356 - DNA, 1000 bp, Homo Sapiens
gggtggcaggcaccacaggtgtgcggaggagacgcagccgtttattgtgaagctgggaagcaggtggggaatagtctgtgcagcccggcacccagcgaagggagaaatacatttgggggagagtttgggggcattcgccaccatgcatggtgatgcttctgaattgtctgaagtgaagatgataatggataagaaccagaaaagtgagagctaaacaaccgccttcagaggacagcacacatggagtcagcatcggtgtgtgtgcatctgtgtgtgcatctgtgtgtgtacatcggtgtgtgtgcgcacttggtgtgtgtgtgctcatccatgtgtgtgcatatctgtgtgtgcgcacatcggtgtgtgcatatctctgtgcatccgtgtgcactgatgtgtgcgtgcattggcatgtgcgtgcatccatgtgtatatctgtgtgtgcatctgtgtgtgcatatctctatgtgcgtgtgcatcggtgtgtttgcgtatctctgtgtgaccatctgtgtgtgcatccgtgtgtgtgcatatctctgtgtgtgtgcattggcgtgtgtgtgtgtgcatccatgtgtgttcatgcctctactgtctccagcaatgaaggcagagcagcagcctgagggccagcagatcacgtgcaggtggggcttggctgaagggaggtaaggaggctcagctgggctgtctgcctccaggacaaccttggcactcccctgcccctctgtccagcgcctgtctgcctctgcctctcatcttttctattccatctctgtgtctctattagtctctttgaatcttggagtctctttgagtctctctccatgtcctcagagtctctccctcagtctctctctgtctctgtctctctctgtttctgtctctgtctccctccccacctctccctccctcccatgccctcctctaccccattaactgcagaagaatatatgggatttggtgccaggacagttcgacgcagccttggctt

SEQ ID NO: 341357 - DNA, 758 bp, Homo Sapiens
tgaattcaatgctaaatgattttattgaaacttaaagaaatcaaacataactagtagagaaaaatttcagaatgacatggtaaaaaccactggagcccatattttttctgcacagcatattcagatgactaaatccatagtggctttaaaaaattgtttagttctccaccgtgtctccacagaaggaaatgtccacaatccatagtacactggtcgtgtagcacgttcctgagtaaaaaaacaggcttgcctcttgcatctcctcagccatgtatgttggaatcccacgacacatgtttgcaatgttttttccgaacttgctcaggtcatcgactttgtttgggttgactgagtacatcaggcccttgggaggtggtcctcctggtcccttaccctgaagcttcttttccttgaccagtgcatcaagggattgaatggagggcatgacttccttgttcattttgtgcacaatgcatgtcttcttttgaaagagtctggttgcagcaaagccatttccataatcccagatggaattccaggagtcccatccgttgttattgtcaacattggccacattgtgttcattgttgacactcactgactgctgcccacttccagcattgttgttgtcatcattgacgttgatattatagttagctagggcaggagctagaaagactccaagaagtccagcaaagacaattgtgaacttcatcttgtcttcacgaaagcagtggacagaggagtaggcaagcatg

SEQ ID NO: 341358 - DNA, 1000 bp, Homo Sapiens
gaaatgtatttttattttatttaaatgttttaatacatgcctaacacagtttctcattattattccattcaacattttgacacaaattttttctcctatatattgaacacaaatttatcttttcagctgatggttcacaatataatgtttatcttttaaaatttcttcattcattcttctaacgtgaaaaaaaaaaatcccatccaattaacgaaactttttcttcaactgggtagtcagcaaaaatattatcatagttcacttaaccggttctttcaaagtacatttttccaattcaaggaagcggcaaagaaattgtagaaatgggttccatatcttcctttagtcacatgtagtgccaagaataaggtgtctatttagcatgtttcttctttccatggctcgcagtgaattgtgggtatctatgcagtaaaaccatggaaataaacatattcctcagctgtgaatccacaataccttcgtaacataattccacaccttgctgaagaagaagctttactaaacatggtggttcaccactgacagcaagaataagggctgttctttgataattatctgaagcattcacatcagcccctttctccagaagaaattttaccatttttggattattgttaataacggcaactaatagtggagtatacccatccttatttttcgcttcaagatcagcttcgtattcaagcagtttttcaactaatgacaaactttgaccacaaacagcatagtgaagaacagtattataacgaatatccctcagatctgggtctgcaccaaagtttagaagaatagtaggcacaatcctcattttgacactgtactgccttaatcaatggggatttgttttcactatcccggacatttattttgcattgttgctcaattaggaaaagtacaacatctgtatgtccattagcacaggctaggtgcaaaggtgttctgtattttttgtcctgcatatttacatcatatttcttga

SEQ ID NO: 341359 - DNA, 1000 bp, Homo Sapiens
agggtctgctgtcaaaggtcccattccggaccgtccttctccatcccaccccccgggtctccattgccgcggccctgccccaccactttcagctgaggggtagttcggagctccatggtcccttccctagagcggccgccccctcgggcctccccagagccttcgaagagccgcgtgaggaaacggggacctgcccggggcagcagatctccagcggtgaagacgtagagcaccgggttgacgctagaactgaagaaggccaaggccgtagttcccgctcgcgccgcctggccggctccgcccagcttcgccaaggccccttccggtggagccagcgctgcgaccgcctgcagaaggttgactgcgtggtagggggcccagagcaagccgaaggcaagcacgatggcgctcaccagccggcccacccgcgccccgtgccgcccggagccccagcgggcgccccgcagccgtgccagcgtcacgctgtagcagccgagcatcagcccgaaaggaagcacgaaagcggtcagagtctccaggctcaggtgggcggcggcgtggaccggcgacgggtggcacagctggcatacgcggtccctccacaggtggcggtagacggcggccgggacggcgagcaacagggcggccagccagaccgccagcagcaggcggcgggccagggccgggctgcgcagccgaggcgccaggaaggggcgggtgactgcgaggcagcgctgcaggctgagcaggccggtgagcagcacgctggcgtacatgctgagcgcgcacacgtagtacaccgccttgcagcccgcctggcccagcggccaggcctgccgggtcaggaaggccacaaagagcggcgtgagcagcagcaccgcgccgtcggccagcgccaggtgcagcacaagcgtggccgccagcggtcgcccccgtgcaggccgccagcccgccaagctccacaccacgaagccgttgccaggcagccccagcagcgccg

SEQ ID NO: 341360 - DNA, 1000 bp, Homo Sapiens
cattcacacacttagcatatgcaattttaatcaaccaaaagaaaatcccaaatgtacaagtgaaaaaaatccaaactgttgacacaggcctaactaatatcagctacttttatgtacagctgtatagttcaaaaaagctatcctatatgtatatacaaaagttgtttatacacaggtctgtacataagggtctatacatttatttcctcagaacccttaggtgccacctcttggtgaggacaccaacacttcattcacatatcttacaaaaaagaaagaccatttccaggattgacaacattgtgcatcctgtattcagacaatgtacactccactcgactggttaagatccttccatcataatgcggaccacaccagatgcatgggttccaccaaacagcttcacacagagtgctccaaagtaaaagcccataaaccaacccgagatgaagcagggtcctgcccagtgtgccaccacaggtccgggcttagttgagtctgcctgccctgctcactgtcggtattccaattcatctacactgataactttggcgggcatggagggcaggggttgctgtagcacatctgagccaaaccatttggcaaggcccacaggggagctgctcctctggctggggcgatgctccagctgggagtgcatgtggggcaggcctgaccggctgggcacgttctgaggggttgtctgaacgctgacagctgctgcatgggaaccagagcctggaggatgcagaactgagcgctgtagctgctgttgcaccattgccagatgcagaggtgttccaggacgagggtttaagagagggtgactagcagcaggtaaagggtaaaagggctgacccaggatggggccagatattccctgtaaatgactcaagtccatcccaggaggaagcacaccagtttggagcaaacttggaagatgctgtggatgtactccctgggccagcatcctctgtaccaaccctgggtgaagctggtg

SEQ ID NO: 341361 - DNA, 1000 bp, Homo Sapiens
tttttttttttttttttttttcgaattttaaattaataatatttataatttctgaaaaatatacaacttaacatgaaaatatatattatagcataaatccaggccagattttggcctaagtaatacatccaaagtgtttcattttttaaaggcatcaggcttttctctttatttaggctattaatctatcttgtcctttttacctcccttatattctagtcactggttttattagcagttacaactaccaaacaattactttttattgtatcacacactaaccatgcctctcactttaaattttatggatcatatattctaatcttaaccataaaggcatagctatatcctaaccatgggtactcccattttttatagtttattatagatgcatagacttatccattggtccactgtaagtaaagaatgttggaattgtcagtgaaagaccaggaacacctcaaaaataacatcttaatgaatcaatgcaatgttagttggcagcagcattgtcttgcatgtccaaattacatgttttactatctgttccagcagaaggtacaaaatgttcaccattatttaagaattctaagtttgcttcatccattacttttctttcattgtccgatgccttggtatcttttccttgaaattttttcttcatagcaaaaatgaaaacaatatataaaacaagtgctgggaatcttaaagctatagataagcccaagtagacccttccaaaaaatacggaattatatatcctacaagctccttgtgctccacagctgttggtggaccacttcatacatgttttatcaatcagagccccaaaatatattggagctagaattcctcctagtgttcttataaccattgactggaaacccattgcaagtgctttcaattcaggttgaacaatcttcacagtcaacaagataaatgtggtacctcctgttgcagagaacaaagagtttatgacttgaattgcaacatagatgaa

SEQ ID NO: 341362 - DNA, 1000 bp, Homo Sapiens
tttttttttttttttgcagcagagagtttaatgattacatggtgctgagtcaggaggtaggaggagattcttaaatctctgaagagttctgggctggggttctgggaggcaaggggctggaaaatttgggccactgattggtcagggtaagggagattgaatcattaggatatggaaattgcattctttgatgatttagcttctggtagggtccttcagaccagctgacatcagtagtttcatcagtatgcaggacctgaaagaatgtctcgaagggaaaacttagcatttcataatgttcaagctgttatctatagagcagttaaggggaactataatcttgtaacagactccacataattctgaagcaatagccaaacaactatgaggaaggggtcagcaagcaaagtgacctagtgattaatgctgaatgtggtgcaagcttggattatttatgtttctcaccctctcttcttctctgattaattttataaagtttataggaacagtttcaataggaggaaaaggaaaggagtatggagtactatgtacatcttacataaagcctaatacgtaggccaggtgcagtggctcatgcctgtaatcccagcactttgggaggccaaggcagatggatcacttgagatcagaagtttgagaccagcccagccaacatggtgaaaccccgtctgtaacaaaaaatactaaaactagccaggcgtactggcgcacacctgtaatcccagctacttggaaggctgaggcacgagaatcccttgaacccgtgaggcaaaggttggggtgaactgagatcctgccactgccctccagcctgtgtgatagagtgagactaaccaatcatggccaagtccacttgaggaattgtctctgtagatttatctgtagactctctaataaggagttttatggccgtatgtttcgtgtttcccctgatgtgccctgttactgttcctcttgccatggtgtttcttcctgtggc

SEQ ID NO: 341363 - DNA, 1000 bp, Homo Sapiens
gcttgcttctctcttttattgaaatatattttctgggcagcgcccacctacctaactcagcatggcctctttggcactgaaagctggagaataaaaaatcagtaaaaaaataagcctggatttttctgagtgcatagtgcatgagaactttggtggagtgtgggggctggggctgatgaaagcttgacccagaggcctcagggaactgggaacaggctgctgtagatgaagtggccaatgaccaaggccagcatctcggaggtgccgctcagcgccacaatgaagggggcctgggaggcatagtcagcttgaaggcggcggagggatagctgcagcatggccaaggccagcaggctgttctgcacccctacctcaatgctgaccgtccgccgctgggccactggcagcttcagacacgtggctaggcagtagcccaccaacaggccaaccaggggcaccgtgatacccaccagtacgatgggtagccggatgcctgccaggatgaagacccccatgcgataggccaggaagaggccgcccaggaggagcacaaagctgaagggcttgacgacctgcagcagcagctgggagaacttggggagcttggacttgatcagcacgcccacggctatggggatggcaatgaacagcagggtccccaggatcttggagatgggcacgtggagcgtctcatggatgctgagcaggcggctgtagatggccgaagacagaggcaagaagccagtggcagccaccgtagagaggaaagtcatggagatggccagggtgacgtcccctccaagaaggaggctgaagaggtagctccccccgccgccaggcgacgagcaggtgatgatgaggcccagagccagggccttgggcagcatgaagaccttggccatgaggaaagcgtacaagggcatgaccagaaactggcccaggaggcccagcagcatgggctgggggctctgcatgagccccttcagaacctcgagttcca

SEQ ID NO: 341364 - DNA, 1000 bp, Homo Sapiens
ttttttttttttttttttttttttttattttatatatgatgcttcttttaatgcagccaaaagtgatatttgcttttctcagaaccataatcgatacaagatgcagtgaccaattcattccttaaaacacctgggctccttaagcggctagaagacacaagttacatccagcccatcagggagccagaggcgggaggggtccccagccaagctctggcaggcctgccatggggcagggcctgaccgtgcagccagaggctggcagaggcctggggaagggtgggcagaggcagctgggctctcagtcctggaaccggagaccaagggctgctcatcaagctccgtcaggcaagggcggcctcatctgtgcctggtagattctaactgcttccaaggtagaggaggacgcgtgcaggaaatcgtgtcaattgtcaccttctgcctgcctcccacagggacactctgggttgggagcctcttccagtccctgggggccaggggcatggggggccctggagtgtgcccacccccttccaccccctcggaggcatgagggaggtggtgtaatactgctgaaaccttcttgtttacaaatgcatcaggagaggcttgggcaccctttatccagtttgcaagcaaggggccaagacacatgagcactcactgcgtgggcagggatgagggccgggcaccccaagccagatcctgccacctggggaggtgctggcctgtgcttcccagaggccccccccccaccttctgtcggggtctcatgcaggccctgctcccgctggccccctgggtgggggtcattgccgattccggctgcccagcttcctgcggtccttgttctggctgcgctgagggtcatccatcttgtggacacggaaacattccttgaggttctgggaccggatcttgggattcaagatctcctcagtcatggagctggggaaccagcctctctcctggtcgtgcagacgctcgccaaagatccacc

SEQ ID NO: 341365 - DNA, 1000 bp, Homo Sapiens
gtctactggtaaggactaatccaatgtatctaagggaacttaatccacatataaagagtgatcatgatctatttctagtcaagattttttttggttttttttctcaatattctttccaaatccagtctctcagtagaaaatagactttaatattttgaacgtctgcttgggtcattattttatgatgggaactatgacaagaaagaatggttgtggtttgactcttccataatgtcactatcgcacttcaagtgtacatcagtaggtccttgtacaattctggaactctttctggatccactggtctaggtaagaaatgtgtaaatttctgatgcctcttggacctggcgccatctcttggagttccgtctttgttaagtgccacaaaatacctgcggccagtgtctccatgtttatatatgttagatgaataggtgttataccagttctcttcaaactgctccctaaagatgcattcggaagtaagtttctctgatccatagagttctcctttgtcattcattccaagatagagaccactgtccacacctctaatactgaccagtcccactgccacactgatgaattccaagataccgaagaggctgtggtcctgccgggtgccctgcacgctgccgtcgggcaggatctgcaggtggaagccggtgcggcaatagagctgccggcggcgcaggatgccgtgcaggtgcgccagctgcgcagcccccggcccgccgcgggcgctccgctccgccgcgctcctgcgctcgcccagcagcggcggccgctccccggcaggaggcaacaggaaatgcgaacccacctgctggcccaagccctccaggccgcccagaaagcccccgacttcggctaagggagccatggagggggagatccggaacacaaaagacccccccagtaaagagtgttgtgggggtgggatggaggtggatagagaaaaattatagcaaaacgagcgcaaaaagttaaggcccggtta

SEQ ID NO: 341366 - DNA, 1000 bp, Homo Sapiens
ttttttttttttttttttacaatacaaatgtttatttaaataaagaagaaagctattgtacaaatatcactcttcaggtttagcttacagagccatggctatggattcttagctctgtaaggaagtgcttctataaattcttaggtttagagatgataccatctgggtacctttgcttgaaccgtgcaaccacatctgggtctagtaggtggatcccatccagttggtttccaagggtgatccagttgggttgcacattgtgtggtcgtccaaataactcaatcttgcgagtgccaggagatagtctttcaatcatgccatagatttcatctggtttatgactggtggaacgaacctcagctacgatcacatcacaatccagaccctggttgaagccttggggatttcctttgacaccaaccaagcagtgttccttcccatggttcaaccagtgacctgtacggcctgtccgaatgatgcgttgcagttgatttgtcttcacccaaataatttcatctacccgttcatacccccagagatttagacattctctccccaactccatggccctgcctgtgacccagaggaagagaaagccatcatcctgtagtacgggtatgttgagcctgcgcatctcatcatctgtcagggtcccatagggcagttccatgtgaatatcccagggtgggtcagccatcacaactgcaaacttgcccaagatactgacgtccaggtagcggatatcacaacagatccactgaggtgggaagagtcggtctgcactggaatcacctccgacactctgtgtaagagcaagctcctggcttggcgtgtggtctttgctgccaggggcctcagaatccatgcaagcatcaatttcatagtgaacatacttgcaggtatccatgtggaaacatgtattaaggaaagagcagtcacctaaagactcatcagtgtgtttattgataattcgtctgaagtgcagcttgcgacagggtcg

SEQ ID NO: 341367 - DNA, 1000 bp, Homo Sapiens; identical to SEQ ID NO: 159876

SEQ ID NO: 341368 - DNA, 1000 bp, Homo Sapiens
tttttttttttttttttttttttttttttttttttttttttttttttttttaattaaaaattgttacttacgttgctttatttcagctacaaataaactttatttgatgtaatgtaataaaacattttcaagtttaacaatatgtatctgaccataaataatcatttaaattatgaatataatatatacggtcacttcagcaaatttgcggttcaggaatttgtacaagctttgtctgaaaggacagtgccctcctcccctttcaggaaaggtagcttttccccatgtctggtaagaagcaatgtcaatgggagttagaagaagtccataatccatgtcagaattccactttatcctgtgagaggacagcttgctttattgtaggaaaataatattctctttcagttcactcttatcaaataaagaattgcattcatttttccccttgtaggtacaggtactcttctattctcatctactgtctttctgtctccttagctcttaattactacatagtgccatttaaaaaatatatatctgcaaagagaccttttctgtttcctcacctgcctttcatgtctaccattttttggtgggtaggggtgggaatcagaggacagaattgcttaggcacacatttgatttaagatacatagaacacaaaaacaaattctctagaaggaacagactggtgttctgaagcatttcccaagagtggtccaggtgacctcgcttcacacaatttggtttaacacaatgcagctcaacaagaatgaacatgtttatgccccatctccagaagcatcacatttcatggaaaacccatcattcccacacttcttccacataacatacagttatgggccagcccatgggtgggcccactgcagccttgtagaaaatgagagtcaaaaacatgccaataatcatgttaattacaacgcagttgggtaccacttgagcttcactgcgataaaaatcctcacagaaggcatcccac

SEQ ID NO: 341369 - DNA, 1000 bp, Homo Sapiens
tttttttttttttttttttttcaggttttcatgccaataatttattgaacggaggtctgtacacaggcaaaccttactgtggaaactaagacatcaggagctctctccactcccctggccctccagggtggggtgaggagggagtagaccttgggggcagaggacaggaggggagttacagctgtaggaggggcggggccaggttggacggtgcgaatcgacgttttctttaagaaaaaaattataacaatctatttacacccgggggccagggaagggaagaggagacgggctgggctggttctatttacaagggacacaggaggggagggggtctggaggaggtggaggtctgggggaggggagggggccaagggggtaggaggtcctcatccccccaacaccctgtccttctcttccctccccacaaccagttaaaatcctcttaaaaagcccaccacaggggtgaggctggtgagggagggactggaggtggggacagggactcatttacctctgccctctagtctaggggcccagccagggcaggagcttgatgggctatggccccccttcccagcccctcttggggctcccagatggaagtggaagggtgcttggtggggccctcaggaggagttagtgagggtaggtgtggcatcggtcgactgccagtctgagctggtcggagtctcagttaaagcttgtgaggacggggtgagggtggtagtgcccgctggggacctcaagtgaggagggatgagaatggcgttgagagacggttggatggagagttcaccagcactgaagttgaagagagggggaagtgggcggttgttaggcagctgggttcccagacatcgcagttcatcaaagaagctgtgcgcacaggcctctagtggggagagccttgaggatggggtgtactccagcaggctagagcagagcgcgatggcctctggcggcgttcgagatttgaacacctttgtccaggggtgag

SEQ ID NO: 341370 - DNA, 1000 bp, Homo Sapiens
ttttttgcgggtccccacggtttattctagaagcctatagaagagccacattgagtatttccaaaatcacaaaatgcacaacattcatgtttttaatatgcaacatggaatattatatacagattaaaaccacgacagcaaaaacactcacacggtaccagtttcatatcaaaacaaaacacacaagtgctttttcaatattaaaacgactgtgataaaaacatattaatattttgaaccatgtttacaatagagcaaaattcatattttactaaataacaaatatttaacagcaaaaactttatactaaatatctattttgaattataacaaaaatagtacttataatagtttataaagacagacacaaaattataacatttatgaaaaaaaaggtttgtgtataaaataatattatagccatctgggcagggtcacggtggtgcccagaacacaaacgccagcgcccaacatcgaaagtgcttcaatctgcaagcccgtggcaggaagagttttgtggggttttgtctttttaaggtcaagttgcaatagttagggatgataagtaagaaacatcacccatctaatgctagctgtatgaaacacacacgcacacgcacagacacgggcatctcactagagagctgaaaggagggaccaattacaacacagggatcctgtcagccagccagagctttcttcagctctcttctcactgcctttgagacccagcggggcaaatgatccttctttcctccctcacagggacccccctcagcttttccttctctgccccctaccaggctggccacccccagggaaggcccctgagacctcccagccccatgccccctgcccctcacctggaccagacccagtgggcttgtctgaagttccacttactgctctcctagatactcagtcaaaaacaattggttcagggccagctggatcagtttaaaggaaaatgaacctcccagacactggttttgtgttgggg

SEQ ID NO: 341371 - DNA, 1000 bp, Homo Sapiens
ttttttttttttttttggatttaagagcacttattctttaattcagaaaagactaaagagtctaaggaaaaactctagatcttgtacctgcattacttctacacagatgcaatcttccaaattgtatctgctgacatttaaaaaaaatcaagattttaaatattgtctaaagattttaaatcccagatttagaaaatgacagtttaggactgttggtatgaatcacagaaagtcctctgttggtatgaatcacagaaagtaccgtttatatacagtgaaaagaaaaggtgaggggagagtaagcttaaaggagggttgacctaatctacctttttatatatcctgtcagggaaaagcacactgagttcgaggattgcatagattgtattctaaaataaatcctttaaaaatgcttactttaagtgaaaatagcaaattttgtgtatataatattttcaattggcattataaattcatataatcccatttaaattttatcaagaagtaatctgttaaatatttctgcagtgttttctttctaaaagtaactgacaatttccaaaatgtctttgtccctaaaatttctaggggcagagaaaagcaaaatcaaaaggagttctaagtaaaagaacactcttgggccagcccattacacacacaaaatctggctgggtagcataggggagaggtcttgttcacctttaccaaaggaggtcctttagactggaaacagcaacaattacagcaactaaaaactgcaaataaaaaccaatgaaattgaagtcctggggaatcttcaggaatttctgtaactatgcattgaaagggccattcatcatggtgacagttccagattctagaaatattatagtatttctttatattatagaaagtgacacacacacagtgaggcaagggtaaaaacacattaaaaagcattgataaatttttctcactgacaccagccctgagcaacatttgttccctagttctccttttc

SEQ ID NO: 341372 - DNA, 1000 bp, Homo Sapiens
ttttttttttttttttttttttttttttttttttttttttttttttttttttttttttttttttttttaagactcaatatatgcatttatttaaaaatataaatatggaaaaataatttaaaagactagattgaatgtccctagattttcacacattcaaagactacattttttcaagagatggaatgggacacaaagcaagaatgaacggttctatactctcgaagaaagaaacccgggacatggtggggatccctggcctaggtgttcaaggtggtggcatcctgaacttccagcagttccctagcccggttccactaatgtcattccgcggctggagttaaagaagcaaacggtctacgtcaccaagaccatgagacggtttcaaaaatggtctacgtcaccaagaccatgagatggtttcacacaataggcttggcctatgagaggaggggaagcagcttcttactcagctggggaggcccttatactggggtgcaggcctcctcgccccatggcaggcgacttgcagccaagtggaggggaaccgtgccacgtcctggaggctgtgtggcttcctcagctgggctctggggcccactcagaggtctgaggccccaggggtcacctagcccagatccagccttgctctggatacccgtgtgacatggggtggtgtgtgtttgaggggctgccaggaggacacagatggacgcctgcttcgggtgtggagggagaggctggtgcagagcacgggggtgttggggggctctgtgactgcccccagggcacaggagctgctcaggaacggattctgacgtctgcccccgagagtggctggggtccgtggtgctgctgggcgggtccaaaccctgccacccatgctgtatggacctgccatggagacgggggtccaagccctgcccacccacaccgtgtggacctgccacagaggacaggctcgctcagggttggcttccttcctgggacgctggcacag

SEQ ID NO: 341373 - DNA, 1000 bp, Homo Sapiens
tcactaaatagttacaacttcaaaagccggggaagtgccttcaaatgaaagtatgacagcaggcttcagaatgtcctgcttccgattgtgtccaaaatatcttattctgtagattccaggctgggcagtgtctggaatatgccattccactgttgcattactcagacccaggagtcccttgtgccaataaaaacgagtctcccaggaggcatcattacacactatctgccacgatgttgaagtagcctcatatttctccacagtgaggaaggtctgatgggtctggttttgtactgaattcttcgggttagcacctacaaatataacttcagcaacttcccccactctgtattcaggttttgctggctgcaggacatccccgaaagttctgccttttggtgctctatccacaatactaggaattaatggaactattaattgtttgaaaaagggaggttctggacctctgctcaggttggctaccgtgtccgtagcaatagccttagcaaggtttctgaagagctgaatgtaagcagataatgcgtgcggtccataaattgtcgatgctgcctcatatcgctgagcctggtattcttcataagtggtaatgtaatgtgtatagacgttgcatagacctgaaataacaacagtcatgttctgcatcccatgagatgcaaattctgcttgaactgcctctcgaagtcttcgtccagacatggtcgtaaactccccggggatggcagttatggccaaggacccaagggtaataatctgaacatcaacaatgtctggatgccaggggtgaggttttgatagttctccggtgtgaagaaggatgggctttggtttatgacattctttaatttcttcagatggctttcccaggatctggtcccgaatggtgtcccaaaatggatccccttctgttttcccctgtgtaaaattgaggcctccaactccatcaatagtgccagccgcaaaactgtagcccaatgctggt

SEQ ID NO: 341374 - DNA, 1000 bp, Homo Sapiens
tttctcttttcatttttaattttattttttaaaaaagacattgaggttatggtaagaaattatgaagttacatttttttaatctgtcaattgctacagtagtggaataaataaataagttttttaaagttcaatgtttatagacatacttataaaaaaatgactgaattagaagacattaaataatgttgatacacaccaggaagggatttaggcaaggaaaggcacatcatattaccacaagaaataaagaccatagttggaggttaatggacagccagaactttagatcttgtggtaggtttcccagctctggagggtcattatggtgaaacgttctttatagtactgggctggaataaataaatagcagttgaggaattttaccttgtaactgtaatataatgtaaaaagaaagcacacttttaataaccctggtatgtgaagaggaaagaaaaaaaatccaaaacaatttggtggtactgaaaatcttacggagagttaaaaataatactaatcctcgcccggctgaactggaattcttgcagttacaaagttaaaatttcaagtaaacactgtatttttcactttttgtagacagacacagtgcagatacaaacagctgccatatctcacctcagatgaagctatgtgtcaatgcttagggaaaatgatcttagataatttcccaattttatagagcttaaatctttgaaaacagcactaatactgctggttgactggctatctacaacagcaaagtgaacataaagttttgacgatgagaggtttcccaaagaaactaatatagagtttttagttgaacagatacagttactttagttttactgaaaagtctaacagacattagcacaacttgttttcggtcacattcctactcccaattttctttcataaatttgtgtcaagtctctatccatttctttctgtctagacctagattagtttatttgaaagatggcatcgcttaaagtaaacca

SEQ ID NO: 341375 - DNA, 1000 bp, Homo Sapiens
gtatttcgtgttctttactttgaaagcttcataaccatgagcaggtaccatgagagggaaagaaaagaggtggtaagaaaaaagaacaaaatcaatcaacactgtaagcaaccaacactgctttgggccaggcccctaacacatttttctgctaggactggcatagtaccttccagctggttgctcactctcagtctctatttctagtcaaggtcaaattcccatgaggccatctccttaatatttaccccacatcaatcatggtgggatcagtaataacagcattgattgttcttacaatgttgaacaaaagaaaaaagggaaagcctggagtcggggtgggtggggagggaagccccaggtggaacgtcggccctgagacaatcccctggccctacagttccaggtccaggttagccgttagtccaaccaggtcccttccaggaggacaggcgtgggagtgcagaggctgcctctggcccaaaacgagaactggtagagctggcgctgagatgctggttcccagcttttgagtgcctggaagaccagatgttggtaagaggaccatccagggccctgggacactgccaaggggagaaaatgattttctccaggcccctcaaccacaaaactgcagccccaaggaaatgaagcgttcctggtagacccagacaaggatgttagaggtgatgggagccagaagcatctcaaagacttgcagtccacagacttcggctggagagatccgaggcagtaggctgaatttggtcactaggatcttctatacaaccaattcctccagaagtctggctgccaaaactcctccgtgggaagcaccaggaaaccacttgcattcctgggggcgtgaggctgtgtgtctgtctcagggcaccaggggcagggtgtgcgtgttttgggtggttcgcatctctgtctctcctgggtcttcacagccagttccaggcaggggaccggatggcggtggctgctgctttgaata

SEQ ID NO: 341376 - DNA, 1000 bp, Homo Sapiens; identical to SEQ ID NO: 159877

SEQ ID NO: 341377 - DNA, 1000 bp, Homo Sapiens; identical to SEQ ID NO: 159878

SEQ ID NO: 341378 - DNA, 1000 bp, Homo Sapiens
ttttttttggttgaaacccagtttattagaccagaggcatgcgtcacccagagccctgcctgctgttcccctatccaatgcacactttttggcctcattcctgcttccctctggggaggtatgatctctgaggaaactcttaggaaccaagagattccaaagatcctacagccttactctccagctccaggccaatgcagctgctcacaggtcctgttctgggattgaagaccaagacacagctagggaaggaaggcctgaagaggggttggggctcaggcctggaaggagtgtctggtggagggagggggggcaggccctccacctcacttgtctctcattaagatagggtgagacaacagcagagctttcaactcctcctctaggcctctctttcctcccaaacccacctcaccagaaaataaaagtggtgggcttgggtatcaggtgaggaaagggggctgggcacccagaaggaggaaaggccactgactgaggacctcagcttctgcctgtcagcatcccactgccccaacttcaggagtcgccaatccccagctcccttctgtctctgacacacttggcttagtgtccagggtagacctccatcccctgggtgggggctatctctacagcaaccccttccctggggatgccactgtcagctgggcagagggcaatgggataggaggagcaggggaagagaatgttaaggctgcagggagggccgagggtgcccgggttgggggagagggtgaggccagaaagaggcagagcttgtgattcacagcttcctttgtcgccactgagacagtgcaaaggttacaatgcgcgtgtcgtctccttgtgcttctcagagggatgtgtgtacacagtacagacaccaggggagagagtccaactctttatacaggcgaaggcattcagagaccagggagggagtagaaacatagaaggtggaacttggggtgggagaatggttctcagagacaagagggga

SEQ ID NO: 341379 - DNA, 1000 bp, Homo Sapiens; identical to SEQ ID NO: 159879

SEQ ID NO: 341380 - DNA, 1000 bp, Homo Sapiens; identical to SEQ ID NO: 159880

SEQ ID NO: 341381 - DNA, 1000 bp, Homo Sapiens
tttttttttttttttttttttaattacttctttttattagacagttcaaattaagcttgaagaacaggaagcaatacaactcaactattgaaatacaaatagttgagcttaatttattcaacaaaatttacccaatatatcagtgtacaaagcatgctgctgggctgggcatcaggcgtggcacagcaaacaagacagactgactcaaccctcagggggcttacattctaatgcagaaagcagataatttcagtttggatacataatacaaattatcaaagcaaggcgcaaagtattttaaaaataaggggtttgggaggccaagatctgacctattctgtagaaggactccttaggaaagtaacagttgagccaatctaaggatgctagatattcagtaggtcagtggaaaaaatcagtggttctcactgtggtcagtgggttattggtggtttcataataactggggactactcccagcactgagtggatgcagccagggagaacgatgtcctgcagtgtgtgggttagtgccacacaacgaagaattattctgtaccctgtacgactgtctaatgtcctgctggacatttaggtaggacctacagcttgtccgagagagtaactcatttgttttctctgagacaatctgtaatttgtcttgtcctattatccttaagtaaggtaatttcgctctttcttttcccatatacagattatgtacatagtctgttttgtctttaccctaacactggttttcattctagtgtcccccacccgtctagtttcattttcctgtacttgtttacaggaagtagcctctaatcggctcttaaatccaaacctactcattacaaggaagagtaaacatctgtctgtttcaaacagcgtagtcatgcctgagcgtttacataatgaaattcatcttcttttcattataaatttcttcttttctatttctccttaataagagagttagggcattaaattgattttttta

SEQ ID NO: 341382 - DNA, 1000 bp, Homo Sapiens
ttttttttttttttttttttaaatactcaatggtcatttattatataacttaaactcattcaatacattaaataactgttttaaataattacaattttttaaaattaaagaatatgtcactgatcttaacgagacttccaaatcgtctcagcaggggctccagacttccccagcaggcggcaggtttcctgtcatgctttcgccttccttctcatatacaccagtgctagagttcatcatgtgtcaaaattgtatcttgcttcttgttttcaagatgatctaatagttgtcttatctcagcatcatactccacccattctgggacaattctggcagcagcttttagtttggattcttttgttttgggattattgcacagatcaattgttttggctctttgtttggattcatcatcacaccaggtttcacaccacagccagtcttgaggaagagacttaatggcgacttggtaaatcatattattggggagatcctgatctaggtttgaaagactgtttggatcttgactgagagcttgatactggctcctgagcctgtcacctgctccaattctcctgaacttcttgagatccactacatataaagcactgatatggtatttccgtcttaaaagatgtgatgcccagtatcctgttttccagaaacgatatccatccatttccctgcggctatcacaaaatggagtatacccataaggagctccatccagatcgaaatctcgaagttcttttagatcatgtctcacaatctggtcagcatcaacaaaaatgattttgtccactgctagtgggaaaagaacatcaaggaaaagaattttgtaaccccaaataatcctctgtctttcagtctgttgacgaagccaacggggccacctatattgaactagttcatatcggaatccatactctttagccatgtgaggaattacttctttaaatgtcggtgagagataattttttagcaaccagaatttcactgg

SEQ ID NO: 341383 - DNA, 1000 bp, Homo Sapiens; identical to SEQ ID NO: 159881

SEQ ID NO: 341384 - DNA, 1000 bp, Homo Sapiens
tttttttttttttttttatgcttacttgtttatttatattatccagaccataaactctcaaaggcaagggtttcgcttgactactgattcccaagtgccaagaaatgtacccagcacatgcagcgccctcaatcaatatttgttgtggtgtgacttacaaagcatcagtctcaatgctcattagcacaaaattggtctcacagaagcactttgtgtttttttggtggagggttaattagtccactagttgacaagtgagtcattaaggatgggaactttattagagcagtgtggatctgttcaacaaggccctggtgcaccacgctacaaaccactgtcgaaatgaggttgctaagagtcaccttgtggagggagagctgcaggtcccatctcatccagagctgctttgatctgaggtggggccctggagatgaacgaaagaaaggtggggagtgctgtgtattttttccccacaaatccaccagggctcattgtcagatcctgggctttcctttccacatcatttttagggactgaggccagttttgcatgattcagtgaccaggcatgtggcctgactgtaggtggcaggtggggatggtgcaagctgacaggttgagtggccatggaccctgttcaggtaatcttgggggaaggtgataggagagaagtgggtgtgggaaagggatgagaatttgataaagccaggttaccaacagggaacctctgagcaggccaggcagggaggatctgggaacaatcgagtggaagagtggtgatgtggatctggaggccagctgtgctgatcctttgtccaaggtgaagtgattgcccagggaactgggggagaagagggaaggtccttggacagggctgacatcctaggtggggagattgaagccaccctggggaaaatagtacttcaaacccacccctgtttcttcaatacctctttcctcgctgttatcaagactggattgaggccccagaaaaaatccag

SEQ ID NO: 341385 - DNA, 1000 bp, Homo Sapiens; identical to SEQ ID NO: 159882

SEQ ID NO: 341386 - DNA, 1000 bp, Homo Sapiens
tttttttttttttttttcaaagagacacattaatataatttattaaattcgccatacaaagaatatgccacagacaacaatatcagaaagggaagaaacatggatatcacctgctctgaccccctcattttacaaatgagggaactccctgaaatcccagagcattgttatggacaaagccagaatgtgagcccagtcttgagacacagaaacacacagacttaaggattctggctgcgtgagccacatagagcctaaacacttaatccacatttgttttgaatttttctgattcctatagtaccatactctgatgcctatctacttctcaaggctgtaggaagagccctaaagaaaaacaccatgggccgggcacagtagctcaagcctataatcctagcactttgggaagccgaggtgggtggatcacctgaggtcaggaattcgagaccagcctagccagtatggtgaaaccccatctctactaaaaatacaaaaatcagccaggcgtggtggcacacctgtagtcccagctactcgggaggctgaggcagaagaatcgcttaaatccgggaggcagaggttgcagtgagctgagatcgcgctactgcactccagcctgggtgacagagtgagactctgtctcagaaaaaaaaaaacaataaaaaaagaaaaccatgatgacctgcagggtcattcagagccaggataaaagaccaattatggagcaaggggttcagaagggctagtgaagaactcatctgggtcccagaagagtcctgattgccctctttctccaaacaacatatactctgaccccaaagcctcagggaaagtagactcaccttccttagctgcagagcaagtttgaaggagaaagagagaagaaacaggcagaggaaagggagagaaagattcataatagtgtcactctgacattaacaagcctaatgggaacagttttcccggtttcaagcaaatccaaatactgcaagagaag

SEQ ID NO: 341387 - DNA, 1000 bp, Homo Sapiens; identical to SEQ ID NO: 159883

SEQ ID NO: 341388 - DNA, 1000 bp, Homo Sapiens; identical to SEQ ID NO: 159885

SEQ ID NO: 341389 - DNA, 1000 bp, Homo Sapiens
tttttttttttctagtggtatccacacatactttattagttttatctttgttcagcccaccaacaaaaatttggaaagattgctacacatgacagagcgacagtaccctagggtgacatgacagcccatatatcagttctctgtttcacattaaaaagttaccattcattcggtccaaacatccacccaatccacacgttctctcaaagactagcatggttctgtccaataccttgctctaattccaattcattcgttctcataacttatttgaaaaggcacatttggtcagtctgatgtcattcttagggcatctttgctctctcctggccattactgcttgcttttatgtactgaaaagtcatccattgaatggtctgttcctgaatgtcgccacaaagcagtctgtaaaacccactcgctttccctccttaaattacctccctccaggtctgtttcctcaaagatcatcccttagtgggtcacagtaatcatgaaccctgggtacaattgatacaggctgagaagtaagaattcactgttcacttagagcaactcattccctgacctgaaccgggtgtgttccacccttgcccatggttagatctctttccttgatagaacaagcaaaagaggggctgatccatctcccgtgaacatctgttgactgtgggcggcctgggccagccttgctgtgtttgcctcagatgcgagtaaggaagctccagttgtagccttggcacagctgaggccatgccattgctacccggaagctggctctgcagcgttgtgacttagacactttacaagtctgagccatcccgtactagttcatcaactttccttcctcatgatctgcaaagatacagagagaatggcattccaaaattccatggatgacttttctgaatgtcctagaatgtttggcaaagatctggctaaaactagtactatggaatagaaaaggaaaagtgacatttgtgtaatttattttggaaat

SEQ ID NO: 341390 - DNA, 1000 bp, Homo Sapiens
gtgggtgggcccgtctggccagatggtattttggctgcatagcctttacacacacacacacacacgtgttgctagaacgctgaacatggaccacacacccacccagcatccccaatcccaaatgcagagtagccaggctccagacataaattaaaaaataaaataaaataaaataaaaaagagttggtctctgggaaggagagctcatgcagagatgaagacagaagcccttgggagccaggaccaagaagaaggagaaatccctgccccttccctcaggatccccactccctggtggcctctgccctaagacaggatcattaacactaaccatcaggcctctagcccctttaatgtccagtctcccaagctatttgattttggctccagccctcatttttccaccacagcccaagggaatagcatcctagggggtaggaaggggaggaggtgggtgcagcctgcaggtctttagctggtttctcctggctctaggtctgggtcaggaggccccacgcactccttgctgagccgcacaatttcctgggacagaacttccatatccttgtgcaagtgcatattcttggtgagctgctcctccagcatgttctgcagcttcttgttcatctcccgaaggttctcgtcgcctggcttcactaggtctctcaggacgctgcccagcccgctgcggtctgtgtggcctgctgccacagacacatcgatccggctgtccatgacgtaggtctcaatgatggcgctcttccggcagaggtcctctgccatggaagcactgctcacttccaggtgcttcaccttctcctccagcatccatttctcctgctgtgtctctgccagccgctgaaagagctcagccacttcctcatctgacagctctgctggccgagggggctgggcttgagggctgctggataaggacctggctggaacagccgagctctccttttcccgcaagatctcccggtagctgaaggaggagatg

SEQ ID NO: 341391 - DNA, 1000 bp, Homo Sapiens
tttttttttttttttttgcatttatttaaaatttatttgttcatagctatacatatattatacatgtatacctgctcacagcataaagtatttcatgacatacttgtaagagtcagtgttctatgaattcactagagaagttacagcattttgattatgatacacgaaaagaaacccaagtcatttagcttaactccttaatttcataaaccagaaaactaaaatccaagatagattgggtgacttggtctagatcacaaaccaaagttagccataattcggtagtgtagtgcccggtccaaaacctcatagataatcttataatcaatggactctttctgaatgctagtcaaaatgtccttttgtgtgaattttaatgtaccgtcatcaactgcatgatattcttccccatacacaaagtgttatctttttgttgtccatttcagaattttccatgttaatattaaagttctaggaaaaaaggctaagaatcactgcacatttattgagtatctcagtgtgcatcataccatttggtcatttgaggttgcaacaagtaaaaaacaaacataaaacccttaaattaaaataaaaacaaaaaactttgccctgacaatgttacagaattaacatccataaatttacttttcttgaaaaatttattttctttaatttcgtttgtttcctgttacataatttatatttaaatttacatttatttatccagaaactatgtccaaattttatgtcctcttttctgttatcctggagtttggtgaagaaatctgtacttaatttagaaaagaaatccctctaactgacaatattgttagctaactatatatttcttaggcccatgtcaaatatcattgcttattttaataaagattgtttagttagactaagaaaatagtaaataataagggatggcatccgttaagtataaacactggattatttttcataacataacaggtcaacaatatcgttttgaggctga

SEQ ID NO: 341392 - DNA, 1000 bp, Homo Sapiens; identical to SEQ ID NO: 159887

SEQ ID NO: 341393 - DNA, 1000 bp, Homo Sapiens
tttttttttttttttttttttttttttttttttttttttttttttttttttttttttttttttttttttttttttttttttttttttttcaatttgttaaatgaaattgtattttgcccacggctgcttctgtttgatccctggggacagaggggagcaagggaggggagtggcagggggaggcccaggtgtggggctggagggggtactggcggcagcgggaggcagtaggcttgggcaggggaggagtgcgctgcgcctcaggaggcaaaggtgccccagcctgggcaggccctggaccagcccaagctgagcagcgccgcccctgggctggctctcagagcctgggctaacgtggagcccgccacgtcgcttggcactcagaggcccctgcttcttgttggctcacgtaggccacgctcaacacgtagcctgtgccacacccttcgaggcccgggtaggagggcagaggggctggtctgggctcttggtggacccctgctggtgctgcctgcctcctcctcccccacgtgggactcaagccaagggtcagaggcgcttccgctgctgggagcaagggaggagagtaggggtggagcagcctcccctctgcgtgggaacccggcctgtgtaagcagtagcgggacagggtggccggagtgatgccttggggcctgcggggaggagtggaagaagtggatgggctggctggctgtggcttgcatggcactggcagcccagcctggcttagaagtctggccggtccttcttcagcttcttatagtcagtggaaactgcaaggaacttgtattggtcattggggctcaggcggttccagggctccgggttgttctttctgtcccagcagacgtcggggctgcgaagggcgagtcgcagcaagtaaagcgcagcgctgcccatgcccaggcagattaagccgatcatcgggatgatccccggatgtcttttgatctgccggtagaagcgggccccaagactg

SEQ ID NO: 341394 - DNA, 1000 bp, Homo Sapiens
ttttttttttttttttttacatgagatattcaacatactttattataaaataggctttgtattagacgattttgcccaactgtaggctaatgtagtgttcggagcccttttaaggtaggctaagctatgatgtttgacttttggtattttcaactcacagtgggcttatctggacctaaacccatcataagttgagaagcatctgtatacccaacattggttatgtatactttcattaaatactcatttgaaaaataaagctttcttcacattaaccctgtgatgtaggtctttaatttttgaaactgcaagaaactgcaaaacaggttccaagatgagctcttactgatgtatatggtataatacggtatggccaaaaccactgcttatgacctctcaaatattcacacatcaaggccaggcgcagtggcttatgcctgtaatcccagcactttgggaggctgaggcggacggatcccttgaggccaggagttcaagaccagcctggtcaacatggcgaaaccccatctctacaaaaaatacaaaaaattagccaggcatggtggtgcatacctgtagtcccagctactagggaggctgaagcaggaggatcacttgaactcaggaggcagaggctgcagtgagctgagattgcaccactgcactctagcctgggtgacaaagtgagaccctgtctgccaacaaacaaatattcacacatcacccagtattaaggaagggtcatcattcagagaggtttttctgagataatctattaaattacaatttataaagaaatgtttataaatttgtatgaagttataaatttataaatataaaagtataaatccatatagagctgtttaaacaagaagtttccctctgagaggattacagactatgcaatctgctacatgtgatttcagataaatgataaattatacctaatgtgttaagtataacaatcaatttttgatatttaaattatcctaaaacctgt

SEQ ID NO: 341395 - DNA, 1000 bp, Homo Sapiens
ttttttttttttttttgtttgccatttatttttattgcatttttaatggagaaataagtcatctgttttcaaaacagtgcttgaatataccaggagtacagataccataaaacaaagcaaactccactcactaggtacatcacatgaaaaaatggtctgacattcaggtaataaaaattagaaataaaaagtcccaaggttccagcttggtaaaacagacacagttacaggtaatgtttaataaactaatttttttcccaatgtgtaaacaaaatgaccagactaaatttgtgcctggccatttcaacctaacgccatagccattcaaaatacagatattgtgcacacttcacccgatttattattgtggtgaaacggcaaagatgtgagaaaaagaaatactgtgtactagatatcagaaagtaatggtgaaagaaaagtctctacagcataaaaggacatgactatattccaactttggaaaattaatgcaggacaggaaaagagtttaagtaattgcagtttaacatgaaaagtgcagagttagaggagggacgggaggggttaaagcaaggctaattggaaagcctgttaagtttgctgtctagattaagaaagactcaactttcattcattcacatctgttgcccctcacatttcctaatcatagatgctctactgcttaattatgagattttttttaacttaaagtattgctgatcttttgtagactaaaagagcagaaagccagtaagatgtcaagtgcttgctagaaattacttttttatgtttctacatgtaaaatttagagatgaattttgataaatcgtttaaaaataaaagtgtttaaaattcttgaagaaaatgcctttttgcttatgtgtgcaattggaaattaactttcctataaggaggtattctgtggaatgaacaaaacttctcatatgcagtgatcaaatggtcatccaagatcagaaacatatctcatagacattacatt

SEQ ID NO: 341396 - DNA, 1000 bp, Homo Sapiens; identical to SEQ ID NO: 159888

SEQ ID NO: 341397 - DNA, 1000 bp, Homo Sapiens
tttttttttttttttttttttttttttttttttttttttttttttttttttttttttttttttttttttttttcctattaatattttattttattttccttaaagcagacataaaattacatttggaagaaaataactttgatgtattatttaaaccttctaggataaaaatacatgcaagttcttctaatcattcagaactaagaagacatatgaggtgtaaaattgatatttatttttgttattctcaatggaagatcagagttatagtatgcttctcagaaactattgtaacagtttacttcatggtacaaaattgccatagaaatttttcctggtgaatggcagacggggcagctaatatttccatgcttatttctcaaatgtagaattcaaaagagaggtgttgacagaaaaaatacctaacacctgcaatgggaatacgttagaaatgtagtacttttatttttcatgatgttaatgattctaatctaaattaatcaagctaattaatgtgtcacagtaagcactgatgcaaacagatttcattaataagttaatgtaagtatatgaaaactctatctctaaattgattcctttgaaaaatttctgtaagaaccatagattcatcagaaatgctcacaggacagatctatacatgttacaaatggacaaactaataaataaataacataaaaaatagtcaagggtagatgtcctggcttcactaccaaatcatttagtagtgtcaggcttggctgtgctcactgttactgtgttactgctctatactttcaaattatttagaagagtagggatattctaactagcaaatgtcaagtcctgtaggagcgttgcttctgaactaagcttaaacaaatattcaatgcttaattttgattaggaagtgttgctgatattgtggttttgctttgtaacctgatttctaccaaaaggattaaaagaaaaaaaaaggtgaaagtagagaatagggatgttt

SEQ ID NO: 341398 - DNA, 1000 bp, Homo Sapiens; identical to SEQ ID NO: 159889

SEQ ID NO: 341399 - DNA, 1000 bp, Homo Sapiens
ttttttttttttttttttttgttttaactttttattaaaatgcttaggatacagattgactttctttcgtaaatgactgttttacttttcctgaagtaggacatatatgcactctgataaaacagaatgagaagtcataattcatgggaattcctatacaaggtgctgatcctgtgtttggagctgagctcctcacagcagcttctttcagctatcttataggaatagtgttccgtggggcaagaaatacattggttctaactgattttcaatcccctttctccagtggaataaaccactttcacaaagagctgccctatgtataacccacagatttctagcttgcaacaaagtgacaagggacaaataggggaaaaaaaaaattaagaaaactaacactgaagtaatcatacttctcatgtctccgaacagagaagtatgggggacctttaaccaaaggaaattaaaaatatgcaagttatattacctagttcattcactgttagctagatttgttcacttaaggctttaacccctttccaaaccaacaactttgtcttaatccagctatgtttgctaataaacgaaatgcatgcacttcccacatatatacttcactgagcctctgcattcagtacctggcagtgaaaaagtatgctttccccacaagtcagtactggagaataaaaatgagaactccaactaaagaacaatgcctccttcaccccagtaatgttatccacattttccctaccctcacattagaataaagacatcctcccaacttttcatctcctatctccaatctgttcataggagatatatcttttgatcttttattataagggtagaatatagattaagatcatcaaaatccaatttcacatgtggcactaggaaaatggaatgctataaaattaatccccatcacccaagtagggatgctggtgcttttatactgagtctttactgccaataagtgatgctgcctccaaaggaa

SEQ ID NO: 341400 - DNA, 1000 bp, Homo Sapiens; identical to SEQ ID NO: 159890

SEQ ID NO: 341401 - DNA, 1000 bp, Homo Sapiens
ttttttttttttttttttaattttaaagtgtggttttattaatgcacttcagggtaagtgccagtcttattttagcttcttctggaagaaatactaccaattataaataatcacagcaacattttcattagacaaaaactgtgtgtgtgggtgtggtaggggggtatcatttatagcatactgcaaatataaactcaattcttgagctatattaacaacactgagcaacaatatttctttctaaaattttcttttctttaaggcagatctgtttattactaacatggtgcagtgtagttttagtaaatttactattttagtttctcagtgacaataacacagatggtcagaaaacaggcaacaaaatctcttttctagttcctctacctggccaccatttaaaaaacacaagttcctcatatatatagacatatttatatattactgtatcaaaacacattttaacacacttcacagctcatttaaagcttcagtttatagtcattcatgtgaaaggtttctataaggaatgttcacttagaattcctcactgggattccagtgttctatgtcagaaatgcagaagtcctttttcagtgcagtgctagacatattacctttgttcattcatgattttctttcaaggatttcctaacttcacttttgtatcttcatttttgtttgcttgactaatttcctttagtatacgttcaggtaaggtaggttgatatctgtataaataaccatatggacgaagatgataaacgaggtattctaactcatacatggttgtagaatcaacatagtgaaaagaaactgcaagatcagagcagcaaccaggaccctctacaggaggataatagttgtaattccagtaccaaaacgttctaggtagataacctttaattaaatggtgttctggcacaaagggatgaaaagtttcttttccaatggtatctctggaatctcctgcttctacattcataatttccatgcatct

SEQ ID NO: 341402 - DNA, 1000 bp, Homo Sapiens; identical to SEQ ID NO: 159891

SEQ ID NO: 341403 - DNA, 1000 bp, Homo Sapiens
tttttttttttttttttgcattcaaaatcctgttttatttacaaagaactaattcaaacaaattctcagaaacacacctattttcaaaatgcaggtgattacatttgctttagttttccatctgctggggccatttactccttgcctggagggcagagtcccatcctttcttagaagcctaatttttaccaccccccaccacaccataagttcagccaacagtgcacatttagaactgtggtattatcgatttcactttcacatttccccaaccacagaattaatgccatcaggttgtactgaatgtgtaggcattgatgaacattggatttgggatatatcttagccctcctggatttcttgtatccaccttcggctccacttcttattttcaagtcaattgctatttgcttttctgtctaaattaatttaactgtgattggagtattgttaaggcttatggtttctttctaattcatttcagatattacttaataacaaactgtgatttatgtttttgttcatttcttctatttttttttttgaattcataagcctaaggggccttgagattagaataatctaatctgtgtccttttgccaggcgagtgagtccatttctgatagaaaaaccatttttgtgtgtataggatctatggtgttttttatatctagagagaaaagtagataataattagataatcctcaataatcatattcacttggaaggtataaattgaaaggcaaatgatgttttatgactcagactatgagtagtctataaaagcattaacaatttttagaagagacttctttctgtcgaccaatgctcatcaagagactcctagatataggctgggcctggtggctcacacctgtaatcccagcactttgggaggctgaggcgggcggatcacttgaagtcaagagtttgagaccagcctggccaacatggtgaaacctcatctctactaaaaatataaaaattggccagtcatgg

SEQ ID NO: 341404 - DNA, 1000 bp, Homo Sapiens
tttttttttttttttttttttaccagcactatgaatgattaaaaatacaatatttttcttactaagtaggactaaacattctaatcccctactggaaaacaaaaaacaaaaaacaaaaactggaaaacttttcagaaagtcagcagtggtaacaagtcagtaagtggaagaactggttcaaagtttaagaattcagtaagataaggtatataggagctgtcagatcttcttttgcccacgtataaccatttctgacagacagccctaaacactagctgagagcttgactgcacaggaccacggctagtgttggaaataaagactgagccggacttgacatacacaactccggacagatgggaccctggaatggggctgctccatcaggccacagcttccagaaagagagcatccatgatctctgaagagcctcttgggcagcttggcccctggttataactatgattcattcattaagaaatgacaaaacaccccacagatgtatttggaccaagtaagcacaataaaagagctaaatcacggcttcttctagggcaaaatattatctggggaaagattacttgcttctgataattaaatagctaagaggaaccgttagtgccttttctctgctcagaatatcagaacaggaacagactgtggatatcctccaattccctctgacaatgagggttagagagaggtgcctagcagtagaaagcagcaaagccagattgtcccaagtccctacgaagaaggaaaaaatatcatagaaaattaataagatgcaagaataagtgttacagctctagctcttttagaatttgtccagcaggtcttctagacttcactgaactgccccccaccccccccgcccacacaccaaaaaagatacaagaatgtaagcccagatgtggtgtggtatctggcataagccaatgttctctgggttctaggtacccctctcccctcccccacccccaccccctctgaccagggg

SEQ ID NO: 341405 - DNA, 1000 bp, Homo Sapiens
ttttttttaataattacttccagtttaatttatagactatataatttgtcatgaaacaaacagttttcattttgacataatttctgacaactcagtgacataaatatatccatgtgagctcctattttgtttgacatgctcacttacctcacatcagttctgccgatagatttggtaagtggtgcttttagtttccttaatgcacccctcaggatttcatgcaaatgaaattattatgacaaatttttctatagccatttctaacacagggaactcataaagaaatcaaatgtctgcacttcactgtgaaaacactaaactctcagccataatgagactccacacattatcagaaaccccaaggcataccaaaaagacaaggtcaacggagacagtctttggaaggggaggtcataaatgttgaatctggcaaatcataaatttcttgtcttaacattgccgcatttactatcatctcatttgaaagctgatgtgtttgggctgggtgatggcagaggggtgggagttgggggatgctggctctgaaatgccagagaggcattaagaactctggaagcatctggctactggtagacattttacacagatagcaatttctgaccaatccatttcaatgatttctaacccatactcaactatccagaggatactgttttaagaacattattgtaaactgatactctctattcatttacaaaattcattcattgcatactttttgtttaatagcttggattcagtgttacagatttgattgacccaagtgaaaaaatactgacactaatcatttttaagtgctatttcagaagaatatgcgcaatgtttctaagttattgtgactttgtgactgtcgtagctttaaattataatactaatatcctactctgagaaatgtgtaagacacaggtctaacaaacaactacattaacctcgggcaacaaccatcatggagctgctgtaacacaggcatggtggtggc

SEQ ID NO: 341406 - DNA, 1000 bp, Homo Sapiens
ggcttccaataaaaaataattcaactttattagtatgaaatattttgagataattagtgacccaaatgcatgattctccaatatgaaaggtgttcagcataagcatacaatcatttagtaaaactgctctttatgagacccccagaaaagctggaggcacttcctctttttggtggagagagaagacactacttaactggccatttccttgctggagtttattccgattcccttttgtctgattcttcctcctcaaactcgactaaaggagtgtgtctgttggcctgagcaccttctctgtagaacactttctttactgtgccatcctttggagactttatggtatgctccatcttcatggcgatcataaccatgagggaatctcccgctttcactttgtctccagctttgacaaacaccttttcaatggttccagtcataggagctaaggggccgccctgagtttcttgtgagctcacagaagataagtatttggggactggaatgtcaatctcaatacttccttccttggaaaataggtaaatagtgttttccaggataatcagcttcgctttactagcaactccattaacagaacatttcaggtaagtgcagtctccctcgctgtaaagattaccaaggacttggaaagttttatcttcaatctgcatgctataagacccatcatggttatacgttacagctatggctacattgtttttaccatctttaagagtcatgtttctggtatacgagatattcagtcttcttccactgctagacgaaaatggagagaattgatcatgtgcctgaagagtgaaagtgtcggtcatggctttctccttgaggatgagacccagggctgcctggcataaagactctttggctgcagccttccgactgagcaacaactgtttgtggtgttgagggatgaaatcagtgtgcacgttcccagcttcaaactctgggtggccagacaggttgagtaagaagtcaatgt

SEQ ID NO: 341407 - DNA, 1000 bp, Homo Sapiens
ttttttttttttttttttaataataatcaagtttattgcgaaaattatgacaattgatacagagacatgaagtgagcacatgcctttgggaagaaagatgccagcagatttgctcaacagcattgccacaaactttcaatttttttaaaagtgcaatatttgagaagcacaataaaattcagcacaataaaacaagttatgcctgtagactgctgccaagggacactgatgttggcttctcacatcatataaagtagaacagcacgtacatgtcttccttctgtggctcacagtggccattggtagtaggagtgacagcctgactcggaacgtagatgactcaggacgaaccatttccattaatggaaattaatcaaggtataggtgccatgcctttccagtcacgttcttggcatgaactagtgaaggggcatgaggcagttaggatagtggaaagataactaaaaatcaggcagtcttgggttttgaaaccagatctaactctcagttttcacgtttattaaaaaaaaaaaaactagcaatgggtacatgagttgtaagagccattctacctctctaatatcatatgagaaggcatacattatgggatgttcctctctgaagttttgaggcatagaggagagtcagctctgaaagaattcaggttttgttaaagtggaagctttgatagtttgttcttgacatctgttcactagagagggctgttgggaggtgagagttgtgcatggatgactgacatgggaattggggacctatatcttcggtcagctccacaaagtggcattctgtcaggaagatgttccgctgggcaggtggcaactgtgggtcatgctgggagtgccactgtttgtggaaagaagagatcacattctggaatgctgcctggaagcggcgagacagtaggttatagataatggggttgacagctgagctcaggtagaagaagacacctgacaccacatggacgaggttgaacaca

SEQ ID NO: 341408 - DNA, 1000 bp, Homo Sapiens
tttttttttttttttttttttttttttttttggctgaaattgaagctttttattttggatatacataccactattactgttttaaagacatttttatgtagtgatactttgtattatggactctataaagttctatactgtaatcaagacatttatataaagtgacactttgggattatttggcctcataagctagatgccagtgaaattggcatacacatcaatagacatgtttacacttccagtgttagggtttttgtttattccagttgtacttcctttggcagacggctattatgttttactttagtgccgtattgtggatgccagagaacttgcatttgccagggaataatctcctgagatgctatattatgaagtagaatggtgtagtctaattcaataaagtcatcatttctttgcacttgcttgacagtttgaatttttaccattttataccatgtgtcttcagtagaattttgccatattatataaccacaggcaacccaggctaaatgtagaacgagcgtcatttctggagatacatttccaaaattgtctggaatattttgtgcttctagcggttccttcatggacttaagtctttgataaaatgtgttgtcttcttcatctggattctttccagtttctccttcaaatgtgaagttgacttctggtgcagtttcttgtcccgttgaagggtaaagtacttcagctgtgcagttcaccttaacttgtttttgtataatttcttcaacagcaaatttaaggcgatacttatgtcctcttcctggaatatcctccatgctggcttgtttgaccttctgcacctcaaacaccctgtgcggggtcccctgctggtagttgatgtagttctgtgccaccaaggccgccctggaggctgggtagttggtcggcgggatttccattccggatgagcagtgacttcagggcttgggctactctggcttaacgggaccagtagcagagcgccgcccgt

SEQ ID NO: 341409 - DNA, 1000 bp, Homo Sapiens
tttttttttttttttttggcgatcattcaatatggctttattttctcatcggccggctgcatcccacaccagcctgagccccagacggtcagtcagtgcatccatcatgacgacctgtccaggaaggaaggaaggaagctccctccaaaatgctggccccgtggcacccagacaggagcctgctggctagcatgcaagcactccccaaattctctcatggtgacaaggtggcagctgcctgggtcccagagtctcagcacaagtgcccagaggccagtggtgatgggcccttgggcaagtctctggaggaggcgggcaacccgcagggcagacgggagaagagggtcccctgccaacctggaggaaagaggggtggttgtcccctcacccctccaggctgcaggttctggagggcagaggtgctggccgaagaactggtggccaaagtgagaccccctggtcctatctggacagaaccccaggctcccatgggccggcccaggtccttcggacagcaaacacctccctgggccacggaagggagacggctgcgggtgccaggccaggacttgcccagctcaagtcccttccccaccaagcctgctcggcacgcactgggtaggttatattgctaaagaacggacacaccggggtctccctgagctcaacacgggcctccttctctcccacacacacacgacgcctggtctgcggggtggagggttctgtccaaggcttcccgagggcccggaccttcctctctgagttccaggaagggtggccccagaggccatgccccaagtcctctccttcccagcaaacgttctcacctgacgcccccaccccgaacacatcctttctattgatgaggaagctgaggcccagggcgaggagcgaggggaggagccacaaggcctccccgggccacctcctgcctcccagtactccacccgcacccagttccccagggaggaccaactggccgtggcaaagcctggat

SEQ ID NO: 341410 - DNA, 1000 bp, Homo Sapiens; identical to SEQ ID NO: 159893

SEQ ID NO: 341411 - DNA, 1000 bp, Homo Sapiens
aagcgcgcgcagctcccagagggaagcgagaggcgaggatgacggcggcggcggcggcggcgacccgggcgacgcgaccgttcccgaccgacggcgtggcctccaccggcgtcggcagccaggcgcccgcaggtgtggggcgagttcggcctggcccttggggacaacggcatccgactgcactcgcggggagaagggattgatgctctgtctaaactctacaaaagtacagtcctacaacatctgggattttagcagtaatgctaacttctataggttttttttttccttttttattttttttttttattttttgctttcctctaatttttcttctattatataggtattttaaacttttcctttttaaaattctgtacaactattatgattttaagagggggaagagttagaagcatttacagacttttcacaacaatgaccttgcttggtaagtcccatttgttcccctccttgttttctcacacttcacgggtgagttttaagatttgtgttgctttccccaaatatccaccaatttgttcatcttttaacagctccatccagacatagaatacagaaaaccataggaaagtgtcatagacttggatgagggtcatcaaagcgcctctcaaagtatcaaagaactattatcttgctgttttaaaagcattgaagcgttatttttcctttttttgttgttttttttgttttttgttttttttttaattttttattacattttttcatagaatcgctctaagctgtttcaagaacagccatgaggcaggaaggagggggtcctccattccccctctatttgacatagagctacacatctgcaataaaaagtttggtcctttggtccctaaatagctaaaggaatgacagatagagatgctcagtggcggcctctcagccgccccttggggaccaggccccacgcaccacttgccccagcctgcgtcaggcgcccgtgggctggaaaagccccgggatc

SEQ ID NO: 341412 - DNA, 1000 bp, Homo Sapiens
gctagagggtccactggatgtcactgaagtccccagggtctcccaggcccccctctgcttctaagtaattcataaatgcagccatggctgtgtcatcattgtcacatagggcatcgaaatccaactgtgcaccatcactgaggagtggctcatggctgtggacagcaacagtactctggttttgcctggtagcctctagctcccccatttcagaaggacttggtggaaacaactccttatttgacatactcctgcagtttacagtatgagtatctttcattaaacctgttggactcgaatcatcaaggtatgaagaagactgtaacctctgtaaatccagaatttcatttgcaatatctgttccaatactaccagcaccaagtactgttccagtagacattccaggtacactcatacaggactgtctagaggattcttctgatgattgagagctacaaggtaaaaatgatgcttctccaggctcactatgtcccaaaactaaagtgttgacagatacaatatattccagttcttttgtccaaggatttgtgaaactaaaccattggctttttaaagttacaaaagagccatcttttgctctgaatttgtaggaatctgtaagtattttctccttactctgtagaactgctttgtgcttgtcagtcaaattattgtggtcatcttgatgaaaatattcataacaagaagttcccaaaagttcctgaggcagatatcctaaaatcgctgttgccctttgatctacatagacaaattttccattcactgcaaaccgggttataaattcagttggtttcacattaatctctccactgttctgtggaacaatatatggctgtaatcttccaatggccacaaggcaggtaaaattactgttgtctttcttactgttcctttcttcttccattccaacaatatttggaggccagcttctcaagtaaccagtgcaatggatagtatagaattttctgtgctctttctt

SEQ ID NO: 341413 - DNA, 1000 bp, Homo Sapiens
ttttttttttttttttttttatacatatttgattttttattaccaatcaaaaataaattccatatatcgtttagcaaatatcattgttttgtgacaaaagacacaagagtcataacaacaaaactccccgagagtcaaactcataacgccaaaataaatcacaaaaatatacaaattaaaatattatgcaaaataaatacggcggctgtcacctgcctacccatttggatgccctttgcaaaggtctcccttacgtggaagacacagtgggtgggccagttccagggtatggctcatcccaggaaccagaggttgaaataggaagggaaaaattgcactgggaagaggaagtcatcagacaaacaatatttggaaataatgatgaccctctgtgagaagggatgatcaatgggccagggaagaggaggagggccagccagttggtggtaaccgtgtgcacagaggtcactgtggaggtgtgtgcacctgccccttttgcttcacatacccccaccaatgtcttttgctctacctggcagtcagggctgtcaggaatatagctctgccagcttccaaaaggacttgggagcaagctgctcctgtacaagactaagggctttcccccactagggaacaaaagtctggtgtcttttttccttacagttgagaacccatgggtgtcaccaccttctctccaggcttccaggagtcagttctatggctaggagacctcagactggccaggggtaggcatacttggtgcaagacaatccctggtcctaagagttaggatactctaggcacctggagagcagggcacttggggtgaggaaaggagtgaataaataataatcaggcggaaggcctgcagagtttcacctgccaggctctcgggacccagctcctgctgcacccagtggaaggaccaacatggaccttggtcccacagcctccccaaccctgggaagcctggagttttgcagcagggcctgattcagcc

SEQ ID NO: 341414 - DNA, 586 bp, Homo Sapiens
ttttttttttttttttttccaagcaaacttcaaactcattcatgagatatttattaaaataacacatttagggaaaaaaatcaatacaatgtatacatcattactgaaaactgtataccatcatacaaaaaaggattttattttgggaaattgttttctaatttatggcaagttttactttcagaaataaaaccacaacaacacaatctaattcaatcttaaaggctggcatgctgagcaaggaatgttcttattctttgtaggagctccttctttacactgtcaggtaccagggctctgccttttggagtgatttcagccaccaagtcatcaacagtaacgtgttctagtcctttttctttaattacctctttacagtgtgccttcaactgatccttccagccacattcaattaatttagctctcagcaactctttgaggcgttctctttctccagtttctatcaacttttggttaatcgctgctctcatctgcgcatctttgttcatcttgctaaccaccatcaccgcgggcgagggccgtcccttcccagcgacgaaatgacccttgcgctgaggaccgttac

SEQ ID NO: 341415 - DNA, 901 bp, Homo Sapiens
ttttttttttttttttttttttttttttttttttttaaaggcttatattacatttaatagtgttaattttgaagacaatagtgttaatttcaaacttccataaagggtaaccctacagttgaggtgtttgatgcagaaaccagtacaaatttcgattgttaggaaaccaaatgttctgaacattattttcattagaaaagggaaggtaattttatagttgtttgaggtgttgtaatacatctactgataggcccagctgtttaactaaactggctgtctgttccaaaatccatgtggggcttgggttttctgaatgtgcatgctcctgtgttctacaacattctacatatgaacaatctatcccactatggctcttgctacagtttttgttaaactcagcattattttcacagagtctttcatctttagcttcatcaatctttttctcagctggaactacatgacaaaggtccatatcctcaatggagtccaataaatctacaacatgggacggtggagtgattgatttcagatgtttgagcacatactcttcacactggccaactgcatccagaagattgtttattttattgatcaaagttgaattattattatgaaggtgacaccaggagagcaaagcactcaatgttcctcggagtcgtccatagtttaaaatgacttctgcacctttcttataaccttgattgaagccctgttgaagagtaactgctttgccagcatctattccatctctataaccttctttgactcgtctttgcatgttactctgccattcccgctgcgccaggagcgactcgtctgcttcttcgtcaaacacgtcccctttgtctccagggccctggatcaaggaggctgcttgaacccacgacatcaccgaggc

SEQ ID NO: 341416 - DNA, 1000 bp, Homo Sapiens; identical to SEQ ID NO: 159894

SEQ ID NO: 341417 - DNA, 1000 bp, Homo Sapiens
tttttttttttttttttttttttctttggttgacagtttattaaatacactacatttgtaccttattctgtcgttttttaaattgttcacgcatgaactgagtaaaaacgtactttatagaaaaccaagtgcaaaactaaaatgaaagaatgcacatattgcacacatatgaaactgctgcaatgttagaaattaatctgtacaagtacctaatgaagaaggttatgaaatattaggtggttcgagtttcttaaatctggcaccagaccatgactttcaaagtgttaatgttgaagtgtcgatgcaaaaatgtctattaacaaaactgcttaacactgtttgagaaacaggacaaaataattgtttttctttcacagacacttttctgaatcaattctctacagactctctcccattcagaatcagttgggtggactgatgaggcaaaaaataaattccttttaaaaaacaaaactggagcctatttacaaaacatgcaaagggagaattttaagcaggtgttactgcagaactgctcagacgtgaatacagctgagtgacagaatatacctttacttctacaaatataggtccttcctccagactttctggaagaaatacattttcagggtgtggactataaaatggcatacaatgcagagacagaaacaaagaagtttgcaaatcttttatatttccagctgttgagacagtatttttgagggctgatgttacctctagcggcgaaaccagagccagctattaagcagccagaaagctacagtaattgaatacatgaccatttctcttttagcacgttctttgttctcctcttccagaagttgtagacgtctatttagtttgattatctgtcgtcttagtgaagctgcatctacaacagtcaggtcatctgacgttccttcaatggttgtatctatatttgaaatgccatacctgacgttgtcatgatgaggattagaagtggcggcagcagacccac

SEQ ID NO: 341418 - DNA, 1000 bp, Homo Sapiens
ttttttttttttttttttttttttttttactgatatctctttaatactttcatcattcaagtttgttcagaacattacaagaggcatgaaagaaaaaataattccatttttaaaactctgtccaaagtataacatatgaaaccatgccattatctcttaggaaacaaaagcattcaaaattaatttggtattaaagttcaagattcagactaacctcaaagtacggcatgtgcagtgtttaagtgcaagaagtattttcattccaattattttacagagatgctggagtgacgtgtgcaatttgaaatattcaaatcctttaaggtttctgaactaagtgtttaaatgaaaactgaaatgctgcatagtttcagtggctttcaatttcctgtttgatctcagaaatatatggatgatctttgccgtgagctacttccatgattgcaatggccttcttcagggctttctcccctgcggctttgtgttccaggcccatgtagagtctccctagcttcaaccacatggaggccacgttgagggagtacaaaggatagtgcttactgtagggcttaatgattttctgtccatattgcagggctccttcccagtcctgcatgtacaagcagacacccatggcctggtacatcatgtgcaacatgtacacgttactgtcctcaaacacagagctcatcttctcctggctgagctcgcagatctccagcagctcactaggggatttatagtgcttggccctccggaactcttcaatgacgttgcgtgcatatctgaccatgtctcggatggcttctgcctttgggggatcgctgagcttccggatttccaccttggccttatccttgtccttggtggtacactcctggcactcacaggtaaagaaataagaatctcttaaccggtcatttctatcttccgttgggtacaggagatcaatatagctggtaaaaacctcctctcccggcttgatttcctgtacagctct

SEQ ID NO: 341419 - DNA, 1000 bp, Homo Sapiens
ttttttttttttttttttagatttatatctttgccatttattttttaaaatcttattcaaaatattaaataatagtttcagatatgaaaaaaattactgcaataaaacggttcaggggtatttccattgtgcttcccttccctattaggaaagtacactgtccgcccaagagacaggatggacggccttcttccagctctacataaagcgcaagcccactggctcacccgggtcctgcttaacatatattagggctatgttttctaaaaagctgtagtgacacttgtaagtcaaccatggttcaaatcacatatttacatattgatcaattctttatgatagaaagacagacataaatgaatcccatagtaaatactttccagttgccataaaaaacaaaaacaaagaaaacaagtgtgggggaaaaaaggtaattgtacacaaatatcctttatgtatacaaacaacttcattcaggtataattttaatttgaaagacctaggtacagtattatttaagtgataatgacccctaagatttattcaaatttactgtaaaataataaacgaagtaaacgaatctgatataattttaaactctgcccattgcttgaaaccttggaggaacccatgctacaatcaattgctaactaaaagcaattgtacatgtatttaacattttaccagtttctgcttctaaatttaatatagtaattccaaccaaaaaaatagtatctctgtaacattttatctatgtccactgcaagctgcagagtctctgttgccaagatttcttgacacatttaatgttttacctaaaattgtggtcagattgagcaatatcattatcctaaattatgtttaaattatctaaaaatatccaaagcagttttcttggaagaaaaaaaaatattactcaaatccaaagcattatcacacatatccttgtacattacagtttggggaacaaaaaaaaaatgtggataaaaaatagtatttg

SEQ ID NO: 341420 - DNA, 1000 bp, Homo Sapiens
aagtcttcttattctttattagtttaaaggaagctagaacctaataacaatacgccacatacggttcagaaccaaacaaaagctgcttagttatttattttgcatttgcattttgtaggaagtgagaaaaaaacagctctattgggactcaagtttattttcaattaaaatccccataaattaggaaatgtcttataaaacggagaaattggaaaaaaatgttattcagaaaaaaactttcttgagtgtgcttgtttcctgtagcaccttggattttgtgatcagtcttttaaagatattttttaaaaaattcaacctctgtcttcacatttaggacagggcataacagtgtcttgtcctttcatgcaaataagaggaaaaatttatacttgcttagtttcgagcattgaaagcactcgcccctaattctgccatttgctcatgtcccacatgaataaaaggatacagcttagaaaccagggccttgctgctattgtatttttttctaattaaaattcagagtattaaacacagttgagtacatccatgcatacatgacataccgtcatcacataccggaagctccaatcaagagccccgagcaaagctcgtttcataacatcattaagattcattgtacactgcgtttcagaaaggctttgtcaaagcagataataatggcctgtcagaaatgcacaaacagaaatttatattaaattgtcctttccctccttttaaaatatgggaatctattaatagctgcattcccggtataggggactcaagtcttcagttaaaaaaaagtccccagcttcttaatattgtaagcttattaccaaaataagagtataaaaagttaagtgaaaaatatttgagtaactaggtgggggtattcctgggaatactaatcaaatataatgactgtatcaaaacaaaggaaggcggagctcaggagtgtgaaggtagatagcattgctgagtcacaaggcggagtgtttaa

SEQ ID NO: 341421 - DNA, 1000 bp, Homo Sapiens
tttttttttttttttttttttttttttttttttttttttttttttttgagctacacacatgaacagcatttatttttcatgcactcaacacatgttcaagcctacggactctctgctgggccctgagcggggccctgggaacagaggtgtgagaaacctctaagctggtcgaggccagggccagtatcgtcccccagcacagagcctggtggccgctgtcacctagtgagtgtttgctgaatacacagaaggtcatgtggggtgagcaggttgggcagggcagctggaataaggggtgctgtggctgagaccaagaggggcttgtccccacctggaagcacctcagtcgccgggttcctggtcctccttgctgatggctgcagactctgggaacagggaacccccttctgcctcagagaacttgcctagggagtggagacggccaccagccccctgaacagtggcctcaactcctccctgtcctgagcccctgggcttctggcagcttggtgcctgctgcctgaggtcaggctgaacggcctgggaccacgtgtctatgtccaagcgcccagagggcccagccctgccccgtgatcaggttaaggcctggcagggctggggaagggaagggacatgcagcaggaggtcatggggcccaggagtctaggagggactcccagaccagcatactggccccacaggccccgagctgggagccctgaggtcagagccccacagaggagcccgaagcacagtccagctcagcagggccgcttgctgtccagaatggccttccagtcgtccgcccacgagtgcagcctgcggcgggggggctgcagctgcaggtgctggttgtggcaggcggtgaagaggacatgctcccagctgggggttggctcggcccctgtgatgtccggccggtcgtctatgagaaggtcagcagagaccacggtcttgtctctggtcagcacaatctgctccagaaagtcagggccaaagt

SEQ ID NO: 341422 - DNA, 1000 bp, Homo Sapiens
ttttttttttttttttttttttttaaatatttcataaacattttattccaatcatatatgtacgaacacatatgtactgagtcatgacataaattttacaattctctagggcaaaacattgctctaaagaaaagcatacttggccgatcagtcccttgagaagacttttgtttttgattttttgttcacttctgagcaatgactctacatcctgagtacacggaagccctctctcctcaacttgatagcagtgctctttagcacagccagttcccggctcaggctgttttctggagggatgtgtcctcctcttgcagccctgtgaactaactgaaggacagctgcagcggtgcatctgaacctgcagcggaggcagctcaggtcctgcctacagcatgcacatgtgatgccaggggctttccaccatgatttttcactgacatgatttcctttcattcaccggtagctctgccttacctgtagagctcaagctcctagcacagaacacaggggctgagtaaaggcttctaaatacatgcattcaacaataagcacattcattttgctataaaccataaatattacactcaaaatataacagtttctaacaaaataaaaagtttacccatttcttcatacttaagaactacaaaagtactatacaaacctttatttacattaaatcacaataggtacataaaaagttgaggcactggtatctgtggctaatggtagtaatcacagctcatatagtaaagtgtataacattaaccttttaattttgagctgttgcaaaattaccattttaatattatatataccatatattcagtaccaattatgacttttttctaaaataataatagaacatgatgcccagggaaaaagaaaatacttaataactttcccaagtgctagtaaaaaacacattggtatacacctgatttgaggggcagacatgattcagcctatgagccattaggagagcgaagcaaagctt

SEQ ID NO: 341423 - DNA, 1000 bp, Homo Sapiens
tttttttttttttttttttttttttttttttttttttctggagacaatatcactgtttatttgggtgacacatctgcctgcctgagggctctgacaagaggcttagtggttgaaggtcccccagattatacttttccccttgctggctctgcagaggccccagactccgagtgcaggcctgtggagctgtggctctgttacatttctcttggcctcagtgtcctgggagcagctgcctcgtggctgaaacctccttttcagagatcccagggcggtggcagcctcacttcttgaagttctctctctggagcgacaaggagtacctctgaagccgggcccagtgctcctcctccttctctgggttcttctccagcttccgatagctcttctggaggaaacgctcacatctcttctccagtggcagtgcttgggggaaggccatgttatccaagtccctttgaggaatggtacaattttttgagatattttccaggagtgggcaggcctcaaaattaaaatagaaaacagaatattggattccagcatcgtcggtggacgcagtttcatgtgaatagtctcctcggagcaggaaacatggatggtctggagacacagcaaacactggcttccaggggacctccagaggaaaggctcccggaggggcaaaggcacagatgatttcacgcttggccacatccataaggcacacagagccattcttggaaaagatgagcaccatgccaggtaaggctgggactggggccacggcacagatggttttatccaggtgctttacaggcctctcaacaagcacactgatggtgggtccttgggtcccgctagcctccaccagatggagggaggcgtctgtgcacagcaccacacatttcatttgggatttcacttgaccttcaggatacatattctgtcctttgtggaccgagaaatattttaggaagtgaatgctttggcagaaacatccctgaggaagagcagcgac

SEQ ID NO: 341424 - DNA, 1000 bp, Homo Sapiens; identical to SEQ ID NO: 159896

SEQ ID NO: 341425 - DNA, 1000 bp, Homo Sapiens; identical to SEQ ID NO: 159897

SEQ ID NO: 341426 - DNA, 1000 bp, Homo Sapiens
ttttttttttttttttttaacttaatttttgcttgaaaactttattaaaataaggattaaacctgaaaaaagaacaatcagaatgccagccctttgcataaaatcagcaagaaaaaggacagaaagagaaaaaagaagagcatcagtcctctccacttcttcccagagacttaggtggggaggagaatacccgctgccctgcagtgcctgcagcctgtagcggggagagctgtgggcaggttctctgtctcggggctcagtgggctatagagaagtaagttcccaccagagcagaggcccaagagtcacagatacctaagctagagaatagattatcctgaggggatataaactccaggaagttgatcagggaacaggaatttgggaacaaacaattattctgaaagcctggagagcctgaagaggcaggggccatgcacacgagcctctaactgcccttgggtgccacgatctgctggacatagttgacaacattgctgtggagctgggaggcggtggatgcaaaagtctccttggcgagggtctgggccacctcactgccacccatcattgcgtggtacagcggaagtgtatacttctgcttcccctggttatgcaggaactccttcactttccagaaatcttcctggtggtcgttcttaaggacgatttggccccatcgcagccggagctctgcattccgggcatttgagatacttgggtatgtgtctccaagttttttcacattcccaggagggagaggggatttctggaggatcttatccaggaagtagaccagctggtaggtcttccagggagagatggccacggcttcaatggccttcatgtccagctcctcggctgcccacagttgggctagctcttcagcaggcttcatgagtgagtccccaggggagagatcagggaggtacgggggccagccgggggtattcagccatcgatcaaactcaaaacctggaatgatatccactctcttttt

SEQ ID NO: 341427 - DNA, 1000 bp, Homo Sapiens
tttttttttttttttttttttttttcacatctgctgtacctttattgcacttttatgacattgcaaactattccacaaaactctgcaaaggtcagcccacagctgcgcacagccagccctgcaggatgcacttgcaccaaccgtccacagccaagtccgaggtgggtgctgcaggccagcgggcggactcgcaggacgcctggtcatcgggtcctccaaaaccacgtaggcatccgtccaccagcgcacaggccagacgtccagcgagagcctcctcccgtcctcagacgagaccctccagccctccaggagccgaggccccaggaaggagaaagggtttttacttgaattaggtcccgagtgtgagagcacttgaggggtgagcttggccttgaggggcccccagaaccagggagggcggtcctcgtgtttggtttggtaggtgattggcatctgtgtacacgtctctgtttatatacttattcatcaaatataaatacaaaatagtaaataaaggctcctttccctacagaaaggatggaatgcctccggcgccggccgcctctgtccgtgagcacagacagcgcttccttcccaagcttttctggtcaaacactgacaaaatgtgtcctatgagacctggggagcctcgcctcctgtggcagcagctcccgactccggatgatcccgtcctgcctctgaattcactgaattcacgacgggcgcatgcgcttgctgggaggtccggcgcctctgtctccgtcccgggcagcgcagcggccggcggacactacctcgccgaggcggctctgtgctcagtgtccaggtcgtcatccaccacgctgtggagcccgttcctctccacgcagtcccggacggcctttagcacgacgcggagccgccggtccagggcctccaggtgcggctggtacagcacgggtgccacctggtccccccgcagagactcggccatcagcaggctcagcttgtactcctcctt

SEQ ID NO: 341428 - DNA, 1000 bp, Homo Sapiens
aattttttttgttttgttttgtttttttttttttggaagtgtcaaggatcagttctgtggcaccgtttaaccacagactgggagcaacacgcatctgtggcattttaaaatggaattggcaactgcatgacattgaaaatgcgtattacacttacagtgtctagactttcctatgtgtgctcagatacaattagtgaagcaaaagtatacatatcacccctactgttactcagttgctacagagccataaatgtgaaaagcaatactctgaaataaagattttttgtttttttgccctagccctacttagcagcacagtttaagtaaacacaaaaactgtggttgagatgcttgtctttccaaagatgtaaacatcagtcccagtgtcgtaaactttgctgtatcgaatgagacagaagatctgaggcagaaggacaatcacacgctagtaacagaagcttgcaagcagttggaaggtttctgtagcttctcagcttcatttgtcgggggctccgcgctcgctcggaagttgaaggctggaccagctccaccatgggccgggctcaaagcggggttctgacgacggttactttcaacaatgcttgatgtgttggaagccaggctctcccgagtacgtggggagttgaatccactgtccactgtgatgctgctgctgtccatgctgtcgagccgggctgaatgggtggctctctggttgctgctgctgtcggtttcttttggagcaagaagggtgaggttcttttcaaatttcctctgcaagtctctttccttctcccgctcgaggagccactgcatggtgcctacgtcctctctatttttctcctcctctgtgttcttgtttgccccttcctcagagtcgtcatcatcagagacgttgtaatagtcaaaagaggcttcctggttccctcctgactcctgctgacgctgggaagcaggcatggcttgtgccgccgaggtccccagggacggttccagtttc

SEQ ID NO: 341429 - DNA, 1000 bp, Homo Sapiens; identical to SEQ ID NO: 246536

SEQ ID NO: 341430 - DNA, 1000 bp, Homo Sapiens
tttttttttttttttttccctggccaattcagttctttactggagtggaagggctggggacacaactcctttatgaaaggaaaccgagggccacatctcgggccccaatctggggcgttcaatccagccgctgctccggtgcggcttgggctcaggccactctcttccctgggcggccccggccccggcctcgcccaccatcccgggaagcccctctgggcccccgcctggcctgggctccctgggacttgtccttggtcttgggaaacttctggtcacaaaggcgacccctgcctcgatccatttcccaccgcttccgcttccgccctggagacttggcaagccgtttctgcttggcctcggggaacaggtcctcactgggcgcctcgcccaccgcctggcagaaatactcgatgtcatcatcttcctgttcatcatcgtcctcacccaactccaggctcgccgtccttgaagggatcccagaggcctcttcatcactacccccgacccgtgccttcttcatgccctccaggctcttctttctgtgggcctcccgctgctcctgcttgcgctgcacattctgggcctgctgggcctgcctctgcgccttcagccgcagcttcttctccttggcttccaggatggcctgcagctcctcctccgtcttgctcacaaaactgtggaacatcactttgccctccccgacgccctcctggaccttgatgagctgcagtgtcatccgcgggccgatctcggtgagccgcactgcactctgctgggcccgcatgttgccacggccagcgacagcctgaggcagctctgtgatgttgtggtcgccgtcaggctctgcctcgctctccgacagccccgcgcccgtggccagcagctcgctgatgtcctgcaggcggctcatgttggggaacttctcctggagcagcttcttcatcccgcgactcgcgcccacaggaacaactttgatgctatagtggcggaagtccag

SEQ ID NO: 341431 - DNA, 1000 bp, Homo Sapiens
ttttttttttttttttggctttagagaggcattaagaagtagggcatgaaggcacaaaaagggaacctgaaatccaattgcaataattactcatgcaattggcctctttctatgtggcattatagaaacctcctgagtaacacagtttatggttttacaaaagagaactcctacatcattgcatggcatggctaccgcttccttagaccattcagagaatgatccccaagtatttttcataaaccccatagggtttcctacattaaaataaagtgacagagatcacgccttgaataatttcacaattccagcaatgagttgtactacttccaaatgacgaattttctgctccaaataatgggacaaagggcatcatcacatggacacagtcaatttcacagtgatggactcacacaggtggatgatctgaggcacaagctgtgattggtcttaagaaaatgaaaggtagagttgggttcaaaatccacatctcacgatttctggtccttattcatccaaaaagttgaactgcttcatatcagtgtattagacacattttaaatctttctcaagagttgctctgggtgcagcatgataaggaaaaccaggtatttggcttgatagcagatattcaaggtataggtgccaagcttatggtaagcttctcaccgtaggatatctgagatctgttgccacaaagaggactatggtcctacgatgactactatagttcagttttcaacattttgggaataatttgatcataacctttccttctcgttacattataagacaggaatttagagtattcactcaagaggttctcccagtaacaggtgatgtcatccatctgcaaatggttcctaataaactggcttcccctttcagcaatctcttgagctacatcatcatttgcttttacaaattgtaacagctcttggacattggagagatctgttttgactgggatatagtgaacccatggcttcagctgtggata

SEQ ID NO: 341432 - DNA, 1000 bp, Homo Sapiens
tttttttttttttttttttttttttttttttttttttttttttttttttttgatgagacagaggatttttatttttttgtttaggagggacaaacacaaagctcattttctatcaagttaaaataaattagactaacaatggaaggctcttcctttcttgtaattcataattctatctggaactctgcctctccctttcaacatcattttgtcaggatagacatgaactgtgccaaaggcttggctgtctggagctgtttcaataactccttctaggttgacgtggtatacaccaaaaggatcctcagagtagccaccatcatgggtgtgaccagcaaagaaacacaccacacactcatgagaccaaatgactgccagggcatctctgtagttccaggccaggcacacattgtcagaggcgtccgggtaaatgggaagatggcaatcaccaccttttcttggtttgtgtcagagaatgttagcacttcattcaaccagtttagctgttcttggctgaatcctccattaaactggacaaactggggctcagaaagtccttaattgtccatcttcctgctgaataaaaggtagctgaagaatttaaagacaatctattagattctcagctcaaaggaataattcaccttgaggactattcagttccgtatttggattgtgctccctcaatatcttcatacactgctcgtattttggagaagactgatccacgcccaagacactcaagtcatatgcatcaagtaaaatgaaccggaatttagggaatggtacaaaatgataagcataataatcttctgaaggcatggtctcaggatgatgtacaatctgatcttctagaaacttagtgttaagtttagagtgtgttaaatactctctactgaagttatagaattcatggtttccccatgtatgatgaactggaactttaagcctcttgaacatgtccataacaagttctagggactttttggatgcattatac

SEQ ID NO: 341433 - DNA, 1000 bp, Homo Sapiens
ttttgttttttttgttttgttttgaaagaataactaggtaatatatgaaactagtttcacactctctggttggtaaaagagatgctgggtgagctacagtaaaggcagccttttaccaagttaccacctattaccgtcaaaagccttcaatagaaagcaaagctccaggatcattctgtttctgctcagtatcagacagataaccttaccctcaaagattctgggttctgagagaacaaactggcccaggatgctaacttctgcttcaagtgaatctgggccgtgtggggcaacaagcacttgtttgcagtctatattttccaccacttggactcactagcatccctcggtaaagacaaggctagggtagtaggtaaagcacaatgttttacaatgaaagggcgcttcactggtcagcgcaggaaataagtacaggagcctgcggcatttcttttggctgtccatcatgggtgagcggagttgacctctgacctctgtgcacattttccatggctgccacttcagccagcgcagcgaggctaaagaacgcagacacggcaggcatttctggagtactgctccgcgtctccccgacctcggtgttgtgtgagcatttgtcattgcagtctgtctcagttgctttagggagactcctctgcagttgttcctttggtttgtcatccaaagtacctcctgctggtgatacccggccatctgctgtcctgacaaggtgtgtaatcttggttttccttgcttttctcttttggctgcccaccaaaggttcttgcgttgttgttggctctggagtgttgaaaatggatgggatatttttaaccttatgaacaggctccatggtgtttctgtcttctgaaaatatggcttctgtagggtgaatggcatccaagaagagttgcttgtttgaccatttatccccacttcctttgctggttttagtcggttctgaggacacatttccagtcttcttcttttttcttgggac

SEQ ID NO: 341434 - DNA, 1000 bp, Homo Sapiens
attttgcttaattttttatttgaaaaaatgtatttaaaagtccaacaactttttaatataaattacgactctcaaacccattcccatcactttattagtgatggtagcatacatattagagaaggtagctaaaggcaagagagcaccaaaggaaaaagactgtccaaagaacaggtattagaatgaggccgaagatcacggtgaccagagatttctaggagtctctaacctttccaccctatcctgttaaccctttagatctctagtataacactcaggctactgaggtattttagagcaacaagctgggttactttcagagcaaccagcttgactggaactgagagtaaattgggaatgtatgaccaatcttagaccctgaaaaatggcagaaaatacatggaaatttgaaaaaaaaaaaaaaaaaaaaaaaaaaaggaacctcagtcactgttctgtagggataagcaaactgaatgggtgggaattggcagaatggataccagttcctacattcctgaccccactaccataataaaacaggatgtttcctgttgcaaagctaatgagaccccacccttcttgtctcagagcaggcaggagctcatctgtcttgttctgccttcctaattaccctggaagggccagaacgaagaacacctgagaaaactgaaagtgcctaaaaacccctgctcctacgttgttttcccatttaaagcagactcttcagccagggggcagtgggacctggtcttcagacaaaactccctgagtctaatgtgtgtctaggactagggcacaaaaatagagcttaaaatttggggaggataaggagtgtatctactgcttctctctcccctttccccaatcctaccataccctgttcatatctctacactgcaggaaccacttctccagagggcaagaatggaggagggggaaccttgttccaatcatagcaacatgcaaacaccaagcaatacactgaattaaagaattg

SEQ ID NO: 341435 - DNA, 255 bp, Homo Sapiens
ctatcccgccttcgtatccacgagctgcatctggacattggcaggcattccacctccataacctcccttggactgcatttggttctgaatggagctaactgaattcattccactgaacaggtctcctgatccaacatgagctgtatgcacaaagtttgtgggctctccaatcatacttctgtcaatccgccgtcgccttttaggctgaggctgttctgcaatacagcagttgaaacacaaccagaattcactcat

SEQ ID NO: 341436 - DNA, 1000 bp, Homo Sapiens
ttttttttttttttttttatcttaaaaaatggctttatttacagtcatggaaaatgctcaagtaaaatacctaaagtaagaatacaaaaataatctatattaacaagtttgcttcttgtacctgctactaagtcagtcattaaactcactgcaggtgttggaaccaccatatattgttagaacttccataagaatcaaaggagattatggcataatctaagaagaaaatgatctggctaatgtccactgtaaaccttagctacaggcttttatttttacaaagacaaaaggttttcccttaagttgattcaaagccttgaagtaggccacttaatagcagactgctgactgtcacagggtgtatatggatgcagaatgttcatcagaaacttgaggtggttaccaccaccttataaacatttaataattaaggtccataaattcagctctcctaagtggccaggagtaggtcttacttgtaaaagagaagaaacatcttcaaacaaggtgatgcctaggtagctgaccggaatcctcaagattcacttcttttcttttcttttaaaaatacattttcggcacgcaacttttctgtctcctcagcaagcctgacattttccttctttagtcgcactacgtactgaatcttctgatgcaaattttggtgacctaccaactttccattttcctcagcaagacactccacctgcttccttaacatttccatctcctgggatgttctctctctttcttcatacatttcttccagctttgatctcagttgttctttttcctggaatgctttagactccaaagtttgggttcgttcgacttcatcagtcattctaaggcattccatctctttgttgtaaagggcactttggacttcttctaggtctgctttcattttcagcatttcttcaactattttactttttgcaagtctttctttgatactttcttcttgttcattcttcagctgttgattatctggatgatt

SEQ ID NO: 341437 - DNA, 1000 bp, Homo Sapiens
ttttttttttttttttttttccctacaaatactttataattacacagtgtcattatagactaaagaagtacatagacccaatcctttgttttaggctgatggatctcaaagtgactgcctaaattcagggcaaagattgctatgaagtacttggctaaaaatgaattttcacttggaaacaatttgggcctatggctgttaagatggaggtgctgctggtttaggtgagaaaatgtgaggggcagtacatgtctctgacgtggtctcatttcaaggtacttaggatgacactttcagttggaatcatttttaatatttaaatacaaaaagtgagcactgacttctctttttttaaacacacacacaggtctaacagccaaaatgtgcagaggaaatgagctcctgctgtcttccatagtccccattctgtggctgaagctgcagcctgcctccctcctctcatacatagggattcatagtggccactttacactacaggtgtaatgcattttgtctgtttcacattgtgtgcatgtcctgccccaacaactccattctttaaaaaaaaaaaaaaaaaacagtcgttaatggtcaggggcacatccctcccactggcatcggttcctaccccacaaggggaaagtgagatcttccagttaggagcaatttggtgaaaggagtcgggtgaccagagctggaataaccatctgcatggctgcactctggtatcagagtggagacagaagtaaggatagtgtggagggcacagttgcaagttgagtctttccatgagacaatgtggggataattctccccaccaggtttagatagatcaatgtgccaaagttaaaaaaaaaaaaaaatccaaattatcagcagttcaaacacttgaatttcaaacttatcccactgagacagctcaaacagcaataacaatctagatctttccaggaagtgagggtagagcccctggcattcctcctgagagccctgtgttagg

SEQ ID NO: 341438 - DNA, 1000 bp, Homo Sapiens; identical to SEQ ID NO: 159899

SEQ ID NO: 341439 - DNA, 953 bp, Homo Sapiens
tttttttttttttttttttttttttttttgattctttaaattctttatttcatgtctgtttcagcagtattgaaatataggtttctcatacgtgcaattcttttatagattcaaaagtgaggtgttgtgtgaatgttacaaatcataacatgatccaaatttataagaaagtactttaaaaatcagacaaaagacttaagaattactatgttaaatttctaatccaaatgtaaaacaagaatacaggatattggcaatgctaatattcaaaatgggtttaccccagttcataattcctctgctcccctcctacctaaaatctaagaaagtattcattataaattggaagtacagaattcttaaaaagccaactggatgctgagttgtatgattttctttacaggtacaatttacttttcagcaacctgtaagccatggaaagagtaactccatatccaacaaaaaaactcaaagctctatttggctggggaaggggtgtcaaatatgcaatggtgtggtagatccgtgctccgacaaatagtctgaagtgcaggatggctgtagaggggtcgggaccactcaaggaatacaggaggccaattccaagaaatggaataatattttcaaggtcattcaggtgggctctgcgtacacgttctactctgtcatctgttcgaagatacttcttggcattttctcctttgccaaatgctacacagtcttctggattggcaaaaacctttcttgtcaatctatagaatgcagttgcagtactcataagcatcatttttgaaagaataattgttgcataggatgcaaaagccatgaatacttcatcatccattacctgggtgaggtcaaccattttttcaattttggtctggaatggtgaggccgaggaggaggaagcagcaagcctgtcccgccgccgggtcgcgcgcaatgcagggact

SEQ ID NO: 341440 - DNA, 1000 bp, Homo Sapiens
tttagaaaaaacaagatttgtattttatttccttgtaaaaatctttacacatgcagacaaaccagtgttaagaaagtattcaccatcatttaaacaaataaccacttaaatagaacagtgtctgcaattttatctgtataaaaataagatacatttttacagaattcacgctccagttcttatagcaataaacaatacacaactataataaagtacaattgaacctgaccatggtttttaattagatactgctagggcattttaatgtgcaaaaaaattaacatagttcttttcaaaagaaactgtcctcagtgttctagagacctagagggtttcaagaaatcaaatcctaatcagtttgcgtttaatgtttttgattgagtccatacatcacactgtagataggcaaaaccaagaactgatgcaggctcaaaggaagagaaagtcagcgcctgtgcctgccatgtcctgagcgactgccaccatggtgcttgcttttatgggacctctcaaaggagcgagatcgttcacgcctgtccctatgatgtcccctttcatgcctgtgtttcttggctgcatctgagtgatcccgagacttgctctgagatcgagaacgagattttttccttttatgaccatgtctgtttgaactttttaaatcatctctggtatgcttggccttaaggtgaggagaaccatgattatgatgtcttcgagggctttcactgtgactgcgggacctgcttcttgatctcgagctgtatgttccagatcgactccgcctattattatagtgtcttcttggagtatgtgatctagaacgtgatcgtgttcttgacctcgatcgacttgcacttctgctatttctacttctcttgctgtcttttcttacaccattgtaagggcttttggaagcctgttgtctatcctcaggttcttttttgactgtcttcacattaatggagattggtgatttctcttcagcttttacttctcttgg

SEQ ID NO: 341441 - DNA, 1000 bp, Homo Sapiens
ttttttttttttttttttttttttttttttggaaacaaaaatctttattaaaaaaaaataacttacaaattgagagaactctctgaaatgcaactgttcgttgtgtgtgcagatttgcagtccagaacagttttttgtttattttaaaatgtaactttacaatactattaatgtcacaaactgcattacaaagcagttttcgttccatatcccgtgccggtacaaaacaccacacagatataaaactatggtaaataaaacatttcagccaagactggcatatatttatatatttatatatatttatatatatataatttcaaaacagctaacaattagtgtcatccttagtcaaaactgaagtcacgctaaccttaaaactacaacactctgaatatatgtcagcactatgcctcccaaacaatatttaaaatatatttaactttcaaatacatttataaggtacaccaatagtgagaaaataaagtcttaaaatttaaatacaaatcaccatataaaaaattcaggaaacacagaaaatcctatcttacagaagtccaggcaagcctgtcctcagctggctctgacgcacagcactgctgtgcgacacagctctgcctgttgcaaaactgtcagcacgcacagccaaatgacagctgcgtcatcaagagaaagagagaatggatgcagggggcacgtgctcccctcttcactctactcaagcatcaagacccgaagctactttgctttgctctagaaaaccatagggcccatcaccctgttcaaaaacaagtaaacccgtcccagagcctctccagggcagatcatttggtgctctgctccaaggcagagtactccgtctctgagactctggaggcatcgatgagcttggtgagccctgttttggccgagtacttgaagatgaaggccttcatcagctcgtacctgtagttgcgattgatgaagctgtagaggacagggttgacgcagcagtgcacca

SEQ ID NO: 341442 - DNA, 1000 bp, Homo Sapiens; identical to SEQ ID NO: 159900

SEQ ID NO: 341443 - DNA, 1000 bp, Homo Sapiens; identical to SEQ ID NO: 159901

SEQ ID NO: 341444 - DNA, 1000 bp, Homo Sapiens; identical to SEQ ID NO: 159902

SEQ ID NO: 341445 - DNA, 1000 bp, Homo Sapiens
ttttttttttttttttttttttttttttttttttttttttaacactcccacgcgcactttattaagtacggaaggacaggtcacaacaggggtggaggtggcggggaaggcccagcccccacccaccatcactggcacacaataaataaataagtaaatagccaagtgggcacgggagagaggtggtactgaaaacactgaccgcacagggggacacgaaagccccccttcgagctgtggccatcaacgctgtacgggtaccatgaccaggaaagggtggggcttggccacagaagccccagagcatcacaagtctttgtaaaggagaggtgtctttaggacgtggaccactcttatttactgactgaaacctggacccctagctggtcccgtgagacccagattatcaaggggccactgtctctcaggcttctggactgttctactgaggatctaaaagaccactgggtcactatcacttggggtcctgatgggtccacccagggacctaggacatgcgagggtcatcgtcacttaggcttccgattggtccactcgggctccaggacgtgaaagggtcactattacttaggaacctaaactggtaccccacaggacccaacattgatgagtcactatcacttagcctttggattggtccacccaggacaataagggttgtggttccctagacctctggttgacaaggacccaagggccaggacctgaggggcagagagagctctagaagccccagggaagggggagaagactaagtactcagggatagagggaatcttcagcaggcaccagggcccagatttcaaggaggggaggtgacagggaagaaataaggccacctggctgggtcaggccaagatgaatccataggggaccagcttctggggcagcaaagagtgcccagccactgctgggagggggttgcaagggccctcaaaccttccccgggtcccagccccaccccggtgcagaactggac

SEQ ID NO: 341446 - DNA, 1000 bp, Homo Sapiens
ttttttttttttttttttttttggtattggtttacaagttgggtgggactgagtagttggcagggggtggagcggagagcagggcaagagttgaggataggatttaatagaatataagtgagggaggagggtccttatatatctatcatatttccccttccatgttaatcaactgccactttaaagaaacttttgcctatgattctctcctacttgggctacttgatgaactagttcacacctatcaatatcctcttgcatttcttataagatccttcatgctcttcctccttcttccatttcatgattgttcttcttcattcaccctttgtttcctcctgggtcggcctctctttcttactgcctctgaggcagtggagggaggggcttgttcccacagttactgattttcttctgccttggggtcccggcaggtgcactcatccaggtcacagtcagcagcaaatggaatgaccttcttggaggagagtgtggaagagcagcagtctcccccgtcatagtggcagtaggctcggttgttgatagtgtcacaccaaccatctgcttggaagggctcacatgactggatgcagtggactaagacggggtctgggtgccattgacgccggccagtgcacacaatgctctggactttgacaggttccatccagtgctccagagtgtcagcagtgatattctcaggtagcatcacggggtcactgggggggattacacacaatggggaacacactgcaccaatcccatatccttgttcacatttgtactccacagaattcagctctgaggggggtggtgggcattctccttgcagattctcacacaacttaaactcctgggtccacaggccctctttagtgcagaggatgggaagcttttcacgttcctggttacagttgagcacacactggctgtccaggctgaagccattggtacattcatacatgccttcaaacacaggagggggtggctcacacaccac

SEQ ID NO: 341447 - DNA, 1000 bp, Homo Sapiens
tgtaggcacaatttattttaaaatccacacaagaaacccagaaatgcagcattatcttcagacatcacattctagctctgtttaaataccacatatgctaaaaaccgacgccaggacattctctaaatgagttacaaatcagtttctggaaaggaagtgctccatgaaaagcttatagcaagataactcaggctttcaggtggagtatggcacgtgaattagccttacagtaattgtgtacatagtatgtttagtcattattgaatcaaaagtttcaggaagtaccttttttaatgcatacgctgagagaaccgtcaatatgcctttgttcctgctgagggatctgccattctggaggtacaaatactgcagatagaatatcaccgcaggactacgtcaagttcagagtgttcaggatcatttctatataaaactacaattagctgaactatggcaaaggtccttgaacataaagcctttcttcatttcattgcatcttaataagtagaatgccactaccgtaaatgctgcttatatgtattttattcacatataagttatgatttttctaactaccctctgtagctataaatttttcccttcctgaaaatctctcttccacacctgttctgcttgtccctttgttccctaaagcctgtattttttctttaaggggatctattttcctttgaaacaattgctggaaagccagcctcagaaaggtaataggaatgtttttcctgtattttgaaacaaaaaattttccataggaatatccattcaattatagaacagaaatcaataggaaattagggcatggtcaacaggggtttgcttgaaaacctgtattctatgaaatgtggaatcctgccatggtgccacgcaggtataacaaggtgaggacaatgcattcctaggagttttccagcttcttgcagggtgaggaccatccacactggcacttgctctggcttttactcctcagacacctgtggccctg

SEQ ID NO: 341448 - DNA, 1000 bp, Homo Sapiens
tgtagagatggggtctccccacattgcccaggtttgtctcgaactcctgagctcaagctatcttcctgcctcagcctctcaaagcgctacgattacaggcctatgccaccacaccaggcccaaagccttttcttcttctaggctgtgaactccaaatggcaccctacagggtccaggacaagagactgtagccctaaagggcttgggatatgtaaaatagcacgtaatagtaaataataactgacactctcagggggctcctctggggcctgaccccattgtcaagaaacccttttctaaggtggagaaatcaggctgatgggaaagcagcaggaggccagcttcttacctcataactctgccaccagttggggatgttgggacgcagcttctgatcacatacaacctttcgcatttcctcaatggaagggtcagagggcactaagtcgtaatatggcagctgatattcttcatggactcctccagaattgcatcttcgagcaatctcccaatatacaagcccgagggcataaatatcagcacatttaaaggagtcaaagtgtttcatattaatggtttcatcaagtacttcaggggccatgtatcgtttggtccccaccctctgattcggggcaatgtcaatggtgtcagtgactgcatcatgacggacagccaggcccaggtctgctatggcacacatgccatttttcttcaccagaatgttctttgactttaagtctcgatgagcaattccaggcttcccttgggtgcccacgatctccatgtgcaggtgtgccagcccactagcagcagacaaggccagcttaatcatcccctcaattgtcactgtgtaccggttcagataatcaaacagggacccgtgctcatgatagtcagaaacaagccacagctgtgtccaggtgccattatctttattgtcagcagcaataaatccaaggatgttttcatggcgcagcatgaccgtctggtatatctctgc

SEQ ID NO: 341449 - DNA, 1000 bp, Homo Sapiens; identical to SEQ ID NO: 159905

SEQ ID NO: 341450 - DNA, 1000 bp, Homo Sapiens; identical to SEQ ID NO: 159906

SEQ ID NO: 341451 - DNA, 1000 bp, Homo Sapiens
gtttttgtcaatttatttagaaaaaaattaacatgggcaaatgagatacctcagtgttacaacagagtatagaaatgtctagcaatagtcaaataatttgatctttaaatacaaaataaccacatgaacacctaatatacaggtttcatctgaatacatatttattagataaatattagaggttgtcacatcatctaactacatacagctttgcaagactagaaatcacaattagttttttgaccagtttaaagtatgaaatgattgcattgtacatacgatgtacaaagacgatgatggtttctgtgggagttacttcaggctgcactggtgggtgtgtttatgtgtgtacgtgtgaatcacctgtgatcatgatatcaaaaattatacaaagtatgaatttggttacaattttcttctgaaatccccgtttcttttcattatttccatagcaccctaaaaatacacaggtggcaggactagtacactgaagctaaatagtacatgtaggtaaaataaaaacagaacaaaaacccctttccactcagggtcagagtatattacatgagcgagagagacagacgtggagaactcacaaatgctataaccaacaggatctagtttttccacgtgatggagttccaagcttttttttttgttttgttttgtttcgcaaaataaaaacaatacacattccaagagaaatgaatgcatctgttgacacgtctctatttctcatttacatatgtacacacgtcccttgagtcgctgctgttgacacggccctgtgtggacgggtcaggcccgaggcccgtcgggagcagacctgtagctctctgggggatcagggcttccattagggagaaagtattagcagtttcttaaaaaataaaatggctacacggaacatgatacatggataaagcttcaaaccaagaagatgggggtgattgcctgtacttggcccttcccgcctgcctgctggctccctgtccatctt

SEQ ID NO: 341452 - DNA, 1000 bp, Homo Sapiens
agatggagtttcactcttgtcacccagtctggagtgcaatggtgcaatcttggctcactgcaacgtccgcctcctgggttcgagcgattctcctgtctcggcctcctaagtagctgggattacaggtgcatcctaccacacctggctaatttttgtatttttagtagagacgaggtttcaccatgttgtccagcctggtctcaaactcctgaccgcaggttatctgcccaccttggcctcccaaagtaagtgctgggattacaggcgtgagccaccgtgcccagctggtattctcaaattgagacagcttcctttgaatttttctactttatgaaaagttgctatgtataaatactgtaattctagcctctgctttactgaagccttttcccccagtaaactgtggagtactcacaggttcacaaagaagaactgaacctcaggtaagctataaaaagaaacaaagcaactgtggtgttacttctgttggaaaatttaaaaaaagcagttatccaactttcaattccatttataaaatgtaaaaattcaaaagtatacaacatagttcactgatatcccaacaattcattgccttttaagatcaaatagctgattacctgtttctaaacttgaattattgtctagtgagtaaaaactgaaggcaaacagagtgttttgtggaactgggaaaaaaatggattctgtggtgatctctagatggtacactggatgataagggtgtttttttcagatcacctaaagaagtcagaacactgccttcctcttaacctctaaggtagttccatatttctcaaggagggcaaagtttacaaatacccctttaaatccttatttcaatactgtagaatttgtgtcttatatttaaagggtgacttattcattatgaatggggctgggagattataatgtatgccttaaataactctgtagaatgtgtgtaagtaagcttgattgaggagttttcaatcattaggataat

SEQ ID NO: 341453 - DNA, 1000 bp, Homo Sapiens
ctctttgagtaactttattttggaggagttccataagcattaggaacatacataaaatgacacaccactgttgacaatgaaaaaaaaaaacagcatttgatattttccagctttttaagttaaaaaatgattcagttaaaacaaaacaaaagtttagatattttagcaagaatcaccttgcaggaccataatcacatttaagccactgacttgtttgtttgtttgttaatggaaaaaattcacactgcatctagttactatagtatttctaagcataatcaatcaatcacagctgattgattgaatgcaatgtgattgattgattgattgatatataccaaaattcatatggatgtcacacagtgacagcattgtacaagtaacgttaatgacctccaacaaacacattttaaattagactggtcaagctaaaaggaatgttggagccaaaagaaatgtagtggaattcagattgtctattaagacttgaaactatacattagaatgatgtggaaccctaatactagcagcaactgttacagccctcttaaaagatttgtaagaatctagcaaataaagaaagataataccatttttgagagaatataaaacttctttatatacttcagcataacctacttgctttaaatcaatcaggcatttattttaaaactgggagtatattccagctattgcttttataaaggttctaaaatgaagcagatttaatgctggaatgcagaatcctaccgtgggtataaaaacccaaaagtgaactataaatatatcttggttcagaaatctagatagatagatatctaaatcacttgaagttggcagtactaaataaaatatcagcaccttttagctaggttgcttgaagggccaagcaatgagatgaggactgtcctaattcagtgcccaatgctgaaaattaattatatataaaacttctacttattataaggaggccatggagtaagtcagaaataatttttca

SEQ ID NO: 341454 - DNA, 1000 bp, Homo Sapiens
ttttttttttttttttttttgatgttttaatatgttctttgttgaatagcttattttacatttcagtcaaaatagttatttcacaggtgaaaccactaagtagcttacttcctaccttttaaattaataaagttacagtcagccacattgcttgagtcttgccaaaatctttagagaaacaacacaaactcagacatctaagtcagatcaaattagagcccaatatttttgatacttttattgtatatgactagttttctagaaaactattccagaagatacagtcttccttccagaaaatacagctttactgtccttaagtgcctaatcattttcaagaggaggagcaaacagtttgccctcaagtatctggtctatcaacaggggtctggctaaggaaaaaacggccttagagcgtgatgaacctacttaacactacctggtacctcaactcatgctaaacattctaatttgagcaaagctaaatcatgggtcttagtctgtttagcaaaatctccacaagatgaaatttagcttactaccccaaactgttcaatgttttgggtccaatttagacacaaaaaaatgttttataatcctagacattagattaatgaactttttaaaaacaaagtcatgtttgggcttagaagtttgcataatgttacacagaatgattatgatatcttccgaaacagcttggggttggggggaagttacacataggtgcatttgcataactatccaaactattttactgttttcacaagtacaacataaataacaaaggtgctaatttcaaagacaggtttcaaacaatgagaataagaatatattatttcatatcaggcaataataaccttagcccaaatacttttaacatctaaagtgcattaattgacttccttaggaattttcctaaggaccaaaggtagatacaaatggcctattttaaatagtaatattactccatgttcacagacacttaaaggcaatcact

SEQ ID NO: 341455 - DNA, 1000 bp, Homo Sapiens; identical to SEQ ID NO: 246537

SEQ ID NO: 341456 - DNA, 1000 bp, Homo Sapiens
tttttttttttttttttttttttttttttttccaggaaaggcattttcattttatttaaaaattatttacaatttattaagccttcataaatgctttattttaaaatcttttttttaaactttttttttaacctgaagaaaatctttgtggggtgggggtatatagggaggggagtggtgacaggctccatagggattttgcaaagggatgggtgtaatgcaacagcagtggcttgagcctggtggcctcaggtgatgaagaccagccaggcaggcaccccggggccagtggtcagctgggcaagaagcctgcatgatggtagttcttgttcaaaactcaccatttattggtttgggtctaagtacccaacattgagggctgacacttcgcctgttcctaccaggcaagagcaggtgttgggactggatgactgtgaagttatctacgagaagtcatgcactgctgagcctcaggccaggccaggcaaggggtgtggtgaagtcaataatcattgctggaaaaggcatctctagctccaaagtctttacttccacacgctgtggccctcctgtctgcaacacctgctctgggttgttggggaagaggggacaaagttatgtgggggtgttggttgtacaatactctagggtgtgccgagaatttctgaggacttccacttcttggtgggtgccagccttccccatcaattgatggacatttgaaaagaccacttatgattaaaaacctgtctcgaactgcccagtatccacttcactctgcattgcagaaacgctgggctgaaagttccactatttaaaatagtagtgtttttttttgtttgtctgtttgttttaactctttgtaggtctgagacctttgagaaccttatgaaagctttaatgctctggaaaaaacatacaagaataaatacattaaatactgacagttttaggggtttcatagaccctctgaagtccaactatggaccccctggggtga

SEQ ID NO: 341457 - DNA, 1000 bp, Homo Sapiens
gaattccccaaactttaatgctgtgctctgaaaagggaggctggaggttgtggtgggtcacagtgttgctgacacctctggcctccagccctgcatccctaggcaccatgtgaccaggcagtgagaaggacggggcctcactcccatgccagactgctcctcgggctgagcaggacctgaagctctcagggcttccaccaaagcccagcaaacttgggggaggcctgagggggcatcagcagtccttaaaggcctgagcttgcaacactcaggctggactcggctgagggcctctgtggtgccaccatggggtaggaggtaaagagagaccctggttccagcctgggaaccagtgggtgccctgaagggaggggaggcctcagggagttcgggacaggagtgtgcatggtactgggcggcccatgggggctcctggcctcttggttcaggcaatccctgagctggggacacattccatcttaggtccaagagacggaggtcaggagcatccctagaacgacctcccaggcacgaggaaggcccggggcagggccgggcgcagcgtggctggcttcaggaccctcgggcatcttgactcctgccctctgggactgcaaagggatctgcgggcgcctctgctgagtcaatcgtctggtaggcactacggtcctgagaagacccaaggaaaccagtgtggaccaggagctcacccccgcgctcccggtacatgtggtagacgaagcagcaggagagcggcttgagcagcaagctgaggatggccatgcccacgccaaagcggcccgtgtccgtgaggctgacccgcgggtagaagatgctgatgtgcacgatgtccaggaagatggtggccagcaagccacccagaaacatgcttatggcgtcgatggagtcccgctgagccacagcccacacgcccaaggccaggatggtgaagttggcccaggcataggagcctgagaatacaatgcagccccaggttgtc

SEQ ID NO: 341458 - DNA, 1000 bp, Homo Sapiens
actattaaccattgtatatttatttaaaagccataaagaatacgaaaaagcatgaacgcacaaattccagagaatttgttttttaatcaatccgatcaattttacacaacaaaatatcattaagaaacatagaaatcatgtgaattgtattaaaactatgacatatgacaatattatataaagaaaattttaactctaagagacaaatataattttttaaaaaagaaattaaaaatatcacgtcttatgctaaatatatatagatatatttattatgatgcagcaggttttggaatacagggatctaggcaagttaaaaataaaaagtttatatgcttaaactttctgaatattgtttgtctgatttcctatttaaatatcagacatcattataggaaatacatagtctacttacgattgcaatggcactttcaaatataaggcaattaatattttagaaagcagcaacttttactttttttaaaaaaaaaagctagtagcagcatgtaaaaatgagcattacgagaaactcagaaaaacaaatttaccctgaaaagatgaatataattaaaaaacaaagcacctttcatttcaaaaagaactgtaggctaagaccctcatctcagaataaccccatctaagaacactcaggctttctttatttaataagcagcagcagaagaatacatcccattctacatactgactgtgttaaaaaaaaaaatgcagtccatatgcaggtagaaaactaaagtgcaacagaagcaagttaattagagtgtactcacttatacactatgcttttaattagttaacacaaaaatgtgtaattgataatttattattggtcctacatattatttactggcatgctgtagaccatagagaaatagaatgtttactgtgttttattattattactctgtgtagatacatatgtatctatcatgtcaataaaaagaagcaaagcagtattaagcagcggtggaatttgtcgctt

SEQ ID NO: 341459 - DNA, 1000 bp, Homo Sapiens
ttttttttttttttttttttttttttctcagaaataattaataagaactttgattttattgcctttgcccactctcctgattctgttccccttttctttaaaaacaacccaaatacattccccatactacatactgattttagcagtgaaatgaaagaactctctttatatcttcctgtgtaagggctcacaaaaacaggcccagggaacagtgacctaaaatcagacaaatccaggttcccagtccccatcacagtttctccatcctactaacacacttaaggctcaaaaagcaaaattaatgcccaaacagcctgtgaggcacataaaaatggaaaaattttctatcctcatcataccaggcatcagataagatactaaaatcttccacagaccattcatttagaaggggttctaacctttaaaatcatgtactaacatcatcaacactacgacagggatcttggatcacacccatgatggcttctttgtcaaggaagcaaggaagttatatcattttggtgcctggaaattcctatgtggtcgattgaactgcaaagatcttggatccctgttaaaggttgtggatctccacataaatgatatctctgttacagagaaagaaggggctgctgcacttgctagaatgtctctggctttgtatcagatgctacaaatttcatttcaaccaggcttccagtgtgccaaatgccaaacttcatgctttagcaagggaagaaaaggtgagattctaggaacacaccagacctctcagaaggagtcgaagcctgcttcacttggacaaagcttggtcccccgtattagcaccaatctcctgtcatttagttcctcacagattaaattatagcttctctcagagaagacctgggtacggagaaggaattacggtagaaagtaaagtagaaattccaagggcaaatatccacaaggtcagacatcacagcatctgaggctatataagaaagtggaggaattcaat

SEQ ID NO: 341460 - DNA, 1000 bp, Homo Sapiens
tttttttttttttgagtttgacaaatttattggtactttagtaaagacattcatctcagtcatttctctctcccagcttgaccttaggttaatatttcatttgggtcaagaaaataatacgtaggagaggtatgttattttaacaaacaggaaaatggacaaaaaattgatagtttgcctacattaaagtaagttaaattcatgtatcgatataattaaatcatgtaagaactaagagttctatatacatttccattgtcttacttgggcttattctaaacttaaatgctagtgaacaaagtgttaggaatatacacaggctgcttctctggagttattaccaactaaaagacctcagcaagcagctaccaccaataaaacagtctgaagctgcctccaaatataatattgtaggagttttcaaggaaatttttatactgtatgcttttgtctgtgactatgcttttaaagatgtgtttaactgtcacatttaaaaaaagttcatatacaatacaaaaatacaaaacaaacaccctacaatacacaaatctaacaaagtatatgtggtgagattccaaaaaatgtttgaagatgcattttctttccttcaatttcagtatctaaaatgtgctttttcagaggccattggtcaatatgtacgcatttaaaataaaccatataattttaccagtaagaaagccgatagttaagttcaattcaaattggagttcataagttagtaatttaaatccttagacaaagttacagaaagtgcatcttcttattttccatcttcatacaatgttaattttttttttggtgtttataccttttaaaaaataaaaacagccaaatacttaagcaatatgtacatttaaatttttggtggtggtttgtgttttaaaagaaacagcttccttacgatttgcctcaagttctggtggaaatgcttacaggaactagctaataaacaaaaaacaagagaagcacattcaaaata

SEQ ID NO: 341461 - DNA, 1000 bp, Homo Sapiens
tttttttttttttttttttttttttttttttttttttttttttttataattgaggacatgagatttattgaagggaaatcctcaattaatatgaacatttcttgagaaatgggaaatttgaaaacattccctcccaccataatcaaataagactctaaaaggatagaaaatggatgctttttcttataacaaactaggctatgccctgttttttactgttttctattgccacaaagtcaaattgcgtggggtctttttaaagtccatagacatgttcactctaagcagctgcccttctctttgaaaacaatttctatccagggccaagtaggccttgctcagaatcctatggcagttgacctgagccttgggctgtctcagggacatttctttagcaggtgcattgtgatatttttcacagccagcatagtttctgtacaggtgggtttgatgagcatctctgggagtaaaaatccaaaatatccagtgtcacgtagttcgaaagcaaatgcataaggtattccatttttgtaggcccaatccattgagctaccagagctcacatacaacgttgtggaggctggtccatatctgtatcgtaccccgtatactgactgaagtgcattcacagctttataagctgcagattccacacatctaaaattgggaattgttgcatatttgtaagaatagggatacagtaacatctgagcatatgcatgaaaggagagataagccctaatgtgctttctgtgttttcgaaggaagttagctacagccttcacttccggctcagattctggaaaagggccacagtatgtgtcatcacaagggtgcatagaagctccttcatcacaccacttcactttccagtttctattggcatccactccacggcagcgaaaccttgagttccttgaccttgtttttctccaaaatcgatcattggtccaactaaaatggtatccatcgacgttaaacacaggcatgatatagaaat

SEQ ID NO: 341462 - DNA, 1000 bp, Homo Sapiens
tttttttttttttttaagtctggcaaggatttattaggaagcttattagtcacagtgaataaaagccatgaaaagaagaactcaaatctccaaattctggcatcggacttacaacactagttagaagctaataaacattaaggaatttccaaggggaatcttaactaagtctcaatcttactgaccagattacccacacacatagaaatgatccccatgctctccccagactgcttagctaggcagtggaaaagaccttctccccaagcttaagctatcacgcatcagcaggagactcctgtccttctagctataaccacaggacacatgtgcgtgacagacaactccaagctgggcaacttgacaagaatgctgaacaatgagaggggaaaggagcaagcaggaacaagtgttttagttggagaccctcctgatggctactactaacacaatccggaggcatcagaaagtttcctatagcccacaaatagtttcctttaaaaaaacaaaaacaaaaacaaaaaaacaagtcacacaacaatcttgccacaaagcaacatgacacttggaatcacatggccacattaactggaaaagcaagtgttatccatgactgccagatgccacccagcccaagacccaatttccacagcgccctagagaaccacgatggtcccctggcacctacacaaccctcccagtggtgtcgtatcttccgtaggccaggtttctgcagcaagccccaaagacaaagcttggcagaggctgtggcagccaactctctctggagcctcatccctttgtccttcccaacaggtagtcgtacatcttcactgacacagcgcctctatgggagccttggccagcccttaggaaataaagtgtgtctgtggggtaacctgatggaccctatggtctgctgggttggcagatgcttcgtaattgcagatggtcacctcgtgtcggcgaagctcagtccactctcctctcaggccaatat

SEQ ID NO: 341463 - DNA, 1000 bp, Homo Sapiens; identical to SEQ ID NO: 159907

SEQ ID NO: 341464 - DNA, 1000 bp, Homo Sapiens; identical to SEQ ID NO: 246538

SEQ ID NO: 341465 - DNA, 1000 bp, Homo Sapiens
tttttttttttttttttttttggacagaccagcatttgtttattttggccaaatgcatgccttgtttgcatctattctcttaatcagcagcagcatctgctatgctgtaaacactggctatgttgtaaacactgcaaggaaggaggctagaaacaagggccagagtctatctcctgcccttaaggaaatctattagattactaagccagaaaaacaaatgcaacaagctgcttcaatgtattctttcagatgtcaaacacagaggtaggcatttactgctgtgagcataatggaacacactagcttgagacatgcttgtaaactggctggtcctgaaggacagccttatgcccacctgccgttagaaggcaaccaagatttgcttcaggcactttttttcccctttttaggaaatcatgctgtccaaccagtcttccagctcttcctcggtaacatttttggaggtacttggttgctcaggttccatgtttttttcttcagtcacagatggttttgcacaaacttcttcctcttggaccacctccccatcttccttggatttcaggtcctgagacgtctgatctggtaagatgttatctccctcttttataggtgcatctaaattaagcaacagatctagttcttcttccaaatggtctcctgctgactgcagtggggaagtgggtttctgagaatcccttgaaggacccgggcttgggttgtctttgcccagcaacacagggcagccagcagccacagatttcagctcaaagatgggcccccttcctccaggccccaagggcccctttaactgcatccctaatcccttgccatcatcagttctctttggtttcacctgaggaacctctaaaggaactgtaccctggaccagttcggcagcaacgttgagtcggaggcagagaggcagctcttgaagggctcgaaccaataactcactatccacataaaatgctgaattctgttttggacaagaagcttc

SEQ ID NO: 341466 - DNA, 1000 bp, Homo Sapiens; identical to SEQ ID NO: 159908

SEQ ID NO: 341467 - DNA, 1000 bp, Homo Sapiens
ctttataaagaatgtgtccatttattttattattttaaatctgaactttcataaaatgatggttatctgcatttagctccaaacgtttttgtgacgtgaagtggagacaagcccaggtttggacctttgcaccttactatcaggtccagcggctgcaccattcagccttgtaacttaatttgcatctgctgagactgtggcagccccactgcaagtgactcagttttcttgtagtgatagtaagtaggggatgctgtgctcctgactgcatttctcttacagctggtcaaagtcagaaatgatggtgaagtacaagagggtgccccagggtacatgggaatgctcgcggtgcctgagactctggggtggagagaccccagtggggttccaatccctcaaaaggatgcagcttaaaaggggacctaaaagaaacttaagcttgaagtttctgagatgtagcatcatttctcttccttcctacactcattctgtcaggctctttctttttacacactgccccctcttcaagaccccatcaagccaggcccctgcagacagacagcacgccatgtgggtgtaggaacatgcttacgtgcatgtgcgtgtctctgctgccgtgccctcctctgctgcaggctgaactgctcacacattggtgtgctgagagcctgacgacatcatgctgcccagctggctttggcctgaaggtgctgagctggctgcccggctcctgcttcgatccccacctcctgggctcctcagagccggctcatccatcagcttgagcttctcatgctcctctttcaggaagaaatccactaataagctcttctctttcttgatctggtcgctgatgtccgtggggatgtctggaatcatccagtccacgaggacgctcaggaacatcacgaggttctggaagattatgacaaaagccagacgggcagacagaataaaccagtactgtttcgaaaactcataagggttcggggcccatggc

SEQ ID NO: 341468 - DNA, 1000 bp, Homo Sapiens; identical to SEQ ID NO: 159909

SEQ ID NO: 341469 - DNA, 1000 bp, Homo Sapiens; identical to SEQ ID NO: 159910

SEQ ID NO: 341470 - DNA, 1000 bp, Homo Sapiens
tttttttttttttttttttttttttttttttcttattcaataaactcttttattctagtccacagatttttccattacaataataatgaaaatagcactagtaatttgtaacactgaggcccaaagggaaacccctcctcaaattataaggtaaatgacacaaagttgaacatagggtcagtgttgggcaaaaagcatttaaaatatagataacggggtcaagattttgtgtgtgtgcaaacactgggttttgtttttcaggatgacaccattttagaaagtgcatgattttgaaaactatatgtgtaattgtgacaaaactaaactgtagagaaaagacaaaatcaagcaaaaacaaaaaccaagaaaccaaaaggaagcaaatcaaatacaaggggcggatatgcaaacctccggtcctttggccctggaatggcaagtgagtgggcttcatagaaattctctgtagaaaggaatgtgtgggccagtgtggccatggccctggcctgacatcgctgagtctccaagtcttgtctcctcacagaggaaaagaagttgcttgtccgacacatctgctgggggtctgcccgagatggggccttcgttcccaatccctttgagaacagtctcaaatcctgaaaaggcaaggcatccctgcggcggccccagggcggcggcaggagatggggtcagtgtctgccccaggctctgccggagctgtctgagtggttcaccgggagtgggtgggcctcggtgttgaacacccagtcttccagggagagcaagtcatcttcagagaacagaagatagagatactttagtgtctccgctagaaagaagctctgctgcttgttgtcgtggttgggggtgctactgtacacgtcttggatcccagagaaaccggcttctgtccgacagtatttctccaaggccagcaccacctcccagccccactccctgtagatggggttgtgggtctgtcgccacaggtacatgtagc

SEQ ID NO: 341471 - DNA, 1000 bp, Homo Sapiens
tttttttttttttttgaatttcataattatcttgtttaatctcttttttttttttcacacttgactttcaggtcaacttttgaatctcattgtacagatgagaaaattgaggctcagaaggaagtgacttgtgcaaggtcatacagcaaaccagatgctaacgcagaataagaggcgccctaggatcctgcctggtgccctgcagtgcccgaccatctgcttagtaaaacctactgcttgctgaagttcctgcacatccaaccagcacacctaacgcaaagtatgacttctttgtggaagttaatgattaaaacctagtctgatctaaagcatcttatccatggttactaattaagccaatttcagtgacagaaagcatttcaaacagaacagtgttctcttaagctaaatctataggcctcaaattatggtggcataaactgtacaattatgatattttgagtacacttaaaatattttataatacaatacattaacctctgtagctttacattttctcttcattgcatgccacatgttgggccctgataaaatggttttataacttttgggggagggctttaactaaaataacttcatgtagtgtttgagcgaactaggtaataaaatctgtttgctgtattcgctgtctccagatagggctgtaattacaccacatgaggaagaaaggtagctgagtttcaatctagatcatttatgtaaactcagccttcttgtcaacggtgttctcaaattgcatgagtgcaaacctcaaaaatcatctcctatgaaccacacagagacagtgtccgattgcaggcctgtgagattgcttatattctttctgtaattggatgtctgtggttcaagaccaaaatttgacattctgaggttaaaagaacactctcaccaatgaattccctagtacaaaaattctgtttctgaaactcgtaaaaattaaagtatgccttaaaccaaagtattacaaatgaatacattt

SEQ ID NO: 341472 - DNA, 1000 bp, Homo Sapiens
ttttttttttttttttgcctggcaataaatattttaatttgtttcatttttatgatgacaaataattttcaagtttatttccttgtttaaatacaaagctaaaccacaaacaggtataatcaagacattgtgtctcacatttacactcccatcggatcctcttccaatttgctgaccactgaccaggctagcggggggtgggagggaagactttcttaggtagcaccgtcgtgaggcccgaggtggggttgggggggaatcaaagacgaggacagcctctcatacctgtctccattcacatttacctgggaccagggtgggcaggagacaccaggtcatggctcctgagccccggccccctggactgaagggacagtgtgtgagaatcagttctgtgaagggcgggaggaagcagtcacctattcctcctgccttcacagttaaggtgaaaaccttagccctatccttgattcctgggggctgccgggccctgtgtgctcccctgcacacctgggtgcctttctgaggctggcagcagcggccggggtcaggggtcctgggctcctaggctcacacctcagctcacagttgcgtccttgcaggaggacactgggtgtctgacaaacacaaggcctcgacagcaggtctggaactttcaaccccagcaggatgagggggaatgggggtggatgtcaggtaagtaatttctggtcccactacaaaactttatttttgattagagtaccattctcaatctcttctacaaaaagcaaaaaaaagcaaaaaaaaaaaaaaaaaaaagcagccacttcactcacttcaagacctatatacatgtaaagttgttttctgtggttttttttatttttaatttttttaaatttttattattattttttaaaataaattcagtgttcacatttctataaagaattaacccagtttcaggaaaccctgccccagcagggcaggtaagcaaccctctccctgcccacatcta

SEQ ID NO: 341473 - DNA, 1000 bp, Homo Sapiens; identical to SEQ ID NO: 159911

SEQ ID NO: 341474 - DNA, 1000 bp, Homo Sapiens
ctcaatcaacaagtgtttattgatcacctactgtgtgcctggcactgttacagatagtctgggggatacagagaggtctaggatatggcccccacccaccgaagggtttacaatatacttgtgagatcggacacacacacacaaataacgatcaatcaaaaattgtgaatgctaagcatcaagaagcaatttatacattgagggttgggggagggaggggtaggagagggatggagtgatcagagaaggctcaatgaaggaggtgacgctgaggaagttctccaagcctgaggaggacttggctaaggggagacggccttccaggttgggagagcagctggaacatggcaagaaggtggacatgtgaaaggcatgttacagacaacagatgggccctctctgctgacaatgaggttcgaggaggtgtgctggaatttttcagaagccagtcatgcctagactggtgagggaaaatacctttggtgtatgacccctcactcccactccagggtaaagggaacattttcggaccttagaggtggaactgtcttcctgggaaccattctccactcccacctcagctgcaatcccaggcagcagtgcagctatcactcagatcatggacacagcaccgtgggcatggatatgccatgctggagcccttagatgccctctagccactctggagcatcttccgatggacagtgggggaatctgaaggggctcgcttggtgctatggtctttcagaggctctgtagtgctctgtgggtggaccctgggggggcctgatctcatttgagctgattttccattacgcctgaagagtttctagggggctgcctctcactggcagagtagaaacacccactggagccaccacacacatccacctggcttcttagacaccgtcaaggaatggtgtcttcctcagtaccccacagctcccacactgtcatcccccagccaagggccatccctagaaaaactggtttactgttc

SEQ ID NO: 341475 - DNA, 1000 bp, Homo Sapiens
acagataaaagaggtatttgtgatagggcatgaagaccttaagaccctgagggtgctgtgaacagggaacagtctgatatctggaaccaaagggcaaggaaaggtcctggggctgaagtggggacaaggggcacaaaaagccagtgggggcaggtggtgctggccaaggtcagaggctgatgcaacaggccctcttctccccaggccaggctcctgtccagcctggcactgcccagagtgatggcattggtccggatgctgttctgtctctgcttggacaccttcgcaaagatttctttcaggacagtctcaaaggctagctcaacattggtagagtccagggctgaggtctccaggaagagcagtccattgttttcagcgaacattcgggcctcctcagtgggcacttcccgggcctggctgaggtcacttttgttacccacgagcatgacgacgatcgtggcttcagcatggtcatagagctccttcagccatcgctccaccacagcataggtctggtgcttggttaggtcaaacaccaggagggcccccactgcaccacgatagtacgccgaggtgatggctcggtaccgctccaggccagctgtgtcccagatctgagccttgacagcagcggtgcccaacatcacagtgcgggtggagaactcaaccccgatggtggtgcggctgtcgtggctgaactcattgcgcgtgaatcgggagagtagattggtcttccccacacctgattcgccgatcagcaccaccttgaagacaaagttataatcttcctcagttccattccccatcttggctccgcatggagggtgcaggtgtcttcggggacagaggcgacaaatctgtgtgttgctcaatgccctcaaccctcagctctcaaaagatctggtcctgcccctcctctcattgggggtgaaagggacttctgcagccaagagggattggggccaactcaaggttaggcagggcctagggagggatc

SEQ ID NO: 341476 - DNA, 1000 bp, Homo Sapiens
tagtgcaagctgttaactatttttatttaatacaactgatgaagttaacagacaaatatattttaataatatcacaaagttataattgttaaggtattatctatatttaaaggttttttaagtcaaagacttaacatttgaattttaactatttttgaaatgtaaaatgtacaattagtaatacccatactacgtattttagaattttaaagttttagcgaaaacatttgagtttctgcaggtaaaagcaatagttctcctgtatctaagaaaaaaaaatgtattactaaaaaagtgccactgaatttagacaatgctaaactgtttcctttttggggaggaagacaaaagtacataacagtatagaactagtcattttcattatactagtatagaactagtaatttgcattatgctttgtaacaagcacaagaatgcttatttatagtagatattaaccacaataaataactcctcaaaaaagatcacaactatgatgtgtgacaagctgttcggtcattgctgaaaatagtccagagttttttaaaaagtgcaatcttgaactaagataaacttaagtctatcaataccaagaaacagttttagggacttcatataaatacaataacctgtctttttttttttttttttttttttgtaaaataggtttctacctgttctaaggaggagaatagtggtagatggcaaagttggcaacaagtatgtttctagcaggtgaaagcctggtatgcattgccataaagtgcatcttttacataaggaaaacatgcttattagatgtatacagtacttttcaggcacttgacctcacttggtagctaagttggtgttcagatgtttgtttaatggaaaaacattaaattacatattggcttcaagccatgttcccatagaacatctgtgtttcataagctaaatccaaatgttccctgctaaaatcaaataatgatgccatatacccaattcagagaaaaaattt

SEQ ID NO: 341477 - DNA, 1000 bp, Homo Sapiens
ttttttttttttttttttttttggatctcttcattcatttattcatccatttctctaataaacatcagtagaacccattaaatttcagacactgctgagaaacagaggacatagagatgaataaaacacagttcctcccctggagaaactcacaaccaagtagcaaggatagacatatctataaataatgacagccattaaataagggctacatccaaatatatacaagtttatgtgtaagcaaggaaggttggtcacgttgacctgagttatgggtgaggggtgataggtgggaggtgggggctgccaggcagacaccaggggaaggctcaccaggcagaggggaatggagagagagagagaaatgaaacaagaaccagcccattgtctcacctggctgaggagttgggtttccaagggagaggaaggtaaggagagaagaaatctggactcagactcagagggctgtgaatgtccagctatgaggtttggaggcccttggaggatgttggcaggagagggcatgatcatcccaacctgaaaaaggaggcacaggactgtgtggcaggggaggagggcaaaaggtgttgagccaagctggatggttaggacaggagagacctgacaggggagggaaagcagtctcagaaggacctggggcttctctcagtgtttgaaatgaggccaggtgctgatgatgttgtacaaagcctgcccaggagacaaggttcgggccacatcactgtggcccaccagcaggtagttgggagtcaggtaccctttgaccatggcacactggatcaggtcttgggctgcctctagtgctgcagcattgggtggtatacctgtgaaggtgcccatgaaggtaatgcccagggcaatgtcatcgtagccaggggtggaggagccttggacattccagcccaccccttcataaatggcgccatcctggcccaccaggaagttataaccaatgtcgcatgacttgagcctgtctatg

SEQ ID NO: 341478 - DNA, 880 bp, Homo Sapiens
cttttctattcatggagttaggacaaccaaatgaaaagggaaaaaaagagatatctcaataaaaaccaacatggaagaacaatcttcctttcatattcatcagaaatagattctgtgggaggcatgttttaattcagaactcgggctgacgcagctggacccggtgtaaattcgcctcacggagcagggagtccaggcactgtgttcaagcagcgacggaacctccgcagggtcttcaaagcagctcgatggtcgacgactggaccggttctgtgggctttacatgcttctgcttctggggaggcctcaggaaacttagaatcatggcagaaggcaaaggggaagcaagcacatcttcacatggccacaatttcccagtcattccttaagcgtaatttctcaagacaacatctttcatatcttctcagcatcactttttggaatgaaacttgcaggccctgctctggcaaaatgtcttcagtaagataagaagacaaagctgagtgtttggctgtcttctctgtgttcacgttccagggctctttccttgcctccagacagatgatcagttctggcttagacatagcaagactgtgaaataggaattgcatattgaagctatcctcaccaagggagatcaggtttctgtagttctctaacatcacatccctatacaaactccgctgagctgggtccaggcattcccactcctctggagagaattctagagccacatccctgaatgccaatagtcccatttcccagcttttgggggtcccagcgtcctccctataaatctcgcaatacctgcaggccacagggcgatggagcctgcggcagtcacccgggaccctcgtgcctctccgagaggcagcagacg

SEQ ID NO: 341479 - DNA, 887 bp, Homo Sapiens
ttctttcactcaaggaagagccatttgcattcttgtcctcacacctgagtacttgtcacaagttaaaacactggccaaatcaccacctcaggactccttgtatgcattcagataaaaacgtctggggtgggggaaggtgctttccctcagttcttgttctcacacatctgtcatttagttggtcacagttgggcaggtagaagcgggttaaaagttttaaaactcataataatcgtgtccagagataaatgaaggctgttgttaacaagcatgacagaaaagcctggaccagctgttttctccaaaaagccagtggaaagggggtcctgaagaagtgacaaaagccatcccagccgccctgagcctgcagccaggcgcggtgctgccccatgagccgcgagctcagcaaggccaccaggcgctggcagtcccgggcgacgtcgccctcctgctcctttagccgcggctggaagccccacttcttccaccgggcggtcaccagcggccctctctccagcagcgtccctgcgaaggtcacgagcgtcaccactctgccccaggtggggccggggctgtcggagagcacggaatccgccatcagcgccaccagctcgaagcggttcccggggtagccgaggtaggcggagaaaaaggaccggtgaatctgccgtaacctggcggccgcggagcgcagcacggcggcctcgggcgtggatggcgccggctcgggggtgccgggttcccgggcgcagtaccccaggtagtcggccagcaacagctcggtgcgctcccgcagcgggtcggccatggtggtgcgctcccgcaactggtcaaccatggtccggcctctgctggggggccgggccttcgctggttttcttggcccg

SEQ ID NO: 341480 - DNA, 1000 bp, Homo Sapiens
ttttttttttttttttttttttttttttttttttttttttttttttttttttttttttttttgactatcagtagtgattaatttatttagcactgccctctccccacagtaataaaaagcactgtacataatgccctgggaagaagttagacatgaactccaatacttcaggacaagtatggttctcaaagtgtgatccagggaccaaccctctgaggaagtccacgaggtcaagctattttcataatactgctacacagatgttatttgtccctttcactctcattctctcacaagtatactgtagagttttccagaggcttcatgaagtgtgtgtggtgacattattgctcccatggctaatgtaatgtgtgcatgtgtatttattttaaaaatgtattcgctttaatttctagtatggtaagtatcaaaagaacaaaatataagcaaagctctttgagatcctcaatttctaagagtggggtctgagaccaaaaagtttgagaaccagtgctttagtagaaagaattttatccttactctggacaaaggagagagagggagagagagagaagaggagaagagagaggagaggagaggagagagaagagagaaacgagagagagagaaaaagaaagaatattaaggacctaaaatggaggaggcctggaaaaggggatgtgatggaagaaaggataacctaaaaagggtttggacttggatgttgttgagggggaaactctaagttagttttgccttgccccaactatcccatgctggatgccaagtctaaattgtcacaagtcactatgcgagaaagaatgtagttctgtccataggaactcttgtattaggcctcagtggtgagcaggggaagcctaggccgaaatgaaagggggtggcatccatgagcctagacagaagtcagcagatgaacaggcatctcagtagctttgtccaccaaacctggtgctcttcagctctcaggcccctgtggcgg

SEQ ID NO: 341481 - DNA, 1000 bp, Homo Sapiens
tttttttttttttttttttttttttttttttttttggaatttgtaaaaacagaaaattttaatttttatatagttttattaacaagcacacagagaaacgctgatatccctacatgttgaaagtgtcacgataatattctgaaaagtacaaaattcaaatgtctaaattttacatggtaatgcaaaagaaaaaattactaataacaagtatattttattaaaaacttcatttatcatgaaaattagtgagattacaaagattaaactataactgaatttcataccctaatgggtcaagtccctggtctaggagcattagagaggactctctgagcttctgcagcaacttccttagctcttccttagaaaataccaggtacagtttgtggcgctcagaggataccatatctgctaactgtaggcattcctgatactgaccagtactgtgcaatatcgtatgaagcagaaaacacaacattggcagacaaagctttctcagtaagaccatttgatgtgttctttcatggtcttctttggcatcctctctaacatccaccatccaccctccatcaacaaacaacaagacgttatacattttctccttcacatcagcagttagggcatccaaatgccctttccaaataccaaaatccatttcatatttcttttctttgtgttcatgagccactttctcagtaaaagttggttgaggtatcaaagcaggtttttgtggaactgaattcatatgcttaaaccactcattaaaggtttcatgggcttccaaataagctctgatgcacaaatgttctcggatagcattatcatcttcagcaggaagtggactttccattccttgttcctcgcactgattatagatttctgctatagaatcctgaggaattttcacaaatacttcttttgcagcttcgtgcttttttgatgccaagaattttctcataattgcattgccttgtttcagtgcttctgccctctgcgctgg

SEQ ID NO: 341482 - DNA, 1000 bp, Homo Sapiens
ttttttttttttttttttgctaggtacacgcttactttattgagtcagggatttggggcgaaatgtctgtagggcctcctgctctggaaactcgactgagaatccccgacccttttccctgagcccctcagcagggaaaggtaacagccaaagccctgcaaagcagccacctaggaaggaagacaggaaatgcagcagtacagttcagtttctcattataacccatgtgctccccactgagagctccaatacccagcacaaacaattctgtccctccaagactgtactctgtgatcttggcctttgtagagttcctcttttttttggaattaggggagtggcaggctctggacttcctttagttagggtgtgtagacaatgagtgctcccttgtggattgtgaagtcaagtgtctcaggatcttaggagcagtggggagagactggctggcccaaagaccagcaaccacttggccgtggctgtccctttctggaggagctgtggctgcagcagatccctgtgacttagtcccagccctcacagggcctgcaccagcaccaggaggctcatgaccagggccatggagaagaagatggccaggaagaagcggtccatcacacgggccaggcgcttccagtcctcatggcagcgctgggcagctcggtggctgcggaaggtattggcaatggtggctacgtggtgcagtagggcttcctggcggcacagacatcgtggctcgtggcaagggcccgctggggggccagcccctccttcaggcgactgggggctaggagataactcaggtggcctggactgcccacagggctcccctctttcccgcacgcacaggccccgtgccaggtgtcccagcaggagggccctagcccaggctggcactgggcggacactgggaccacagtaatgcaggttcatgataaggatggtgagtgctgttgagaatgtgaccatggtcatagtggccatgtagtacttcccgatg

SEQ ID NO: 341483 - DNA, 1000 bp, Homo Sapiens
ttttttttttttttttttttgacagcatagactttctcagatttattgtatgtcctcagacagtagataaaaatgcatggggtttacttccagggatttacagaccaatataagtaaacagctggggtttctttttaggctgtttctcttggaggtggtgcaggaggttgaggaaagcacctctgatgagcagatagctggaggctgttcccacagtcatgtctcagcgaagaagtcggagttcagcagccatcagaaccaaggtatgtgtggtgatcttcggaatgccactccaaatcctttgcactttcttttgcacacagcaggagttgtaaaagaatgcttccttttattattaacactgagaatccatgcagagagtttacactaaacacatgaatacattgtgttttagaaggctgggtgccctcagtccccagatctttgaattctaccattaagttcaggtaggtttttggagacagagattggccgcatcatatctgtgacactgactcttctggtgtaggtttgcttggccagggagtctgagtgcagcccctgatcagtgcttcatgccaatctgtgagtctgttccaggaactagaggagagagagccttagccttgcctgcaaccagatgaatggttagctttagtggtgaacactttgctttttgaatagtgtggttggctggcagctcttgtcattgtttatctctcaatttaacaaaccaagctgaagcctgagcacagctacaaccttgtccaatctctttagcaacaaaatacctgtgtgtgcatatcttattgctcaaaacattaaacaaggctgtatacaaacacacacacaaacatacacagatacactgtacaggagacccctgataaaacacacaaattttaaaaatttatttttaaacaaatgcagtgggatgatcatagctctctgcagccttgaactcctgagctcaagcaatcctcctgcctcaggctcccaa

SEQ ID NO: 341484 - DNA, 1000 bp, Homo Sapiens; identical to SEQ ID NO: 159914

SEQ ID NO: 341485 - DNA, 1000 bp, Homo Sapiens
tttaaaatctcagatgctgctttatttaccaaaggtgctggcttggggctggttctgctggccaagccagcggatggctgtgggggtcccagctcagtcttccaagggcgagactgtacagccttgctgtggggggttgggggcagggttccctcccggggccctgttggggttcccgcccagcggcagccagggtgggcagtgggtaccagcactgccatctcaggaaggcactttcagcttcggggtccccaggaagaactgcaggacgcggtcggccaggagcgccaggcagaagtccaggagcaggacctgggcaatgaccagcttgaactccacagggatgtccacgaggccaaactggctgttgaagtcgggcgaggagccgaggagcaggccaatgatggccaggagtgaaactgccagactccacaccaggggcttgttctcgggcaggctctccatgaagggcgggcctttgtaattgatggcgaaggtggccatctgcatggccatggccatgatgtagacggtgctgttgaccaggcttggctcaaactccttgtacaagtccacgaactgctcctgcttctcggggctccgggcctgggcctcacggtacaggtagacaaggctcaggaagtgcacaaagaactggagcatgacggtgaggatggtgtacaggttgaagatgttgggcaggggccgttctcgggagagggtcttgaggggcttggaacgggagatgaagaggaagcagccggccagcagcagcccctgtagggtggcctggaagtcactgaacttgactccctccaggtagaggacgctctggctgtaggccaggatgagggcattgagcgccaggatcttgaacatctgtagcgtggtcaccagcgtgcagcggccctgcttgatcacgtggcagatgcactggatggatgagagcttggaggtgaagggtgctgcgatgctggcatcccccagtttcacaatgggc

SEQ ID NO: 341486 - DNA, 1000 bp, Homo Sapiens
tttttttttttttttttttttaaattataggaccacatttattaataatatacgttatgagaacaatcatttgcagtctcactgtgaaggcaaaaaaaaaaaacaaaaaccaaaacccaaaggataaacagaaatagcacagtccaccgaatacactgcatggtgtttataactgtataaccaaactaagtaatctttcccctctctttaacttttatgcaccacctgccattctagatactatcaatcacactaaataataataaaaaccaaccaccttcaatctgatcattctgggcaggaaactgaatacagttttgaccagatcttcgagaaagattcatatacacgaaattaactagttctgttaaaaggctgctataaaaataccatcattacgagctatacagaactttagaatccagctaagagtgcagaaatactgaatttcttaatttatgtggagggggctgtaaacccaaaggtagaagggcatttcagcattctggcgtgttcagagtttctagggtatagtatctctctaacacacagagagcatttcaaagggtggctatggccaggaaacctcagagcgggttctgccgtcacacttgatcccgaaggcgggccagtctctgagacagttcatcctgctccgccgaagccacgctcgtgcccacggagccggtctggccctgcggcagctccatgttgaggtcgaggcccgcctcatctgccatttcctggagcagcatatccacttggttctggggagtggtgagcgtcgtcgtgctgctcatcgtgtcttccatttgctgcgtctggacgtccagagtctcaaactggtgctcgaatttgtccatcaaagcagaaatcttctccagattcatggtcttcaatgtcgcatccatcgacttaaccacaccagccatcgacttggtcaccttgcccatcgtcaccgccgtctggaccctggcagccactgcatcgactcgcgcac

SEQ ID NO: 341487 - DNA, 1000 bp, Homo Sapiens
tttttttttttttttttttttttttttttttttttttttaaccttgaaggagtttttattgaaacacagtacagaaaacaccaaacgtcactgacagcagtgagctcatagctgtaatggagttggccccagatgccaaaccacctcgctgaggtgtgacttcctctggagggtgacatggcaaggaaagggaaggtgttctctgtcaaattcagagaccatgtgcacctccaacaaaatcacactccctacaagttcagtgtgcccccagtggcacccgtggcacatcttgacaatgggaagggttaacggaagtagtggggacatccaacccaatggcacataccaggaatgggaatgtaggctgctgagtcttcttggagaagaagagagagctatgccacagttcagcttgtgggccctgagacaagggccacagtgtgcggagaggattccaaaggaggaggaggatggtgacatggacagtgactctggggctgcgggccacgatgtggcaaaaatggagcagctgggtggaggcaagatgaggggctgaggagtggaaagacaccagaatggggcagggagagcaattccactcagagtggagcagggaacagccagcatattagggccaagacccggtcagccagcttcaaccccttcacacgcaggatgagctcatggaggttgatctgccataagttgaaggcctcgctgaaagagatctgggtccttctgaagaatgaacaggtattcttcttcttgtgctcagctagcgctctgatgcagcaacgtgacatgttgagaaaggagctggcgctggcgcgggtgcccagggcggcctcaatgccacgcagcaggtcgttggtcttcaagatgagcagcatctggcgcggcacgtggttgaggagatggctgatctgggggaggtagttggccgcgttgttgcgaatctctaagtcctcagtggcagtgacgggagcttggctgatgcctc

SEQ ID NO: 341488 - DNA, 1000 bp, Homo Sapiens; identical to SEQ ID NO: 159916

SEQ ID NO: 341489 - DNA, 1000 bp, Homo Sapiens
ttttttttttttttttttttctagtgaaaataatctttatttgacatttagagaacaggattgtggggaatattcttattaagaactttggtacaatgtactacatgtggaacagtcaggaactgcctaggtccacaaagaaccatttactcagatagtctaactgtaaacaaataaataagctgcctaaggaaacctcagcaatttaaaatcatttatataatttatagctaaaattttttaaagttgtatttcataatagagcttactcttatgttaaagaaaagaatggcacaaaattaagctaaccagcttgaattacattttctttacttccggaattgtcctggaaaaagcagtaaattcgacctctcctcagctacttgctcttcatagaaactggcctcagtcaaatgcacaaaggctcttcctcctggaaaccagtactgtgagcctcaccacccagggcttttagccagcactcacagtcagtctcctacttcagttggcacagactggataatgagctcctgggatgggaaaagcaggccactttggggttttcttgtcccaaagcctgcttttgaggtattgattttttttaaaaaaagggaaacctttttcctaaagtttaactcacatctattgtcaccagttattatcttcccagttcagctccccttcttcttcccagccttcagcctctccctcagtaatttctgctgcagcaaattttgaggaaaactgcatcactggggagacatcatccttttttgggaccatttctgtcctcagttcaggtaatataagaaaagcagcagaaggcttaatttctgggatcatatcagcaaaccaatccatctcaggatcttttactggcttcttttttacttgaatggtgaattcctctcctaaaccaagttctgatggaaccttaaggggcctttcttgtgatgacacttttggcggctcgatttggtctgcgtcatcccccctttgt

SEQ ID NO: 341490 - DNA, 1000 bp, Homo Sapiens
ttttttttttttttttggggctcagtagtaaagattttatttagttccatgtaaattcaattagctaagttctttaatacctaccaatcacacataattacattttcatgtaccttacaaaaccataataaagtatgacaaattaaaaataacattatgataaactctgcctgtgctgttattattacttggtaatattaatagcgactgaagcaagacttcagaggtgagatttactactgaggcccaatgacaatgatttggagaattaggtatatatctagaaatgaaacgggtccagaaaccttgtaagaaagatttgaattctataaggcagaatctggccagacacaggggcctagccttgacctctgtcctaggccccgggccaggtgccaggacaaccaaggccattctgcttctcacctccagtgggtgctgaccgtagggctaggctttgtttacactcatttttacccccatttctgtccccacttccataaaagacacttcaaaatgctgatgcttcagagaataagaaacattctgaaaaggaaaaaaacaaaaaggcctgctggcatataaacttcaaaagaaaaaaaaggtacaataaggagaccttatctattccttatccattgagtagttgtagtttttaaataactataagaacacttggtcttatgtttataacattacagtaacattaattaacacaaattaacataaacaaaattaattaacattaattaacataaacactaaaatagataacatttagttgtagtcaaaatcatcatacctcagtaaaacatactttttttttttttttaaagaaaaactccaattactctgggatattcttaatccttattttagtagctgagtggaaggatcttttccattaaaataaaattctgtcccaaaaatagctaaaatggaaactgaaatatatgaaccatttgtgacactataaaaactacttgtcagagccaactca

SEQ ID NO: 341491 - DNA, 1000 bp, Homo Sapiens; identical to SEQ ID NO: 159918

SEQ ID NO: 341492 - DNA, 1000 bp, Homo Sapiens
aaagtcgtgagtttattgcatatgtaacaaaatgaacctgacctcctgggcccagcctgctgtacaatcactgtttgttttgtgtttccagctggttccataaccacattaaatagaactagtatttcattaaatacttttgattttgacatagaacattagtgtacaactttcacaaaataaatcagtgataaaaacagtgggaaggataacaaggatagcagcaatacttcaaaacaagacattacaaaataaattaaaaaatacgttataaagtggttgagaaacaaaaataaacacatttttaaaatccatactatgtttcgggaaggctgccgtgtggcacacacctggctgcagatggcgggtggggggacattttctctgcagaaggcctttcctgacatctcgggttgggtgaccaccttaatctgaatttggaccatacgtccgaacaagctcaggggtcgaaattcgatctggtggcagattctcttttcagaacttgagagagcccttttccggtcgccccgggcctcccaggcagcctcagctcttcctactgaaagcactggcggagtggtgttagctacatccctgagtgtcggctgacggccgctggtgagggcaagcctgaaaagccgggcccctgaagcatctgggcagaggggcagggggcatggctggatcgcctgggaccaccgagaggggcaacacagatcacacgtgagtgggcttcgcgcggacccaaagtagaacagtcgggaagcttttaccatttgctttgccatgttgagttctttggggtggttcaaaaggaccaaacaaaccatcgtagaaactgaaggttctaggagtgcagtgccaccgacagggaggcctgtttggaaagagtgaaccggagctctggaaaggtctgcgacactcacacaaccgatgacaaggcggcaaacccacacgcaggtagaagtggaaaagcagagacggaggccaggatggg

SEQ ID NO: 341493 - DNA, 1000 bp, Homo Sapiens
gaggttgggaggacttgtttattcaaggcacggtcatagcattaacaagaaggttcagcattctggcacattccttttgtggtggtggccaaggttagcccacaccccctcccccccgaccgggggccccagaggacgcaacgctgctgataggcactttgcttccaggggcagtggagggtcaggcaggtgggcatggggccactggaggcctgaggagggcccctcctggaggctctaggcaataccggttcctgggcggcagctccttccagaaaggattaagtcaggaggtgatttggtggatggagtggggtggggcggctgggaagtggctggcagaggagtgggatggcagtaggtggggggaggggggcaatgggtgaggcaggtgtgggctgaggcaggaggtgcctgagagggcctggatgtggtggcggggggaggctaaaagatgccccctgctccaccatcctgtagtgaccatgggaggtccagatggagccaactgccatgaggctttgctggttcccctaagagtggactatggaaccttctccacatgctcaccaccttctctcagagccaggctacactggacccaggttcagagggagaagcccccagtcatcccgccacattgtctgccaggacttttcccatatgtggcttccacagtccggcaggggctgcaggggctgggggcaggggccagggagctgtgtccagcaaagaagagaccccaggccagcttctggtgtgacccccacaccccatacaccaaatacacatgatggggtcgggcagggcctggagctggccacctccccatcatgtgccaagctcctgctgggcctgaccgctatgctgtaacagcgtactttccccttgttggttggtgaaattccagtggggagggggcctgtgggacctgggtgtgtaggggccaggctaggaccatttcccctttattcctagctggacaaggaatgggaaagac

SEQ ID NO: 341494 - DNA, 1000 bp, Homo Sapiens
ttttttttttttttttttttttggtcacagaatgttttattttaaacttactgtaaaactttcaaatacaacacatgtggcaaagaaacaacagttcacacacaacatctgccacaattctctttgaactgccatttctatattatgtgatattttacaatttctttcaatttcttacattcatggtattcttaaaggcagcaatgtcaatttttctgctttgaaaatagttcagttaatgttctgaaattgcttaacatgacattttccttttagtattctactgctgcccacactgacataattcaacatattatttataaactgttgagaggtatactgtacttaataaatcaactcccaactctaagttaacctcaatctaaaacaagcattttcttaaaccagtatgctcagctacttttctcaaaaatatttccattctgaaataagattttttgtgagatacaatagtttcatcttttattcctaacagaactcatgccgtactttttttctcaaaatatatttgatatattctgtgcaaaatgttaagttctgtataggcatgtaccttatattgaaaaagtttataaaacataattcctaaaaacaacctcaacattagacaatagaggaaggaaaaacatcagacaaagcctaagttttcacatgagaaactaagtatgttcttaaagctccagtattacattccttgaaaaaactcagaatgcactttggtcattattaaacatatttgaacataggcaaataaaatgaaatgctttctgttgtttttcatagaaagaaaaaacatactacacaatgaggctgaattgaggctgatcaaaaggaatggtaagagcaaagtgatatgacatggctctgttctccacacattcctgattttaagattatgatttagggattagaactgcaccaatcaaataaattatttacaattaatcgtcttaaagttcttaaaatatggtaaaaatat

SEQ ID NO: 341495 - DNA, 1000 bp, Homo Sapiens
ttttttttttttttttttataaacaagttagttttattttactccctttcctcttgaggctgggtctgaattagggaggaggacagacaggccacaggcaggaacccagagccccattcccccagcatggccaagcccccaggccctgaccaccacccattgggtccaagctgcaaggcatatcaacatctttgcagaacttcaagcctcccagaggaacggaaggccggcatcgcagaagctcaaagagggtatggtcctgtccaccccaggctcccagctcccagtctgtctcagtttggggctgggaaggggagggctgaagaaggagccccatttgctgttgcagggaatggggacacgcacccccgcacccccaccaactgatgcccataccaggcaccctgggccctccatgggttgctgcagggaagcacaaaggggagagctggcatcccagaggacctattccagctcaggacaggggtggagtcaatgccccactccccctggggttcagaccacagcagagggccctttctggctcctaggcctctctccaccccaccttggccccagtggtgaccaagccagggcactcctctgccgctttcagccccttccctgagcagcctggctgcccctctgggcagagtctgcctgaggccaccggctaaggagaaggctgaggagaaggggtcgcaggtttccaccggagccccccaaccctcctcctccctggcccagctcgcaagccagcgccctcagatccacacggtggtcttcccgtccctgctgctggcactgcccttctcggagccagccctgggcttggctcctggccgctcgtgggtgccgggccggccctgctccccgacagtgcccgcagaggtagcactgcccgtccgggacgcgggggcgcctgctctggggggcccccgggaggccgcagggaggccgacgcacggcgaactgtcccggtcgcggtccccagccgctg

SEQ ID NO: 341496 - DNA, 1000 bp, Homo Sapiens; identical to SEQ ID NO: 159920

SEQ ID NO: 341497 - DNA, 1000 bp, Homo Sapiens
aaattaaacttcctttaatgaaataaaaaacaaatggtgcattgcataatatttgtggtcacagtataaaacaatacaattagttcatataacattggatatggacaaaaatacacaagatcctttctttgtctacggaaaattctgcagatccttatgtgccacacttaaaaagaaagtcagcgttttctcttctagggatctgcacacatatttatcactgagaatttggtcaaacagtggaggagaacttacccaaatcccagttcccttcttcctctgttgtcatcggtgaagctaaaaaaaagttttctgaaagtagcaagttgtgtagtattgcttattattcctgccaaaaaggctcagtctttggctcacagatgtcagtgacaaaatcatggctgcaggcagtctgcaaagcaagaagcaagggccaccggggaaacaaacgaaggtctgggcaggaggggcctcctctaccaagatctcagggagcccctcagatggtgagggtgagggggggaaagacactcaaataaatacatttttaaattaaaatttagcccagttggtgagtcagagttctactgtcccatgaaacatctcaacagttgttaaaaagtcgatttgcattttttttcaaagtgaaacgtgtatgtaaacatcataaagtaaacaatttacaggaatttcgaggcttctatctgaacatagcttaggctctttctggggctatttttatgattaggaaaaaaaatcccaaacttttataaagttcctttttgttaagaagtgcaattccacctgtgtgagacgcggctgggtctctctttcattcacaccagtgctgctggtaggaacctgttctagaagagcacttgtcgcaggggtggggtggggagccctatttggtacaacaaaagagtgcatctcaccacattaaaaatacacattcctggaaatttatatccctagaaggaactaggtccttggtacaatg

SEQ ID NO: 341498 - DNA, 1000 bp, Homo Sapiens; identical to SEQ ID NO: 159921

SEQ ID NO: 341499 - DNA, 1000 bp, Homo Sapiens; identical to SEQ ID NO: 159922

SEQ ID NO: 341500 - DNA, 1000 bp, Homo Sapiens
ttttgatatttacaaatattctaacagcttttattacaatggtgcaaggaagtatttcatccaacactcaccgacaacaaaccatcatcttctataaaacagctccagaaagttcaaacaaaaaaaactaaaagatacatgtatctgtagtaattctcatacattactgtttagtgttcaaacttcatgtcactccaataaagtataatcattttctagcaaacatgtggcaaaaaagtttgctgttttatttgtttgcctataaacatatcagaacatgcctcacaattaaaaactttggattacagcactccataacatcaatatctattcgtgcttagtatcagccagttgtaccaaataccataaaatacaaaatgataggaaatataaacatcgatttgtatttcaagtttaaacattttatttacaaaaataggctgggaggaaaagggtttgcgcccccacattctctcctgggacctaacgattttgcgccattttctaatgttgttttctctaacaattttcaaagtcacatttggattccttcagaattgtatttgtcagctagcagctcggaggaggaggaggagggagagcgagggtgaggagggcgggagaaggaggaggctggcagacagcggtcggcacacggataaatggcttttactgaagggcccgcgccgcgcctcatgcaccggcaatgcaagcacgctgctgggcagcaacaccgacgtcgctatttacagaacggcggccttctctgggttctgaaggacacttgttccccaacgtgacaccatcgaacgacgcgttcaggcagacactaggacatgactccaaagacggggttgtggcggcagatgctgggcccgtactcttcatagtccttcttggtgtggcagacctgaaagaactcgggagtcgaggccagcatggagcctccgaaccacacggcgtagcgctgcatgtgatgcgtgaccacctggacctccac

SEQ ID NO: 341501 - DNA, 1000 bp, Homo Sapiens
tttttttttttttttttttttttttttttttttttaaggccgtatctttttattagacttgctcatcttctagtcaccccttgtggtagagcgaaaagagtgtgttgtccctctcatgcctctggtggtcacaggacactgagtaaagcaagagactggatactttcccatgtagaacctataccccaatcccgactattgggctgggaaccctgtctatgcccattcaaagctcaccatgtgggaggactgcttgggcctgggaggttgaggctgcagtgagctgtgattacaccactgcactccagcctgggtgacagagaccctgtctccaacaaaacaaagcagaacgctcaccatggttctgagttaagccaaaaaacaaaacaaaacctgttggaaaaattctagaaagaggcttggtatagagtatagcaagatatactctccaatttgtgggtagggggtgtcacagcagaaattatgcctatttctgctgtttgggctgggggctgaaagaggctgtgtcacacccagaggtctgcttaaagcccaatcctgagtatccagtaaggcccatgctgtgaccagaagaatctggcaatagaatggtccatgctggagtgaagggaggccctctacactggtggactgatttcctcaggcaagggtctaggagctggcttaggtctctcttacccttcctgtctgtaagcctcagtctaggacaaagcccacacagctgtatacccactctcacgagtccattgctacttctcaaaagtttaaaaagtaaacaataggaaggcaccggactgctccctgtagctccctctgctggtaataataaaaactgcaggcttctggggccagccccagtaccttcgacctaatctttagctcaaagactgggtgaagaaactcacccagaccaaggaaatacaaataaataaatatgaacatgtcagagcagtttttctctaactagggaagggcaaac

SEQ ID NO: 341502 - DNA, 1000 bp, Homo Sapiens
tttttttttttttttaaataagacatgccataagtcgtgaagttaacaaaatataagcatccgcacagaatatattctaaggtgacttcctttacaccgcttctcagagaaacacacaagtaaccttttgtctgcctatcagccagtgttgaaacagctttggaattcacatggaaggctgccgggctggttccccaacactagcctgatggagtcctgtatccgcaccgtgccgtcaaactggctggtttccactagaaaagcaatggagagtcagctctcccttctttacccagcgttcaactccacactgcaaaaactgcataacctgaaccctgctgtgatggcaactgaagtttaaacccaagtttggtgaccttgctttaggtacctgggctgctcaaaaggagaccgaggtgtgatatttaacattgcttgcaacattcaagagggcttggggacgtcagagccatgagtaacaataacgaaccagggctatgagtggaatcctgatgtaccccttccccatcttaacagccagtgctgcgtatggccatcagcagacagtccatttataccactggacaaagattgggaggaaccagcccaagacagatgatggctccacacccactgtgcttcctgactactcaagtgacctacgtgtggcttccagtcaggaaactaccatttaactttctgctcagccctttcatgactcaggttggtgggatgatgccactgctccaaacccgaaggcaagggagcttcccaggcctcagcagcagttcctgggtggcactgtccccatgatctgaagcagacatgaaattacaatacgcttttattcactcatctcaagaaagctggctggcccaagcctaaaaggcccataccaaaaaaaaaaaaaaaaaaagggaaggaagggggcagagtaagtttgggagcatatatatgcccaaattattaatgatcacccgggtttgacacatctaaatag

SEQ ID NO: 341503 - DNA, 1000 bp, Homo Sapiens
gatggaaagtcttcattatctgtgcttgtccgaggacttatgatgtttcttctcttcctttcctcctgaactgtcccgtttctctttcttttctatcttttctttatcatgcctggactcctttttgccaccggaggagattttatccatcttctcagatttaaatgaatcactgcctttttctttgcctgaagattttgacttatttttttccttgtctttctcatttggataaggagattcacaaggactttcacttttatgttttgaaacccccattgttccattctcctctttacgtctcttggttaagtccggtggcacttcacggtcgttgtttgagtgatcccttttccgctctttcctgtccttttcatcttttttctctctttctctggatctttcccttgacttgtccaaatctttcttgtccatttctctctccttactcttggacagtggtggaggagtatgattaatgtagagctttgctgaagattccttgagttcgatgagactgtcctttactgtggaggaatgtgatggagaagggtgagtatcaattttgcggcgtttttgttccctttcaggctctggaatatctgatctgggaacaggtgatttcaaggacccagaaactggtgttttttctcctcctttaacattttcctttgatttcatttcctttgctatatctctttctctggatggctccttctctctttccctttcttgagttgattttgattctgcgttggggacagtggtcttaaatttctcatctttagctttttcttccttcttgaatttttctttctctttgtcagacttcggcgttctttccttggtctctcttgctttttcatctttatttggccgctcttcctttggtttttctttaccatctttaccaagtaccctggcctctggagtagtagctggagtcttttcttttttctctttttctttctctttccctttttctttgtcattttcttta

SEQ ID NO: 341504 - DNA, 1000 bp, Homo Sapiens; identical to SEQ ID NO: 159923

SEQ ID NO: 341505 - DNA, 1000 bp, Homo Sapiens; identical to SEQ ID NO: 159924

SEQ ID NO: 341506 - DNA, 1000 bp, Homo Sapiens; identical to SEQ ID NO: 246539

SEQ ID NO: 341507 - DNA, 1000 bp, Homo Sapiens
ttttttttttgatagcaaacagtagtcactttaatttgctttcccaagtaagcacattctttacaaattaaaattatgatagaaagccagacaaaatgcataatacatacatagttaaatttcatataccttcagaggtagaatttgggatttatgtaaataaatgttactcaagtatatctatgttttcaaagcatattgtcacatttttgtctgcagaataaacaataaaaaaggattttgcaggattctctgagcctatgggtcaaaaatagcccatcataaatccttagaaaatttacagtaggcaaataattctctactgaatggcagttctcaaactgatttggtgggtctggtgtgggttctgagagtgtccatttttaacaagttccagtgatgctgatgttgccggtctgagaagcatcatgagaaccactttctggctgggtgtggtggcttacgcctataattccagcactttgggaggctgagggaggtggatcatgaggtcaggagtttgagaccagcctggacaacatggtgaaaccccatctctactaaaaatacaaaaattacacgggcgtggtggcgggcacctgtagtcccacctactcgggaggctgaggcaagagaatcgcttaaacctgggaagcagaggttgcagtgagccaagatcgtgccactgcactctagcctgggtgacaaggtgagactctgtctcaaaaaaaaaacgagaaaaaaaaaaaaagaaagaaaaccactttccctgatactttaccatccaggaaactacacttactaagtgcctatgatttttattttattttattttaatttttttttgagacagagtctcactctgttgcctaggctggagtgcagtggggcaatctcggctcactgcaagcgccgtctcccgggttcaagccattctcctgcctcagcctccagagtagctagaactacaggcgcccgccaccacacctggctaattttt

SEQ ID NO: 341508 - DNA, 1000 bp, Homo Sapiens; identical to SEQ ID NO: 159925

SEQ ID NO: 341509 - DNA, 1000 bp, Homo Sapiens
tttttttttttttttttttttaaatgcttaaaatgttttaatgcgtaaaatgcataggattacaaagtaaagagatatttaaatagtaattaaaatatttaaaaatccacatttgaatatgctgctttactgatgcatcaaataagatgacctagtggtgggtctaataattactgtaatttttattgactgattgattaagggtttcactctgtcacccaggctggagtgtggtggtgcgatctcagctcactgaagcctctacctccctgggctcagaagaccctcccacctcggcctcccgagtagctgtgactacaagcataggcttggttaacttttgtatttttttgtagatacagggttttgacatgttgaccaggctggtcttgaactcctcaagtgatccacccactttggcctcccaaagtgctgggattacaggtgtgagccactgcacctggccaatcaccgtaattttaaaacagtggtgcatataaacagtctctggaaattatctgcaacaactgtaacgtgctataaataccggcaatttctgttgttgaggaggtcccaggcactgctaatactactgtggtttgtggcctacattcatcgcagatggaaatgctaaactttagatcgagtttagcaaaaataaagatgtcaatttttcccccatccaacttcatagatctcttgcattcaatccgctcttcttgggggtgtctgtggaccccaggtttagaacacggatctacagcctctccgtaggtaatcttgcttaaaccaatgctcctcaaacttcagtggcatcagaatctctgaggggcgcttgttctagcacagagtcggtgggtcttaggggggcctgagaatctgcattcctaacaatctcccaggtgatgctgatgctgctggcctggaggcttaaggagcccccactctgaggacccatgacttccaacatcatctattcactaatgactcccacctcaac

SEQ ID NO: 341510 - DNA, 1000 bp, Homo Sapiens
ttttttttttttttttggaattacagggtcacattttaattcctgaattttacagtttagcattaatatcaccacatgtatacaaatggtgtaaaacaagtacagtggtattttttaatacaaaataaacatctgttttatggaaaaaactatacttcatatctacacagacagctcatcttttccaaacaatagccaaaattaaaattaactacaaaatctccaaaacaggggaaactgctttagattaaacgattccaggaaaaatggacccgtaacacattacaagggtgatctaaggattgtggctggaattactgttaaagtttttttttcccaatgcattaaattgtattttggggagatttttctcacttcggcatgatctcagatcatagatgagcaaactaacattaaaatatttacagttaacttgttgctctaaaaataaaacttaactgtttgcctcaatttatttttaaaattcacttacgtatatggaatgtgcttttactcttcttaaaaaagcagctttcatatcacacccttgtttacagaaaagctacatgtgctgcatgctgactttgacacttaagtagcttcttggatcaaaatggcttctagatactaaatgccacttaattcagcactattcttggttggtctgtataagtaacactttaaaacttgcagctctggaaagacagaactttactaacaaagtagaaagtgatttcaaagtatcttccacaaaagattgtactggtaggcggttgacaacattctgttcgatctactttcaaatttctagagaaaatcattttggaatactactgtactgattcttggccttcgttgtctctaaaagtgctgattttaacattatcttaaaactgtccagtttgaattgagcttgttttcatcaatatacatattgaaaattcctggtgtagaaaactcaacatgtgctgaatacggggtgtacttcccttcaactacc

SEQ ID NO: 341511 - DNA, 902 bp, Homo Sapiens; identical to SEQ ID NO: 159926

SEQ ID NO: 341512 - DNA, 1000 bp, Homo Sapiens
tttttttattattaaaaactcatataggatgctttatttatagatacacagttaactatgtacaaaataaaaaaaaggaaaaccaatctactaaaatatattaactctaagaaaatcagatcttattcctgtttctccatactaggcataattattttcaaagctatacaatacgaagtttatcagtcttatctgtttgccataacatcattatgaattttctcttttaaaaatggcaataacaagtgacttatgttctaataaaatttggatcacagctagcaaatgaaagactatgagactcaatcacttttaatcattaagtttgtgttagtctttattaaaaacaaaaaataactaaaatttcagacagcgatgtacataatatatataagaatatacccaaaaaagtaaatttctaccaccctcgcacagcagaaatttcaatgggttattctataccaaatccaagtgtttacatccaagatgtcacagaggtaacttccttttgtaccttattgagctctggaaacagttcctgtatcacaatgtccaataaaacataagtcagctgcttgttgagtactggttgctgtaagccatcaaacagaagtctgatgctttcatacttggtttcttcaccaatacacttgactaacagatctggaatgtaattcatcatttcttcaaaagtctgttttgctcctttttgcttatcttggagagagcgaggttcagtgttttcacagaatatagcatctctgagaagtgttatgagtgagaccaaacggtgctcctgaaatagctgttctagtttacactgaagatagtaatcagtatacatttccagggtgtttttaaagaggattcgagttcccattaagagatgatgaagccagtcaggaacctggaaaactacccgtcctacatacatcaggtaatcatagactccttctacagtcatcacctccataaaataattctgattttgctttctctc

SEQ ID NO: 341513 - DNA, 1000 bp, Homo Sapiens; identical to SEQ ID NO: 337031

SEQ ID NO: 341514 - DNA, 1000 bp, Homo Sapiens
caggaatattttgtattttcaaagtatttaggattctttaattagaaaaataaaggcaatgggattatctatcaggttctaaaagtacccatgaattaaatcacttacatctcccatttaaaacaaaaccttaaatcacattgctgttaagctttcatacagtaagaaataagaccaagctatgctggagtacaaaaacctgaaattctgagcatgaaaataatttattgattagacatcttgcttatttcaagcattaggcctactggagatagaattaacacagctcatggaaaaggaaaaaaattccattcagcacttgcttcctttcaaatttcctggggacatggtttatgcattttgtattatagactcaccctaaagcatccccatgtgtttgatgttgattaacttgaacaggatatgagaaactttgtgtacactcaacttggcaaatatcattagcgatgcgacttttggaaacattcttaggcacaagaaatagcactgcctgcagtgaaagtccttgataatcaaagaaaagaattccattaaatataattttacaaatatgaaagaaaatatatgcatttttgccaacagactgctctacatatcaggaaaaatgtcttaatgagattcctcctacgagagttaaaaggttaccttttaattgacaacttttcaattgacactcaggtgatttctgtggtattaaaaaaaatcagaggacaataaaactgatttagcctaaataagatttaggaaaagaaatgcaagcctattaatatggaataatagctgcacttttcttgggtaagtcattaaaaaatgccaattaaacattttcagtcaaattttatttaaaaaaagcagcagataaacattacaattcaataatttaatttaaatatgcatttgacaatgaagcatatttgagtatggagtgaaaaaggttttccaaaaaaccctcaaatgtattatctccaaatacccaaat

SEQ ID NO: 341515 - DNA, 1000 bp, Homo Sapiens
tttttttttgccattagtccatttctttattaattttgacattggttcggctggtgaagggagaatggtctatacatcagagtagggtaggggattctctcccataacagagcatgtgggagagtcaagaaaagatccattttcataacaattaaaaaaatcaaggtaatttcaaaacttctaaaaagcgtctaatgtgcagactgcagcattctctaggcatcgtgtggagaccccaaactcctcccctaacggctcctactagcagccggagcgtgcagccatgccagccggagcagaggtgccaaagcggagtctggagctgcggggtccgcgggggcgctaagggggctactgggttggctgcagcagcgacctgggagaggaaggtgcaggatcgaggcgggagaggcgagccctgagcccagcttccttgggccgtcaccgaatcggtcccagccgcgctgtgcggcccccctgccgtggcccccgggatgggggaggatggaggggggcgcctctgcgccctggaggccgggccggggtggcctctggcggagacggcagccgtccgggctcgccctgcagctcctccgacgcagcctcggggaaactcaggcccggagctagagcttcctctccctgcccgcccctctaaaggaagcaaaagcagccccacccccggccgacaaggcgcctaggccgccccggggcctgcctggccgggggtgcaccggggcggatttgtgtgggaagcagggcccctctccgctcacaggccccgcggccagggggcctctgacgtggagggggcttctgtgctacttggaaggtttaagtgtgtcccgaggacactcccgcagagcggcggggcggacggggccgggccgtccacaccgcggctccaggggcgagaggagccagccctgtctctctctcctggccctgggggcgcccgccgcgagggcggggccgggattgtgctgattctggcctccct

SEQ ID NO: 341516 - DNA, 1000 bp, Homo Sapiens
ggatatccaagtgtttattgaggtcaaataaacatgttatagctctataattattgtcataaatatcaatattagccttacactcaagtagcaatatcgaatgatgtttctataaataaatccatattaataaaatgatataaataaaatgcagtcttataataataataaatacatttataaatataaagtactgattatggaaacatgaagctatttaggggttttttcccctaaaggaatggaaagtaatcttttttatggaaaaagacaattatttaaaaaataaattgttttctgtgtatagaacaccagttacaatgaaatgttatcaataaatatctatgcttagaaagtctaccttctggtcttataaacaaaagtggcattggtttcctttgtaactaacgcaggggttcatttggaatccacccatcatgatggagtttggcttcccatcttccttttggttaaaaaaaatcgctttggggcatctaattgttatttctagcagggaaagggggttagttattcatttttcagctttgctctggtcaaatgcaggcatttctcagagacataaacagcaaatccagttctccaattgctttgatctctccactctctccaagctttttcactgtgtccttcagcttttgcacattcctctggatatgcaggtcatcaccttcaatatgacatgtgcttagcctgttgctgagcctggccaggaagggcaccacctcctgcatataaggctggaacctatcagattgagggaacagcacttcttcaagggtgaagttcagcacctgcttcatcagatagcagcgctcactcatactgactccgtggaacagtttctccccaatgagacgaacgtctgtgttgttatcagccaagctagcctccttagccagcatgaaggtgcggttggtgatatagggctgctggaagttggacttgtcaagcctgcagtgggagctgatgggcgcagctg

SEQ ID NO: 341517 - DNA, 1000 bp, Homo Sapiens
aaagatgaggcagaatttattcttattgtgggtaagttcaagagtcaggatggagaccacagagaggcagatccccaggaccctgagagggaccacacactagagtgaggggccacacttttgcaagtgccaggcccacggtgcctccatgactgtgaggatccagagcccagaaattgggtaagagtggggtggggtggggaggaagacaggatcccccccccagatcgtgttctgaccatgtttccgacttccataggaaggaagaacagctcggctatatagtaatataatatatagaggtgtagagagctggccgcggcacctggatggggctgagactccccgaattattgcaggagggagagggggctcagtgctggtgtccccgcgggatagctgtgctggctatggggagggggggcagggctgggcagctgggctcgccactccctctggggctggcagggggcacacggtggggttcctgcttccctgcctgccaacggcccccgggatggggctttctcaccctgggtgctttttatgtgctttgaagaccatttttgcattgtcaggagtgaggaaaaaatattctgacatggtagaaaagagatatttacataccctggtgggccgtaaggggggaggtcagtgtgagaggggaggggcttccagggcacttccacccccagcgcccttgtgggatggtgtatggggacaagagccttggcaggaggccggagccccgactctgacacttggttgcagtgcaacctgggacggggcatcacccctctctccaggccttagtctccccatatgctacaggaaggggtgggctgggtgctgagaagataggatcctctggtccctgatcctaggcctgggggacaaagggcaggtgtcagggctgggcattgaaaggttggcgaagggactttgagtgaggagacctgggccgtggagggaaggcatcagaggctagaggaggctgctg

SEQ ID NO: 341518 - DNA, 1000 bp, Homo Sapiens
gaggaggggccacgacatttattgaactctgaggagcacagagggggctccctggcgcgtctgtgctctccagccaccctggaagacgctcaggggaccccaagagccttcccagcacgcggcatctctgtgaaggcagggcctccagcaggctccgccctccaccccactcctggggtcagagccccaacatcctccatgaccctcctctcctggcgctccccatgggtggcaggagagccaccccccgattccagcacacaacctggggcagaaactcgagcccagacaacaatggctctgaggggaaaccgagtcagcatggcagggctgtgtgagagaggaggggtctcaggcaacagttctggacggttctggatggcagaggagaagggcggacaggaagtgctgtcggaacgccgacccagctcctaagacagacagctacgctgacaccaaggaacaatatttctaaaataattaccactgcatgccggtgcatgggcagacgggagcgtaagtcataaataaaataacactgaggggggactcggcggagcctgcagcctctgtagagagcagctgtgtgcgcgggtgtgtttctccatggcatacgtccttttgttaattaagaaaacctctctattggtatctgtgaggcagggaaggtgggctgtacagagtgcgagagccgggggccttaggctctggcaggtgggtgacgcgggggaagggtgctgggtaggattacagcgtgcccatcccggtgacctcggacgtcagcctggcgttgatgagatactgggcaaggctgatgttggccggggtccccgtgatggtgatctgacgctctgaggacccttccgtggcgttggcgattttgatctgagctccagacatctgtcgaatttcattgattttggtcccttggcgtccaattatgcagcctattagatcattgggaatggtgagctcatgagtgctggccggtgggctggcg

SEQ ID NO: 341519 - DNA, 1000 bp, Homo Sapiens
ctgagacagagtctcgctctgtcacccaggctggagtgcagtggtataatcaaggctcactacgttctggacttcctgggctcaagtgatcctcccacctcagcctcccatgtagctgggactacaggcacgtgccaccatgccaagctaattttcttatttttttgcagagatgggggtcttgctatgttgcccaggctggtctcagactcctgggcttaagtgatcctctctcctcggcctcccaaaatattgggattataggagccactgcacccggcctgatgatgttacctggtcattcggtgtatccagagcaaaggaaagatgaatggttgctgcctttaggagcacagtgagttgggaaggaagaataacatcctggattgatgacaaaacttagacactcctaaacagatatgtaaaacactggggtttttgggaaactggactggaggcaatttctatgagaggcttcctgtaagacttaaaggttaaggagagcattggggagagattttttttttttcttgaagccaatggcactgggacctgggctgatgagaggtgcactgccagttttctgcctggcatttttgctcacagggatgcttttagctgcccagaactttaaggagctttgaccaggaataatgctctttcagattcaaggaacaggcagttttccattctagcctggcctcaactgctaatcaactgtggaactctgaacacatgtgcctgaattactctgcccctgtttcctcacctgcaaaaacactggggagggagggaggtctgaagcttgatcagggatcagaatcacctggagaacctgttcactaaacagcagttgtgctgggccccagccccggggatctcaaattcagggtcctccttcaggttggggcctgagaatttgcatttttgataagttcacaggggatgctaaggctgctcctatgggaccacacctagaagggaccaggtacacacagag

SEQ ID NO: 341520 - DNA, 1000 bp, Homo Sapiens
ttttttttttttttttttttttccttttttttaaagtgaaagcaagtttattaagaaagtaaaggaatatagaatggctactccataggcaaagcagccctgagggctgctggttggctattttcatggttatttcttgattatatgctaaacaaggggtggattattcatgagttttccaggaaaggggtggacaattggaatggagggctcctccccttttagacatatagggtaacttcctgatgtgtccatgtcatttgtaaactgtcacggtgctggtgggagtgtcttttatcatgttaattttataattagtgaataatcagcagtgaggacaaccagagatcacttttgtcgccatcttggttttggtgggttttgactggcttttcttatcacaatctgttttatcagcaaggtctttgtgacgtgtatcttgtgctgacctcctgtctcatcctgtgacttagaatgcctaagctcatgggaatgcagcccagtaggtctcagccttattttactcaacccctattcaaaatggagtcactctgattcaaacgcctctgaaagtagcattggcctgttgccaaccacttcatctcaccctaagagagggagagctgttttttttttttttttttttttaaggtagaaggaattaaattatgtctttgtgctgatggaattgatgctggagagactggactacaggcaaggtataaactgaagtggtgagagcccaaggggatgacttggcttgaaggaaggaggggctcttcttccagtgtaactctttttggggtctccctccttctgccttttgtcacctttcatttcttcaataaatatttatcgggctcccactttgtgctggcacagtcctggatgcagcagatccagaggcgaatgagacaggcacgtgcctctctgcttcatccacgtcctttctagcactctcacctccccagcttctgttgtaactccaagaaggagaagg

SEQ ID NO: 341521 - DNA, 1000 bp, Homo Sapiens
ttttttttttttttttttttttttttttcgatcgtttaacagccatccatctttatccaccagactagattccccagtgtccagagaaaaggttgttcgcattttcattatgctatagggacctgctataggaggcgggcaggcataggggcaaggcagaggcaatgaacagacactggctggtctcactggcttatatagtatgttagctggactttctgggcaaaaatcaaaggtctcaactcagatcttacacatacatgcaacatacagccaagtccatagtcctgtgacttgccaggttcatcatccatcaccccttcccactgtctggaatcattcatcccccggaaacctcagccctgaaccagccctgagtccaattccaccctgatttagagaaggggagtggattaaagacctagctgacaattcagcaactccagcctgtctgctggccatactagtgttcgaggtccccactttgaaactagggttcaagtctccacaccccagtccctccatcaaagatctgccttaataccaacagttcagggagcattttctgcccccaacccccaacatacacacacccctacacacaatgcacgcatacacatacacatactcacgcatcctttgcaaacaccagaggcctgcatctgattcagggctgtgtctcaggcctcaagtcctgataacagtctctctgatgctgaatggatagacatggaccatgtcatcttggggtttacagtaggcctggcacataccaggtgcctgataaatgtcagaagagccaaattcttgctgccttgcacctgctgcatgaaaagtcataaggaacggcataaagagtacgtccttggggatgagacagccaagcttggatttgggttctggcacttcgttggctttgggatggtgaacacattcctcaacccctttgcacctcagtttcctcaaggttgcgaggattagcaatgacatatggaagtgt

SEQ ID NO: 341522 - DNA, 1000 bp, Homo Sapiens
ttttttttttttttttttttttttttttggtgagtgttacacatttactcactcgagatatacatgtatagaatttggttttgtttgggatttttaaaaaaagtattctctccctctgtcctcctcctcctctggttgttccccagcactgtgaatagctccaggagcctttagtgtttgagggggcagcttcctgtgctgctctttttggggtctccctccttctgccttttgtcacctttcatttcttcaataaatatttatcgggctcccactttgtgctggcacagtcctggatgcagcagatccagaggcgaatgagacaggcacgtgcctctctgcttcatccacgtcctttctgcactctcacctccccagcttctgttgtaactccaagaaggagaaggaaggaaaaaaggacgtgactcgaatctgcaatggcagctgctcttggcccagtgtgaatgtgtctgggatgtaaatctgttgtctctctgcagtttatcctttgcatggtcccctctccttgaatgtaggtatgacttgtgccttgcttctaaccactgctgtcccctctttggctccacacacactctcagactttctgtttctgattgcaggtgtgtagctggaaggtgaactgagatagcatgaaaacaggtggcatgggctgcagaaagagcactggggcaggaaacctggatcctgcgctgctcggatgcacttggctgtgtgaccttggacttggccatccactctctgggcttcggttttctcctgtgttcagggaattctcactaagtcctcttcccattctgctcctctgtgagttgagtgaggatctttctctttaatttcagcctccatcttgtaaaccaagaagtatctgagacaggtctcaatcgatttagagatttgttgtgccaaggttaaggacatgtctgtagtcttagctgcttgggaggctgaagtgggaggatctcttgagcccaggaggttg

SEQ ID NO: 341523 - DNA, 1000 bp, Homo Sapiens
aatctctaaagaattccctttttaaactttttgatttcctgaacttgtctgaaggacttaacacagttatatagagtgttctttgtgtaacagtatccatgactttcatttttagctctggtattagatcttcctggacaagagcattactggccatgtgtatgttgctatcacaaataactagtagttaatatttcctaaatcttagcaagagttatgataaatagctgaattccatgaagagaaaagactcatggcatgacaaccagattaggaaagagtgttttccttgtcctgcaggcaaaacagaactgagagatatgagtatcactcatgatgaggacaaaagggctgcgtgctgggaaacatgaggcgaccaacacagagttggtcactatccactggcctgggtttgcaactacagttgtccaaattgtcagaaaactatggactgaatagaaaacaaaaaaggagctcaccaggaccatgatggtgtgtgtggctctggcttcctgggaaggtctgcaggagagtctgttgctgtgattgtgttggacttgctgcttgtgtctgtagaggaagaagaccatggagccactggcccagaccatgaagcccaaactcataaaatcaggggaaaaatataagactgcatgtaatgagctaaatctctttgatgctttgtaagaacagtatccataattgttttttgcactactgtttttgctattcagtgggccattcactaatagaagaacagatgcattcatcaagacatggggggcccagcagaggagacaacagaagtcaataaaccttggggatctaatcttgatctccatccacctgcatatactggggttgagcttaatggcttggaatccattgagaaggcagatggtgctgagggaaactcttgtgcccaccctgtgataataaaagacaaacttacatccagtgtcattcagcaaatatttcaatccaaaagctgccattgtct

SEQ ID NO: 341524 - DNA, 1000 bp, Homo Sapiens
accagaaatccaatattgataaaacttaaataattctgtctagatcaattaaaatcattgagtctccttatgaatggaagaaatctttgaaaattttaaaattctaaaatctttttttcaattttgccttctctggatttccctaatgttcccctcccataatcctttttattcttatattccgacatgcttttaagtagtactacaaagaggataagctaacagaagctgagataaattttatttttattttaaacagaagaaaggaaaaaggggttacatttttataaatatctataaatatagaaggataggcaaacttccaaataaataaataaatactgccacatgacgagggatataagaaattgtaggagctattttggctttgccataaagaaaacccctgatggtagtgttgagtttgtgagattacaactagttttccaccaaaatccttttgggatctttcactgaggagcctccaatagctattatgcaggataatatttccaacaggaaatgaaaacagaaatattaaaatatttgccatgcatggctatatactattatacatagttttactgtttcagaataggaaccagtccttcaagttcagcttaaaaccatcaggtaaaaacagttgcccaacatttctctcataaccaaaaagaatagatcaaagtataaggttagtatgtgatggcagtgagaaaaaaaaaagtgactgggaagaagctgttgttgaatcgactttgcttgttaatatactgtcctttaggtggtcatttaaagagagggaggaaaatggagcccccttacaggaagaaccgcagtaatggggtaaggcttcatttaatgcaccaagaatttccaaggggattgagacccagatgtgtcagcctaggagagttttaactaatcgaagagccactgctgctgcagagccctagagaccacagacaagagcctgaccatgtggttgtcttttcataacttc

SEQ ID NO: 341525 - DNA, 1000 bp, Homo Sapiens
ttttttttttttttttttcagcttcaaaaaagtaggcaagtactttgctttattgacatcaaatggaacttcttgtccctcacgcagtccacacaacagtaaaggcacaatgaggcatattaaaacatagccagtttcaacagcttggatatttcctgccatggaaaagtatcctgcccacagattcacattaacatacatggtacattaatatcaatctctatcatataccaggccacggtacatgtttgcacgcagggtcacgttctgcaacaaacttattctaataacagtattcagaaggcaccctatgggacacaggtgacagtgaagttacgaggctagatggccacatcttttacatccaagaaccgccctggggccacaccccaaactgctgaggtgcggaggcacgtctgcaaagcaggtcagaaacactccccccataccccaaaacactatccctatcccaaatcacctaacaaaaatgagagctgggaagggcgcaggtgagcagtgcatctacctaggtaatactgtctatgtctaggtaatactatgtaattttatcttcatactgcgtgtggagataaaaaacacagcttctcctgcacctcttccccaagactggtgcactccagcgacctgagggggctcgcctcagtccccagcactgaggttacaaagggagaattttttaatgacttaggcctgtggctctagagttgccaaaacatcttaggcaacgagaaacgaacggcagctagtaccatgtgggcacgtgtgtgtggttgtccacaaggactcacccaagtaatagactggaatggttaagagctggccacacatacgccccgcaaagctggctgctaccattcgttccttgttgcataaaacattgttttcaaagccaaccccactacttagtcatcatttagagactagactatccaatgttatgaacatttttaacaggtttcaagcaacagctgataaggta

SEQ ID NO: 341526 - DNA, 1000 bp, Homo Sapiens
tttttttttttttttttttttttttttttttttttttttttgtgtaatcattttttagtacaaaatattccctgtagccagacatttatcttcagaataatcacaccacattaaatcagtcttctcttttcagccctagtaaaagttttgtttaattctaagatgccatcatagtgaacaaccttaacttttatgctacataattatattcaaagctttatgtatttttgtttataattacacagtaattataaatgtttagtaccaacctgatgacaaacactattttgttgaaaaggttttgcatttaaaaagaaaaatatgtaaaatccaaggcactaggccacgaaccaatatgacttttaaagaaaacactttatattgaaaaaaaaaaaaaaaaaaaaaagctaatgggatctcatttcaaaacacagcatatgtgaattaatcaatctgaaaccaataaccataactcaaaatcttcaagacaggaaacaaaacagtacatatatatagatatatagatatatatatcttttaaaaatttttcataattgaagttcctctttatatttacaaaaaaatcaggaaatactgaaagcagcaagattcttctttttcctttttcttttaataaccaattccagtagcctgaatagaaattttcaaatttttcttttggtaaaactgcattcttgaattaaagttatgattggaatattaatatgtctatagggaaagctttctagtctatttcaaaatcatgtaaaaagcagttttgatatgtcattgtttcttaaaataatttccatatttgcataaaatgtactgctattctaagtacattcctttgttaatatcaaccctagaccttagagagtgcctggatatatatcccaagcagaatctattcctatcaaaagaccataatcatcaaacatttgaagtattacatttctagcctgccttacggaaatgtttaagaaagcaagaaaccctt

SEQ ID NO: 341527 - DNA, 1000 bp, Homo Sapiens
ttttttttttttttttttttttttttcatttccaaatctctttattatcataattaacctttacttggaaagcaagcagtaaaacctgttcagacagcatcattatattactttcaggcaaacaagcgtggaggacctctacaccctcaagttaaaaaaggcactgaggccgggcgcggtggctcacgcctgtaatcccaacactttgggaggccaaggtgggtggatcacgaggtcaagagatcgagaccatcctggccaacatggttaaaccccgtctctactaaaaatacaaaaaaaatagccgggcatggtggcgggtgcctgtagtgccagctactcgggaggctgaggcaggagaatggtgtgaacccgggaggcggaacttgcagtgagccgagatcacgccactgcactccagcctgggcaacagagtgagactgtctcaaaaaaaaaccaaccaaacaaacaaaaaagcactgaaagagacagactccagttcccggaaggctgacccagtcagcactaaaaacaggattaatgtatagctattaagagaatcatacagtggctttattcttactacttaaaaaaaggtgatgtgatggcagtgatggtcaacatcacacagggaagaccaggtccacgctttgtccagaatcaactgctaccacatgagtcttcttggttaagtcatttgagcccacagtgacagaataggtccctggatatacttctatgtagaggtccttagagatgttctcagcaggctgggatgcctctggagcatgctctgatatttgatagctgcctccaggaccaagggatgtcttttttctgtcttttctctgaccattccctatgtccaagcacatgtgcagcttcgactcgcctctgtgataacgatagacatgggttgcccctccttcctctggcacagatgaataatatttcccacactgacttgaagtatagtccatgaattcagccattgttctga

SEQ ID NO: 341528 - DNA, 1000 bp, Homo Sapiens; identical to SEQ ID NO: 159929

SEQ ID NO: 341529 - DNA, 1000 bp, Homo Sapiens
ggatgtttcaaaaattatttttattgttacattccaaagaggacagaggaagaaaaaagccagttatccaataatggttagacctttcagaagaggcacccacaaccccagccctagttcaaagctgcacacattggagctcaaacagctgcctctcaccacgaccggaaatgctgacaaatgtgtatatattatcaatccagggaggcttgggtttaaaataaaatttctttattgcaagtgtccaagtccttaggatttgtccttaaaggtactagaagatgagtaagaccacacacaccaagactatgtttagtctttagagtaaactagcaaatggccagtttgttctaggatgcattgcatcagacatcacagtacatgaagaaaatctgctttttgtgaaaagccaccaggcattttagatcccgtttaccatgaagtgcagacacagcagatacccagataatacagtcagtgcaaaagtcaaatgagtaagtcagctctttgatgaggctggctacactgcaaaatataaatgaaactcgaaaatagaaggtaaggtctatttacaaaagtttgtttagtaaagtgacttgaaaaaagttgttaaccacttcccaggcatccctcccctctcccaccaaaacaaacaaacaaaaaacaacaacaacaaaaaccctgaaaattatcttgaaagtcaagttaaaactatgtggtgaaaaagagagtgcttgttccaggtaaaggacttcaagataatttacaggcagatttatttttattagtaaaagtcacaaataggaaaagacttattggctgactttgagctgtgtgcttttaaaaatgtctctattattacgttaacaagaaaaaaaaatcaagcaagtttttgcttccagttttgaatcttccagcaacagttggtgaaatcaacaaggtattaaaatgaaacccagcaaaacccagtcagttctttccagttgtctgcctgtttctt

SEQ ID NO: 341530 - DNA, 1000 bp, Homo Sapiens
tttttttttttttttttaacacattctcacctctttgccctcctgttaaaggcttgaatacaaatgaggcagcatgggagtcttggcttggaaatcaggtctgcgttcttggtcccttcagtcactgacctaatatatgaacttagacaattcacttgcctctctggacctttaaatgaaagagttagactgtaatggataatgtccctgggctctttcacataatccatacttgagaaatcaatgaatcaatttgaagaaactctaattctaagacataggtatcctggcacctgtttgaaacagctgaaaggaggtaaaggtcaggttcctgtttattatacatttagctataggaaaagaagcacatatatctatggagacacagaacctggcagcccctatacttgactaataaaagcaaattcctggaagaagcagagaaataggccacaagtgagactggcagtgtcaaaaaaggtctataagttaagtgatcaaagtagtaaaaaacaatggccataaccagacaagatctctaagcatagactatagtctagagaggtctgaatgggaaggagcccctggagcttctattagatggaaggacttggtccacagcaagtcactacggcatttggttcaaacccagttttctcaatctgtcaacccggtgtgtatgcatgcacacgtgcagacatgctgcaggctgtagttatgcttctgaagtgttgtcttcattcaaagagactgtctccacaaaagggatttcttccttgtctgtcttccccatgatcagccggtgcttatccaagtttatgatgcacttcagagatcggagagtctgtagaccaagggacaagtttttctcattgtcatcaaccacagctgctgggcagtccaggcggagggagcccagtgtgatcactaggtgctcaatctggcccactactttgagatgccggggtagagaaagcttttctccttcatgcttgtggga

SEQ ID NO: 341531 - DNA, 1000 bp, Homo Sapiens
ttaataaccaacttttttttattagagcagatacagttgtgaaaactgtacattatacattttggtttcaagaattataaataaaggaactcacaggtagggagttctttttcacagcaagaaactttaaataaacaaagtcatgttttattaagtacattggcagacttcatgtgctgtccaaaatgttgagtacagtataacaacccattagaaagagccttcatgtaaaatacagctgtgcacattttagaaaaataccaacaatttgagctttgttttaaaaaagcttataaatcatacatatatttataaatgggaccaacatgctcactttataaacatatcctctcgctatctgttacccattatttccaaagcattacgcattttaaatgaacacttaataagattaaatattttattattatttttttaaaaaaccagctttcccagcgtaaggagctatagggtttgggaggggcagtgagagtactgagagtgacgcaggaactttaaacatttgttctcaggtaaaaacggacttcctaaatttaaaagtcaaagcaaaatgtaaaaaatgaatatacaagttgaaatttttcatttgctctctttctgccttcttctttattccatattggtcacacccaggattttcaacatattgtgcttctgtaagaaacatcactgggttactaccctgcaggtgacaaagcactcagtccacatctgtgctaaccagggaattgtgtgaactgtctcttctccattgaaaaggtagctaatatggtgtaaaaaaaaaaaaaaatctgattaaaccatgcaaatcatgaaaatatttaggagtagctccccctctgcaatgtaatgttttataaagatttaatagattagatagatatctttcttcccctgatttctttttaagtaattacttttataaagaccatttagtttctataagtaagcatgcttctgaataacaaagggtaaatta

SEQ ID NO: 341532 - DNA, 1000 bp, Homo Sapiens
tttttttttttttttttttttttcatttcaattttttattaaaatacttttttgttaatagggacaaccaaagaaaaatacacaattttatatgttgtagatcatataaaatacaataaacataaactcttgggaatgcagaatagatttcaaaatcttaaaagaagctttcataaaaataaactttagaaatgtggcttatatttactgcattttttcagaaaactttcttttctccattttaatgctaccctgattataaataacggtccaaatttctaacatcttatcaattttgctttctggaattttagaaatcacatgtctaaatgaagacctcttttttataccaccctacataaacacagaatagattttatttaaattaccatttgatttggcaccactattgtaaatacaattttagtaataattaaatgttatgggggaaaaactaacagaaaaacctgctaacaagcacaagtcttactataagaaaggatcttttatatatggcttttatgatacccactgatttaaaacctagtgctttaaaaatctggttataaaaaaagtaataacctaattttttattaaaaaagaaaaaagaatttttaccaaaacttcaatatagaagtgaatgtgcttagaatggtaatagaggatctaacttttaaccaggctatcaacttcttgaatatttactttcaatttggaaaaatattgttattcagaacctgaaatacattataaaactggaaatggaatcttttaggtgaattctttctttcaaaccctcataaatcagaaaaaataagccaaatttgaaggcaaaagatctttacatttagggatagtttctaatgaaagaaatcaagataagaaaaatcaattaaaacaatgtggtttaagaaattatcctcctaatgtagggggtgggaaacagatattacattttaaaatttaatgaagacctaaaaaatgataaatgcagttttaa

SEQ ID NO: 341533 - DNA, 1000 bp, Homo Sapiens
tttttttttttttttttttttttttttttcccggcgctggcttttattgcctcctggcagagaggaggtgtcccaggccaggccaggcaggagagggctggggccaggggagtttcagtctatgtggtggaggctcagatttggagctggaggggttggggcggttcttagagctgagcttggggccaagggtccctgggtctgggctgggagactcagtcagaaataggtattgcttatcctctgggactatgacagcccctccctggggttgggggtgtgacagggacagaagccgacccagggggtccctgagagcccaggggcaggaggatgcctgggactgcatctgcctcctgcggggcctggacagggagggggccagaccacagcggcccctcctccggtcattgtgcgggcctctgaggctgtggcaggtgcgcggtgctcacagctcatcgtggtgccgggtcaggtcctcgccatagttggtggcctgactgcccacaaacatgttccaattacccaggatttccgctttgctcagccgcccatccttgtccgtgtcgctctcgtgcagcaggtggttggcttccaccaggggctggtcctgggcagggggcagcacccagtggcccacctcactcccatccaggtgcccatccttgttcagatcccggaagtcccggaactgctgcctctccgtctgcacccacgccggctcctcctccccaggctcggctgagtacagatccgcgatgtactcctccacctggacatagccatctttgtttctgtccaggtcctccagggtttcagcaatcacgatgtcccgcatgtgagggaactcctcggggtgcaggaaggctgtcagctcctctcgagtggccatcgagtccccatcctggtcggccacccggaaacgccgctcgtcccgagccagcatctttttgtaggtctctgcatcctccacgtcatgaaattcttcaccgggcgcgta

SEQ ID NO: 341534 - DNA, 1000 bp, Homo Sapiens
tattttgaaaagtatttacttagtttaaataaattaattgcaaataaaaattaagctacaatatatagcctgaataaaaatgactagaacaaatacaacacaggacttgctttcttgcattagtcacaaagcatgtgacaatctagaaaacttcaaaatcaattacatttctttgaaaaaggggtaacagcagttactgatacatcacaactaataaacttataatacaagtttcctgacatgcatttcctgagtgaacccaaatgatcattttttaaaacaaggaagtttcgacagttgaagtaaaataaaataattcatggcttctaagcaacaagttttgttttttaaaaaccaaaagaaaattcagaacagttttgtaataggataaattaaaggtatgctaccacatataaaactttgctacagtcagttaagtattatacaacttttcaaactaaaggaaaacaaatcaaaatattaaaagaagatactgtctaatctaaaagtgtactggtttctacaagtgtcaaaaaaagatttgatgtagtgcaactgtctatacttgtggtgcctttgaaaaaagggtgggaaggaggggagagaagaaacttttcttgcttctggaagcaaaagacatattggaattagagaataaacagaccatgcagtgcgtcactccacgctgcagtcattggtgctcatctgccaaccaaacatttccttaagtctcactgtggcaatctccttaggattcaaacccagagttaaggctggtctgctaaaaacgggggcactattgtcattcaaccctttagatctctagatttcctaatgcccgaataaggccaaatacagaataattaattaagcatttctttttccaaaagcaaatcaagtcactctcctttcttgctaatttatactttttcttatggcaatgatttttttctagaaacagtgaacagatgaaccacagtttatatccaaaaaataaact

SEQ ID NO: 341535 - DNA, 1000 bp, Homo Sapiens; identical to SEQ ID NO: 159930

SEQ ID NO: 341536 - DNA, 1000 bp, Homo Sapiens
tttaactggaacatgctctaatctttagtttatttctggttaaaaatatagcaatccagtgcagtgtagtaaagaagtctgctcgaaaggtagcagagaaacagctaaacataagcaaagcaaggcagagtccataagacgggctggccccaagacgaccggatggggaatccctgcagcgcctccccgggcacaggggtcctgcgtatggccgtgcccggacccctcaggcacgtccatgcacacgagagccagggccagggggcactcggacatcctggcaaaccttgttcttttgtttgggtgatggagcgaccctggtggagaaggcagaaacataaggaacctgtttttgttggactgaacaagttacattgtacattttagggggctggatatgctacagtttctcaggaagtttcaagccactgggtttgaaccgcattcctgtcctgggaccaggcccactgtggtgtagcactgaggcatctggaaggaatatgcatatctgttaggggaagttgaggcaggcacagtacagagatgtgaaaacccgtggagatcagtaaccatgggagaaggcgtcctctagggccctcactgctggggacacggaaccccacgcgtccaccctgcacgccaagcgcacacacccagagccccggcgcgagcccagctccacggcacagcccccttggcttccgtgcttagctgagcccaggcggatcggagtgggccccggcttccctggggtctggtgggggaaacagccgaatgggacccacagtgagtgggcagcagaagaaaagggctttgctttaaaactcggtgtggggagtcggcttctcatggaaggccgggggcagtgccgagaagagggaaggacctgcatccgtctcacagggaggaggtggccgatccctccccctccctcaggtgtgcagcacagatctcacacagaaaaaggccaggctactgcccactggggtgggccaccctg

SEQ ID NO: 341537 - DNA, 1000 bp, Homo Sapiens
caagtttattccatcatactgattttttattttaacttcatataaatcacttttatattattttatttggtattttatcttcacagcttccaaaattatttatcatttatttaactgattgaaagtgagccagaagcaaatttgctgtcataaaagtttactaaaaatcaagagaaatggcttcgtagcaccattactgcaatgttacaattacatacgttgttattagaatcatttctaaagttataaatttatgaagctttgagactccatttcaatatatcagaaaaggaaatcatgttaataaaaaatcattagacgcaaaataatataaaatataaatgaatacatgaagtaacaatttttaactcttttacaaacttatgtacaataagattaaaataagacagttgtgcattcaagttttcctgtggatctgctcatcttcattgcaagggttgctaggtaataacggcacagggatatggttattctgaatatttttctcactgtcaaagacagttgttagggacaaatagacaccaaaagagacaaatagggatcccttattggctccttacattttgttggataaagcacaatttccttgcaatgcttccccatccttctctcccaaatattgttctctttctctctctctctcttttttttttttttttctgagacagagtcttgctcttgtcgcccaggctggagtgcaacggcacgatctcagcttactgcaacctccacctcctgggttcaagcgattctcctgcctcagcctcccaagtagctgggattacaggtgcctgctaccacgcctggctaatttttgcattttgagtacagacggggttttgccatgttggccaggctggtctcaaactcctgaccacaggtgatccgcccggctcggcctcccaaagtgctgggattacaggcgtgagccaccacgcccggccctctctctttcttttttttttttttttttttgaga

SEQ ID NO: 341538 - DNA, 1000 bp, Homo Sapiens
gatattaaattatttctttttattcaccttttataaaaaaaagggggcaaatacaagaaataaggttatgtcaaagtttggtttttaaagctcaaacttacagagtctgttgtaaggttaatacataraatgctagctttttagtcacctgagaatcaggaaattcacatgaacataattccctatactgacaaagaactatagctacctatgggcttgtcaagttcctacgcttcattcagcatgaaattgcacttttcttgatatgtataaattaaaatctatgcaactgtctgtgcttgtgttgcctcatatcacatctataaaaacagcatttaaagtttgtaggaaataraattttggccttttacaaagcaaatactttgtttctttaactcaraattctggaaatgcaatccagttctggtattgtgactgccaaaatatttttgtcttcaaacattagtttttttcaagtgtctgactctatacaagaaaataataaaaagagtatcagaagtttcctgtaactaccataaaaaaaacttcagtatccacggggctgttcctaacggtttgttaggatgctccttcctgatccaagtccatccagtctgaggctatttttcaattccatgcttctatctgccagaagagtctttttaggtaaagaagccatcataggaggcaatggagcttctagctgtcgtccaaggaatgaaagcaggcgcctccagatgaggccacttcccatgaacataattcctgtaatcagccaaaaaattctatggtcctcttcaagggaagattccaaattcattccaaaagcaactcccattagtccaaagagcgaaagagagaaggttcccatggtcagctgtagattcaacctcatcatcacgtttcggtggctgtccagattaatgaaaataatactttgtgaatcatcaatcagcaccctaagctcacgagctgcattggagagatcgtcagccaatcg

SEQ ID NO: 341539 - DNA, 1000 bp, Homo Sapiens
aaacacagttcatttttagtttgtcgtggcaatacatggaaaaaaatcaggccactactaagcatctatagagtgtatctttggcaaaaatgtggacctgcaacaattcagatggttttctttcaattaggttcaaaaatcatggctctgtaaatttccaaaacttttaaagtcttctcatgtcttcttataatcgggcattcagaggtacgtgttggttctaatagctttggtagaaacatgctgaaaatagaaatgaatataaaatgccttgtctttaggctaatttggtatggattagtaaggcctgagtgaactggaaattagtacatttcttgaaataatacaaatgaatgtgagacacatgggtagaacagcagattcagaaaaaaaggttagtattgtagtcccaagttttataaaagacatcaagtaaggccagcaatagaggaatcaagtttctttttcgggttccctggggtgatttcctatcagcttcacgttcatgagctggggatttgtaaaatgtgagatggcctttgactttgtttttgatgcgatcagcagcggcactgtctgcaatccaggcccagcattctcagacagcgtgcagtacggatgcttctggctggcagggaggtcgtggcagtgggctgactagtgtgctgtgttgggagggctcagagggtgatggggcaagcctccgtgcaaagggagttcctttctggtcgtgccctcctttttggctggagcttggccacagagattggctgccattctcatccctggatggggtggaggcaggtcccagacaacctcagataattgaacagcagctgtgaccctcagaacagcgtttcttctttttcttggggtggaaaatggtgaggattgcttcatcaaaaaccgctttgagacctttctgagtcagagctgaacattccaagtagcactgtgctccgatcgcttttgcgagcttcacaccatgctcgtaagtgag

SEQ ID NO: 341540 - DNA, 1000 bp, Homo Sapiens
tttttttttttttttttaggatcaccagcaattctctttaatcctctttcttttccttctaaaagcttttgcaaagtccaatttatttttacagtaaatagattatcttttaagaaaacgcactagcaagattgtagcaaagtgtgtttatgcaaacaggtggtgcagagacagaggggcggaccttgtgggcagctggaggaccatcccagctcatgggccacgcacagatgggagcacctcagtgttttcagccaagagaacacaagtctcgggatccatgtggctccctcaggccctggacccaggcaggcaggacacccttgaccatggggcaggggacatcccagcatcttgtctgtacccccaccacctgcgtggcacctggtcctcagacacctgcgtggcacctggccctcaggcacctgcgtggcagctccacgggccaggcccactgtccagttgctcctgccctggagttggggccgtggggagggaaagcgcagtaatagctgagtgttcagaggaggggctgggctgcaggcattgctggttcagattggtgctctccacctggctgagtgaggcggcaggaagcagcggccggaagattcctagagcttagcagagaaggatgcgaaatccggcagccctttgacaccgtttgggaacgtcaaccatgccccgccatcggccaccagcacggcccccgtcacgtaggaagccagagggctggccaggtagagcacgctgtgggcgatctcggtcttgttccccagcctctgcagcgggctggcagtgaccttggtgctcaggctggcctgagggccacccagtcgccggagcccctctgtgccactgatggggccaggggcgaggctgttgacgcggatgttttggggaccccactccacagccaagtgccgcgtcatcgcgtccacagcggccttggcggagcctgcatgcacctggagcgcctgcccccggttccccagggtgg

SEQ ID NO: 341541 - DNA, 1000 bp, Homo Sapiens
tttttttttttttttttttttttttttttacttaagagatgattattactttattaagttagcacagattggacttttacaaattgtagaaatggtcaacaaatagaattgtcctattaggggctgatattcagaaaatatataatcaactgttggtgtgataacaggataaaattccaccctgtatatgagtaattccatttttatccatccatttacaataattacttctcacttttgtttacttagtcatatacagagtgatataagtgatcgtcaaaaaggatccattttcaatgatttctacaccatattatatgtattctccactggaaaatttatttttccttaggtctttgaagtgtgaaaatatatacatatgcctgatcttatttctaaaaatgcttaaatcaataactacaaataccacatgaccacatttatacactatactgtcagaaaaatattttagaatattttgagtcgtgaatagcttatgatttcagtggtgttggtgggtataattgattgcttttcactttcaagcacattcaaaatttattacaaaagaagaatggtgaaacaaaatatatgatctgctcttggtatttcaggatgctcagcagtcacacagaaacaaatgtttaatttcttgaggaagcagaacaacagcccttcagagaggggtgagcctctcatcctctgtcatgaaggcatcattaatatgccctcccttcatgtccaggggatcagaggggatgccattttcaattgtgatcatgttttcacacttatcttcagcgtcatccacttcagatggttctttgttctttcttctacgttgccagatccctgataaaatcagtagtgcaattgcaactatgatgatgcaaaatatcacaccaaatataataatccagatgggcacagatgggtccatgggtggtgcaagtgtggaagggatttttaaaaattccagagtttggtcatttagaaagaa

SEQ ID NO: 341542 - DNA, 1000 bp, Homo Sapiens
tttttttttttttttttcacttttttcatttttttttattaatcaaatgatacaaaacaaccatcattctgtcaatgcccaagcacccagctggtcctctccccacatgtcacactctcctcagcctctcccccaaccctgctctccctcctcccctgccctagcccagggacagagtctaggaggagcctggggcagagctggaggcaggaagagagcactggacagacagctatggtttggattggggaagagattaggaagtaggttcttaaagacccttttttagtaccagatatccagccatattcccagctccattattcaaatcatttcccatagcccagctcctctctgttctccccctactaccaattctttggctcttacacaatttttatccctcaaatattcatccctggcccaaccagtcccctgagcctccctctggtggagactcctccacccatgagctccccagagcatccaagacagagtgcacagagacctggggaaggaagctgaactttgcagagatgaggacaggtgcaggctagggtacagggtggtggtagaggagacaagttttatctccaggcccacagtctctccccaacaccccccaagaattccagagggagttctcagtgcccccggacaggcctctccagcttcacactcttggccgcttctccaatcagctcccagaaactcctgaactccagtttagagtcattgcagctgcccaggttggcaattttctcttccaggccacagttgctcggcatgagatggggcagctgctgggtgaccaggtcccgtagctcagaaggggtcagcgtctccttcccaccctccacggagtactggtgaaagttcttgatgagggtctcaatggccctctccacatcactgaattcctgagcatcctctgcgttggctgaccgacactgtcccatggtgctcactgtgtctggtcctttggtgagagttctgttgt

SEQ ID NO: 341543 - DNA, 1000 bp, Homo Sapiens; identical to SEQ ID NO: 159931

SEQ ID NO: 341544 - DNA, 1000 bp, Homo Sapiens
tttttttttttttttttttttttttttttttcaaaataatttctttttcaagaacattgattttagagctcacactaagaaaaagaatacaaaaataatggcatagaaagtgaaaaaacaaaaataaaaagtagaaagctaaagtttcccattaaaatgatcaatatactgtgcagtaagtcaaatgtgtacaatgaattaagaaaatatgatatataaaaatccaaatttacaaaattaagtacaaataggtgtttatattacaaagtgatactggtttataaaaggattcaacatagattttttttaaatggttgttttcctcaatcaatttaacaatgattttaaatgtataaaattttaatatctctttgagacagtgatccaagcttcttcccttgatgatgttaccagttcatactttgtttcaataacctgtccctccacagaaagtaggtgcagtctcttcaccaatacactaagaagtactgtggtcaccatatatgcaaacctcaactctggacactcctgtgtgcctgagaatccaagtgaggaaaaagttttcattactaattcatcatcaaaccgatctggatcaaacttgtgtggagatggccaagtattaggatcctgaagtaccacaccaagggcataaaggacgagggtctctctaggaataataaatcggtcaatttttccttcaatatcttgaagctgggcagaaactggagtcagtttggcagttcgaacagtttcacaaagcacatgctgacaatatctgagctgctcaattttctctggagtaacaggaccatttccaaaaacttggtttatctcttcatataattttttttgaacttcttcagaggtggttaaaaaacagattgcccaggtacacaattttgcagttattatgcaactggccagagaaaatatcatactgtcttctaggatctgttggtcattaaggttcccttgtactaaggagtcaatgaaaata

SEQ ID NO: 341545 - DNA, 1000 bp, Homo Sapiens
ttttttttttttttttttttttttttttttaaagacacatgcacacgtatgtttatttcggcactattcacaatagcaaagacttggaaccaacccaaatgtccaacaatgatagactggattaagaaaatgtggcacatatacaccatggaatactatgcagccataaaaaaggatgagttcatgtcctttgtaggaacatggatgaagctggaaaccatcattctcagcaaactatcgaaaggacaaaaaaccaaacaccacatattctcactcctaggtgggaattgaacaatgagaacacatggacacaggaaggggaacatcacacaacggggactgttgtgggttgggggaggggggagggatagcattaggagatatacctaatgaaatgacgagttaatgggtgcagcacaccaatatggcacatgtatacatatgtaacaaacctgcacattgtgcacatgtaccctaaaacttaaagtataataataataaaaacaagaaaaaaagagatatgtaatagagaagaaaaataaaccgtttttatatacactatttgtatgttaattataaaccgtggcagtaaaagctttccgaacattggcaagaaaagctgaaaaattgttggtcttccttacattctcttgaaattctgctaggccctcaagatgaggggcactatctgacacttcatagtcccttgcttcattgagatgtaaggaaaacataaatgggctctcaggattcttagggtcaatattagtgaaaataaactgcaatttctcaccataaatttttcgaatttctagtccaagtcgatctttatacaagtctgcagatttctgcagccttttcaacctctctgcattcgctttattagcagtagaaatagtttccttcttcctagaatattcttccttaagatcctggatatttgcagtcagtacttccaattcctgctttttgccttttacttcagcaatcaattttaaca

SEQ ID NO: 341546 - DNA, 1000 bp, Homo Sapiens
ttttttttttttttttttttttgctgatctagacttattaaatttatttcatgtcattgtggtcacttttacagctgtttagacttattttcaatcacattactcttcacagaattcacagaattcattaactaactagtatgttacatccaagggttcttagtagcacattgaaatagaaaagaggcccacgagttgttgcttgtgtgtggaacctgagtctgattacttagacagatgtctagaacattattgctttattaggcctatttttaaaaataataaattattcctaggaaacccaccctgccaggtgctcattctgcgactgctgtgggttcactcagaacatacctgactggtgggtgctgaatgaacctcccacccatgtaccctgctgctccggacgctctgagggctagagcaatgcccctccatgcgtgtaaacattttctacagcttgccactttcctccctggtcttgcagccaatgggctgcagtcatacatgggtctctatgtaaaacttaaattagacctaaacaacagggttcagcgaatgaggactaatgctcctataaaagccactgcccatgcaagggaatacacctgatgcaacaaaaatatcttgagtctccaactataaggaatgtctcaaagaaaatgtccttgatttaattatggtccaaggtggctgctttgcacaagcttctcagtgacatgaacttgaagacttcatggtagatttcatggctggggtttcttattttgttccatatgagtttctattttgtgaaaaatatcttggaggttttcgcgtggtccccaaagctctggggaaccgtggataccagggataagggacgggcttcctcagggtcactggcgctccgaccgcatttggggcaggatccctgagagtggtggctgcgtcagacttgggggatgggagcagatgctgtgtgcagaatgcaggctgcagtcggggcctcagtccagct

SEQ ID NO: 341547 - DNA, 1000 bp, Homo Sapiens
ttttttttttttttttttttttttttttttttttttttttgggagaacaatggctttattcagatgttggtgcctctgcccctctggtgcccccgatccccacaaggggccgcgaggcgggcaggtcacagcaggttgaagtcccctttgtgctgttccagccactggtccagcgtcagggccttggggttgagtctcagggtcagctcgatgtcacggtcgggtctcagggcatagaaacggaacatgttggccaggtcccgggcaccgggaaagccaagcttttcgtagtcctcaggagtcatcttggcatcgtgcacgaccttgcgggtgtgcttggtgagcagggcagcgtactcctcggccgtgtgcctgcaagtgctcagcccgatgttctggccgacgtatttttctggcatcttcaaaaggctgagcaccacaggacccaggtcagacacggacatgccatccatgggaacgtcacctgtgggcaagctcagcaagtagctctttccgtctggggctttctggggcaagaagtgggagaggaggttctcaaaatagcagggcagccgcacactggtcatgggaacgccaatgtcccggaaatattcctccacctcccctttgccgtcaaagtgcgcggcggccaatctccctgccgtcagcttcttgatgttctccaggccgctgtagaccacatagtggaggcccaggcgcctggccagatcagcgagcagcttcccctgcttgacctcctgctcctggctgcagctctcccagtaattggtcacgatgaaggtggcgtaagccccattcagggccagctccatgatgacctggtcatcttggtctccctgcactacttctgcaccttgcagcctcagctcctttgctgccttcttcctagggtttcgggtcaccactcgaaccttgaatgtcccatcttccaggagtgtgcgggccacggagccaccctgggcacctgtgcctccgaaaa

SEQ ID NO: 341548 - DNA, 1000 bp, Homo Sapiens; identical to SEQ ID NO: 159932

SEQ ID NO: 341549 - DNA, 1000 bp, Homo Sapiens
tttttttttttttcattcaacactggctaggaatttattggctaacaaaatacaagtgatttcctggtccccaatccagattctccacctcttcttcacttctgactgatggaatgcataagaactaagatcttgagatgttatttgagggcagccttgcttgggtgtggtctatcatagctcctctgactaccgccgttgctacctggctgcaaatgattgttgtcaaggatagagggtccttcagaattcctgggagatcagaatcagtctctgaggtgtgggccagttgtcatggtgattattctgttgtagcatcactttatgaactaaattaaaaaaatcttcagtcacatctgttcagtaggagccatttcctttggagtcaggacacgcgagaagggcttcaaagtgttgcctacccttctattcctttgacttctcctccttttggtcaaatgactgattacagagatgattcccaaacccgtgatcagtatgcaaatgatgagaatggacgtcctggagcggtcagccttgcggacaactttgggagccttgcagcttctggttttgttgcctgataggtctttcccagaccaaaagtcattggccagggttcctttgtcgtcagttacaatcagctctgtaaaatccatgtcatccctggcaaagtcccgctggatgccacaccagtaccagcccgtgtcctctttggtcaggcaggacatagtgacaatgagctggttccctgtgtccctcagggccacatgattggtgctgttaggggagaaggcgatgatgttgcagtagtcacggaaatagcctcggcaccagtatttggggtgattcttgtagtgggcattgtagttgcagatggcagaagccgtgtccagcacaaagcttctcttgaccttttcatccatgaccatggcatctgaaatgagagccaaggagagtagaatgaagagccacatgactggaaggaagcaaactttca

SEQ ID NO: 341550 - DNA, 1000 bp, Homo Sapiens
ttttttttttttttttttcatgtttcaattataaattttatttaagaatactgactaacacaggaaacagatttaattcatggaattgtgcatatggtcatccgttacattgtgacatgttaattttttttttatcatttattggcactgtcaacagattacttgtgaacaagatcactttgtacgcttaagtctgcgatgctacttagctatggttttctaccatgagcttatatatagataggtgtaggtatgtagatacattaatgctatacacaattttgcatggttactgagcgtcagtaaaaattatgaaaaaacacccatttataataaaagtgaggatgtactaagacttgctattactggaccttgttttctgtaaaagtgatgacacttgctggacggttactaaactctatggcactaatgtatgatggattcatttccagactgtcggccacggaagcacttcttcatggcctctgccctggacagcagcctgtcctccgggctccccatgtttttaccagcttctgctgagtttctacaatcttgagctctgctgagaattcttttccttgaaattcttctacctaaagccccagcccccaaaagagcatgtctcaggaactcattatgccctgagtcaacaagaacttgttgataaatggcttaaaagtttttacaagaagtaacttcccttggtaaggagtaaataatagctctggaattttccagataaaactatttcatttctctgtcagtgccccatggggagagaacgaaatattggagcccctctccctaccaaagagagccacttttctggttgtgccctggcttaaaaccctttggactccgagaaccatactgaatatttgcacccaatgctaaagttttcaggagaaagcatacttaagccaataaatgaataatggtttggtttgcattttgcttgcttgttaaataaggccttattgaaccttgggatgctgcc

SEQ ID NO: 341551 - DNA, 1000 bp, Homo Sapiens
agaaacataacctttattgcacacggcgctgggtcttttttcatagaaaaaggtattaacacataagcatctgcaaattgaagcaactcctggttttcttggaacagtaaaatcgcatgcagtgtctctgagttgggattttggtctttgtcaaaaccacctagactggggggaaggtgaggaggagggaaaaaaattgctgagtctttgtgcctctgtctcaaaatagggtgagagaaatatatagatatatagctcgtggacgcgttcctgtctgtctatatatgtatatatatctccacacatattttgtggggtgggggatttgacttgtactgtcaaattctttgtgccctggcttcatggagaagaagaaaatagtttcatttgtacaaaagagttctatgtacaggcgttcatgattgggggtttttgttttgtcgttggttggtttttgtctgtcagttgaatataaataatgcagaaaaacagccgagctggcgtgtggggctgcggcgcggcgcggcccaggcgtggctgctcttcctgccggccctacaccagggtgtaggatttggagtaggccccggccccctgcttctgagacctccctacccccgatgtgctcatctcgagaagcgagtccctggagccccccattttggtgtgtgggcccccggctcgtggaggctcggtgctgggggccggaggggcagcgctgggggcggtgggtggctcagcaggggtggggccgggggctgggggggctgtgccggctgggggggctggcatggccagagtcctctgaggtaaggtggctgtggaggcggcagcgggggcccctgggtggggaaggcccaaggacttgctggcagggtccagggtcaggtggcgagcctgggtgtggtaggttcgagccaggttccggatggaggcctcacggggtgggaccacggggcagggctcacgtccatctgcctttcgaaagaaggcctctgac

SEQ ID NO: 341552 - DNA, 1000 bp, Homo Sapiens
taaaatccatacaaacatttattctgtccctgcctggaggtgagggggaagggggtccggagagccccgcagaggaggacggggctctagcgggaagacagtgtccggaggccggtgggctccctctagacggcagaccctggggctaacgaggggccagctgggttctcagaggtcacggagtgcaggggtggggcggcgagtggtggaagccggcgcccccgaagaccggccagcccctggagcacagaggcgggtccagcccacactgcgctgagtgtggccctggcccccactggggtctgtcccacccccaccccgcaggagggaaggcagcaggcccgctcttcccggtgggaaagatgctgtgcaagtcatcaggtttaaattaaaaataataaaaataacaatacaaaataaaaaaagactgtctcaaacaaacctgggacaagcccgccccgcgacccacgtgaggagcagaggtgccggccaccacccgggagggagggcctggcaggaggggcaggaggggctgcgggccgggtgggggcgggctctgtcctggtctccatcagcagcagtttctagagacgccagagggctggggggcagagggtggggaccggcggaggggtgcggcaggacgtgagcgggggtgggctgggctgggcgttctctggccgccagctcatcccgctgctctgggctgcctcggccaggtggacgggttaccggagatttattgcactgttttggaagaggcatggggctaaggaccagcgggacggcaggagaggcgggtgggaggcgggcaggcgtcatcgcttggtcttggcgtcttctcgaaccttccagatcaccaggtgcatgcaggcgccggcgtcctcgctggagctgtgcccatccacattgtcctggatgatctgtctgaggtagtcggccatgaggttccgcagggaccgcttgtaggggaggcccaggcggtgggggaagagcacag

SEQ ID NO: 341553 - DNA, 1000 bp, Homo Sapiens
tttttttttttttttttttttttttttttttttttttttttttttttttttttttatgaactagcagttttttattttacaactctttcctttctcctggcctctacccagtcaccccccatgaaaggcagtgggaatgcaagtaaaaactgcagtgtttccatcctgggtaagccacaccaccatcgtgcacgtctatattttgagtacatgcttccataccaccaggtttccatgtcatggcaggaactccagggcaatcacagcatcatatacaacatactatatcctagaagcaaaattatctgactaaattctgcttggaaataaaagggctctcatttgatgagctttcagagtaggcaacaaaagtatttaagctactgcccttgctagcaacccaacaacgttcacctcagggagacgatacaacagtaaacttctttttagttgaggaagacaacacgaccttactcctaaacatcttaaaaaataaatatttcaaaaacatgctaatatcttagacacagcaaagtttggtcaaatggcctagatcagaaacctcatccggaaatacatttctctacagtcaccctaggaaacaaggaggcttgactgtgaaccaaggggctcagcctgcactaacttggctttaagcaccctagggtttggactatttagctgaagcccctctccctaacacatctgttcttgggaaaaaaattcgatcttcactgcatgtttaactaagtaacattctctaaagagtgacatttatgagatgaacatcagtgtacatcgttctaaagatgattggtgcacccatgcaagccacggaactacagatcatttataaaaacaacttagagacttgcattggtcaagtctgcttaactttgcattctctttgttttggtactaaaactaagtgaaagcaatggataaagagctgagattttgttttcacatgactgtgagcaaaatctcatcatatccttgc

SEQ ID NO: 341554 - DNA, 1000 bp, Homo Sapiens
ttttttttttttttttggcagttgggggtggggtgttctggtttaatcatattcagagtttgagcttgaaataaccaactcaagacccacaggagactatgtcaccagataaacccagtgctagaatccaatgtccagcatcttcaaccactcaggagtgtttgctgagagaccaggtggtgcttacccacccaacaagcactttccatctttgggtttgcccaagatgtttaccataaatgaaaggggtggggaaaggattatagttgacacaaacataaattaaatatccaattccagcatatgttacagctacatcactatttttaattgtaatatttctaaaatgtcatttaatctccttacacattgaagagaacaaacagtgggagtgtttattccttaagagagaataaactgcagagattaaaagtttccttcgagtgtatcatcttattaaaaagtacaaagtttcatgaactttcaacaagactgcaaaataaatatgccaggtaggttgagcctatccaagtgaaaacaaggttatttgacatttagtgagagtcaatgaaaatatgaattatttcaaaggaattcatgatccaggtaggaggatttagatcctacggtatgttagaataaagctagtttctagcagattctgttaacagctccagactagaggggacggagtgtgctgctttccattctcttctctacttctgtcactggggagaagatacacggatcacagctctgagaagtgtgcattaaagcacatttgctaggctgagcactggaatggtgtgggctggtgtgaaaatgaagcctacgtcttcttggaccctcccagagcccttcacctcaagggttagacatctctccttctctaaactaacagcagcactcaatccctggtgtgtccgaagtggtgcttggaaagattcacagataccaagaggggcccacccaggccccagcttgatttaggagtgtaagt

SEQ ID NO: 341555 - DNA, 1000 bp, Homo Sapiens; identical to SEQ ID NO: 246540

SEQ ID NO: 341556 - DNA, 1000 bp, Homo Sapiens
tttttttttttttttttgtgggacagagtctcactctgtcgccaggctggagtgcaatggcacgatcttggctcacttcaacctccacctctcgggttcaagtgattctcctgcctcagcctcccaagcagctgggactacaggtgcatgccagtacgcccagctaatttttttgtatttttagtagacatggggtttcaccatgttggccaggatggtctccatctcttgacctcgtgacccgcccgcctcggcctcccaaagtgctggggttacaggcgtgagccactgcgcctggccacatcatctcatttttcaagagatgtgtcttttagaaaatttgcattttttaaaattatactttggtctgcaaaaaattgcatttttaaatgtttgccactaattgattcttctcccctcaaaatggcagtgcaagtcaaaataagacacaggcagccagttcgcaacctgttgtatacactccacaataaaaataaatggatccacacagtagcaaaatatgtgtacaaaacctaccaggaagaccagggacagacccctaccctccggtcaacatgagacaaggagagggaaggaaggctgagaatggggcaggagcccttgcagcaccagcctgtgtctgcagccctgggtcctgaggtaccactgggggatggaagaactccaaggagagccccagctgggtcctaataccccaggagccttctggcttcttcactttgggcctgcagggtctcgcttgcatacttctggaggagttccattttcttccttcgcaccagtgcctcctcaatctcttgctgcgagggaacagggacgtgagcaatgaacttctgctggctgtcgtcccctcctttctcctggctgccttcctcgtccgactcctcctcggtgactgcatagatgttgatctcttcctcctcttcctcctcctcttccttttctcctcttgccagccgagcctctctctctgctttcc

SEQ ID NO: 341557 - DNA, 1000 bp, Homo Sapiens
tttttttttttttttcttttaatttataaagaaaaagaggtttaatgaactcacagctccacgtggctggggaggcctcacaagcatgacagaaaggcacgtcttacatggcggcaggcaagagagaatgagaactaagcaaaaggggaaacctcttataaaatcatcagctctcatgagatctattcactatcaccagaacagtatggcggaaactgcccccatatttcaattatctcccactgggtccttcccacaacacatggcaattatgggagctacaattcaagatgagttttaggtggggacacagccaaaccatatcaggtggggaaacggatgcattctctagggggtaggggactggttttgctaccagagctgttgatggaagctaaagttcaccctgtttcccaccgacccgctctggcatgccacttttctccagactcagctgcaaagtcagaaaaaactcactccggctgaggttgctcttcttagaaagagaaaatggctggcgtggtggctcatgcctgtaatcccaacactttgggaggccaaggtgggtgcatcactaggtcaggagtttgagactagcctggccaacatggtaaaccccatctctactaaaaaatacaaaaagccaggcatagtgatgcatgcctgtaatctcagctactcaatcgcttgaacctaggaggaggggttgcagtgagctgattgtgccactgcactccaacctgggtgacagagcaagactccatctaagggggggcggggggaagagaaaatggctgagatgaaagaccttcccctgtctgtttattggtagttgtcagtgtgtgcatgtagcctgtgttcagaagcacagaccaccagagtaagaacatcactcccttctaggccacaccccaggcacatgtgcagggggtgaggcagctgaggaatcttgaaagggctatttatttcctacgagagtcctggggaaaccgcctgggag

SEQ ID NO: 341558 - DNA, 1000 bp, Homo Sapiens
ctaattccagctcattttatttttattaaagtgcttcagtagatgaacagtgttatcaacaatcaacacaaactttactgaaatattcacaaataaaaatcctctgtaagtcactaaaatgtttttctatgtagtaaaagtaatcaccattggagactggtgaatttgaatttattcctaaccacatacatggtttatatattaactttattatatccttctttgtttttgagacggagtttcgctcttgttgcccaggatggagtgcagtggcacgatctcggctcactgcaacccatacatgggttctcaaattggaagattcaacctggttaccttaatatatggggctggctgtcaatacctgaaagccagtcccagcaagtctgtggaaaaaaatgatgtgattggaaactaatcatttatccttagtgcttcagtttctccatctgcactgagaagtaaccttcccttagaaaagggttgtaaataaatacaaaatgttaaagcttagcatacttctgtgcctcaaaaagcattcacgtacatgcttttaaaagggcaatttctttgttcttgacataaattgaatactatctggctttataataaattgatggatgattactctttccttgaaaattatctttttactcaaatcatattaaaatcatactagcctgactgtagattaatttacaggagttgtgctcagtaaattattttgattgcaataaggactactgtcctacttaggtaaaatttacaaattattttaaaaagtttcatccattacttaacattctccaagacctatccatagagacagaaatcctggtactttaaagcacaaagaggcaaaatccaaaatttacttgttagattttggtatagctcctttggatactgtcaagtattttattcatgtccttgaaatgatactgtggttgacgaggggcagagtaaataagcaaattttgactatatcacccagcataaa

SEQ ID NO: 341559 - DNA, 1000 bp, Homo Sapiens
ttttttttttttttttttgtggctatttttaaatagaagggaagcaatcaaattgcttacagttccccaccagctggcgcggggctgcagtacagcgggagcggatataatacagcatctgtacacctcaagctctacactccaggaagtgtcactgtcacattttcacaaattccagtctctaacgaggagcctctgctgctgagccagaatccttttcgggttcaacggatgaggtagcctcagcaggtaactcttcagaaggctttaggactgcagcctcagacacccccttctcaagttctgaagcagtgtctacatttcccacttggctaatgggaggttcaacggttttgttaccacctgccctgtctgtcacctcaggcttttcctttcctcgggcttcttccttctctctacgagactctctatctctagaatctctctctctgtctcgatgcccactagagcgtctatttctctcttccaagtctctgtgcctgtcccggtcagggctcctccttccccactctctcctgtcacggttactattatctctatcatcattacggttcccataccgttcccggtcattttccaccctatttccaaaagatcttcttccaaacctttcttggtctctacctgaattgaactgctgcctgttatcatttctaaactgctgtggctgctgctgtgttggtggaggctgttgtgatggtggtggctgctgctgctgctgctgctgtggttgctggggcgcctgcggctgtggctgctgctgtggctgctgcggcggctgttgccttccgtctctgtcttcaggaccccctgggcctggccctgggcccccgagccctggcattccaccaggcctaacaaaggggccatgcggtgggaagggacctttcattccatgaggtggaggcatcgcaaagccccctggtcctggcggtgggcctctgtgcatcatgtgcggtggcatgggacggggcggcat

SEQ ID NO: 341560 - DNA, 1000 bp, Homo Sapiens; identical to SEQ ID NO: 159935

SEQ ID NO: 341561 - DNA, 1000 bp, Homo Sapiens; identical to SEQ ID NO: 246541

SEQ ID NO: 341562 - DNA, 1000 bp, Homo Sapiens
tttttttttttttttttttgccagcaaagcatataaagcaatatattcaaagcattatgcaatataaccaagtgagatttgtccctggaatgtaaggatggttcaccatatggaaattgatcagtggaatacaccacattaggaaatgacggaaaaatgacagtctcaattgatgcaaaaaagcatgacataattcaacacccatttatgattaaaaatctgcaacaaacaaggaatataatttactcaaattgctacaaggcatatatgaaaaactcaataaaatctttgatggtgaaaaaccatatttttaatatctaatatcagaaacaaggatatttgctctcaccagctccattcagtgttaaggggggtgctcccagggaaatcaggcaagaaaatgcaagcattccagccgggcctggtggctcaagcctctaatcccagcactttgagaggccgaggcaggcagatcacaaggtcaggagggcgagaccatcctggccaacatggtgaaaccccgtctctactaaaaataaaaaaactagctcggtatggtggcacgcgcctgtaatcccagctactcaggaggctgaaacaggagaattgcttgaacctgggaggcagagattgcagtgagccgagatcatgccactgcagtccagcttggtgacagagcgagactgtgtctcaaaaaaacaacaaacaaacaaaataaccagccaggcacagtggctcacgcctgtaatcccagcactttggggagaccgaggtgggtggatcacaaggtcaggagattgagaccatcctggtcaacatggtgaaaccccatctctactaaaaatacaaaaaaatttagctggttgtggtggcacgcgcctatagtcccagctactcaggaggctgaggcaggagaattgcttgaacctgagaagtggaggttgcagtgagccaagattgtgccactgcactccagcctggcaacagtgagaatccatct

SEQ ID NO: 341563 - DNA, 1000 bp, Homo Sapiens
cctggttcacagatagctgctttttattgacaaacaagatcatagtatttcagtcatggtgtcaagcacattaatacttttctgttactcagcatttttttttatatcagttcaaaagctacttttgccaagaaggatgagacaaaaggccagacagaaattggactttggttttcagacatgggactctcatgttaacaaagaataaataagcaaatattgaatcctttgtttctaagttagtttcttctgtataagattaataaactaaagggttcctgaagggttggggaggagagagggtgggggaaatagattgaccccaaattcagtgtgaacacagctccattcttgtttactcttcctttggactcctacttttcttctaaactctctgggtagataatgttatccttattggccttagagatacccaagatattataaaaccagagctgttatgtctgtcaccagccctgcaggaattattcaggaacctgtggtacatgtgacttgttcgaggtagaaatgtctcagctagatccccaagttgtggggtgaaaagtgtgaacagaaatggctgtaaaactacttgccttgcaaagtcaagtacatttaaaagaggcagaaacttggatgtgcttcttttttcatcatgcttgtcagtttacggggtgagagaggagaagcttacagcagctgaggtgttcagataaactagttctggcctcgcagtttttgctgtgcaaaagatacacacattgttggggttaaaggcttggttttgggtgctactgctaaatatacagttttcagcactttactgacatatagtaaggctgccttagagctaggaaataaaactcagtttcctagatgttggaaaatcagagtatgaactctttcgttttgtttttgttaggggagggtgtgtctacaacctgtctagaggagactgtctagtctcctctgcactcaatcagaaggtctgaattgaggg

SEQ ID NO: 341564 - DNA, 1000 bp, Homo Sapiens
gatgctattgtaaatggaactgttttctttctttctttctttctttcttttctttctttctttctttctttctttctttctttttgagacaaagtctcactctgttgcccaggatggagtgcagtggtgtggtctcagctcactgcaatctctgccttccaggttcaagcaattctcctgcctcagcctcccgagtagctgggactactggtgcgtgccaccacacctggctaattttttgtatttttagtagagatagggtttcaccgtgttagccaggatggtcttgatctcctgacctcgtgatccacctgcctcggcctcccaaagtgctgggatttcaggcgtgagccaccatgcccggccggaactgttttcttaataacattttcggattgttcatttgatcttgtgttttaaccttgtatcctgcaactttcctaaattcatccaggcaggtagttgtgagcaacacgagaagagcaagaatatgcctagccacggtggattcaggctgatctgcagaaaatgctttccttctgggctaacttttccctctccaacttccctcttctcgccttattagttaaaaaagaaaaaaataatcaaaacataaaaataaataaaatcaaaaggccatttaaaatataacaataagaaccccctcccccaataatgaaacctacatctagaagtcagttttagtagagctattaatggcccatatggtgaagccctggggtaggcacctgcggtaacccccagcaatgtaaaggaaagatgaaacaagaggtggtaggaccaaagtcttaggacaggaagagggtcacactagccagggctaagagtaggcctcttcccctgaacttgctgctgggaaaggtaagggtagagcctatttaaacctggttccttcctaaggggcacctgggggtactcaacctttgcttgcatttttttcagtgtaattcctccctctgtgctttcccctgcaaagctt

SEQ ID NO: 341565 - DNA, 1000 bp, Homo Sapiens
aaactatcaaagctacaggaaaatcctccagaaacaaactttggtaagtagtgaatggcaaaggctcagggggtttgcagcaggacctccttggggtcagatctgccagcctcgggttggcctttcagacccctcatcgtctatgaggcatcctgtaagtgcagctgtggccagggcttgcatatgcaatcaattcctgattcacctagttcttggcaggaagagaaaatactcgttaatcagaggactaaacaatccaaagcgcattctctctctgggaatggaatataatttatatttctgttgctattgaattatccttctaattccactggactaaacttaataccagtaatactaaaatttgttttgggcaaagccgactgaaggaggagtcagtggcgcaagcctatgctgactgtgaaaaataaacacctctgagatcaagaatcccacagtgagagctaggatttgaaggtatccagagattgcaaactctgtgactaacagcaatttttaaacaaggcaaaacaaaccaactcctacttggacttaaaacttcaatcatttagattttcattctcagcaccatagttgtgccaagtctcaaaggctgttattacatgatacatgtcaagtaactctacctccccaagctacgaagcctgattgccacaagtcatagctatctgcaaaaatggatcctgcctctgaaagactcatctgtggtcccacagccagaggagcttggggactcatgttattaaacccttcacattatagatgaagaagccgaggcttagtaaagcgtgtggttcatctaggattctcgattcagagctctcttcattcctccctgcctcttttcccacacatagagagtggatttcattacaggaagcattggactcctagggagatgcaacctttctgagggtaataatcatctgccttgccttactgtctacttacaaaccatcaaataggaaattggtaaagg

SEQ ID NO: 341566 - DNA, 1000 bp, Homo Sapiens
ttttttgatactctttgactgaactttagacagaaaagacaaaactgaaatggaggaacgtaatttaagtgtggcagaaagttgggaatcatgcggcctgatatacaaagataaatgcatcactgaggcatattcccctggccttgaggtatgcaggcaaaggagaggtcacaccttcctgggagacaaaggatcaaagttgacacagagctccaagaaaatatttaccagaagaatgtgatgattcatttatcagtccagaaatcccaagtacaaaacttcaagatacaagaaggatcaaattatatcatatatatgattcaatttaaaaattcttagccctcttatatcatattatctagattataatagtaaaaaatcaagttacattcatatgaaactttcataaaaagaaatcaaatccagttttatgaaattttatagtacaattactttctagtgggtcttttcttaggtcacagtatttataattccatttacatctttataatttttaaaattagaaaacaaaaggatgtcaatagaaatctaaattttcacttgcaaaactcccttcagtttccaggccagtaacacatggtgatgtcgacttgtcctccagacatggacggctaccaaagatccccagttcacggagcatgcaggcctctactcattaggaacgctttttggtttggctcacgtttcaagaaattgtggagcatgtccatgccgtccagagatcccccaggtttcaggattaggtttctgtatttcattccaacctctggattcattatcccttcttttttaaaacagctgtaaaacatatccatggaaaatacttcactccaaagatatccataatattggccatcgtatccccctgccaaatgtccaaaggtagctggcatatttgtgcctggagtagctgcaactcctaatatttctgagcagtatttggcatattcacttgcagcatccagcgatgtgttggtat

SEQ ID NO: 341567 - DNA, 1000 bp, Homo Sapiens
tttcgaagcaaaatacagtacaaatttattgactccaatcattcttagtcaacatttaagcaaactgtagacaatggaattgaatacaaataagcaatggattaacattagatagaaatcctattttaccatgaattttcagttcgaaaaagcttattcctaagtaaaatggaaaaatgacttactctgctaaggcatatgacaaaatacacagaattataaaaccattcgtttttcttttaaccataagcatatattcaatggaaaacttgaaatagccttggactaatgttctgaaaactagtattaactgagtataactgtgtgaaaaatctggacagcattaacaaatgaaagagcactgaattctgttattttaaagatttacagtaaaatactttggttcccaaaagactgtctctaaaaggaatttttaaaaacacctgacattgtaactcattttttctcctccagaatctaaacaccaattttgtcttctccccagtcacatgggaatgccacaagctggagtacccgctgagatacactgaaagagcatattaaaaattacaaaaaattaaacttcttaaagtgctaaaaccacaaaaagccataaatgaaaacctattttttaaaacttaaagtttagtagtcagtgttaaagaacacttttaaagagtacgtgtcagcattatttaaatcaataatgcatttcacaattattgcagaaacatcactgagacatcgtaaattgtcaaactgacttgtaatccagttagatacaatttatacagaaatctatttggaattatacctaattactttttactaagaaacttcaaataattttacttcctgaagttccagattacagttgtatacacacatgcatgcatgtgtgtacaaacccaatttgagacaacaaaggccaactttagatctgttaattcttccatctctccctcaccctgatcagagagttggccttgtaggtgcatcc

SEQ ID NO: 341568 - DNA, 1000 bp, Homo Sapiens; identical to SEQ ID NO: 159936

SEQ ID NO: 341569 - DNA, 1000 bp, Homo Sapiens
ttttttttttttttttttaaatttgacaatttattcaaacattgttacataagaagttttaagaaactgtaaataattcttaatactctcattttgattttccgacttctcaagactattttgtacttctttcaaacacacttcctgatgttgtgctttactgttcattttgcaaacaagttgattttgttcttcatttttctttctaagctcagtttccagatctaatattttaatttgtaaagcactctctctagatgacattttctctatttcttcagcaaccttttgtcttccttcttctaaagcagcttccagttgtctggccaatgctgtatactctgcagatttctctttaaacttaagattgctgtgcttaagacattcttcttggtttgccagcttcttctcaagctctttattttctgcgtccatctgttctaatttttgttgaaggttttcacacttcagctgaataagacagttttcctcttccagagaaagctttgtcagaagattgtgatttccatcaacctggccctgaagctccctaatggtgtgttcctggtctgcacacttccccttgcagcactgcagactctcctgacactcgtgaagcctccgttccgccgccgtcaaggaatcgcagacacgctctaactccttcagatgagactccatctggcctctcatcttctctacatttttatttttggtttttgttatttggttatttttatgtagcaaattttcacatctgctttttactatttcagctgcttcttgcaacttttgtacctgagttttatacatttcaataagggttttctgttttttttctacttcttgcaattctgagagttcattttcaacagatacaacttcatccttcaaagcagcaagtgtagtctttaattttgtattctcaagattcagagtttcattttcatattcaattgagtgaacttttctaagaatttcttcacatgaattttttcca

SEQ ID NO: 341570 - DNA, 1000 bp, Homo Sapiens
agcatgcaattttttattgttttctaaatctatttgtacacttaatatgctagtattaatttcacaaacagtataaagaatgtactccaatgatattacgcggcaactactcacctgaaaaagaaaacattgtctctgaaataattcctaattatacaattttgcaaataagcactataaatgttaaaatgttaagacttcagtgtataatgtcaataacatcctgcctttttaaaattgcttaaaacatttgttaaagatcatgcaaaataaacactgtattaaaatgctagattacactcaaacatcaaggcaatgaaacacaaaagagcaactatttagcacaatgactggcccagtaaataacttaatcagcatattaataaaaacccactgagtgataaacatcgaaaatgtaacactgaatctagataatagcgcatctgcgatctcaccatctaccgtcctaactgtgacttggggtaaaccaccagaattcattctacataaatgagctatgttaaaacgataacaatatttcattgcatgatgacagggtacatttctagtccacacagtacttcaatgtgaccattctcttaactcggctaataattaatggaaagtacacttttacagtcacagcacttatatagatatatatatatattttacccttgctttgttacatgtttccaaattttttttttaaaaagtatttcctttcttatgatccttccccagaactaacatgctgacttaggaacagatgaagtagataaagtctatcctagtatagagagcaatgatttagttttacctaattaaatatttccttgtcatttatcaattgtcactgacctttttgatgtaattatttcctcattcactcatctataaatatttattagtacctattattacccatgtctccctgattttccagaaaaagaattcatgtttttttttcttctcattgctaagctcacttagaaaagtt

SEQ ID NO: 341571 - DNA, 1000 bp, Homo Sapiens; identical to SEQ ID NO: 246543

SEQ ID NO: 341572 - DNA, 1000 bp, Homo Sapiens; identical to SEQ ID NO: 159937

SEQ ID NO: 341573 - DNA, 1000 bp, Homo Sapiens
caaagctaccctggaacggtaatacaataaaactagtacctgtgcataaattgttaactgacctgcccagcatgggtacctaactggggtttagggtagggggacagagggctttttaagattggtggtgggggatggggattaatacagacagctcgggtagggtccactcctggttccagggtgcaggttgctggacttggagcatgggatgaagagatgttcagagatagagatcattaggttgctgaactcccctagggcagtggagtgaaaaagctgtagcagccaaggcagggtgtagatccctggaggctgacggcttggggtggggccacagtgagcccagcccctgatggctctagttcttgtcccttgcagagctcagaaatggaggtggctcctgtgccttgtccagcaatggttccctgaaaagaacccataaggatacccccaatccaccccaatgtgtttctggtgttattgtagataatctccccaacagtgggtgagcttggggtgagggaacctggctgctgggagtggaaacgccctagatcctccatcctgtacagctgcccagtggacatacctctctccccagcaatttctcaaggcacaagataaagtaaggggcaaatacaaagataaagctgtgaggcaggagggtctgagtctgcctctaaaggagtagccaagactcctgtttctctgcatttttctttttcttgagacagggtctcgctctctcacccaggttggagtgcagtggcacgatcctagctcactgcagcttcaagcttctgggctcaagtgatcctcccacctcagcctcccaagtagctaagacgacaggtgcaccaccacgcctggctaattttttaaacttttttgtagagatggggtccctgttgcccagcatgcctggaccctcaacacttaatagtgataataacatatatccaacccttggtaaatgccaggactcatcctaagacct

SEQ ID NO: 341574 - DNA, 1000 bp, Homo Sapiens; identical to SEQ ID NO: 159938

SEQ ID NO: 341575 - DNA, 1000 bp, Homo Sapiens; identical to SEQ ID NO: 159939

SEQ ID NO: 341576 - DNA, 1000 bp, Homo Sapiens; identical to SEQ ID NO: 159940

SEQ ID NO: 341577 - DNA, 1000 bp, Homo Sapiens
ttttttttttttttttcttgatttatactttattttctgtctttatatgtaacacatactaatcaaagggaaaaaactaaaaatacagatttatacccaaatggataacgattatataatcattcttactccaaaaagaactgtattaggtataaacaattataaacttcagataaataggtcatattctataaatactaatttgttatatacaacacataatcttctacaaatactagttttatgttattacttttcaaaatatttcaaactagttatttttttccttgtgcttcaattttctcatttgtaatttagggacttacccatttttatagatttactagaaattaagtttttttttgccgacaagaatgtcaaatcaggcacactgggatttattcctttaaaaatacagtcatttttaatcttcctaataggtaatggtctaaagtcagagtccagttacaacatggagataagacacactgccaattggcaactcctcctctggcagtttttttctccaatgtttgagtagatcattgtttctttggtttgaacaccagataaaatgtgtagttggttggatttaggacccatattgtatgacaaatacccatctttaaacaccaggcttagacacagctcaggctatctacatgcttagagctcattggaaaggctgagctccaccttgagttccatcgaaggctcccacagagtggaatccaccctgtttaaatcacttttctctctcctttttttctaattattgctgagtgtatacttaaaattgcataagaatgtacacagtcaaatatatatagtatgctaaagtagaacagaaaggagattcactgccatatacaccaggagcacattcactgttatttttctctctgctaacaactctttaagggcagctattttggggacagagacataggctaggttcagaaaagctactaagtatgcctactcatattaaaagaaagca

SEQ ID NO: 341578 - DNA, 1000 bp, Homo Sapiens
aagtcccatggatacatattgatcagggcagacattgtgggctattttccttaaacatgctgaaatggaaagattttcctagtgttaccaagggaaggactttcttgaccaaagtctgacttctccattatgacgttgttgctcttgcccccctggtcctcttctacccatgcctttgactttacctcaccatctgtcatgttttccttgattgacaaatcctccttgggaatatttgattcttatatcttctgtctcatatccaatccggggttccctccttttcctcttcttcctggagatgctacactttaaaactatcccagayctcttctttcctaggccctgctatcttatttgcacttagagcagaagaggcaggtaaagctacacttcttccagcatttggttgagctggggtctcaaactcccaaggacaaacctctgctcgtgatgttaaaggttgctggaagttattacttgagttataggagccacgcacattctcctcagaagaagatgtctttttttcctggtgtcctatttggttgagattttcattctctgtttttgatgctacagctttggggggcagttcttcgctctgcccagcacacacattggctgcacgaggctgacctccgttctcctcttttgccctctctgggagaactggagtcttggaaatcaaaagcttctcatcttccaaaatggactggccttggctctcccaaaggcatacttcagccttatctatgcgcttctgattggattgctgacaaacctcagctgccttaggcttgtggtgagatttctcctttaaggaaaaagtggggtttttctccatttcagaagccacaatagatacgtgcttttgaacttttgattctgaaggcacaggaccaggggtcaggtcataaacctcccaaggacacacctccccaatgtcaaagttgtccttcatctgggtggtgcctgggttcaggtcagaattggcagt

SEQ ID NO: 341579 - DNA, 1000 bp, Homo Sapiens; identical to SEQ ID NO: 159941

SEQ ID NO: 341580 - DNA, 1000 bp, Homo Sapiens
ttttttttttttttttcactttctctgaattcatttatttagaggtaaaacacagccattcaaaattgtggaatacaatgtctacacacagaataaggttggggaattaagctgaattgttatattccattcacattaataaatatttttaaagaagaaattgtagattttaaaagcttcattagacactagtgacacatacaaataactaaactctcatactgcttgattttcaggttgaaaggttacaataatctatatatttcaattacatggcagtaaatacaaaagcattttaaacatcttttgaactgtgtagtatactataagcaggagtttattctaaaacattccatcattcttctgacctgtttatgggtcatgctggacaccagcaatccacatcacataaattatccaccagtaatgaggtgtaaaatcaattatgcatgtattttgaatagaaattatttttaaatgtcagagagaatgctattattggccaacttgaaatttcctaattagctatctgagctatttaagtctgtacttcagtgtcttcatttttttaaatgagagaactggactagattttatataagtacctactaaagcctagtgttttgcagttacttccttccctgtcaaaattttgcctcctttgattttcaatatatatatatttttttgtcttactctgttgcccaggctagagtgcagtgacgtgaccttggctcactgcaacctctgcctcctgggctcaagcaatcctcccacctcagcctcctcagtagctgggaccacaggcatatgctacaaagcccagattattttttatagaaacagggtttcaccatgttgcccaggctggtcttgaattcctgggctcaagtaatctacccacctcagcctcccaaagtgctgggattacaagggtgagctaccgtgctggcccaaaactaactttcaaagtgactttcaaacacttccttctaaccca

SEQ ID NO: 341581 - DNA, 1000 bp, Homo Sapiens
gcaaaattaaatatatacttgtattcatgatcaataagtacaaactaacatttccagttaaaagtttttctttttttctcttccaattatagaatacagagagctcttcctttcttatttccagatttctataaccctttttcagaacatttcttcacactgcagtacatgcctttagtgcaggagtgtaacataagtggtattcctcttgagggtcccagtagtaaacatagcttaactcacaggagagcaatcagttcttacaaaacacctatgaaaactatgcatatgacctctataaaatgtaagattgccaacatcccataataggaattccatggctgcttataaatatagatctcaaagaaatgtttgggcaatgcctgtaaacccataggctggcaaaccatatgtcaatccaatgcttttatgacccccaatttaacttcactctattgaaaatctgattagtcaagaaataaacaaagatgtggagtaatcccaaaagcaattaaaatgaagaataccttctcataaaattaagcagaagtaagactagtgatgtcatgcagttttggagatgccatagaaaaactgtctcttaatattaataagaaaattatgcatcagtgaaaatgcaggcttagaaatatagttctgagtttcaatttgtggtgtcttcactgatgagggaaaatggaattcttactactgatctcttcagtgttgctgatggctccttaactgagcttagtgtttaatgatgctgtacaaataaaaagcagtgggggaaatacgaaatatctgtattaaatgccatcctgtaaagtatttgatggatggaagagagtctaatgcattttaaataaatgcatatcatactatcacatatagtgaatcttaaaaaattattacttagatgcacagtccttgtagtggtagacacggcactgtgaaggaagtttgatttagaagctattttctattatacttctcaagt

SEQ ID NO: 341582 - DNA, 1000 bp, Homo Sapiens
ttttttttttttttttttttttctgcgcgtgttgtttactgttggtcactctctgctcttagcttcacattaccatttcgtgttttgtcaaagtccgtctcaattcgcgtttggtaaaataaatagataatgagcctctaggccggcgctctctcgagccggttaacgtcgtgattgaattttcacatcagacctgtgaagacagcccacgtgcaggcggcacgcagtgcccatgggggtgggctccagggtggagcgggggcgggggggggggtcttgacccctctggagccacctgccttttgacaggtggtgattttgtctcaaaacaaacggaaacgcgtgttgggtaagaattgagttgaaggactggatgggaagctgcgtgtgcgggtggagctgggcttctggaagattctggtgttgccgcctggcacgccctgtgagctgagtgaggccgggactctctacaccttccggacccgggctgctttctcggcccagacgtggggatgggattcgtgccggaaccttcttctggtgggagctcgcattccaaaaaggagcagcggaggggccgcctctgtcctgccttgtcacgtcccggccagccccagctcagtctccagctcagccccctgagggccaggtgtgtctctggccaaatgtgaccaggcagggttccatccacccagaagatgctcttggccacggcaggccaccagccacaccgcaggagagccgggcctcgccacaccagctctcactcccgtggtcatgggcctctcaccgccagaatgaagccacctggctccttcacctctcaataatcctgattcccgacgaacacggaaagaacacttttcaaaataccatcattgtggttgtgttctgtttgcaaaactgctcatacacgccctgcggcccctcctgggcgggactgtccacacagctcctgtctgcaccacaggcccagctgtcagccgaggtcgcatcagca

SEQ ID NO: 341583 - DNA, 1000 bp, Homo Sapiens; identical to SEQ ID NO: 159943

SEQ ID NO: 341584 - DNA, 1000 bp, Homo Sapiens
gtttcctgctgtttattgacagccgacggcagcgccttgcccagacctcccctgcccacctgctggagcccagcctgtgccgccctctgaggagaggcctggggggacagctgggcacgtccactcgcagggaaacacggggtgagacagcaggaaggggccctgcacgccgggacgccacctccgccagccgcctccacccgccccacaccacaatcgctggttttcggcattttttaaattttttttttaagaaacgtcaaagttgtgcccaacactgtggatcagcaaacacgatagaggagaccagtcagtacttcttggagggggcaggaggagagaggaaaagggagggcgagaatgaccacacaacacagccttggaccatgagcagaagcgtccgtgggaactccactggggtggatgggctgcctgcacagcccctggagagggggccaggcacaccctcagaggagctgcaagcccgtggcctggcctgctacatgccctgcttccacgtggctgccacgctgacacacccacattcaccaaacccacccgcgccctgggacgcagccacgccaggaggaggacacggccgccgagagcaaggcacaacctcgagttcttggggcgcagagaacttaggagagaagcacggaggagcccccggcagagcacccgcccccgggccccagccttccacctgtgctagcagcctggggcctccactctggccggaggaaggaccgcaggcagacagcctgggcctctaacagcttttgtccggagctagacttcgtgtcctttcagttggtaaatggttttctatagaatcaataatatttctttctttaaatatatatttgttaaagttatacctttttgtttctctggggaaatccgcctcagctcattcccaataaattaatactcttgatagcttatattctgggggtgcggtggggcaggggggccctgaccttggtcccctgtccct

SEQ ID NO: 341585 - DNA, 1000 bp, Homo Sapiens; identical to SEQ ID NO: 159944

SEQ ID NO: 341586 - DNA, 1000 bp, Homo Sapiens
ttttttttttttttttttttttttttttttttttttttttttttttttttttttttttttttttaatttgtgcattgttcccccttttattttaattcaccatgcatgcattttcagtaagataactgtgcctataaatacaaaggataacatcagtgcatattttggaagccacttcatttcattattttttgtcagcatttcagtgcaattttttcctagcaggggaaagaaaatcacaataccatatgatctagtagttttacattcctgtcttccccatttcctgctgaatgcagatcagttcatttttgatagtgggtagaaggactttgtaaatatgtttctgacttcagacaacccacatacctttagggaatgatctcccaaagctcactggattttagtatcgcgggatttcccagaaggcaatctaagttggggctctacacatgtgattccccattcattgtatccactcaatactactaacttctttatattagcaatttatggcccttgtcataaccaatgttcgagaagtaaaccatatatattgttttcttcagaattaaacaaaaagttctaaaaactattttaacttcagggaaacatgcccgagtcacagtgactaccagagttactagagcatgtactcttataactcacttacccagaactcatttccagtgttgcaggctacctggacctcacttgataactccactcaaactaggtactttaagcctcctcagagccttttactggccaggtctatgttcatttctatataaacactcacacaaataaatgccatgctgttgtcttagttacttgaatattttaccatgggatgagtgccagtcgagaggtggcccagaataaaaatattgctgttgtgatggttttaaacaggttttctattccagctttgttcactggatgtataaggaatgtcagagcagagaaaactcatgacaggtcaggggtcagaggaaca

SEQ ID NO: 341587 - DNA, 1000 bp, Homo Sapiens; identical to SEQ ID NO: 159945

SEQ ID NO: 341588 - DNA, 1000 bp, Homo Sapiens
ttttttttttttttttctttttttttttttttttttttttttttttttttttttttttttttttttttttttttctcagttatttaatattttattatctatctcttttacataactacttgcaaaaaaaactaatatgacaaagccaatgtattatatggttataaacagaaacatatctgtaaacattagtattataagcagtgtaatattaaaggtggttatctatttgaaaactcagaaggcagtgacttctacaattaaatttcaaaaaatcaaaacataaaacattattagcttcagttactataaataaagcatccgaatcttaattttagagctaatggtaacttttaaataattcctaaatttcatgtaatctgttaagatatattttgttaacatttagaaaagacaagagaataagagaatcaaaaccaacgaattaaaggagctttataatttagcaaaactttcaacttacatgtctctcaaacattactggcaaacacaatgactgcttatgagaaaatctgcatatgtcattctacaaacagtaatgtcattaatattctatttttagtttccaagggaagatcctaaacataacaaatccttccgttagcatttcttcgtgtatgcatgttcctacttcctgttcaaacatatgctgtaactattcaagtacgtcttttcaaaataaaactgattaaccacccaaaaattcaaaaacccaccaacatccaagtgatattaggcacatatcacttgaacttgacattttaatgatgaaaagcaaatttaagaagcaaaaaaattaacatatttaaattataatttgcacatcagattactttttcagatgtgtcagagctcacagataaaagtaatgaaaagaaacgtggtaaaatacattttaattttaccttcattataaattaaaatgaggcgtaagaaaaacattgagaccataatatatacatatggaaaactggccact

SEQ ID NO: 341589 - DNA, 1000 bp, Homo Sapiens
ttttctaaaatgtctttatttttaaaacctatagtttcaatttagtaaaaaatattgccatgaaatttctaactatacagcaacagaaacaaaaaaatacagttaattagaggttactcaaaataaattcacaattttaaagttggaatatatatgcttttttcaaataaacaaaagatattttttcagatgtttttcctcttaaacatcagatatacataatcttttgaactggagctagatgacctctcaataacttcagaaataagtgcttatattaacatggaaaataaaataacccccaaaccatacaattaatgatttactcataaaactaaaacccaaatagatcattgctttaaaatatctacctcttgaaaatgaaatctacatctgagttgtgaagaggaataagctttttatagaaaaagctgaatcttccagactggttaagttacttcctatcaaatttatcctattcagactattttcatatgtcttaatcctgaaagaatgtgaggtgttaaaatatgaaatgcttctttggccctttagatagaggtaccttaactgtaaacaactgcaatgagagccttctagatgtggacacttatgctgaattgaagatgtacatccttgtttcttaaaggcatggtaatttcctttttaacaataacaggttttttaatgtattgagatttgtttttaaatgctttaaaaatcaaaattcatgtatactactataaaagaataattctccaaagatcaaagaaaagcattatatgatattacaccataggttttattaacgataaatgtttgcattacttttaaaagcttagctcttactaagcattctttaacaaaagctaataagcaagaaatcatttgccatacggaaactatattcacaaacaagactttaatccaatattgaaagctaaagaattagaaaaaatacaaaacactgctatgagtcaattgaactgctatcattgaa

SEQ ID NO: 341590 - DNA, 1000 bp, Homo Sapiens; identical to SEQ ID NO: 159947

SEQ ID NO: 341591 - DNA, 1000 bp, Homo Sapiens
tttttttttaaggcaaaagctgatcaaattcatttaatctttgttaaaagcatcacaaatgattcatcgatttttaaaaaggaaaaataagaaggaatgcattgtctctttgttatgtgcatggcagctgatggcctcgttcccaggcgcccaggtctacctgaacatcagatatgcagaccctcgaatttacaaccagggacagacacgggcccacgcctggatctccatgggtgcacagacgggaacgtatcaggctgtctcagatgccacctccttcccaggtgcttgggtccacatgcccaacatgttcttaatagaaatattaacataaaatacaggaaacccacagataactaaggggaaaaacccaacccaaacagcagagagaattaaatggagtggtcaaggaaggccaacgacctagagtggctaccgcaggcactgtgagctaagggggagggcagttcccagggttccatgttgcccgtgggccccgggcctgcactgtgctcgccatgtctgtccctgtgtgcctgacgcttgcaggcggcctgctggccagggacaggtgtgggtggggtggccagcaggacaagaatccctgcaaaggtgtccttgcagactgcaagcaggggaatgggggctgtggcaaggtcccagagagtcatggccccacgtcctggatcccatctccaggatgaccttgaggacaacttgtagggtggcctctggagtggggagggggcacaggagccccaggtgggcaggtagggtggggagagagctttgggtctgggggacaggtggaaggggtggggacacctccacgcctgtgtggcccagggtgctccccttgtcctgtggccttgaacaccccccgacccagggagatgaggttccagtctccatgggtggttttactcaacaaggagcgggtgcctcctccccaccgggcactgtttggggcgtgaagattcacccctgggctttcccctct

SEQ ID NO: 341592 - DNA, 1000 bp, Homo Sapiens
tttttcagttcaccaaagtaatctgggtatacaggctgggagaggtggggacacactggggcagaagatgtggagtcacctgagcacagaggaggtagagaagtcagagatgttaccatagaggggaaatgttaggcaaggggaggttccgggtgggggtgggaatgaaaagcttctctgcagcttgagaagcaggaaatggtcagcaagtagctgagaggcaggtgctggtgggctcctgggctggtcttgctgtagccagagacacagggcgtttccagagcccccagctctgtgcttccttcctgggtggcttcctttgtgttcctcttctgaatgaagagcaattccaaaggcgtaagtccccagacaccctgctaaggggtacacaccagcagctcagttgtgcaagcagcacaagctgtctttctgtggccacagaaggctgcgactgaacttcggtccaggaaccaaaatatagattcatttttccagtgggcctgggactacagaatgccctcagagagcctgcctgggagagggggaccttgactccacagacctccaaccacaccagatgagggcaagcagggcacacaatgctgcctttattgcattccaaagggagtaggctagctgcagacctaccccatcccaggcctccaggagggatgctctggaaggatccaggctgctgggtccttgggagcccatacatgaggacccagagctggggccccaggatcaagagcgatggttggagcaggggtcctaattcccaggcacagagactcccctccacccaagtgcatggatagactgcatccctcctagaacacccaagtgtactccccatggggaagggacctagccctccactcctggttgagaggggatgtgaaattcactgtgaccccacctcctttcagtatggagtgcaaggtctctcagagtcaacacctctctctggctacagctgctgacacaaccctcacaccag

SEQ ID NO: 341593 - DNA, 1000 bp, Homo Sapiens; identical to SEQ ID NO: 159948

SEQ ID NO: 341594 - DNA, 1000 bp, Homo Sapiens
tttttttttgactgaaaactactttatttgaagacattttcttctatagttctaaacacaaaaggaatgctgttatagtgggtatttcataggcattcttgtattcaaatgaatcacataatgtttacacttttaagctagacttgaaattgaagacttaatacaaccttttaacaaagaaagtatcagtcatatcaaaacataactattcattctacagattatcactttccctaaaatgactactagatatgaaaacattgcagggacagctcaagtgccccattcttaagggttttttttaataggaaaaatgacaacgtaaatcacattttccttttctttactagtaatgaactatggcaatccatttgagaaagcaccagccaaccgtacaagtcatttcagcaccctttgctcttcaaaactgaccatcttttatatttaatgcttcctgtatgaataaaaatggttatgtcaagtacagacgtcagcaacgtgtcagttggtgtgaatttatgatgtgttcctaagtcaacagagaaaataaaaaaaatctctcatgtgaataaaatctaaggatgaaaaactatcctttgataattatcacaaggcaaaatcaaccaccttttcatcagtactagtgtggaatggaaatttctttattaatactttttatgggaatgttttaaaggcataggtataaatgcacatgcaatcagcttgcccctcttagatactaacttccccagcttcactcctccttttcactggaacaagctgctgaatccctaactccaaagtctgcagtgcttggtgagcatttttaaataaagattatatgtgattttcactttttcacaaaaatgaagtacagagaagactgaaaagcagtgagaaaaaaatcatagagcaaaaaactaaaacacaagatgtgatgttcaaatttaaaagaaaaacaaaactggttcgtgatgattgttagtaaatcacaaaaaca

SEQ ID NO: 341595 - DNA, 1000 bp, Homo Sapiens
gaaggtattctgaaacccagacactttatttaaaattatgacaaacattaatgactgtcaaaattgctgacaaaggtacaatgactaagcaatttcatgtttctatgtgctggtacttaattagcattttctaataattaggctaatgatgttttattactacaacctatatttagagttcactctcattgttcccatattagaaataaaagcaaatgaaaatgagtttaatcaggcatcacatgctacaggaaaaaaaattgaggagagggtgctgagagtagcaacgggtctatgttataaggaaatagatgcacttactgagttttagctgttagattccttaaatttcagttataaaaatcagttgtatcaggcaaaccatatgtgaagaaaatttaaagaacaagatatcaagtagatattaaaaagaaaaatacagtagagcaccaaatagaatattctcaacaaatgtctcaaaaaatgcacagagcaaaaatgagacaaacaactgctacaaacagatcagtctaacagctaagtgatttggaatgaaaattaactctttggctaatctttccctccctcacagaatgaggccgtgtggctcagggagatcaactgatttgtctgaagcttgcaagggtagatttcagagacgcttcagatgagggagcctctctttccatgaggagatggcagaatgctgaatccctgttcaatctgaaatttagccatataacttgtagaaataagaggaggttttaagactcacttaaaatataaatatcattctgagtcctcttctagggttatcccatcactttctgaaaatattagaaaagatcaagttgtatccaggtaataatcaggataagaccatctaatacatatctttaatagccaaaattttttcaaacatgatacgtgagcagaaccaggaaattctggaaacctagtctgccacaggttacttttaacacaaggttactcagccttg

SEQ ID NO: 341596 - DNA, 1000 bp, Homo Sapiens
gagacagagtttcactcttgttgcccaggctggagtgcaatggtgcgatcttggctcaccgcaacctccgcctcccgggttcaagtgattttcctgcctcagcctcccgagtagctgggattacaggcatgcaccaccacacctggctaattttgtatttttagtagagatggagtttctccatgttggtcaggctggtctcgaattcccgacctcaggtgatccatccgcctcggcctcccacagtgctgggattacaggcgtaaaccactgcacccagccaagaaggaatattaatggtttcagaataaaaggatcaaggcttaaatattcaaaagataatttcttagatgaaaacacatgactaaacagttgcactgaaaaatgtacaaagaaacaccaccaaattagaagtatcccaacatttgactgaatgtcagctgggacatagacaaaaaacaggaaaccaaacctagctatttgtttttcttttcagtaggtggcataaaggggtaagatgagaaaagggatcaacaaatgtagttcaacttaattgaagaattctgcctgacgtagtagaggcaaataaaattgttggttttgtgggattatatttgtttccatttagggacacatttcctgttgtttaaatgccacagcaactcatgagatgaaattcatctccaaaatggatccacataactgaatttccaagtaaatacaaagagtctacagcccacagaaaccattacaaattacacttttatttttgccccaactcctatactaaatatggtctaattcctgaggactagcaatggtggtttatcccacagtcttggggcaagcgtcccatctgataagtctcactcctccctcctgcccaccacctctcaggaaaggattcagagaaacttggttagaaactgttgtccttaagcctttgtgttttcacctctccagatagaggttgaatcttaagtccacaatccgctaaatt

SEQ ID NO: 341597 - DNA, 1000 bp, Homo Sapiens
aatatttttccttttaatgtaaatattacaggttcattgcaaggaaaaaattaacttaaaaacacagaaaagaaagtaaaaaacaaaaaattgatgaaccactaaaacagaaataaccatcattaattttttggagaccatcctttcatctctctcaaaagttcacataattacataatattacatttacagttttataccataaaggcagcatttacatttttctgtttttacagtctccccttcccttatctctacttctccttttctcactcccctcaaggtaatcaatattaacagcctggtgtatattcttccatacctgtctccatgtgcatctaaccacacacacacacataaacacaaaataaatgggtgtgattattttaacaaaaatgatatattgtatatatacatttgttataaagcaattatttatcaatacattgtggaaatacattgaaatcagctagcatagatataagtcgtttttaaaattactctcacactgttccataatatgggtatgtcacaatttatctaaccagttccctattaatgggcattcactttgtttgcagttggggctttgcccccctctacaaacagtacttcaacaaacatgtttatttacattcttatgcattgatgctgcttttatttctaacggacagattccaaaagtgagactgctgggtctaagagtatatatgttttaaatttttaaacatatattgttggactgctggtggaagtatgttacacaacctttaagtaatagtacatggtttcccaaaccccaatagctagcaaaagatctcttaatttttgccagatccatgaaggggaagtttcatctcactgagcatttcaatttgcatttccctgagtgctttttaggttcaaaatattttcacaggataatgatcacctacagttgctctcctatgaagaaccatccagtccagagggattaaagacttaagtgtaaaaaataaaa

SEQ ID NO: 341598 - DNA, 1000 bp, Homo Sapiens
ttttttttttttttttttttttctttcaaactttgtttattcacctgtaaaaaacttcacacacacacacacacacagagagagagagagagagagagagagagagagagaggcagacctaagatccctgttccaatccccagactcacctagggggtcagcacatacattccataccaaggtgacccaaacccactatcagggtctgtgcctgggcaccaaaggggcaggcaggggcagtgccctcgtttgaaactaggtctgtctggttgggggcctcctttgcaggtccatatgccttttcacagcctcacattagggatgttcacagcagagtggcctgttcggggtgggggactggctgtcgataggctggtagccgagccctagtagcatctcggcggcggcggaaggccaggaattcctcccgaagggcagcacagcgggcctcagggccagtaacatgggcagtgttcaggaggcagccctcctctggagtcttcacacctagctctgtctcagcttcaggtctgagccgggagctggccaagcccaggtgcaaagtctccagcaattccatgtccccagggaattctgagtcccactcatagttctcgtccacagatgtgttcctcctcttgctgactgtcaccacatgctcccttcggggccatctctcagggccactggcccagctgctggtgtctcctggagcagggctgaggtagctgcctcctgcagagggggctgtggaggggggccgcaggaacgaagcgctgcctcgcccgctgctctggctggtgaggctgcctcgaggggcagcagggagaaggcctggcagcagccgctccctcagtgtccagtcagccagggctgtgtaagggggctctgcagtggccccagcccctaccacagccccaggaagtgattccctgggggatacaggaggggtttctggagaacgaaggaaagatgaggtgggacagcgccgggtatccat

SEQ ID NO: 341599 - DNA, 1000 bp, Homo Sapiens; identical to SEQ ID NO: 159949

SEQ ID NO: 341600 - DNA, 1000 bp, Homo Sapiens; identical to SEQ ID NO: 159950

SEQ ID NO: 341601 - DNA, 1000 bp, Homo Sapiens
ttttttttttttttttttttttttttttttttttttttttaatatagaacagtcaggttttattacttttaagtaataaagagccttttccttgcttttcttttttccctttttttcttttcttttttcttttcttacaacatacattaagtcgtgaatcagatgttaggggatgtggagatggaaggaaaattggtgacatcacaatatttttacaactttacaacaaatataaatctgagtttgttgcatctaccagtgtctagcaagggtggaaagcaaaggcacactcgggtttatggaccctccccccacacacagtggggaaaaaaactggggagaaatacttaaatgcagaagaccagctcaatacatgtgggtattttagggttaacaccagaagtgatgggttgtgggggtgtaggaatgtggatgtaagttttgacacaggtctccttaacagctgaggcagtgatgcctacaaacactggacaagacagccgcttacgtcaatgatgggtgctgcactgccagtactctcgggagtcaagcatgggaaagaagggggcagggggatacagacccatcaccttcctaatttctgcatttctagagaaaattcaaggaagaaaacaatatttcaggttctaggaaatacttcagggtttcaggagacagagttcacaggatgtgaacatggattccattacaaaagccaaaaaaaaaaaaagtaaaaacaacaacaaccacctactcctaaacaacagcaaaactaatggacttttggaacaaagggctctcacccaccctcagctaagtactcaggtctgaaggcaaccacactgattatggaggctccactttttcactatccaactcaaaactgtcattgtcagtctttttttgaattctttttaaagacaaaactaaacccagaagatcgaactggaaataaaagcagacaaagagaccaccaaatatactgtttaaaaaaacaaca

SEQ ID NO: 341602 - DNA, 1000 bp, Homo Sapiens
tttttttttttttttgtttgcagcacaatttattatctggccatagtatttgggtacattatcaggtaccgatttaacaccatgtaacctctcttgacacagagcaacccaaaaagaaaactttaaaatgtgcaacagcaataaatatcaagctttgtcatctaaaatgtataaatataaaatatcagtcatttctggaaacatcttaagaaaatccggcaaccacatgtccatgagtaggtgtctgatgttgacggtgcttacattcagaacatatcacctcagatccaacacaattatttttatgtcttttaccaacacatgtttgcatatactgaacagcctgggctccttggtgtgtggatgaaagcccttttttttacaagcagaaacctcaagcatgccagcattggtgagcctgaagatgccagtgtctttatgctttggtgagcaaacaatggcaatggcctctggcaacatgagttgataggaacagtgagtgtgaagatcaacgctggataaaaatgcagtttgagtgggatgtgtatggatccatcctagagtgaggagatcatgttgatcctgaacattgaataattcctctacattctccatgtcacaatagtctggtcccgcagactgctttggcacaattacatgggtaatagtaaattcattatgtgtcagttttccacagagtattccacaggtttctattcctctcactgtattagattctgccagttgcagaaatttgtggcaaagatcttctggcaaaactacacatcgcagtccttcaaccactaaattctgaacagcacttagagtagcagctggtgttaaggccctgtttacaggaggagagtggctagcataattggttgcatcacttttattaggttgatctgcaaatacattcagcaaggaattgttctggtgtgtggaaaagcaggacaaagcgctcccatcaatctgctctgacagccctgaggtttgctga

SEQ ID NO: 341603 - DNA, 1000 bp, Homo Sapiens
ttttttttttttttttttttttgactttttattttttgcatttattgtggtaaaatatacataacataaaaccttttaaccatttatttttaaacattttaagcttcttattgaaatataacaatataggaaacacatacacagtacaacttgtaagtacactgctcaatcagatttcatctggatcaagaacagaatattccaatattccggaaaagaaaagaaacatgttaaaaagaaaagatttttatttaaaaaacctagacatagtaattaaaatgggggttaagagaggtaatctctctatccctttgtgtgtgtgtgtatatatatatatatcatacataatcccatatctatgcatctatacccaccctataatgtaccattttcagaaatgggtttgcagaagactttctaaggggtatttgttttattgtttaaaagattatgtggtaataactttgggatacactaaatagagtaatcaaacaagtttgtcacccaaggaaattttcacaaattcagacttcagggcctattgactgatcattctcaagtcaagagaggaatgaggagaatccttcttgcccattctagatatattttttaaattatgataaaatatacataacaaaatttaccattttaaccatttttatgggtacaatttagtggcattaacattcaaaatgttgagcaaccatcatcgctatccatttccagaatttgttcatcccaaacagaaactatgtactcgttaaacaataaccccaccccccatttcctcctccctgcagtccctggcaaccactattctcctttctgtttctgtgaacttgcctatgctggtacctcataaaagtggcatcatatttggccttttgtgtctggcttatttcacttagcatagtgttttcaaggtttatcctgaggtagtatttatcagaatttcattcctttttaaagctaaataatattccattgtatgtattatagc

SEQ ID NO: 341604 - DNA, 1000 bp, Homo Sapiens; identical to SEQ ID NO: 159951

SEQ ID NO: 341605 - DNA, 1000 bp, Homo Sapiens; identical to SEQ ID NO: 159952

SEQ ID NO: 341606 - DNA, 1000 bp, Homo Sapiens; identical to SEQ ID NO: 159953

SEQ ID NO: 341607 - DNA, 1000 bp, Homo Sapiens
aattagtacataaagtttttatttaaagttttccccttccaagcaagcttcatttacacattctaatactgtacaaaatttacattctctgtgacttatttattcacttttcactttctagtaacttatgtctctctgaaatacagaaagctttacttataattctcataaatgcttttattttggtgagaaataaaaaataaaatgcagaacaagtctaaggaaagcaaaggttcttgtacaaattgtgacttttggaagaaacagtgacagttgacaacaaaaggttctgaagcagacctcattctattcatgatgtcagctgagattttcccacagagtactgtaacttttctttctatatactcatatgttttaaggaaaaagaaatgacagttgattgcactggatatacatatatttatatatatatatttttacaacggatcctttggatctgaacatacaaataaatacaaaaacaacgaagattgcactttactgtagaaacggcatcggattccagtatacccatttatcttgacgtgctctgccatgaaagcttatcactaaggcatttttcatctgtgggatttccctaattactgttttgaatgacacatttgttgaaggattcaacaccatctctggatggttaaaatatattttaggcttttatttactcctaaagttgttgttcaagctctggagggcttgaaaatcgaatgtgcattcctgtcagttttgtccttttggttggccacattgagactatctcatgctatcctgaccttctgctcctgaattcctcatgctcctcaagacaactagcaattgctcgcttaactgagttcaggcatctctggtgataacaaacaaaatatgatgaattgggggaataacgatcgtaagtcaagtgtctagaggcacccgaaggtgaggaagaggagaagtattctgtcaggtgctataattggctcctgtggctcttgtaagttct

SEQ ID NO: 341608 - DNA, 1000 bp, Homo Sapiens
gcagtggtctgtgacggtcaatgtctttacttctaaagcatacattggactcactatatattaacatcaaaagtggctacctaaaatggagtcattctttttaaaaatccaaatcctcacatttttatataagatccaaaatgacatgaaattaaactctacaatgttatgaatagtataacaaactgctttcagaaagcaaaatgaaaggaaaagaattagcagttgggacggttgtaggcctgggttccatgtcttttgaggcattgtgacagagagccagcaccaaggggaaggaccagcccctccctgtggccacaggaaggaactcagtcagacagaggaggtgggcgtggctggtcagccttcttacggtgacagagaagcatggtggcatctccctgcccctcagggcccttggtgtgcccactgattagtcttctttcaagaccagggaggggtggggctggaagagggcaggggatagagcagggttcaaaatgattattttaataataaaggtccttctgggcttcctaaggagggccgtagccacccagcgatgttggtcaactccatccaccaggtcccccacaggcttccttaacccacttgctctttctgctccctatgactgggataccctctgcttcatgagcctcatgggcagccagagacctagggggactctaggaggacccaaaggacactctggcctttgaagtagctggatgttgtccagaacatcttggctgtaccagacccctggggtccaggccagcagccacattgatgtagggagggtactgggggggtccccaccctggcctagtcttggctctgaagcaggactgggttgagctgactggggctgtgccccaagcccctgacgctttggttcacacaattcaggggaggacacttgtttgcatctgctggggagatcctaggcctggtcctgcttcctcccagcctcaggtgggctgacaatccctgcctt

SEQ ID NO: 341609 - DNA, 1000 bp, Homo Sapiens
cttatgtggacttcttttaaacatttattaaaaaagcaaaatgtatgttcatctcaaatctaacagttaaaaatggtaaagcaatacaaacaatgtgttactagcagcatccagtcgttagaatctctcaccctgcttctcggtctgatctgtgcaagctcagtctcttctgagcctgcagctacctccatccctcatcgtagtgcaggccaaaccaaattttataaaattaacaatttaaggttaaataagcttaaataagggtgttaaatacaagacacttcatcaaagcttctgtacaaagataaacaaatctggcattgtacaagtggttccgctggctcacagcacacagggaagttctagtgagtaagcagattcactctcatttctttccagcagagcaactatacaaaagtgaactaagagttgaagtgactactgaccactcggtgagccatttacaaggcatatgtatcttttttttgtttttaatcagaacactgttaatattcaggcaccatttgttcctgcaaataaataagtctctaaggtaactgcatctgaactagtgttaaacacaacagtgcttttttttttttttaatccccccacaaagcttttccaactatgtactatgcctcctttcttattgctatggtaatgtggctgtggaaataaaactactgtacatccaaaaaaatagagcacctttaacattaaagtatatgtctgattatttgttctcatgtttattttacaatactaaagcccaaactatggtaaattgctttacatctctaccaggtcacctgatatacaggaaataaaactcaactatcttccctcttgaggtaagcccaagccagagcactgttttagcagagtctaaaagaaaaaggtctcaactgtcgccagggtttacattcatcttcacaccaggagttacattcattcatcttcacatcggcgctgctctctgccgtggttaccgagaaag

SEQ ID NO: 341610 - DNA, 1000 bp, Homo Sapiens
ctttcaaactgtatccagctttattaaagatactttccataaacaatcatggtatttcaggcaggacatgggcagacagtcattaacagtatacaactttcaaactctcttcttcaatggactaccaaaaatcagccgctataaaacccaatgaagtcctcatctgatgctctgaacagggaaagtttagagggttaacatttcacatttagcatgttgtttaacaacttttcacaagccaaccctgactttcaggaagtgaaatgaaaatggcagaatttatccgaagatccataatctagaaatggaaccactgctcttttgacaggtgccatctcagtggcatcactggaaagtccagattgccagacacactggtaaccaatgaccgggggtcaggtcccaacagatgtctgggcttaaggggattaagtctatgctgaaagatggaaagggaaaagaagacataaaaacgaatttgtttttccataccacaaggcttttgtgccaaggtggccatgtgtgtcaaagtcaggaaatccctcctcctgggagccaagaggaagtctctcaaaactagaagggaaagatgttttccccgtatcaatccagcttcagagatattctattagtgacacataccccttcccccaaaaacaacaatgaagtgttctgtgtgctaacaacatagcttaaaaaaagtaaaacaaaattctgcatttttataaaacttgataaagaatatttcaaactgtacagtcaccagaagtacagttataaaaaatgcacacacttcacttgggatctccagcaccttcccgctccttgccagcatcagcttttctctttttccctttgggtaccttctctcccttctttgcaggggcctttttaggcttgggctctggctttggaggagcaggtttagcagacaacctcgcagatcttctctgtgattcatccttcaccttggctttatctcctttagcatccccttcag

SEQ ID NO: 341611 - DNA, 1000 bp, Homo Sapiens
tttttttttttttttttttttttactagtggaacaactttacttggaaggttagaataaatctgtgaacccacatgttgaaatagaactatattattcaatttctctttcttcagttaaacattagtgattttttttacttgactaaataaagtcttgtatatattccccgcaggaattctaattcttttgttcgttttatccagagctatatagccacttcttaaaacatgttctatttatcaagtcataattaatttcctcaccaacaagggaacacagccttaatcatgagacagccgctgtgatgtcttattataatattaaatgttaagcatactacatgtgctaatcaccatctaccttaagatactgttttaagtcaggctggttgcctgtaattgcagccacttgagaatgaggtgggagggtcacttgagcacaggagtttgagaccaccctgggcaacatagaaagacaccatttaaaactttttttttagcttaaaaaaagatactgttttggttccaaaatttttatgactgccatactgctttcaagaatgcactgtttaaaaataatttacatcaattctggagaatacttatctaacatttactaagcacttagtatgagttggtcattttgctaagcactttatgtacatcaagtattttaactagagttttaagagtaacttaatttgcatttttgaaaggtcactgtggctgtaatgttaactcgaaagggacaaaagaggatgaagttttagaattcatgggtatggaacccattgaatgtgaggacttttttgcttatcggaggtggtgtatcactaaactatgcacagactttttttttttcttagctcatcagctattgttaatgttagtgtattgtatgtgtggcacaagacaatttttcttcttccaatgtggcccagggaagacaaaaggttggacacctgtgtaatgactgaaatagtccaggtgaaatgactg

SEQ ID NO: 341612 - DNA, 1000 bp, Homo Sapiens
ttttttttttttttttttttttcacttaaaaaaccacagaattttattttgtcaactcaaattttcagcacaccaaataagagtaatcatctcaggactgcacaggactttctcattttaccatatgcatttatggactacttgaatttgttatataataaatgtgtattttataatgaaaaattatttttctagcaggtaattctctaacacaattcatagaagagagcattttatcagtctttatagcatcttaaagatgaaaacattctttgaattcaagataggtatctcaatatctagatcaaactgagctgagtactagaagacaaactgagtgtattattcagcagttgcaggtgggagcatgaacagataatttaatgaattgctggactgtcatgatagagttattaccttttggaatgtccttcatgcttatcaaggtgcacggaagagaagcatctctggtgcctcagtttctctgaaatcaggataagctgctgtcctctgcagcagctgtgtagagaaccttttcatacatggtctgccttcaggggtggtgaaagtggacgaggtctggtggggtgcgtgtcactgatgctactgcactagaaggctgagtgccttggcccgcccttcctttccgagcactcacccctgtttatttctgtttcattaaggtcacatcagcaactcctgtcgtgctatacggacacattttcttcacaggctcagtcaggcaaacacttgtcctttttaaagtttactatgctaaaaatatataggatatatttgaacagacgatctctagaatgttcctttggatgatcccactgtgataaatgctatagtgaatgactagcaatccaggaaaagtcaaagaagggaataaaaattctcaaaataattcctttgatctaagaagtagctcgtagagaataaaccaggtgtatgtatgtatgtgtgtgggtgggtggagataacacacatacagact

SEQ ID NO: 341613 - DNA, 1000 bp, Homo Sapiens
cactggcttatggtgacggttttttttattgcattgccaagagtggattttaagaaaaaacactacaaaggtttcaaaaaccctatttattctctatcatcaaaaatagcaacagggggacttatacaacttttctgtgagtacccaccagtctatttttttttcttaaaaaaaatagaagttagttaaagaaaaatgatttggtttttaaaaaataatgtaaggaaacacttaatcagatagcccaaggagtcatcagaaatatgtgtagcaagaaagcttcattttcggccctctctggcctttgcacatcttttactaaactagaaagagaatgtacagtaccaatatgttccccaacctgcttggatcaaattgtttgtttttaaacccattattgctaaaccagagtgttgacactgagcgccgaggagtccactcatagaggataaaattgagaggctgcttccgaggactggatctccacctgggccattttgaactgagtgcactgcaaccactttcggagggctgccaggccagcactgctctggcccgagcccggcagcgtccttaggctgtggtggttcacgtggttctgaatagcctggaggcgaagctggagtcccgcagataagtgcttgatatttgactgaatcattggcaaccacataggtatcagcttgacaaaaatggtcgaattgcattcctgcaatgcctccattaaactaatcacatggagacacaccatttctaccatcactttgttatgggccattagctgaaggatgctgggtgtcaccctactccaaaattctagtgctgtcagtatcgccgtgaagctgaattcattctgattttggagatttgtagcgacggcactttgctcgcaataaactgtccacagctgagcaaagatgaacgcgtggaagagggagcacatgtgcagcacggaggtctttgattgctctggaaatccaatcaggataacaataagatg

SEQ ID NO: 341614 - DNA, 1000 bp, Homo Sapiens; identical to SEQ ID NO: 159956

SEQ ID NO: 341615 - DNA, 1000 bp, Homo Sapiens; identical to SEQ ID NO: 159957

SEQ ID NO: 341616 - DNA, 1000 bp, Homo Sapiens
aacttcatgcctccagaatgcatccatttaatagaagtttccagcgctgaccgtacaaaccagtaaggaaccagcagcaaaggacgcagggtggcgctcctgatgtcagccgccgcccgggatctcgccttgctgagaagatcctctctctccacgtggcccagcccggaggctgaattgtgcttcacaagtcaggggtttagaaaatgaggctttgctttaaaaggtaagtgtaaaatggtccatggaaatgcaccatcttccgcccaatgccccctagatgcagtggctgggacagttcagtgtgaagtagaggaaatggcgtcttctgcttccttcagaaaggtcctcggcgacagggccctctgggggacctggggacgcacccctctcacatgcccggcttccccgggccctttgctgcttctaacttccagaaggggcttgggacagcaaacagcccagggtccccctcacccaccccagagtgcagaacagcagccctggcccccagcccttggctgcaaggaagcgaggctgcctggccgtgaacgctcaggccggctctgagttgggtgtggcccacgcggggctcctgggttctgggttctgctcccctccccatgcaccccagccccaccctccagcacagcctgggctcggccctgtagggcgtccagtccctgcgttgccctcccagccagccctggtcacgagttgcggtacatctgtgtaaagagaagtggactgcatcgacgtgtaaaaataggttaaaaaactctcctcactagcctgcaggtgcccaggggtgagctggccctccccccgcatgaggggctcctttccagggtggagtcccaggagccatggtgagtagagtgtgccatccccagggtcacgctagtgccaccgtgtcctcacacgctcctccacgtccttcctgaggaccccgggcttggtggcctgagctccgtgcagggctggctcagagctgtgtctc

SEQ ID NO: 341617 - DNA, 1000 bp, Homo Sapiens; identical to SEQ ID NO: 159958

SEQ ID NO: 341618 - DNA, 1000 bp, Homo Sapiens
ttagatcaacattagtatgtatttatgcacaataaaaacatttacaagttgaactggaaatttaaacagaagtttaacagctcttattatattaaataaccaaaacaccttttattcccaaaattggtaaagaataaataatataatttacaatatggtacaaaaaataaccaggaaaggcaggcattctgctttatacatacactgtatatgcatatttataatctataaaacaaattcatatctgaaacgagcggaggcctcgctatggcttaaccgagtaagagagagaaggggagcggggcgcgggaggcagggccaggggctgggctccccacacctcacccaccccaaggacacgcagccactgtgacatcaggagagcgctgacagccgcgaagggtgtgctgtgggtttttttccttcgttgtaaattactctttccttgctttctttttttaacttgagacccagtttcgctcttcttgcccaggctggagtgcactggcgcgatctcgactcactgcaacctccgccgctgaggttcaagtgattctcctacctcaagtctcctcagtagctgggattatgggcatgcgccaccacgcccggctaattctgtacttttagtagagacagggtctctccatgttagtcagggtggtctcatactccccacctcaggtgatccgcccgcctcggcctcccaaagtgctgggattacaggcgtgagccactgcgcccggcctccttccttgttttcttaagacaaagtgctgtatttcctgacaaatgcatcggctagagctcaaggtttaaagagaaaacacaactgtcttcctcctccctcattcccggtgtcttatgccccacaactttctttgcagaagaaattttgaattcaatgctgtgatctaattaaagatgctattaaactaaaaaggttatccaccagaaatgaggccacggcctctcatgcccagaacctggaggtgcggca

SEQ ID NO: 341619 - DNA, 1000 bp, Homo Sapiens; identical to SEQ ID NO: 159959

SEQ ID NO: 341620 - DNA, 1000 bp, Homo Sapiens
ttttttttttttttttttagaaaaatatcatttctccttttattgacatctttatttttcaatatagtttaataatttcctttcacctctattgataaatgagttcctttatcatttgttttcttgtttctgatgtgacagttgtattgccctcataaaattaaaatcttttatacatttttctctactctagagcagaggttggcaaactttctgttaaaggataggaaatatttgcagttttgcgagccatatagtctgtcacagttgtctaaagcagccatagtcaatagctaaacaagtaagcatggctgtggtttgataaaactctatttacaaaaacaagcagcagataggatttggtccatgggctttagtttgataacctctgctccatagcagggatcacacacattttctgtgtaggatcagacagtagatatttgggctctgcaggccacatggtctcctgtcacaactgctcaactctgctgctacagcctggaagcagcacaatcaaggtgtaaatcactgtgtggctgaagccaacaaaactttatttacagacaccaaaacttaaatttcatataattttcatgttgaaaatattcttttcacttttttcaaccctttaaaatttttttaaattctagatcatggaccatacaaaaacagtcagtgagactgtggccatgagtcatagtttgctgacccctattctggatcagtttacctcacaatgaatggttccttaaaagttttaatacggttcacttataaatgtgatttttaaacaagtcaaatcttgcaaagttttctaattcttgagtaacgtcagttgttttaacttcatgcatataaatcttgcatttttctgattttttaaattcatttgtcccagctggcctattcattcatggtccctagactttctaaaacaaatcaagtcaaatgtaaagtttaattttctcaccaacaaggtcacatcaccttacattca

SEQ ID NO: 341621 - DNA, 1000 bp, Homo Sapiens
acaacgtactgagctgcacgctgctgctaattaatactgcccctttgtgatggaacctcactgttaggttaggacacagaacagtcgtaagtcccatcctgaaaaggttcttcctcctctgcttgggctgtgtcctcctctttccggctgaccatattgctgcttccaacttcaccctgggggatgcttccatggctggaggagcccctgctctcctctgcccgggggctagtctgttctggagtcttacccatagttattggttggaaggcatctggctggacctgctcttctgttatctcactgagcttctgcagttgtggcttaatgatgtttaaaaatggcttatatccaggacagtctgtagaggcccatcggtccactgcatggagccctgtctttatgttctgtaacatctctccatctacctctgaagactgtgtaataaccaaaatctgattgattattgaggattctctaagaatcaggcctataacgatgcaccagtctaggcaccctgcctccatgaaaatgtgtagcaaataccgaagctggacctgggatttatgaggccctttactggccaactccatggaaatgtgctccagctctgactgagttaaactgagtgtagagaaattttcatccaccattgtccagtcgccatccaccatggagctactttcagtcaagtctgtggctgaaccaatactgcattcatcacctttattagataaaggtgacaagaaggcatcttgcatttgtggtccatgggatgaagctgtgtctatctcatgatgggtggggccaatgttgctgagccagctctgacttcgctggatgttggagatgccagcatccatctcaaggttcaaaaatgggtcagctgattgagactttaacagctgctctcccacagttcggtattttccatttttgaaaggagaactgatagaagaggctgggatgattggaagtggccacaggaaatctttgtgga

SEQ ID NO: 341622 - DNA, 1000 bp, Homo Sapiens; identical to SEQ ID NO: 159960

SEQ ID NO: 341623 - DNA, 1000 bp, Homo Sapiens; identical to SEQ ID NO: 159962

SEQ ID NO: 341624 - DNA, 1000 bp, Homo Sapiens
cagaaaatagcaggcatctgccagaaataaattaggtcttgggaatgatcttgtatctgaactaggatccccataccctttctggtactctgaatttattttaaaggcatttctagataccttctcttttaggcaagggcctgtcctgtagcaaatggagttacctccaagactgttgtatctctgttactcctgaagcctcagaaattttagtcattatcatttgatggctgagaaacaacctggctggcgatagatgctgaactacttcctttttacagtttttgttcttttaatttacctcaataagtcctgcccctccaaacaataagttaaaagtatgctgagttagaatgttaatggatttggttccattaatccctaaaccataggagtggcaaagtggttgagagagaaacaattttatttttggcctttttattattattctagcattttagggcttccactcttttatttttagatggttaactcattgatgatacctatttgccatatagctgatcccaactgatgaaaaccattctaaaacatcaataattaattcacttaaagacgatggtccctctgtccctaagacagatcctatcaagagagggaaaagtctcttttctggaaacaaattgacagcaaaaagatgaaaaattagtctctgtcaagctggacaggaggtagttaacaggtttgtaaaaccaaacctgaaacctaccttcactgcccttcaacaaggagaaactattccctctctttcacccctttgtaacacaattctactgtttaaaaggacatcttccctaattaccacctccaataaatatccattctaaattattctccacccaattattaaagttttttacaagctcggtgggggaagattttccctgagacaaacaatgaacagagtgaggattttggaaagatagaaaaagctacaaggcaaagtggtcacagcataagaactgaaaatagccgggca

SEQ ID NO: 341625 - DNA, 1000 bp, Homo Sapiens
tttttttttttttttttttttttttttttttttttttttttttttttttttttccaccggtgtcttttattaatgaatgcaaaatacagtactaactggcagggcatgcatcagagacaacaagaatgcaagctacagaaaccaggaatggagggcctcctcatgtctgaggtagagtaagacggtgtcagggggcggacccgggggcggagatgagcaccggccgcactggggcatcatcccggcccacccgggacgatgggccgtgggagggctcagggcggtgtggtggccacactgcgaagaatggatttttaaaacacttcatagccccgaatttgtttcagctccctcttcgtggacacaacttcagggctcccttgtcactggcttgcgggggtggtctccccacttgcagagtctggtctccacaggacaccgtccttcccttcccttccaaggggcaggccccacgcaccctcgcccaaaaaataaaggagctttgtgttgaaaacgccaaggcagccgtccagggagctggaggccaagtgcgttaagaaagaccctttttctctataaaaatagtttcgctttataaaaggggggatgctcctctcacatgggggaaggacgcgtgaaaaacgctctaagtggagttccacggggcggggccgggtggacaccgtggtgtgggggaccctcccctcaggcctacagggctggggaggagaggaggtgcggggaggaacagactcctcgttgttggccggggcaggggaacagcgggggctggggagaggtgaggccggcccttctggggcacgtgggctggcggggagcgaaccacggccaggcctgcacgcaggcgctcagttgagcaaggttccgtagagctgggccttggtgaggctgtccttgcggctcagccccgagccaccagtccgcggaaaggcctgctgggggctgaggcgggcggcaggatgcatttccggggaggcct

SEQ ID NO: 341626 - DNA, 1000 bp, Homo Sapiens; identical to SEQ ID NO: 159963

SEQ ID NO: 341627 - DNA, 1000 bp, Homo Sapiens; identical to SEQ ID NO: 159964

SEQ ID NO: 341628 - DNA, 1000 bp, Homo Sapiens
agactgcagctgcttgtctggtggttggttcccatttcctccttcctccaaaactgggggctcacagctcatatttaacctgtgccctcccccaccaagttcaagtactgagttagaacttctgttctcctccaaactcgtatatatgtattaatttaatttaaaatccaccagtgcttttttttttggccattaataatcaggggcattcatgttcctagctggtttatatttggatggttttttctctggattactccaaatttttgcctattgaattgatggtcacttaaaagacagaggaattactggcatgtagaatttggaaggaaatagaaaggcaaacgagaaataagaattagcactattctgcacggagatctatgatgagaaaagagaacgaaaccaaactccaagacgtttgtgtagctagtttgttagttactttgatatgctggtgtcatatcatcactatactggcaattggaaaaaatttaaataggtgcttgaatgattctcactataacattattttgattccatcctttgtccatgttaatgcgctttcccccaaatcctttgaagattctgtggaattcctcaaatagacagtgaggcatcaggaagccagcaaagttttgttttgttggagatggagtttcactcttgttgcccaggttggagtgcaatggcacaatctcggctcactgcaacctccgcctcccaggttcaagcgattctcctgcctcagcctcccaagtagctgggaccacaggcatgcgccaccaacctggctaattttttgtatttaataaagacggggtttcaccatgttggtcaggctggtcccaaactcctgacctcagctgatccacccacctcagcttcctgaagtgctgggagtacaggtgtgagtcaccgtacccagctgccaaccaagtttttaagactcctccaataaacccccaaactctcccttctatttcagatagtgggactc

SEQ ID NO: 341629 - DNA, 1000 bp, Homo Sapiens
ttacatggactctccacccccacccaggtggtcaacagaaagaaaagcgttaatgggagatgggctgctaattcctcgggggtcgctgctgcttgggggaccccacaggcttgtggaataatgcggggtcccccagagtgaagtgccgtgaaggtctccacagttagttcccgacagcccagcaccattccagtgattgagatcggtccggctggagaatgagtgggaacagtcgagggagcccagccggctctggctggacccgagagactgccagccgggagaaggggtcagagactggctttgtgcaaagaaacgactgatctcctcttcactggcaaactcagcaagaatagtagtgttccccagtacacacatgtgcagagacttttgtgccttcactacctcttcttttgaactgtagcggaccagagcatttccgtgagggaggttcaggtggaatgtgatcagcgggccgtgctgcatgcacagagtgcgcagagttgagccatcgatctgaggtgtaaggttttttagaacaagccaatttgttattctccctgagctgctctcaccccagctggaacctggggtatatctggcgtcagaatttccccatcctccacctatacgaaggggagaattatcccacgtagacaagggtggcttctgaccagtcagtcccggaggtgggcgggacggagcagtgatgtttttaggtggcaaagggaccttccacagctcatgagccagagaggtgtttgtaactgaaccaggagaccatgtcaatttggaatcactatttctggctgaagtgctttgtgctgtactgctgaggggaacgttgtagttggaggcacgaatggatgaccaggcactagttgaaggcagcgtggtgttcaaggatgaggatgacccactgttcctgtccctgaggtggtcaacttcccgcacagtattaattgaaagattgtttatgacactgccaggagtgacgtaa

SEQ ID NO: 341630 - DNA, 1000 bp, Homo Sapiens
tctgtcaaaatacaacagagttttttttttgtctctcaagtacaattttaataagatgttttgtgttagagttctctctccatcctcccacacccacaagtttcatgctaatgccaagtatcaactcttgaggacaaaggcaaaaccagtgtgcacaatgtggaggatgtctgttgcagctgtagttactaatgcaggaaaacccaatgcaaagaggaaaatgcctgaggcagccagaggccacaatctggccacaggtctgggtgcatgagactggcagtctagtagggctccgctgcctggctgccacatgggtgcatacctgagttgtgagcaaccaaaggaactttcagctctgacaattctctgcctcatcttctttgtgcttgcttaaggagtgggaaggcgctaggtggccaggcagtccccacttctgtctcgtggtgtccattttgatggcctgcacccagccacagacccatgaggatggggatgggggttctggcttgctatgagtgccagtttttgctctggaaggagtgaccatttggtgccgcaaggggaaagtgagtagggaaggctgctccccagggccggacaaaccaagaaagccaggtcttcctcctgcctccatgggtcaggtccagcccttcaccagggctcccccaggtgcctttcccactctaggctcctggaagcaggctggtaggactggatgtgcataaggggcacctctggctggcaggcaggcaggcctggactctcagcaagagagtgggctcaagcagcttggttttggccctctccacagcttgtggggcaaaggcttatgtcccaaaggtgagctgcccaactgggacagagagcccctctggagaggaacagagtaaacaacttggactcagctgaaacagtgagataaggcacagaaaatggggaggtggccatgggtaccaagtgcgagccaggcagacacccaaccccatgcagcacacagctg

SEQ ID NO: 341631 - DNA, 1000 bp, Homo Sapiens
tttcaaatcgattgttttattgactgcatacagacgcgtttagaaaagggcacgggctccggggggctactccgtcccaggcccgcgcttgtgctgcgcttcgcggagagggctgatcccgaggactgaaactccccccaccccaaccccgacgctttctttcaaaatggaaaaaagaaccccgccccgagtcgccgcgccgcgcccctccccttccctccctccccgcccatccgcccccccgcccgcccccctacactacacggtcacacttcacaggacacagacttttctcctacagggcacgcttgtcagggactacacgccgggcaaacacgattcccgccgaagcaggggcgggtggggcggggcgacgcgaggaccgagacgcgaggacggaggggctcggctccatccggatcccgtcgcacagtcgcacagtcacgagcaggctttgtgcgaactagggcgcgagccctccagagagccgcggcccgggaggccacagtcagcttcctccgcctccggcgctttccagctagggtctgggtcgggtggagccgcgggagcggcgctgttgggcgcacagacctccggaaagcccaacacacggacaacgaaattggcccgcgaccaagtccacaggctcagccgccaaggggcgcgcggtcctgcggcgctttaagttaggagagagacgacagaaaacgcattccctccctaccccccgacacacacactcgattttcccagaggctgggaagggggtgttagcaccagacccgaaatgtcgctgtctttgaaaacaacgaaaacaggaaaatctgagcgcggagctgaaaggcgccccaggcaccgggctggactccaactggccagaagtggggtgggggtgggaggacagaaggatttggttccctgccggcaggaggctttggaactaaaaactaggggttgccacgaatcccggcttctgggagtagggattgaaagggaggag

SEQ ID NO: 341632 - DNA, 1000 bp, Homo Sapiens
ttttttttttttttttcctgtagagtatttatttatttactctataacagttcacattttaaatagtgcttcctgacaatataccagctggctcttctttaatagggcaataaggatagcaattcacattcaggggattagtttcaccataccacacatttgggggatggcaaaaacggggtctaaggaaaagggagggtgtttaagggaaagaggagggtaagacccttgcatttgtagaagtcattactatttctcagtagtggtcatattggctttgccggcaacctcaggatgggattagagaaagaaaggagcatgtcctatcttagacacctgggtgggtggctgcctgcaaggagaaggaggcttagggacacatttcacaagaaaccagcacccacattggtcagatgaagcttcctcaattttcagccaccacttacacctttctgtaccggctgcaagaggaagaagaaaactaaacttataatgttgtttggcaaggagagattcaaacttaccatagtcaaaagaatctatgttaagttagtttgcaaatacaccatgaagaattcaggtacattaagtttctctagcttcctcttatctttctgggatttgccctgcataaacacagtcctctgcccaaacaatcccaccaaaacaggtcctcagaaaacaacttcatgtttcactcctgcgcagagtggctggcttcccagaaagccttaacataacagagaaccaggttatgcccggacagctcagccaaaccacaggaccaccacccaagttttgggtattcagctgcctataaattaattcttcaaattctatactaaaccaaattaggtcccaggcccttaaactcaagtagattcaaatcccagaaattatctggaatcattcccatactctagaagtatcttcttattcctccaaagtcaagctggacccacagatgacttccaaactgttgaaacaaaatttgccttca

SEQ ID NO: 341633 - DNA, 1000 bp, Homo Sapiens; identical to SEQ ID NO: 159965

SEQ ID NO: 341634 - DNA, 1000 bp, Homo Sapiens; identical to SEQ ID NO: 159966

SEQ ID NO: 341635 - DNA, 1000 bp, Homo Sapiens
ttttttttttttttttttttttttttttgcagtgcagacagtttaatgctctccacctccatcaccaccaccgaccatcctccacaaggccctcagccccagggcacccttcacactggagccccagagagtgtgcacaaaagcatgccccaactagcatcactttctcacccaatgcccaggacttcgaaggctgccttctcacttctgggacacctacaggcaggaggaagagaaggcttcttctgagagagaagagctgggattccagaggccgcagagtgaacagacggaagaaaggtgctctctctctctctctctcgaggtgaacaggacgtgtgtggggaatgacagggacagaagaggtgctagaggcagggggtggaattgggtcagatttctgacttctccaggtgaagggcctctactgggaggcaggctgatggtctggcataactgcagctctgaagaacagcatgaaaagctggcagaatacactcacacctgacacctcctggccaacagcgctactctactcccgtcaacgtggtcacagtgtggcaattgcaagatgactgagcagagcctaggaggcagccttctcaagtgggttcaagccactgctccccattgcccaccccccatcaaaggtgacaccctcctacagccaactgagctgctcctcctcgtagcgctgggggtcgatgaacggccggtcgatagagcggatcatcagctccccacagtacacacactcagcggccaccaactcatccaggtcagccttgagctgttcccggctgggccctgccgtggcagccccaccctcggcctccttggcccgggcagagcccttggctgggggtggagcagcccccagcttcctctgcagctcctccagccgggcctgcttgtaggctggcaggccaggtcgcacagcctgcagcaggcagtcagcatggaacatatggccacagaggaagaggtaaaaagggcggtt

SEQ ID NO: 341636 - DNA, 1000 bp, Homo Sapiens
tttttttttttataatgatttgtatattttattttgactttacatgcggtgttaaaaacccaaagtacatattatttacacatccacaatacaagtttacaaggtatctattcatgttaaagtactctataaaacagtatagagacacttcacttgagggttactttttatgccgtaccattaaaaaagatacaatctgcgtttacctttgcacaaatggataaagcatttaaaaattaaattaacaggatagagactagatttaatgttagaaatttcaacataaatactgattgaactcacattacaaactacaaggaagcacaatgttacaaaatgttatctggggtcacatagagttactgttctgttttacacacgctgggattaatattggtaaggtgaattcaaacacgtttgttgttggtggactgagtagtgtttatcattggttggtttaatttattattaatctgtaatattttagttgcaaagctgaagtgtttcaagaacagaaattttagctttagcgcttccagagatcactggaaatcacgttctttataaaacaatgttctttaaaaaaaagaataactgtatcagtatttcacattctgtataaaaatgatctggtcttctgcaacatgtcctcccccaagtaataggtaccaacagtattgtcaaaagaaatccagttgaactcatttgcctgattacagcaggagcatacctctgccttggtactttctagatttggttcactaaacaagtgtgtggtgtgcagcatattaactgaaacagtcagcagggttgcgcatcatcagccgtaagtggtttctgccaaactacgtataaatgacgctctatagtttctgcaggtgtcacattacccaggaaacctcatttgagttcacattatcactgtttcatccttaggaaagcaggagtggaatgtttatcacggcaaagaatgtaatgctgctatgaggtcggattatgt

SEQ ID NO: 341637 - DNA, 1000 bp, Homo Sapiens
atctttggaattcatttcattaaggttttcacaaaatacaaagctcaaacgtaatcatctatgtccaccacaaaacagaatcaaataagtggttagcacaacaaacatagtgatcttttccattttaaaaaatataaataacaatgttcaaggttttacagttttcttagtgtgtgtctttttaaggctttatgttgcagacccttcattaatggtacttgtaccctgccatcaggatacactgcccaccagcaaggaaggccactgtggatacattcctgagggggacacacactgatccatgttgcctcagcctgttaaaaactaaatgatcaaacaccctccaatcagttctcagtttcattaactttctttctactacaaagtaataatagaaaggggtacgtgtccagcagcattcgagctctcagaagatcaatcaggaagggcaagaaggaaaaaggcttcctcctggagagaatttttttcctttcatcaggaacaaacaccaataacccagatagttcaaacagtggtttgtactgaaacatttttcagattaaatagtgttgagagaaacagtgatcttttggttgggtattttagaagaggttaaagtggagaggttaatgttgggaaaataccactgaaagtacagcccccagcaggaatgggctcactcgtgaggtttgggggcagagccagggccccagccttgggaatgaaatctgagggcaggctctccagcagacacttgacctgctcctggcccagcttgatcttgtcatccagcttccgttgctcaatgaggagcgtggacttcattttcacgaagtgctggtagtcctggagctgctcctctgaaaggtaattggccaagatgcccagcactactcgctccctgcgatccaggttctccttcagctcccgggcatcctcatgctgaccagccaggatcttccttttctcgtaaagagagctcctttcttcattactggca

SEQ ID NO: 341638 - DNA, 1000 bp, Homo Sapiens; identical to SEQ ID NO: 159967

SEQ ID NO: 341639 - DNA, 1000 bp, Homo Sapiens
ttttttttttttttttttttactcatttaattaaacgtttattcaatgaaaggatgtataaaaacttacaaatttgagaactcaactatacatgaaataggatgatgggatattcagtttttaacatatacatatactatagctattagctattctccccttctccttcagtccttacttctggctcctgttttgtcttgtgaggcccttcttttattggcctaacggaagattaatgaacaatttttactgctttcgggccaatggagaaaatttcaggcattaagaaagaagaaagaaaaaaaaacaaccaaaaacctggagaataaacatcaaaatcaagttttttcccaaacagcaattagattttttgtcctgatttctctttgccatttatttttgatgcttcaattaatgttgccagtaaactatcagcattgactttcagtcattgaagttactacatcttctggtcacaaattcccctgtaagatgagtattcctatatccttttccctgcagtacacacactgatttaaaagttagtgtaaaacaaattatcactggcagctgctagaaaatggcatgtcatgttctattcagaaaggcaatttatagaatagtacattcaaatttgatttttaaaacaaatttgtcagaaactcaaatacagcattttgttgttgctcaacttggaaagaagccagcaatgagataaggatgtgcattaattcacctgtttattagcaagtacccacacatttttctcttacaaacacacaaactcacagcttgtcatgttgtacccaaaaattaagattgccatcacattattactttttctcctttttgttttgttaaagtagatttcttaactgatgatttctcttaagtggacataatctcaaaggatgcattctgaagtaagacacctggaggatgaatactaagaacgttttcttgggtttaaagtttccccacactttctagattttgcata

SEQ ID NO: 341640 - DNA, 1000 bp, Homo Sapiens
ttttttttttttttttttttttcagacaggaactgtttttattccaaccacctcacctccttagaatgggaggcgaacagtgaaatagtgcatttatcttaaaagtgaaataattccaggatggtagggcgagaccctgtgatgggtgaatttacctcacttgataccaagggcccttaatactcggggaagtgggactttgtcgacaaagccaggacaatccccctacccccaccccacccagcagtgattaaaaacccgtacggtcactttctatgtgatggctgtctccctctcaccagactgcatagcggttgcagatgaacatttggcacctagatgggggtcaaggagctggggctgtgattcagggaagatgctgagggggactgggagtctctgtttgaatcttgaagcaaggggtgaaggtgtggggtgtgtgtaggggagctgacactgaagtctttcaggaagcagatggtaagggtcagggggtgtgtgtctatgctggggtgagggtcctgtggtattgctggtgatgctgactgccttgcccaccccaagttggactaggagagtcctatcaggctgctgggcagggagggcaaaggagagcaccattctgcgggtagggcaggaagggtggcctccccaccctgggtgcctgcagagcctggcagccccgccctgtggccatccgatgccacatgtcctctagagttcctgggccggctgctccacagcctgctcctccacaggctgcatggcctcctgcacgtagacgatgaactccgaggcctccccgccctgcgtgtagacagtcaccgtctcaatgccctccacgtcgtcggaggacaccaccaggtggtgctgctcggcaagctccacggacgcttgctggaccgtctcctggatcatgaccgtgtggttggagctgggctcctcctcggtgacctgcttaaccacagtcaccgtccctggtgccatggcaaccaccgag

SEQ ID NO: 341641 - DNA, 1000 bp, Homo Sapiens
ttttttttttaaatgcaaattttttgatcatttattaattgtaattaaaatttacatgggcctatttattaaggacattgtgtaatgtttccactttgttttaaacaattacaaacatgtggcttaaaataatgtacagatcaatgtaacaagtttgaaaaatgggcgatgagaatatgaagtctgccttctttctagcaataatcataaacactccaacttaatggatcatatgttttcttttgaaattctaagtttgtttaagaacaaaattctaaaggagttcaacatgcaatggatatatatatcattcagaatcactagcttccatgcttacactgaactcaacataaggcaaaagcccaataattacactgcatctttggctcagtgtgttaaaaaagcaaagcaaaatggtaagcctagtgaaaacaatcctttgtgtttgccagtttcagattgccaatatggttgcaataaaattcaaccattatctctgatgagatatgcagctttgattagtaggacagtttgttttctgaatgcaagatacaagcatgaatctgtttctctaattgttctcatagcttaggaaaatgaggcagaagcaggtttgtttgaataaagcataattctgcttcccgttatgaccacatatgattagaaaaacagtaaaccaatcagatactgtcagatgaaatattctgtcttctactcttggcaatctcttggatattgccatagactataaaatgattgaatgagttgtggtcatgaaactatccatgtcacaaatattggtctctcctttcaactgctcaagaaaaaacaagcctttggtaactctagttattgtatgctataatacaaaacaaattaccaataaccattcccgaactaactaacatatggccagacatttttcctgtataagtttaatgttttcttgtttcctactattctgtttgatctactaactctttcaacatcagtaggtaac

SEQ ID NO: 341642 - DNA, 1000 bp, Homo Sapiens
ttttttttttttttttttaaggtttgaacatcaaattttaatcttgaaaccttttatccagtcctcaaattattaacatgaaaaggagtgataaattgcaattttatcattaccatatcactgtgtaacaagcccttgttacaaaatctccctctactgtctgcaaaaaaccaatagaaaacccatacattatattacctaatgatctattaacagatgaaattttaaccaactttataccaggaaactatgaacagaggtacttcaatcacatagcttaaaatatggagaaaagacaggtaaaaaaattatcttaacctgtagtagtcttttttctttttaaaatttttataaaatacactaatttcccaaaataaagaatattatgacacattggtgtcaacttacacagatgaaagctgatgccagctttttcctaactaaagttcatttcaccaaacctttatatattacatgaatatccaagtaaagtattttttttttaaattcaacacacaggaacataatatacattgtttttttttaaaaaaaaggttaatttaggaatgatttcatcttcaaccacataaagtatctttttaagaccatgaaacctcttgtcattgcaagacttttcagttcatgtttctatttcccagttttaattcttaaaggaaaaaaaaaaagatgaaagggtttattatgtatttcccatgagaaaactgtggtaaggatcttattcattaccaggctgtcttccctccttttgttttccggactacccagatccatgactgcgtggcaccgtaatgaaatcggtgggagaggccaatgacatcaaggaatggatataaaaagacaggctcttctggatcctgccacaattgtaaggtgtgggcaaattcactcccaccaagccttccagagctccacagtcacaggagtagtctcctggttaactcatccttgatgtctgtctgctgggaggacataaaagacc

SEQ ID NO: 341643 - DNA, 1000 bp, Homo Sapiens
ttttttttttttttttttctttcaactttatccacagtttgcatcggtaatatacatttaagtgttccatttatttttaaatgcatcagaaaagcaattatgatagatctgtgaccaatacaaacatttctgatttattcaaaaaattcagttaaaaaagtcattaaactagcattctgtaaagataattattaaacaaatggtaatgcatttttactccttatttcatttctaacatacccaatgtcacttctttcttgtgccatacagtaataaaatgtaacagaaatagatatctattaaattttgggggcctaataaaatatttttgattattcaactgtcattaaatcacaaatcccactcaagtaatgaaaatcattcttaattcaataactgatgaaatagataatagccataaaaacatttagaataaattttacacttagaaactactaaaagaaatacatcagagccttggtataacattgtaggggaccatgctgtgaaactgctttagacgtggtgttgccatttggcacaagagtaaatgaactgccatgatgtggacctcagagaagcccatcttaaattgaattttgctctgcagtaaagaatgctacagtgaggttctgctgtattttctttttaaaggaataattaactgaaaagtaactgaaatgttataagaaaatggcctacaatttcactactacttcaaagatatgaaacaggacaacacttgtaaaataattcatactagattgattaatcagagactatcataacacctatgaaagcagtatgaatgattgctgtgtttttaatggtcacttaatttgtaatgctgtcaaatttctacataaaaagtcattaactaaggtatttatttgccatttcttacatatattacccaagttttcactagggagattatgtcagcgagttttttttttatccaactaaaaaattaacaactaatgaggtcaaatatttaaaa

SEQ ID NO: 341644 - DNA, 1000 bp, Homo Sapiens
gttgtcgcgggtgttttacagcactgagctccaatacaactctttcacttttatggctaacacaactaggtatctccagggccacatcacacaaattcggccaaggtcaaagtctgagtgaggtccggcctcagtcctaggtgcaacatctgtcttagctcctggagtccctgaccctctctctcaagcggagaagaggaggaggtctcagctgtccaggctcatgagtagagcagtgcccctcttgatccaatgatcaggtgtcatggccccagaccgcaggtcaatgccgatgacaaaggaggctcggtctgagctgcctgcccggttgggatagtaatagcaggggcaggagtacatgcccttggcgctcttcttgcggctctctgcaggccggaagtggatcgtgggcatgaggcagacaagctgcatgggctctgcctccaccaagcaggagttcttccggtcccagccagcaccttccaggtacaggccccggacccagacaccatccttggggggatacactaggttgctgtcatccacagtggaaacgataaactcccaggagaggctgtccactgaaacgttgttttggcgagctgaagactgcagcacagcagtgaggaagccagtgggaaaggtgaaaccagacaaccagaagatcacaggaggccgggcccggctggcccacagctcaaactgctccacacgcatggccaagtcccgggtccaggcagccaatggcttttgtgaggggtatgcctttccccagagcggaggaacatgggcatcaaagatgcaattgaaaatctcttccaggcttgtagacatgacgatgagaccctggatgcctttctctaggtctgtcagtgagaacaggatggtctgcatcagtgtgttgtatctctggatctcctgcagaaggaccacattgaggggggaggggtcgagagctagcagtttttgagtcccctcatagtcgatcatttcagggatc

SEQ ID NO: 341645 - DNA, 1000 bp, Homo Sapiens
ttttttttttttttttttaatttttatacattttattaccattgcatttttttcaaatttagaaattatgctacagcagtataaaaattattttaaattcactaatattttcttttgtgcttcttcagagacaaacttctctagcagtaaaatcataccttctctctttttactttactttttacttttactctctctatatttttattttgtaatctttaggactgttataccaagaaagtttggtcttaagatctaaataatcacaaatgagaataaataagacaggcaaaacagaatagaaagcaactaagaaaaaggaaagaaccttagaaaaatgataatggaggttaaaaatgattttctaatgtaagaaccaaagaaaaccttaagccataaaagccagaaacaaaaagtaaaacttagaaaattaaatttctattcaaactatcaaataaaaaacatgcaacagatcagggtctttactaaattagataataacttcttattgttacgaagtcacaaattaactcccctacccaccccccctccaatagataaatacatcaaaaatatcatgagattacaaattccaaaatgccataatgtctatatactgagattcacagtttctggatttatttttccaccacttaaactgtggatcattgctatcatgtgggagtgtttgttcaattcctcttgctgaagtttcaccaaggactctttctcttccaaacgaccttctaattgtgccttttgaacctctagggaggaagccttaatgctcaactcttttcttatctgttctgttctgcttaattcttttctaaggatatcaatggtttcttccttatcttccctttccttttgtaaggttttaatcttttcttcttgtacttttgttttttgatgcaaatttgctagcttatgttctctgtctactagctgattctgtacttcttttctctgttcttctttctctattaattgggcaata

SEQ ID NO: 341646 - DNA, 1000 bp, Homo Sapiens; identical to SEQ ID NO: 159969

SEQ ID NO: 341647 - DNA, 1000 bp, Homo Sapiens
gagtgtgtctattttatatttaaacccagctgtttggaagcaattataaaacttctcccacacaccaagaaccccagaactccccacccagaaggaaaggagacttagggtcctggtcccacagtctttaatgctgtagagtaggagaggggacaggcagagtgagggtggtaaaggactactcttgtccctgagaaggcagaggtgctggctggcctgcccttccccaggcttggataccttgggcctttcccttattcctgcaccaacagcaaactcagaaggaaaaaacaaaacaaaactctaaaggtaaacgcggtccttctccctctctcatgtggctcctcctgcccctacctgggagaaggttcaagtattgcgctgatgggtttgggcaaggaccacagaggctggcatggagaggccctgcctcctcctactcctcctgtctccttacctgaaaaggaggggagggatggataaaggaatgggtaaacaaaattaattggtaacacataaagttagtaaatgaataaatacaattaaataaatgaataaataaacaagcgaagaaaaaaatatcacacaaggattcagccatttgcccctccaccgggggggatctaggctggcatattaataaggaggtgccaactaccccttaacttttagggggtcacgactggggcagagggtacagggaagaggaagctcgcagtttacaaaaagatggtctaccacaggacagagactgcagggaacttagaagtatgttcccactcagagggtagacacagagtgtccacaggtggcagtgagcgggtaaaagtggatacccacactcaggacccaagacatctgctgacagcaatgggggcacaggtgactggcagtgcctggctatgctacaggaacaggaagataaccagaccgggcagaacctgcaggatcattggcagggaaacagagacatctagttacttggcagtgatggcagtgg

SEQ ID NO: 341648 - DNA, 1000 bp, Homo Sapiens; identical to SEQ ID NO: 159970

SEQ ID NO: 341649 - DNA, 1000 bp, Homo Sapiens; identical to SEQ ID NO: 159971

SEQ ID NO: 341650 - DNA, 1000 bp, Homo Sapiens; identical to SEQ ID NO: 159972

SEQ ID NO: 341651 - DNA, 1000 bp, Homo Sapiens
tttaatgaaaatcgtttatataacataagcaatccatatcaacagtagcaaaatacaccaagatactccacacattaccagtgttcttcaaactttcatgagcactagaatctccatctgattgctggctcacacctcctgtttctgcatcagttggtctagagagtgacccaagaatttgcatttctaatcagtccctagctgttgctgttgctggttgaagaacaacattttgaaaaccaccgtcaaaacgtgaagagcaccattctaatcttgcagggaaaatatgcatatgcgcctgagttctgggatctaggtgtctgaagcagttaaaatagatattcccccaaaataagtgtttttcattgagatttcatcctgagatacttgttccttcattctgagtgaagtacaggattctctttgcaaggatgaagtacaggattctctttgcaaggatgaagtgaggccgagtgagtctgtcaagcaggtctgtacaaagagtcaccttcgtattccccctgagggatcacccctgcctgtgtgctaggtagccgagagttctctgcttttcttaacagctcctcaaaaatcccattgtgcatgtaaaagaagatatacccagagtgaagcctcgcctcctgcattttggtctctgagatttctgatacacatagatcgttgtatgtgaaccaggcctgcttctgaaagtcatacacatcgctgatgtaatggcctgaatttggggagctcccgatatggctgacaacactgatgagtctgtaggcctggagaggatcccccatcttcacgtttcttgttagttccttggcttcacctcttgtgttctctgcatctaaaatgtttttgtttcctgggttgtcagaacccagtgccccaaggtgattcaggtcagccttttgaagtcttaattctgtagactgattgagggtctcttctgtatgttcctgggcatccagcttcctaacacctggaggtg

SEQ ID NO: 341652 - DNA, 1000 bp, Homo Sapiens
aaaagttcaaagttttaatccaaatttagacagtgttgagaaaaccaaactttggccatagaaaccattcccctcccgggcccgcaatggggaccagaccacgccccctgatgccctgagtggtcccagatcttcggcggtacctccagaccacgtcctcgcgctccgattggctgccgcttttgggcggattacaagctggattgtagcagagtgactcgcagaggccatgccccctcgtcttgtggcaggaccggaggggcgatcccggcatcccacgcgggcccccagggggtgggacctcctccacgcccactccctcggcgagagaaccccgtggaacccgaattagccaccgggggagatctggggggaggggtctcctggcgcgtggggtccgaaggaggcagcggcacaccgggaagagggtctccctgggagtccaaatttccacctgtcatcattctgtgccactgcgacgcctcagtagccagggcttgggagaggctgagaacccgctcccggtgaccttcggaagtcggcaagtaaggggtggtgttccttggactactccaggacccagagcttctgagccatttctgggctcccgagtgtcctacgacaggcctttgctccacgtcaggctggcgtctggctggggacagtgtccttcccagggtgagaagccggggggaggtcgggcgagggaagggccgtccacattcctggtttctgcgcatccgctccagctgctcctgggcattcatccggggccgggccaccggggccttggttcctagctgtggggaagggaggtggcgaccctcagggctggaagcccgggagaccctcggagacccaagacctaagtgagggctggcgaggtctttgtcgcctccaggaggccgcccccagtcagtctcgggggacctaggggagctcagttccaaggactctggcaggctctccctctctgaggactcctcgccctggagcacgg

SEQ ID NO: 341653 - DNA, 1000 bp, Homo Sapiens
ttttttttttttttttttttttttttttgaatgtctcacgaaggtttatttgaatagagttacatctagagttctcatttcagtgtacaaacaactcagtgcagtgtttctaatacaagtcatataaaactggaacacactaaatgaatagtgcacttgatagaaaaataaattacactttaaatgctactgcaaagttttacacatataaaaggtaaacacaaaatagttagtgagaccctcataaccacttatcatatccagataaggagataaaaggggcaaaggaatctgtgctataaaaaaaaatctctctgaagaggagaaatcctgacaagtaactgaatgatcatctcaagcaatgtggtgacatagggacttacagatcgtatctcttagaactgggaaggaatcatagctctaccaatgtgttaacacaacccagttcagctcagggcaaatttctataattcaaacaaatgtcctcatactaacgcctaatatgtaggaaaagtttccaactttcttctgaccactgaagaggtacagtgtttaaatttttgagaggataaaaaggacaaataatctagaaatgtgtcttcttcagtctgcagaagaccccaggtctccaagcaaccacatggtcaagggcatgaataattaaaagttggtgggaactcacaaagaccctcagagctgagacacccacaacagtgggagctcacaaagaccctcagagctgagacacccacaacagtgggagctcacaaagaccctcagagctgagacacccacaacagcacctcgttcagctgccacatgtgtgaataaggatgcaatgtccagaagtgttggctgcctccaagtgacaggtaacactgcagaacctatctgaggacctgccagcctcccgtttcacgcagccactctgctgctctacaaagtttcacatcaggggtcagcggctttgtaaaggggactccgcaggaacacagctgtg

SEQ ID NO: 341654 - DNA, 1000 bp, Homo Sapiens; identical to SEQ ID NO: 159973

SEQ ID NO: 341655 - DNA, 1000 bp, Homo Sapiens; identical to SEQ ID NO: 159974

SEQ ID NO: 341656 - DNA, 1000 bp, Homo Sapiens
tttttttttttttttttttgtatgttcaatttttggtttattaaaacaaaactacattttctgtgtttcttgcaatacactaacaagcataaaaatcaatcagcatttccaagtatgttttgctcacaaaatcgcagttatttcacagtaccttatagtaattcttttcacgagtcttaacatttctttgtacaacaggcaaatagtttaataccttccatcaagacatttcagagctctagacgtttagaaataaggtcaagaatctctttcaaatgcaatcattagtttgtattaaactaaaatgccagacggcaagtctcaggtttctaaaatagttttaaaaaacaggtttacagcccatagtaagtcttagaaacctcaacgataggtcctgtcatgtctaaacactacaactatctgtggataaaaatctgcattcaaacgtacaatactttcttctagatctgaattaaaaccttatttaccccaattcatccatgtattctgatacgttcagtgaaaaagccaggatcattggggctgttctctctatcaaaggaaagagctccgatcacctacattataattttctgtgcttattttctgcaggggaggaaatacacatctattcaacgccacactggacgttacaaaatgcatgcatattctgccccagtgctatctgttcattaccgttttgtctccttaaagaactatctaacatagtgtttcccaaaatgttctccacaggacattagtgagaggttcataagtatcccaaaggagaaaaaggtcctggtgtcaaaatagtttgggcaatgctgggttagacagtttttcactaccggatgccaagcccttactgcgctaaagtgcattgtaagtttccaggtgcaaacttggtttcccagcaacaccatttctataaaacactgatgaacatctcacagagcactcatattacatggagtgccatgggaaatgcttttccccatcc

SEQ ID NO: 341657 - DNA, 1000 bp, Homo Sapiens
aaagatgaatgccttttattatgaaaattgctgttacattacagccaacattccaaaacagtattttaataaacacttgtcttgattataaagtagagcaaaaaccatgatcctttttcaaaagtaattaacatcttctcagtcacttaacacaaatcaggacactctgtatgctcaccacggtgtaggagatgagatgaggaagagcacctatgttattcaaaacagctactagtgttacttatacagtataaaccaacaacttacaatagggcattttttaaaaagcaaaacactgaaatgttgaggtgccacaatacttttgagatggaaaaagccaaagcttgtttcctttttcttcccatcctgagttcagtgtgaagtatagggaagaacaacaccaggctggggatcgatgcagttttttgcttatttcccagttgttagtcctgctcgaaaacacagcctgcatgcaaaacttcctcaggctgccattcacaggccttggaatacagcgtttgcacatggacaaatgaggttcctagcagctcagagtcggtgtctgaattccagtgtattcactctctgtagcatgataaagaaaccaaaaacaaaattcctatgttcttttaagttaagaggcagaagactcctatttggatgcattccacattttggggacagaatgtggtagttttgcacagaacctctcccatcaagaaacagcttagaaaaagttaaaactgcagtttaaaagttcctttctcccctcccttggcaaagagacatgatgcacacatgactggaagggactcaggaaggcagagtgtggccactatagtttcaagtacgatctggttcttgcaaacggatcggggtaactgcaggtggattcaggcaaaccagaaattcaaaaatatccatcaacttctttaatataagaagctctactggaagcttttcttacaacttcatgtagctgacataccctttactgtag

SEQ ID NO: 341658 - DNA, 1000 bp, Homo Sapiens
ttttttttttttttttttgataaatacactgaaactttattaaaaggtcagggtatatagaaaacaaaaggcatgtttgcaaaattatttatttacatcttaagctcacattaaaatctttctaggatagaatggctaagatgaaatatacaaagctgatataaacacagaactcattaatctttatctgaacagaaacatagagatggctttagataatctgtttttccttcacaaaccaatgttcccttaagtcatgccatgataatgtctccccattaagaacttaacttgtattgcccaaaaaagctgagaagcaaaaagctaactttgatttgttaaacagctattcatatgccacaaaaccaaaactattttacagtgctgagaggtccagataggtccaaacatgatgatttttaaatgagtgctttggttaattaggctttgacttggtttttggcattacttgtataattatatcattccaatgagtcactacaggtaatccattcaaaacatgacttgcttaatactatcacaaagcacttagccttgccttgactggaaatacctttaagatgctgacaatagcaacaatttctcctttccttcactcagcaaaagaaatcacataaatcacaaaataaaaaattcatttctcacatgttaaaaaagcaaagtctgccataaacccttagagaagaaacagtttctcataatatctgccctgggtaatagtgcattattaaaatactagacctgcaagatctcttcctatgccttggaagcctatgacttcatgatctattcatgaaaaatatgccgaaggctaaatatgcaatgcattgaaatttctgggaagaattcacatttaaaacagtttaaaaaatctggatttagtaagagttttagaaaaataaataaaacactgtggttctacttctccccttctactctcccttcacaaatctaagcttaagtgcaggcttctaaaaag

SEQ ID NO: 341659 - DNA, 1000 bp, Homo Sapiens
ggaaaagaggtacttaatgtcacaaagtagactgtgcaaaaaaaaaaaaaagtacacccattaagttttcgtcattacctggcaagcccatggggtataatttttagaagaatacggaggaaaatctgttaacagtaatgttgggtagcaatttggaatgtttactagtagacagaactcctaattaggtaaatgtgtattagaaatgaccttaaagtcttcagagtggaaggtaagtaatttgaacatgaatacttagttggtaaataacattttaagaattctatttaggtttcacagactgagcattaggtaaccctgtgactagcctttaacattattatagttaaccttcttaaaaaccaaaggtgtacattttgacattgcctcccctcctcctaaaactggataaaacccagtaaagtgcaacttgacagtgatctctctcagattctaaagaggctgccaaactcatttaagatctaaaatcatctaagatactatagatactaaaaagaaattctaacaactaaaaattgtaattaaaaagagctaaggacaacttaaatagtatccttctagggtctactatctcactgcaggacagtgtataccccacatctctgagaaccctgtaaagccagtgtttcatatgtaagtctcgaaacctactgtgtcaagtaaatttcacttcagaagaatggattgaggtgtagctttaatcccccttgttaggaatacaaggattccccccaaacgagattcatatcagctgcaatatatgccttgcaaaagaatgcaagacaaaccaatgcctctcagatgctcaaaaccaatgtagtatgcatgtgagaaacaaggagacagctgctttgaattattactgaaatcgtaaaacagcagcagtatctgcagaatcaaggaactgttacaattctgttttttccctttccctctgtctcacccaaaacaaggcttcatcctactgctgtgatgacgg

SEQ ID NO: 341660 - DNA, 1000 bp, Homo Sapiens
ttttttttttttttttttttttttttaggaagcagattcatttatcagacatggaggaataatcaataggcaaccagaagttctatcacattttcaggtcaatagcaatatcaccttatatctcagcctattttctaccaaagaaagattattcacttctcttagcatagcatctattagtggagagtaggtgatgttattaacttgttggtaccttcggaatgtgcctagtgaaaagcctaaaacagtgtcagtctaagacataagtcaatgttaggtagacaaaaggaattattccttgggaaaggaaaacagactttacaagataaataactcaaaacagaaaatgggagagggcaaaagtaaggcaaatccactccaagtggtaagttgcctggtctattagtgctttgactcactccctaccacctacacagaggctttggagaagtcaaactagcaaaatcactcctaaaaagactaagactattgccacattgtcagtcagttcgagttgtgagcatgaagcccctactcaattcacacaagtactatcatttcttaagttcaggacagcttgggccagtttacctgcatccaggacctgtgttgcatcgggttgtggctgacaccctttagagtctgtgactgttgtacatgcaaaagaatcaaaatccactgtgaggtcttgtacatttctctcattggcattatcaaagctgtttttgccatgcagctgtttaaggtgtttcctcaaaactggtttatgtgcaaaaaccatatcacaatagttacatttatggggcttatctccactgtgaaggttaagatgatcctgtaaggaacacttctgagaaaaggttttcccacagattttacactggaaaggtttaattccggcatgcacacgcatgtgtcgatgaaggttgcctttctgagtgaaagtcttgccgcagagtagacacataaagagtttgtgcatttttaaatggttggcgta

SEQ ID NO: 341661 - DNA, 1000 bp, Homo Sapiens
tgtttttttttttttttttccattgcatacagtttatttcactagattgcaattttatacacagtatgaaggggtttcctgatagcacatatatagtttactttctgtactgctgaagaaccaattgttttttacattgtatcataataccctatcattaaaacattattcagtgaattttttccaactacatataaacggagatttaccacacacattctttaccatggtgcaagaatgcctttataacatatttgaatcacaaaatgtgagtctaaaatacatcactgtaattaaaacactactttaaagttacaatgccccatgttatagtagccagatttgattaatccctgtataaatcacaaagcaatttggtggataatgtcttggctaactggcagcagcttttaaccgtgatattaaaaaaaaaattctttaattaagaaccagactttcacaatttagaaaacttcttcccttatatgtcaatattctcagtcaaaatgggatatttaaaaatttgtagtctctaaaacaaggaaaataaatccaaccctcccttagctgaaaggatgcggttctaacattaggtttcgtagaaacctaagaatagcattgtacgaggagtggaaacaagtcataagaaacataacatttcttttaaaacctcttaaattcctctgcccctccccatctctgtcaaacacagagaaagaatactgcattacaaacaaagatgtgtttccgtgaaatgatgtaaacaagtcagagagaaagatttcttcattttcctattttgtggagtggggcagtgggatatcagttaaataagaaatagagctccttaatcaaagaaccacttcattacacacaaaacagctcggggcaactgctgaaaacttctcctgtgtttcctttccttttccccaaagtttgagaatgtttgaaagttcaataaatagtagaaaaataatcctttacttagaaattctgagat

SEQ ID NO: 341662 - DNA, 1000 bp, Homo Sapiens
tttttttttttttttaatataacctccagggcttagaacttagctgagtcctgctattttttgcatccttacttaaagtaaaacagtacaaaattataaacggtgtttgttctgtacagaacttcatggaatatgtattatgacccactctagcaaacatgggccaatctctaaaaaactatagcttctaaaaccaatcttcaagattatcttcttaaagaacgccttttaaacagcaacatgctgataaaagtttaactggctttccaaaaaaaaaagacctttatgtatataaaggatgtgtagtacataatttacagatgacaaaaaacgtatacaatattctattttaagttccatatagccaattgattctcatggaagacttttgttgacttttgccgaactcttgtatctgtagccaacctgtggttgcaatttgaccaagattttacaaacggtgttgcatcccaatctgctaattctttccccagtaaatttattgtcattaaatctgatacatgatctattgttaaactatttctcacccttgtacaaattatgttcattaaattgaaacccctttcagcttcagcactattgattgcaatggtgctaactatctttttagctttgtatatagttgtaggaattgaaacattgtttgattttatattattatttacaaattcccgaaaatcattcaaatcaacttcatattttaaaattttacacaaatgaaataatgttttttcaccagctatccatggtgaagttatttcttcataaggccatgtggaaggttccagcaaatcaaagtaattaaaaatatcttcatggtttctgtcagataaaaggcgtaggttcatgtgctgaattatattgtctagtaatatactcctaggaagagcattaaatttattgtttttattaaatggaatatctttaaacttatctgacttgatcaaatcttcaatttgagattcatactttccagtac

SEQ ID NO: 341663 - DNA, 1000 bp, Homo Sapiens
tttttttttttttttttttttttttttttaaaccaataatcagttttattttttctcatgtgatagaagtctggaagtccagggctgctgcagacactcaaagaggccacaggggaggccagggtcgctgtgagctttctgcagtcacttccttagactgtggttttcatatgcacggtcgttaaggtggatcttccaatactaggtactggatctctttgcaaggtgaaaagtaaagcaaagaacaaaacatacagggaggaattcatgtttaagaacgatccccattcaagagctttctcagaagcccatgtggtgacatctgctgatctgccagtggccagggctgtgagacatggatggcaccagctgcaagaaaacctgtaagagattttttaaaatttagattagcacaccttactaatctgacagaacctggattctcttgatattggaagaagatgagagtggataccggggaagtcactagaagtatctgtcactcttggctggacagcaggctgcaaacatattaccacttgatggaggcatcatgctctggtcgcaatccgtgtacatcaggtaccagtaacaaagtggtactgagaaatatcctcatgtcacatagatctcaatatgccattggtcaaggaggttgtccagaaggaaattaggacgttatcaaggatgaagctatagtaaaaatactataaacaaacctttcttgatgaggcttaagggttatttagaggagtataaccttaaaaataaagatgaaaaatttatgaacggggctctgttttcatgatgagagagtacgtgcagtcccgtattcaccggaaaatctcgttggggcttctctcggggggtctgtttccgtgatgaaagagtaagtgcaatcccgtattcaccggaaaatctcgctggggcttctctccgtgagaatattcacatgctcaagtgaggggaccatggctggaatcatttccacataggaatt

SEQ ID NO: 341664 - DNA, 1000 bp, Homo Sapiens
tttttttttttgaaggttaataaaggctttaatttcatacacacaaaaaaactctatgcataatttaaaaaggaaacaaaaacaaagaaaaaccgtaaaggatacagaggaacagttctgctaaaacacagataaaagtgccgctccatacaaaacataaagaatcagaatcaaaagtcactctgaacataaagaaaaaaaatcatctcacaaataatgtggccacagctgccagaaaacctggtagtggctcaattaggcaaagtgtaggaatctcatttttgtttttctctccttaagtttaaagaaacaacaatgacaataggccagagaagttagggagggaaagaaaagctcaaagggagggaaacctggggacaagaggtgtgcacacccacatgtggtctcattcttcacacaggcccactatttttgaagtagaccagtttagttgactgttcttctttgttctggcatctgactggaccaacctggaacctggtccagaccctcacccactctattcttatgccaatggacatacctatactttgaacctctgtacttttaagaaaagtccaatgttacaaaatcaaatgcttatattcagactggcacactttttaaataaaaactccatacacctcagacatatagcacacatggagacaacttactaattgtgtgtaagtatgatacaatgaatgagactgcctgaagtctagtaatcaaagcatgccataaggtgaatgattgtggttaaacacagcaaaataattgtcacaaaactttcaaggcctaacaaattagaattttccaataaaaaatatatattttttcagatgttaataagacatatcagtagagacaaaattaggattttgaagtaatgcaataaaaagatgttggagggcagaagtctatttagtttttgtatacacttgcaagagtgcattactcagtataaagcaaaatggggaggaaaaagacatccatccat

SEQ ID NO: 341665 - DNA, 1000 bp, Homo Sapiens
ttttttttttttttttatcaggacaccatttattcaacaggaggcataaaaactataattctctttcccggaatatgacttaatccctctgtttttcagctattcaccaataaaacaatactgtgactattaacacagaaaaaccccagcacattagccacccctgcaggacatcaaaggataactgaagcccagggccaagcacattcaggaggtcaaatgcctgaagatactgaggaatggttttgaaaatcagaagtcaagaagacttctgtatctttatgtttaaaaataactataaaatagcctcagaaaaaagagcttatatatatatatatatatatatatatatatatatatatatatatataatatgtacatatgtctatatgtgacccatcatgataaatactgacatctattatttacactcaaataattttacattttcttctgttagactactccaagactggaattgttttgttttgttgtttttaatgagagggtctcgctgtgttcccaggctggtcttgaactcctgggctcaagtgatcctcctgcctcagcctcccaaagtgctgggattataggcaggagccaccgcacccggccaagactggaatgtttttagtaaaatattctgaagtgtgaaatccttcatttctccctcatctgaaaggacagctttcagagacatcattcttttcagatgtctcctgaagttgtgattttcgttaaaagcaaactggagccatccaccaagttagggaacagctatgtccttgtgggttcatctgtggcactggaatcagcagtcatcttccaaatctgagatccctaaatccactgtcttgattgttcttttgccagttgtcaacaagcccttctcaaattcttcttcagttattttgcctttcttaagttttttcaagagtcttgtgtcattaagaagttcttccatgtcctcatcttcaatatcagaaccctcttccctttt

SEQ ID NO: 341666 - DNA, 1000 bp, Homo Sapiens
ttttttttttttttttttttataaggaaaagatgtttaattgactcacagtcctgcatggctggggaggcctcgggaacttacaatcatggtggaggggaagcaaacgtttccttttccacatggcagtaggcaagagaactgcagagtgaacagaggaaaagcttataaaaccatcagatcctctgagaactatcactagaacagcatgggggaaccgcccccatgagctaatcacgttccaggaggtccctccccaatatattgggattataattcagattacaagtcaagatgagattttggttggggacacagccaaaccatatcagagttcatattaatagatttgacagtacttaactgggacacacctttggtcagataaacattcagttaagttttctactttcctagttactgggtcatttatctcacaacccacccatcacccacaccttaccaagtacatgtatttagaatcagtacacttaaaagtatactatctacacatagggaaaatcgacaagttggctgtagtcatagacatgtcaactttactatttatcacaacagtacaactttaattttgggaaacattccaaagtatatctctagcttagcttttactttcttaaactatccttagtaacacttttaataaaccttgttttatttaataagaaaaattagttttataatctagtcaaaatgatcactgaacatcagatttttcttttttaataatttctataatctataaataaaaatgtatacaatataaaatatttaaataaaatattctcttatttacaaataaacataaaacagcaatgattattgaagtgcatttaatattgtgagaggtctttgaaaaccccatcttgagcagcttgattatatatcagatttcagtctatcttggttaagatcatttggtaacatttgtatgtcaaatacatagtgaatatatctatagatctcctcagccttctgatgag

SEQ ID NO: 341667 - DNA, 1000 bp, Homo Sapiens
ttttttttttttttttaccaaatatcctgtttaatgtaaacaaggcaggaggcaaaacagagtattacagtaacactattttacagggcccagaaaatgtgattatctaccatgttttaacacataaagtgtcacaatgacatgcatatttgatttactacataacccaaaatataattaccatatagtgtggttttagcacttcactgtaacgtcttctgtcaatactgatggacttcataattaaatggcaattgtatgttaatgcaataatttatgaaaacattaccatgaatttatgaagtaattccataatttgtgccctgtaaaattaagtgtaacaatgtttacactagcaacagtgtaagcgagctaagaattttggtccttatatatatacatatatacatatatacacacacaataatgtacaattaaaccaaaaagctatgaatccactcacagcttccatattgcacaaacagatacattacgagaaagttacatagttataaggtgagtactatatggcaataggctaagacaaatctgagttctatcaagtaaagaatgcggctcataactaaaaacaaatccaaagactatattgttagaaagttttaaaaaatgtgcatatttattgatacaaatgtgaagcaaggctgaaattcactttggaacttgctatggcaatcaattgttatgacggtgctttccactcagcatagtgcattttagttactgtttttgcaagtactgagtaacagaaatattcagctgtcaacagaaggtaagaaaaactggtgatgcagtacaatgtttcactaacaaattgaactcactgtgagagcttctactggctctaggtctgaactaaatataaaagaaaaaagaagggatgaaaaacagaaacttagaaacaaatgaaatcttaagccttagctgattacaaattaaagtcattacaacaacttagaaaaattatattttcagaagcagc

SEQ ID NO: 341668 - DNA, 1000 bp, Homo Sapiens
ttttttttttttttttttgagcttttgatcattttattcacaaaatataagcgagacttacatccctttctggtgaaagttttcaaataattttatgggtagggccttgagatgtatcaattataaaacatgttaaaatgaaaacattttttaaatttacaaatacaaaccaatactttatacaagaattctctataaagttcgtcaaagtaaaaaataatttgtttcaactgaatataaggcatgtccagtttatgtcattttgtagaattatttttgttttgctggagacttttctcttcgccggtcctgatttttctttgattctctggattgttcagagtatctgctagatttttcccatcgtctctcggcaccattttgatatctatcttcatcacttcttgagcctgagtgctttctattcatttcctttgactttgatctatcttttcttctgaaattttcactgtctttaattcggtgtgtatgcttctcattttcagaaaaagaatttcttctctctcctctcttctttttgggatcaccatgcttattttccaaatctatatgcatttcttggtctctgtcattcgcaactctactgtagttatttcgttcagaaggaacatctttgtctgatgtgtactttgttataggatctctccaatttgaaccacttgaattttgatctctgtgtttttctgaccttctttctctctcagtccttgtttcctggtgcccgtgttcttgtcttctttctttttgtttcctatcatttgtttgctggtttctgatcaatttatctacctctttacttctggtcttcccatgtcccttctttcttacatcattagctgaggcagagctatgactactgatggatgaagagtcgctctcttcactggaagactctgaactgctatcactgctgtcagaatcagagtcggatgagtcagactctgaagaggaggacgctgaagaggaagaggatggggag

SEQ ID NO: 341669 - DNA, 1000 bp, Homo Sapiens; identical to SEQ ID NO: 159976

SEQ ID NO: 341670 - DNA, 1000 bp, Homo Sapiens
attgtgacaaaacaagttttattttgcaaaacataatgtgatatgaactccactacaaaatacgggaacacattatttttaaattatataatccagcagaagagaaacagagtgaatggaggtctagggactgaaaggatctcttgtggcaaaggggaagaagacaaaaatacatcacccaagatgtggtaaaggggaccaagaaccactgaaaaagtagtgcaatatgtctaggaatagaagaaacagactgtgtatatatatatatttgccttgtcaataacatgcatcattcaaacaatctctaataaaatcttagtgaattaatctaatgaaaatattcacacagtattatgtaggcaaatatgtttaaaaaaatattttaataagcatattcagaatggcagacaaggaatgggagaagggaattattttacagtgcaaaattactatgcataaatttaacatctaatttgaaattttaaatgcctatttaaatattacttcaaatacattttaaagctcaacaaacttgtgttgaactgaattgcagatcctgaactctatttgaaaatacatcatgaaacagaaaaatacccattccaaatgaaaatgatagtgctttgttgggggtgggaatgaggcggggagactaaatcactattaacagacttcttttcccaatgcaatttgtcaaaagttcaaaagttctgaaatgtactaaatcttaagcaaattaaattcatgatattactaaaactttttaaatagtgcaatgacttatcaagttatagtggctgcattaagaacaaattattgtgtgaaatacctgtataaacacaaaatacaattaaatatttctttacaaaaagctgagcattacgcataatagtggaatgtctttcattaggtgtattttttaaagattaacaaaagtaacatttcctaaaatgtatacatgtgccatatttttgcaaacatgcctgagaatgtatttaaa

SEQ ID NO: 341671 - DNA, 1000 bp, Homo Sapiens; identical to SEQ ID NO: 159977

SEQ ID NO: 341672 - DNA, 1000 bp, Homo Sapiens; identical to SEQ ID NO: 159978

SEQ ID NO: 341673 - DNA, 1000 bp, Homo Sapiens
tttttttttttctgactcacatagaattttattcaaaggcctaatatctagaaagaagctcaactttacatataataagcaagaaatacagattaaacatagggatattttacagagaaagggctagataccgccaatgtatactatgatgaatataaaagccaaaccatgtaaatgtctctttgataagttttttttccaacttaatgagattgagttgttagccattaaaaatataacagggacctctgattttttaattcagtaatagaaagaataaattattaaatatttttacataatacctttgccttttgtctacaaacacaaacacatttacacatactgaatgtcttacaatggcttctctttttatttttagataaggctggttaaagatttctcatatcacttacaataggaatattttattttatttaaggagataccaatacagggaaaatagaactttttttttaaaggtaactttacgagactccatctcaaaaaaataaataaataaaactttggatgggcacattggcttatgcctgtaatcccagaattttgggaggctgaggagggaggatggcttgagcccaggagttcaagatcagcctgggcaacttggcaaaatctcatcgctgcaaaagattagccaggcatggtggcatgcacctatagtccaagctacttgggaggctgaggtggaaggatccgttgagcccaggaggcagaggttgcagtgagccaagattgtgccactgcactccagcctgggtgacaagagtaagaccctgtctcaaaaaggaaaaaaaaaaaaagaaagaaaagaaaagaaagaaagaaactttaagaaaagtattataatgaaaattgagcccaacaaaaataccaattttgaaaggaaaatagacaaaagaaatgtaacataggaaatatgcctaatacatgcaacaggttattttaatacttgaagttctaggaaactgagaagtaa

SEQ ID NO: 341674 - DNA, 1000 bp, Homo Sapiens
tttttttttttttttttcctactagcctacaggaaaagctttttaatggggatgatttgcttggacttaagtatttgcttaaatactacctattctgcccccagctgctccttgaggaaaactttccatttcccccaaaattctgatcaaacacaacaaagccacaagcatgaagggaagccagacagtgctgctctgggctgtcagggagtggatgtccaggcaacgccacaggataatgctttttgaacttaaaaatacatttctttccatccatcaggcaacatctcagtcagaaaaccacctcccaccacctgtgctgtgccacagggcatgatcctgacagcgacatcacagccttcttttcctgttggaaagaagaccactgggcctcaggagctgctgtcctggtcactctcagcatctggaataagggtctggggcaaagccgagggcaggaatcctggggcaggtgctacatcctaaactgggttttgactttgctttccaaagtcacctgttttcgttcatttttgtctcccaaacaggcaatggcactctccccgcccttcttcttaagtcccagggtcctcagtagacatttcctaaagcatcagacagacacctcgcaccctccttccccctccaccagccgtccttgctacacttccccacacatggggtcacaactgcatacaccttagagctccgaaatgaagaagaaaaaaagaaacctaaattaaaaatgaattcttccttttctcttcctctcctcctccctgtgcccgccctcccattcccgcctgaaagaggatccagctgcctctaaacagccacagatcgtttccataaaagagagtacaaaatcaggtttccgcggcactgtgctccagccatgtgccctggtgtcactgtcggtggtgccaatagttcactgtaggagctgctcctgctgtccaataggactatgaataagttaacagtttccttggacagtgcc

SEQ ID NO: 341675 - DNA, 1000 bp, Homo Sapiens
tttttttttttttttttttttttttttttttttaagtctgcctgctaagttctatctcttctttcacccacccctggaatctccacctcccctatcaaatttagatttgggaagagattttgttcaaagtctcttaatttcttcagtattcaaattatatctgagtttatttaaaacttaaaaaaaaagaagaaaaaagcttacctctttttattgtttcatcaagaaaatgttaaaaccctgacaaaagcttaccatcttttccaactctattctatcaaggccctgtcagcactagcatgataccacagactggatctttttccattatttattcccaaaaattagcaaaatcctttgtaattagctgaagtctatcagaataaattcagtctctgaagatgaagctacttgagttgttccattctgttcacgcacataacaaaaggcagaatcattcatttatcctgaaaaaaaccggacagtgtgtgtgacaactgcaagcaaggctcgctaagacattcttgcagctcagagaaattaaagcaaagtgcaagctggaagtgagttctaaagttaagtctcccacttgaaatttaattacaataaagaaggttagaggaggatgaataggttcaatgtcttcaacaattatcgaggtggaaagccacctctgtgtgctcctccacggccccctctaaagccacctctttctcctcggaagttagatctatttctttctcgtccacggccagcagaagttccacctcttcctccacctctgggagctccacctcctcggtcagatttagatttgggaggaggcgattttggtcgaagtctctcaatttcttctgtacaaccagtcaagtaggaattaggagcactgaaataggatgcatatgtttctgcattgtagttgctatttgtaagcgttggtccaactgtgagccagcctggtcgaattgtactatctcttccaaatagatgaaggcgtctt

SEQ ID NO: 341676 - DNA, 1000 bp, Homo Sapiens
ccattaatctttctggagaacctagatcctaagtcgaaaaacctactgaagtatatcacaacctgtaagtaggtacagatgtctgaggcctatttagaacaacagtgttagaaaggcgcttccttacctgttagacaaaggcgacttccggccaaacccaattgcccccaggatcccagagctgagtctctcctcagccacgaggttctgcctgctctgaaccaagagcagaattcgaatgacagattctgtcaggacggagtcattctgctctgtctgaatgagggagagctgaaggacttggtgccaccacaaaaacagctttgcctcttcctccacggagcttgggtacacctgttccagccacttgcttaagatgagcagcactttcatttcattccttaaagtctgttcgctgtttaaacactgaagcaagtagacgtaaagagtcaagtaactgcccaaggtgaggcactcctgcaggaactcttccatggtgagctcgggaacctgaagggataccagaatgggtccccatcctgaattctgattgagagggctttctttgaagtaggcagtgatgcaggcttctgtagtctcagccatgtggcggacggacgccaggctctggcaggctgctgttaaaaggggcagcaccaccagcccatgcattttttggccaatcgaggtccggatactgccccgaaggaactctgctgttggaatagtcgcgttgttcatcatcatcaggacttccataaagaggctgctgagggccatgtggcgggtctggctgtccatgtcgggcgggttaaagacaatgatatcgtctaagagcttagacatctcctgttctaggactgctaaggtgatttttccattttgttccagggtgctgaggaattgaaccatctgatgagtaaaagcttggcattttggaactgcatcaagatgcttctggctgtcagtaggaatagaaaggcccgcagacacttttagg

SEQ ID NO: 341677 - DNA, 1000 bp, Homo Sapiens
aaaacaaaagaagaaagtgatttacaagacatgcaaatttaccaagtctttttaaggaaagaccaagaaaagccctgaaagccttaatgttgctcgggtttcacgtaggagcacagaccggaaggagccaaaccatggtcaggtatcaagccagttcctggcctcaaaagaagaagaactttatttccaccagcctgaatgagctcaattgctcgagtatgtgtgattccttgtgtaggttccccattgatttcaacaatttggtcaccaacatgaattctgccatctttgatggcaggaccatcttcagcaagacgaaggatgaacagccccatgttgtactccttcccccctcggaggctgaatccaaagccccgggggcctctctccagctctactggataacaaccaaggttctgattgtgccgactgcctacaactgaaattactgcggtgtcaggctgtgcaaggtgcttgtggtctgaccaagaatgtctgtaagaagtggagacatcttttccaatttcaccttctagggcacttctgtccccaggtatgtggttggcctgtgactgtcccatgggcctgtgctgcagggctgggctttgcctggctgagtttgttcctgatggtggaccatgatgctcttcttcagcaatgaccgttagtgtgacggtgacaccagcatctttgatcagctgaacaatgttagcatgagacagttcaacaatggactgcccattcactgcagagatatgatctccaactttcagttttccacagcggtcagccggacttccttctatgactcggccaattttatgaggaataactcctggaggtggtttgtttttggaggtgaggatgacaaagccaaatccttcattttcttttcgttgcaagacaacatcatagggctcctggggtgcaggcctggctgggacctctgcccggttcaggcggggagatccattctgtgttgaaatgaaggcctgagagc

SEQ ID NO: 341678 - DNA, 1000 bp, Homo Sapiens
ttttacttttttcattttaattaaaaagtaatcatttcattttattaacaacacaagagttccaaagaggaaaaaaaaaaccactatataacacaaacaggtcagaacataaaatgctgccatttggggaccttgaattttgaaaccattgtttgcttaaccactggcagggactcagctgaagtcgctgctctccctcacccctgctagaggacctcaagactgtgatccacagggctctactgagcacaaaccctggggagagggcagcttcctggggctccatttagaaccacagccagaaaccctccttctaacaatttcactctggtacaaaagtcgcgaacagccacccatctcgagaacatgtccagctaccagaagtctgacatcaaagtggtccctacctcctgctgctcaggaaacagaataagagtctagacaaaaacaagagcctggggttttgagccaaaagcccaaaacaaatcactgaagaaacgggtgttcacggccagagtctcagaaccaacttcatggaagtgctgctggagagggggatgctgacagaactggttaacagggaagagtggtggggcccagattcacagtttgtggtaactgctgctgactggagctgttcagtccattggagatcttccaatgaaatgaaaacaaaaaagaaaagagaaaaaaacaaaaaacaaccttggctcagagagaaaaattcttttttctgtggctgccatggccattcctcaacaatccagagtggctgatttatgaatcctcaagcagaccccaaacatatggggtgagggtatgatgacactgtgcctgccaaggccagtttgcttttcttcaactctaggcaggagttgcaggcaggagcttgagctctggtcaatgtgtatgaagctggaaagccttggtaggttcacaatgaacaaaggtggtggctactgacatgacaaatgccattccaaacttggctagctgggcc

SEQ ID NO: 341679 - DNA, 1000 bp, Homo Sapiens
ttttttttttttttttttgtccatcttattttagagaaccaatcttcaagttctgagattcgttcctcaggtttttttttctgctgttaatacttgtgattgcattgtggaattcttgtattgtgttcttcggcgctttcagatcggttaggttcttttttattataccagctactttatccttcagctcctgtaacactttactgttattcttattttccttggattgggttttgccattctcctgagtcttgatgattttttttcctatccatattctgaattatatttatgtaattccagacagttcatccaggttaagaactcttgttggagaactggtgtggttgttagaaggacatatgacacagaggccatttgagttactggagttcttgcattggtttcttctcatttccacctatgggttttcctttaattgcagtgtagattgagtacagtccgtagacttattttcggatgttttcaccaggctgaggctttgtgcagggtctttatttgaagctgacttctcatttctggtttcagaggggagtatattagtagggtatttttgatgctgaagctttgggatgtgatccagtaggtggcacttgggcttactggtcagttggtagactcttgcttggtcatgtggctcccctatgtttccttacagttgcagccatgttccctctcaatgatctgaaaatgtgcttctctcccccttgagtgctggctgtaggtcatggcttggcactcctaggctgcccactgcagctctggggcaatctcagtgtttatatttctttcctaactttgaggcagaagaggaagggacattagtagtggttgtagccaagggtcttttgtttgtctcctcagagttccaccacccctggagaatacagcaactgtttactgcaatcagcaatcaggatggagaattcgtgctgtgggggccaatccaggggttccctgtcatgagcagtggggagtg

SEQ ID NO: 341680 - DNA, 1000 bp, Homo Sapiens
gcaatccttaaatagatttatggaaatggcttcaaattacagcatttagaaaataaatataatctcaatacataatatttcctccattatatactctccccccgacagaagccgtttctatgcatatgtactccaccagtaaacagtaattagatttatcctagaaaagaagcagtaggtgtgtcatctccaaaaataaaactgcaatcgtcattgcaatgtgaagcctgagatttaagcctgaggaggtgtccgctggggccactcagctgcggcagcttgggtcccaggccactctggggtctgaggaattgggccagggttccagagggtgcagagggaaggggaagtggtagctgagctggtggccccgggcgtcctggctgattggtaaacccgacccaaggccccgagcaacctctgcctgcggtgtcagtgcctggtcggacccccatgccatcagcaaggggacagtggtgggcagacaccaggagcaccctgcctgcctagaggaccactgggtcagcttcccgcatctccccactccaagaagaaatgagatgcatgttgtttagccaagtcctgaggaaggatggtgaggggtgaggggtgagggctggggaacgaggtgggcagctgatggggagaatgggtagcctgcatttgacgtttgggaggcacatagggagccctgctgtgccaaagagcctgtggagtggcccttgctccggcttccagattcaccgcaacagcagaggcgcagagtggccccactcttgtccacctccatcacccgccccgattcccatagccccagcagatctccgagggaccagtgggagggcccaggccttctccgccaggcaccctgccctgaggcagccaccaggctcctccgggtcccctgctgggcaaagctgacctcttgttggcccctgcagccggcccggggtccctgcagggaggctagcgtgggcaggacagaggctctggatgctct

SEQ ID NO: 341681 - DNA, 1000 bp, Homo Sapiens
atgtctccagaagtgcttagtttttatttatttctaattctttctgcttttttttttcacgagcactgcttagaactcaagttcctgggatcaaacttgtatcacacaggctggagaaggctgtggagaaactgagtcctcccaggtctcaaggtgggtggagggagcctgcaggggtctccttccctcccctcttgcctgttctgcctggtcagagcctgcacacgagtgcagagggctcccttagagagggccgggctagaggaagctgaagtttcagaataagcagcttattctgtggcctcctttccactacagactccttgaggaggagtaagaccccagaaggacaggtgagtctcacctaggctgaccaaagtccagctcagccagcccgtgatctatccaagacatccgcccacagcagtgagaagctgatgccactcaaagccattctcagtctacatccacgatgctgggaaagaaaaaccaagttcaatttaccaaaatatctgtattatctataaaaattgaactctaatgagtcactgatacgggaggcagcaatacccgactgtgctgacatgcagaaggaagacagctctgtcccaccaaccctatagcagaacatttgtattgagtggcacgtgggctgagtcatttgtaaggtctcaaaaacctggacactttggaacgtagcaatcggatgaacgatcttggaaacatctctcgggactcctgggctgtgtacttgaaatagttctggggatgggccaggacatcaaacagagccttgataagtttcttatccttaagtatttcctgatggttctcagatgcatagagcctgccatctcgaactatgtcttcaatgagttcctggtagtcctcatcatatgtcacgtatgggacctggaaccctctagcgctgttcccttcattggacttgaactgaatccacagcttctttgacctggaggtgaaggcgatggggcgttcg

SEQ ID NO: 341682 - DNA, 1000 bp, Homo Sapiens
gcaatgaagaatgacaagaagcttatgagtcatggtcagaatctaagaaacagaaacaccttgtagcagcattaaattacaaacacaggaagagctgatccatgggcctttcacacaggctctataagagccaaacaccatctttttcacatcagaattgtaatcagaggtgtagcagtccttggtcattgtcattgctacttctaacacagctagctagcctgtccctttatgagtaagttgataagattcaaattaaagtgagtacaagccctacctgctcctaacaggtaggatgagccactgctttcgcctctacttggctgtggggtgtgctgcaggctggtggcaggtgggattcacagcagcaaagcctctgctgtcagcaattctgggactccaacagccccctttcttcatactgttctcatcaggggtagtggctgctcagtaccgaacacgtgaggatgatgtggtgggcccgggggacaaatgtgtcttgtgagccctcttccctgataccaccatccacatagtaaagatggcatggaatctctccattgtgctaaatctaggaatcatcttaatcatgatgaaaaccaaatgtcttcctaaggaaaggttgcatgattaaaaaaaaatcattctcaagatctcgaatgctgagcccaggcccatcctcggggcccctcttcccctccagccctggaggggcattgacactacccccaggccccccccgcagtctctcattctgaataaggacaggtcatcagggccagcatttttcctactgccttttttgtgtgtgtgcttcatgtttaaatttttttgccttgtttggcggcaactagaaaaatccaacagttcaggtccaatttcatacaccaggtagtaagtgttggacccacacatgtgaacacagaatgttggtggtcactgatggacacagaccaacactgggtgctgctgggcactgaagagaaaggaatgcttaacc

SEQ ID NO: 341683 - DNA, 1000 bp, Homo Sapiens; identical to SEQ ID NO: 159979

SEQ ID NO: 341684 - DNA, 1000 bp, Homo Sapiens; identical to SEQ ID NO: 159980

SEQ ID NO: 341685 - DNA, 1000 bp, Homo Sapiens
aacaatgaccgaacaattttatttcaaataggaaatatccaggtagcttcaaagcaagaaaaaaaaatcccgtatgtccatagattgtagaacataagtcatcagaaacatttcacatttaatttctgctgttctgatatcagcacaaagcagttgggaaacctaatgcctttgggaattctgggctttttgacagtttgactgaaggtgcatcccttgatgtagagcatcccctggtgcttgtaactcataggcgatcttttgtcaaaagtaacatctattagagaacttcaaggggaaaagactgagccagaggaaatcccctgaatgtaatgtttggtgctggcaggaagcaagatcaagacttagcaagaccagaggtggcttaggaagggaggccttctcataatgtttttcagcaaatgaaagttatgattaaattgctaccactttccttcatctgtactcagtaagtgtgggaatagacccagacaatgagggtctttgtatcttaagattgaggaacattttgtccagaggtgtacatattctagaagctgccaattccacttctggctagcaaggaagatttggcaaagattctcagccagctactgatcttctgaaaggtagaggaatgcattagataacattcaactttcagtgtgctcttggacaactcaacttatcttccctaagattttgtttctttatctgaaaaatgggcaatgtggcatttgcctcacatagtcattatgaggattaaattagataatgggtgtgaaagtgccttgtgaattgttaagcccaataaggtaatatctttttggagacctcccactctgaagattcagctagaccaggatccagtggctttcagttttggcttctagggcatgtgtaaaataatggacaagcacagtcgttgatataacttgtcaaatgtctgttctcaagtgggcaattaggaaaatacatttgagctaaaaagacagagtga

SEQ ID NO: 341686 - DNA, 1000 bp, Homo Sapiens; identical to SEQ ID NO: 157697

SEQ ID NO: 341687 - DNA, 1000 bp, Homo Sapiens
tttttttttttttttttttttttttttttttttttttttcttgtttgttaaatcaagctttattgataaaatggaattcagaatatcttactaggaacagcagcaggcccagccaatcatgatagcaaaaatgtggcagtttcctactatatgtaggaagctgctgcttatcaattagtaattaaatgtaaggacttgaaaagaggtgcaaagaaacaaggcatttagccccaagattgagattcttatgaatacactgtattattacctgcaatactcatggaaacaacgaaggaacatcctgaaagacagttaaatgaagggactggctttatcaacaatgccaactcccctaccaagaacatttaagatagttttcaataactccttggatgttcagctttgtaagattttgaggttattttccataatcatctgcacatttgagcgtgtagctgacatggctgctgctctccctgttccaaccccaagtccaaacacaacatgacttgaaagggctatatatctgttgcatcacacaataagccaaacatttcttgtaactttgatagtgatttaaagcagttcataattaaatatgagcattttgtacaaggacaattacactttacaaaaaaacaaaatcatacaacaaaaattgctggagtctgatttacaacacgaattatggtttgaaatcacgcttacataagtctcaaatttacaaaaaaaaaaaaaaaaatcagttctgggctagctgttgtactgctgaagttctctgatgtaatcattctcacccatgtcatatccccttccttaaagttgaggatggatgttaaaagtttcaacaaagttgagctgtactctcctttggaggtgaaggtaaactccatggctagatgagcagttttaccacatatcatctgttgatgtagagtcagtgtcgtcatttttgtaaggattcagtctattgtaaacggcttcaataacattcctcttg

SEQ ID NO: 341688 - DNA, 1000 bp, Homo Sapiens; identical to SEQ ID NO: 159983

SEQ ID NO: 341689 - DNA, 804 bp, Homo Sapiens
ttttttttttttttttttttttttaccgtttaaaagaacatctttattatttccccaggccgatcacagccctgaacaaaagcatctgatacacatttgtcagtctggtggctttggtgccatgactgcctacacaggccgatgacagccactcggttgtcaccagacacactgtgagggaaggtggaggggacagggggaactctcagagcaaacaatcacaaacacactgtgaaatcaaaaataaattataaaaactaaatagtataaataaattaaaatttaagttaagaagagtcccacagtgtggctgtttggcaataaccagtccatagaagaggtagctgtagaggtcacacgcatgttcccaaggctcaggctcctgctcctccccactgggcccactgaggtcgctgggcctcgaagcttctggacccctcaggcactcagctccaggtcactgacgtatttctggacccactcctcactggggtcagcacagacctgccggcctctcttggttaggaagatgacactgggcttggagcactggctgctcgtctcaaagtagtcagctatgaaattctgtggaatctgtcgggaggtgtagctgaagcagcaggcggtcggcgtgtcagcagcaagtggtgcagagaggacctggttgcagagagccatggtgcagaggaggacggcaagggcagcagtggagacctgcatgattgggagcaggtgatggaatgtgggctcgagtgtcagcagagccaagaagggactgactactctttgctgcctgcgtccttc

SEQ ID NO: 341690 - DNA, 1000 bp, Homo Sapiens
ttatgccagagaaatgaagtttattgggaagtaaatgaagtctcctccttgcattccagagaatgccaaagaaaaaaggaaaacaggaaatgcagtagtacgttcaggaaacaccttaagtagtaactggagctcagattacagggagctgaacatctttagaaacaaacaggctcgaccctcaacaggaaggagttgtccagacattggaagttgatgatgtgtgtctttgcttgggtcaggaaagcttttcagcattctagaaataacatagaggcaagatgaggtttcttgatgtcagctgagctccagaaaagtcaggacttgaggatccttcctgtggttgatctaaatggctttgtagatgtcttcaaagaggatacaagcttttcaattacagcaacccttttgagaggtgccacagggtccacaggagttgccactagcattggtggtggcgcatgggttgcaggggagcttgcagtcctcactctccaggaggctccggtacgtgttgatctcacactccagccgggcacgcacgtccagcagcacctggtactcctggttctgccgctccaggtcacagcggatctctgccagctgagactccacgttggtgatcaggctctgcacctgggacagctgggagctgtagtgggcctcgctctccgtcagcgtgttttccagagagtctcgcaggttgtgctgggcctgcagctcgatctccagggcgttgactgtgcgtctcagctcgatgatctccgcctggcaggactgcagctgctctgagctggataccacctgcttgttcagctcctcggtctgcgtggcgaaccattgctccacttccctgcggttaatttccaccagagcctcatactgactcctggtctcgttcaggacctggttcaggtccacagtgggggcagtgtccacctccacgttgaggcggtctccaagctgggagcgcagggtgttaacctcctcctcatggttc

SEQ ID NO: 341691 - DNA, 1000 bp, Homo Sapiens
tttttttttttttttttttttttttttttttttttagagggcgtgagaaatggcattctttattcataaataaaaacataaaattgccacaaatagtttacatggccaaaaagtgacgtcaaaaataaaatgaagctgtcaaaagcaaaccaaaccaaacaagaaaccacaaagagaaaaataactatgtacatcttccagatgctggtccgtcccagcctgcctctgctgggggctccagctctgcctgcaggcgcagcacaaaggccaccttgcacaagaggtgggtgagcagccccgctggcccaggggtgcagcctctgtcatggcagcacccaccgcatgatggcttgaggtctgcagggaaatccctctccccaagctgctgctcctccagccaggcctggcttagtttcgggcaactgtctcacctaagagatggcccagactggggccaggcacaggaggctcactgagtgcctctctggggaagagatgcccccatatcccagtcccatgtgagctcagtgctataggggctgtgtgtgcctggcaggagttcactgggagagctaggagggaaccccgtgacagtccagtcgttcccaggtccaggggcagagtccgatccttggtgaggtgatgcggagtgctgctctctcctgcaggcgtcctttggggacagagcaggttggtccatccgagtgggtcagtgggtcggccagcaggcgtgcccagagggaagggcaggaagcccaccctgtctggggcctggggccaggctctgtgcttggaggcttctgctgtccagagcctctttccagagaggcagaatctggcatggtccaagaatagtgagggcgcttttggacagggcaggaaagaacacccacaggaaggtgaggttgcaaggtcgcaggatacttgcattctagtgccacggtgggccactctggggcgggggctggtggcagcccagggaagacatctgccaccttgg

SEQ ID NO: 341692 - DNA, 1000 bp, Homo Sapiens
tgaaagaactgcagatactgtcaatagatttgattatagcattcagtctatatgtaaaacccagcattatccagaattaaatgaggctgctttattacttgcttgaaaatgcatgcatacaagcacaggcaaaaacaagggtcagtaagttgccactgaaaaccatgaaatggggataattagttaactccaacaatgtgagttgttttatgtgtatatcagatgacaatattttctgaaaaaatacccataattcactctctataaataaagctgtaattcttggctataagacagcagaccttggtgtgagtatagtcccagaattaatcatcctttgtgcatacaactctttagcaaagcttatcaatttaagcagtctactttggctcagattctaccagcttacagctcagatcagtatctgatgctttatttaattcctgctcagtatatgctaatggagacactttggaatcattctacaccattgaaagataattcattttttaaaaagtaacagctgcttcatacttaaataaaaggtgggtttctatttgaaatatttttcttttcctacaagggaaagtcaactcagcaagaattaggaaataaatcacaataagaaaagggatcactgttactggggatagggggctaggaggagtaggtaaaaatgtccatttctcaactattcggcccttgcgtacctggtgaacaagttgcctaggaactgggatgattaagatctgcacatgctgttctaatggtcatgtccttggttgtcattatttcaaagctatgctgtgtatttcccgtcacctcacctctttaaccttgtactgttctagaaagttttactctgatatttctcatggtactttcgcagggtatcccttgtagttgctgaaactgacagaggagtctgggacagttacatacgactcttgagagctaaagctgactgtagcacgctacatctggtgcgctgctcactaca

SEQ ID NO: 341693 - DNA, 1000 bp, Homo Sapiens
tttttaagattgtaaaattttattactgggctgtttacatgatactttctttcttattaaatataacctgacaatctttattaaatgaaaatatttttgtatcatcaacaacaacaaaagaactaggatgaagaatttcccacattcttaatatttatagggtttctctccagtatacattctcatgtgtgctcaaaaggctgtgtgaaggctttcccaaatgtcttacatttatagactttcaccccactctgactcctttcatatattcacactctagaggacagttggaagattttcccacttttattttttcttgagacagtgtctcattctgtcgcacaggctggaatgcagtggcgtgatctcagctcactgcaacctctgtctccaggttcaagtgattctcctgccttagcctcctgagtagctgggattagaggcatgcactaccatgcctggttcattttttggtaatttttagtagagatggggttacaccatgttgaccacgctggtctcgaatttctgacctcaaatgatctgcctgccttgcaccttggcctcccaaagtgctgggactataggcatgagccaacaagcttggccttttttaaaaaaacaaaaaacaaaaaacaaaacagatttcactgcagcacgagtcctgtctttgaaatgaattaggtcaactgaaggcttaatcacaatgtttacattcatactgtttctcaccagtgggaattctttcgtgctcaaaagaaactggaacaattaagggctttagaacaatgtttgtattcacacagcttctgtccagtatgaactcttttgtgtattcagaaggagctggaacaaccgaaggcttcagaatgttgcttatattcttagactttctctcccatatgagtcctttcatgcagtcgaaagtgactggaagaaatgaaggcttttccacattgtttgcattcataaggtttctctccagtgtgagacctttcat

SEQ ID NO: 341694 - DNA, 1000 bp, Homo Sapiens; identical to SEQ ID NO: 337697

SEQ ID NO: 341695 - DNA, 1000 bp, Homo Sapiens
ttttttttttttttttcttcattaaataaatttatttgttaaaataatttaactccaaatacaactgttgaatttgcattgagttataactacaattcatgttttaattgaaatgtcaaggtttaacaactgacattgttacaaaacaataaacttgttcaattttaaatggtcagttgtattagagcgcaacaattaactgtgaactatatctctgggaaacctcaaatcaataatgataagtctgtttccaaaacccactgcagtcattcttgaaaccctgatcaagatttaatagatgaacaatgacatgttaaataaaaaaaaaaagacctccatagtccttaatgtttgattggctaagggacaattaaagcttacccagtgctaacacaagactgctgataagaacaaaaaaattaaaaacacacacataaacaaaaaacagcaacaaacaaaacaaagcactttcatattcatacatacactgacaacattaacattcatactggaaaacccttgaaaagaaataccagacagccttaggcaacatttctttatatagaaaagcaaatatcagtagtattaccacagaaaggtgatggcaactgtagcaatttgagtcaaaagttcagtcctaattctacaaaccaaaggagaaaatcatcaaagcacctttcaatagtttaagaaaatattttatgtaatacttttgatcagatgctggcttgttttgtgtaagttgaacaaaatgaaaggcatcagttaccatcactatcacagtttaaaagaacccaaaagttgcaacatcaaaagaaaaaaaaattcaaagatgctgcctttgtataaaagtaaaaaaaacaaaatcttatcacaagagctaaagaaaaagtgggtctttggatcaaaccataatatttttaaggcatgttagaaaaactttcacttatctaagttgctagtctgatcagggcataaaataaatagtgacacaaggtca

SEQ ID NO: 341696 - DNA, 1000 bp, Homo Sapiens
ttttctcaatcattgtttttaattggctttataagctaaagtgcatagtaaagacaaaaaaaggaaatgcatacataggaaagggacacttagaaaggacctgagatacctaaatgtctgttctaaggaacactggaaggagggaatgcagatgcaggcagcaggcctgggtctggcttctggcctgggtttggagcctgcagaagctgctggcatgctagctctacccagggaacagctccaagagggagtgttgggatgaaggatcacacttgggataggtgctgctggtaccaaatgtgattttagctccattcagggcccaggggtaaccagcagtgccaccaaacctgtcagcaggtaaagaaacttctaccatcccaaagtgcaggttacaggaaaggggtcactccttaatgacgacctgggcctgctgcataaggcccatcttatgcagcatgtgggctgtcccatcttccccactctcagtgactatgtaactgtgtcagggtgagttggtgcagtcttttgtcttatcacgtgcctccatctcctggaggcagggtgcccaaggagggcagggaggggttcttgtgctcctttaagggataagcagttcataaacaactatgggcctctgtttattatgagagttagtctgcaaattagggcctggcaattagaatcggtctgcatcaatgagctcatactctgttcctggggaacaatgtagaataaacatctgaccaagtaaagacccagagataccactaggtggccctaggtggaagccccaaacatgttccagggagtctgtccactaatttgcaggagagaaggggtgagatttgttaactttgctctcagttctggagataaagtgcttactctagcgcaggggtaaatctagaaacaaatgtgggtgagccctaaaagtggatccttaagtaggtgctaagactaaaaagaatgatttttttttttttgagacagagtcttg

SEQ ID NO: 341697 - DNA, 1000 bp, Homo Sapiens
ttttttttttttttttttttttagtagagacggagtctggctctgtcacccaggctggagtgcagtggcatgatctcggtcaccgcagactctgcctcccaggttcaagcaattcttcctgcctcagcatcccaagtagctgggactacaggcatgcaccactatgcctggctaatttttgtatctttaatagagatggagttttgccacgttggccaggctagtttcaaactcttgacctcaagtgatccgcccgcctcagcctcccaaagtgctggtattacaggcgtgagccactgcggctggtccattttcatcttgaaatgagtttccctggaagtcttctggcctgctggattatgaacaacttgtcctataatcatcctgggatccagggatctttcttcacaggcatcctggagattatctcctctgttgtatctcctggatctaatgtcatcctcttcttggttcactcgctcattttgttggaacacttcatcggagttccctgggaaagactggtgaaaccctacaagcgtttccactccatacgcgctctgaataatgggattgtgatgtcttacaccaattcacaaactgggcggccagctgcagggcctgcagccgaatcaactccaggtgcccgtagttgcgataccaagagtagtagctgttcacacggatcacatccacatacagagcccccttgtctgctgcgtaggtggagttggtcccaaaggtcacaggctgggaggggtccaaggctttggtgtgagcaatcaccatcctcccacgagtacaggtaggcggggtgttcgtgcatcaggtacggccaccagaggttggcaccagcaccttcagctggccctgggtcccagcctggttgtccacgactttgttttctgcattcaaaagacatacttccaacttgaactggttactgcacttgacggagatctggtaattcaccagccctggtgaaaccctacaagcgttt

SEQ ID NO: 341698 - DNA, 1000 bp, Homo Sapiens; identical to SEQ ID NO: 159986

SEQ ID NO: 341699 - DNA, 1000 bp, Homo Sapiens
tttattcagatttaatttgtcttacattctcaaagaagccaaggaaatccaggtatgcacattttttaaaaaaaattttaccgagtagactgagtataaggcaagaattaaatatcttttaatttctttatgtcatcagttttactgctcattcacatttctaaatgaatacttattccactgctgtaactatgtcccaattcacaaaatggaatggatttcccaatctgaataaaaaacaagactcttactcctaaactatataaacagcactatgtgtgactactgtcattcataaatttgaatgctgaagttcattcaaccacccattaaaaggaacatttgaacaattccaaaaggaaacaaagacaaatctcaaagtcatccaatagaacagaaacccactactaagaatgttgactgctctcttcaaagagagaagaatgggcctcatgtcacattaaggcaggggaaactagtggacggagccctggaaggtgcactggcccagcccccctcgcagtggccctggctgcagctcatgctcagactccctcttcctcctctctcaaagctgcttcatgcagggatgggtaggaaatgagaactcttgcattgaccctgaccacgtgctccagtactttcaagcagcgagtgcccttggaccccacagtaactcatagcatatgggatcactgctgggcacctgccggtactccaggtagttttcctgcaccaaatcttgggtgagcagcttcctgggctccccacagacactgtgctccctcccaacatacaccttcatcacactcagctcctcccagattttctcctcagggacgcatttgccctccattgcaatcatgcccaagacgattatcaggaggcccgtcttgggcatgatctgattattatcaaccaccaggccatcataggagtcccaggcaggtgacaagggtgtaggtgttgctggtggggtccgcttccttcacgtcaatgc

SEQ ID NO: 341700 - DNA, 1000 bp, Homo Sapiens
gcaatctgtgcctctatgtctgtgcactggggtcaggactttatttatttcactgacaggcaataccgtccaaggccagtgcaggagggagggccccggcctcacacaaactcggtgaagtcctccaccgaggagatgaggcgcttccgctggcccacctcatagccaggtgtgggctcggctggagtctgtgcaggggctttgctatgggacggagggtgcaccagaggtaggctggggttggagtaggcggcttcctcgcagatccgctggcggagccgcttgatgtggcggagccgggcaatccacttggaggggtagatatcggtggggttggagcggctatgatgcacctgtgaggccatatttgcgtgcagggccatctggcgggccacgaagggcaggttgcggtcagacacgatcttggccacgctggtgtccacaaggccctccatgtctttcctgcactgcagggacaccaggttgcactcgtagtccagcggggtgacgatcacgtggacaaagttgaactggcccttgatggtgccaagcttgaagtcctcaccggagtcattgtagacaatggacacaaagtcgttgcccaggtggcgcttcttgtcgcagcggtgcttgtccacgtccttggtgggcatcagggtggcgatgtggaagacggcttgcatgatgtcatcgtgccagcagtaggtgaactggccgtcctcaccacacacgtccaggcctcccaggtacaccttgtccggctggcagtccttcagctcgatgagccggcccaggcccgtcaggaactccgtgtacctgtaggagccatgctcattggacaggatggcgagctcgctgttgctctggccttctccaacatacaggacggcgatcttgtgggtgtcgtatgatgggatctggtcgaggagctgcaccgaccgctcaaaggactgtgactcattgggcagcaggattggcttgtttgactcgtcgccaaaga

SEQ ID NO: 341701 - DNA, 1000 bp, Homo Sapiens
tttttttttttttttttgttcttagaaaaagaactttatttggaatgtaagattttattgggataatggttcttatgccttaaattcccttagttcaaataaactaatgttaaagaattatggctgttttttaccaaaattctctacaattgtatgattactctccaacataacttcaagatgttgaggaaaataaaacaggtagtctctgaagtttttccacaggaacagcacgctaagtgcttctttctggagttattttgtgacactgaatcgccaaagaaaagcttcctatagagttaacagagacttctcttgggctgaaggctgcttgtggttccacatgcagtttctgtgagaatggattcttgtgtcagccatgggtcacaactttctgtgcactttctggtgctggattaggtggccatgctggttgaaggcacgcccacactccccgcactcatagggcttctcgcctgtgtggatccgctggtgctggatgagcactgagtactggctgaaggccttcccgcagctattgcactcatatggcttctcgcccgtgtgggtcctcaggtgcacaatcagagttgctttcaggctgaaggctttgccacattctgtgcactggaagggcttttcacctgtgtggattctctcatgctggatcagagaccggcgtgcactgaaggcgtgcccacattcaccacacacatagggcttctccccagtgtggactctctggtgctggatcaggtgtgagtgctgaacgaaggccttcccacattcgtagcatgcatagggcttttcctcggtgtggatccgctcgtgattcatcagtgtggagcggtggctgaaggtcttcccacactcactgcactcatagggcttctccccggtgtgcacgttgtggtgctgaatgaggactgagcggtcgctgaaggccttcccacactcgctgcacgtgtagggcttctccccggtgtggatcctctggtgc

SEQ ID NO: 341702 - DNA, 1000 bp, Homo Sapiens
tttttttttttttttttgaacttgaacatttcactttattatgaatttaggccacaaatctcagtacctgttactttgtaacccaaaagacattagatgtttcatttctcattacaattgctgagttatcgtgaaacatttttactcctctaattagtaacagcaattaggctcaccaaatcatgtaatgtgttaactatattaacaatataactatatagtctcatttatcactatgaagttttaaaaatactttgataactgtaatttaactttgtttggcattttatatacttaaaacatcattctgagattttccatgttaccagacagccaaaagtgtctacaatacacaagaaaaatgagttaacgtcttcttaagattacttcagagtgggccgggcgtggtggcttacgccggtaatcccagcactttgggaggccgaggccggtggatcacgaggtcaggacatcaagaccatcctggctaacacggtgaaaccccgtatctactaaaaatacaaaaaagtagctgggcatggtggcagacgcctgtagccccagctactcaggaggctgaggcaggagaatggcgtgaacccgggaggcggagcttgcagtgagccgagatagcgccactgcactccagcctgggcgacagagcgagactccgtctcaaaaaaaaaaaaaaaattacatcagagttcagtgaacagagggaggaggcacaattgtgcaatcttggcatgagtattccttatttagctacaacaccaaaagttatttgcactaccgtagtaaataaccctcctttacagaaaactgccagtcttgctaggaggcctcagtttgtgtcaggaacgcccaataccctgtacttttctaatagtcataaacatttctaatatttctaatgtacatttctaatactcatcaacatttgttgaaccatattataatcctctatatattttccctcctatctgtgaggcagacattt

SEQ ID NO: 341703 - DNA, 1000 bp, Homo Sapiens
tttttttttttttttttttttttttggcaagacagtgtctcactctatcacccaggctccatctcaaaacaaagaaacaaacgaaaaaacaaaacaaaacaaaaaaaaaaacgggtcatagaccaaagtataaagcttaaaattataacacttctagaagtaaaaaggaaaaaaaattgtgatcttgggatgggaaaagatttctcggatgcaacacccaaagcataaaagaacaaacgaataaactggatttcatcaaaatttaaaatgtcagctgtttaaaacataccattaaaagacaatcaactcttcatgtgacttttcagtcaatctgaatctcagggaaaactgtacaaagttccttctctagccccaatttcactgtccccttccaaagtggtgatactggtgatcaccccatagccacaagccacaccagccaccatggtggaaatgtgcaaaatccatgtgtgtccttccttcccaaatagccagatgataaattagtatgtcattaaacattatatatactgaaaatttctacagaccatcatcttcacttgcatgtgatttgaaaatgtgtatctcagaaattcagctctctagcttgtacaatacacatgaccagaaaacaagacacacaggatctaccttcttcctgtccagccaagtgactgcttatttaagagattcaaatgtaaccatgtttactttcatttaaaaaacacactgtaacaactgtaggaatgctgtgattacagatacagcttattagaaaaaggagtaggggccgggtgcagtggctcacgcctgtgatctcaacactttgagaagctaaggtgggaggactgcttgaggccaggagtttgagaccagcttgggcaacatagtgagacagtctctacaaaacaaaaccaaaaccaaaaaagagtaggaagaatagtgtacaacattaaaaaaagaaagtccttaatagttagcaaattatacttcttagcca

SEQ ID NO: 341704 - DNA, 1000 bp, Homo Sapiens; identical to SEQ ID NO: 337464

SEQ ID NO: 341705 - DNA, 1000 bp, Homo Sapiens
ttttttttttttttttttcgaaagccaagggtaaagaggcacgatctgatttatcagtttctaggaaacaccctctgggaggaaggcaggcagcgcccgccggagaccttacaaccgcccgctaaccggggaggggggccggtaggggcgcctcgggtctcaaggcgccgggagggtctgcgggccctgaaggtccctgggtccgagccacaagtcggggcagaagtgaggccgagctcgcggaaatccctcagtgatcaccgaggtctgggccgagggcggcgtcggcggcgtcagcggcggcgctggggaacgcaggccccgtgcgggcggctgcgcgcgaagccggctttgcagacgcagcggaaggagccgctggtgttcacgcagcgctcgctcttgcacagcagcccgcgctggttcagctctcggcactcgtcgatatccacgcagcgggcgcgggaggcgtcgagctggaagccgccgggacactcgcacacggcgccgcccggccgcggcacgcagcggccactcacgcagcgacactcgtctgaatcctcctctgaactgtcctcatctcttgggggcttccccaacagcagggggcttgtgtcccagaaggaattgctctcgctctgcgatgtcgggcaatgggaccccgcgccgcgcggcgggcacggtcggcattgggcgccccagccgcggccctggcggcagcagcagtcgtcgaaggtgagggcaggcccggccagggggccagcgcacatgccgtcctctccgcgctggctccagcacacgtcgcgccgctccggggcacgctccatctcttccgggctcaggcactggcgctgcgcgggactgtactcggcagggggcgtgcaggcacagcggtagccgccgcgcgtgttctcacacactccgttccggcagttggactcgtccaggcactcgtccacgtccacgcattccagcaggttcccgtcgtagtagaagccctgct

SEQ ID NO: 341706 - DNA, 1000 bp, Homo Sapiens
tttttttttttttttgccaataaaaaagattttatttaaatattttttttaaataaaaggagccacaagatttctttatactctgcttttggaaaagatgatgacactggtcaaaaaggagagagatgcaatagctataggatcagggatgcatttcttgctggaagcttttagcagctgacagttatatgtgctcaggttcccagttgacctcaactgcaaccagtctcctcttgggtggtagctcatatttataactttaaacagctcatagggagggatcaagacttccttcttgagggagaagtactgtacaggtgcacccaggcaggtgaatatggtaaatagtgtctggttcccaaactcctgtgcctcttctttcaggagggatgtggagaggaattggccaaatcgaatggtggcccctgtgtaggcattaaagtggacatccttcgtcctataatgcacctcatagcacagagtgccattctccatgatgctgtctttcctcagcagctggattgctgaggtgaggtagtagtgtaaatatttgaagtggaatgaacgttcatactgctgtggagtcctggcaacagaggccatggctctagtaaagtcagaatgaacattgctgttcaatgtataaaacaaaatagccacagcgtgtgtggtagtcatgttctggggtagaacttttccttggttaagccaggctaagtgggctttttgccacatcctaaaataattcttctgggcttctatgtcttttgtgaaataatccccttgagttagtttctccataacctgtttgctacagccttggtactgatcatcaaaagaacctggtgcgaagtcgaagtcgattttaattgcaacctcagaaccctctgtgggtctctgcaggccagagaggagcagcaggaatggcagcaggcctccaaggagccagattctcatcgttgcaggaggtacagtagttgggagaagaatcttcttgcat

SEQ ID NO: 341707 - DNA, 1000 bp, Homo Sapiens
tttttttttttttttttttttttttttttttttttttttaggaaattccccgtttgtctgaaagtatgctttttattgcagccataaaccttaatacagatctttttgttattatcaatattatttaatattagtggcagccacatgagcgtactaccatatttctatattttttcaaaatgacattggagctgtcatcaaagtacagaacagagatggcatttaatttggttggagcacaacaaggctttggtacgtggtcaggaaacatcagatgaaccagagtctgaactatagcgtggttggtggcattcatatgggcgttaagtggaaaagaacattctccatcacaataaaatgcagcgtatccttctggtgctataatccagtcctgccatcccagatcccggaagctcacatagagttcgtgcttcttacaggcttgtttttgctcacttgtgttataatctccaacactggacattctggaggagtcctgatgagagctggatttattgcggttttgattttttcgtttgttggctgctctcacggatcgaagaagtacctcactcgccttgaagaaggccaccatgaatggttgttttgactgaggtccctgtcttcccacaagaccagcagattttacgttgatactgcgtccatcccctgtttctgcacagagctgtaagcccaaattattctggggattaatcacccaatgattgctggtcacagtgatatcaaagacaagccaacccacatctaaagcttgggcctttcttgtgtctaacaagaacagatctgcatccctatttgtgtattccttgatgatttgatatatgctaatcttaattgtttcattttcaaatcggttgttgctccggtccttgtatatccggaattcagctgctgtcactgcctctccatgaggaatttgggtaagatcaaatcgaaattctttgtaatgccttcgctggtgagaaaaatccttgtctct

SEQ ID NO: 341708 - DNA, 1000 bp, Homo Sapiens
ttttttttttttttttttttttcagctgataatcagtttaatgcgaaattgactaggctgagcacagtagaatcacaccgctctaaagcacttaaaattctctaattatatggatttgcccagtgattcataaccttagagtttaagaaaaattccttgcacatagtagatattccaaaatatatgttggataatcagtgttactgttgctaattcaccactcactgtaaaaagtgtgaaagtggccgggcgcagtggctcacgcctgtaatcccagcactttgggaggcggaggtgggcagaccatctgaggtcaggagttcgagaccagcctggccaacatggtgaaaccctgtctctactaaaaatacaaaagttagctggacctggtggtgagtacctgtaatcccacctacttgggaggctgaggtgggagaatcacttgaacccaggaggcggaagttgcagtgagccgagaatgtgccactgcactccagcctgggtgacagagtgagaccctgtctcaaaaaaaaaaaaaaaaaaaaaaaggtaaaagtgaaaccgattatgcacagcgggccttgtgactcttgagtggattttatttttgcactccaggatgcagtgaagacggtggaaggttcatcttcacaccgagggccctcagtgtcgaggtgactcccggcctgaggagggctgaggcatcctgaattttgagagttcgaggttgaggtctaagaaggtgtacgtgctgtagtcatgatgctgcaggttcttgtaggtagtgttgtcaaacggctcagcaggcactggggctggctcctgtgtgccgcctcggtcgtcccctggcgcggctgcatcttccatggcctcgccctcggcctcaagcttcagcgctgctgtcttttcatggaaaccgtggttattctcaacaggaactgtctccaaattgcttggtggtatctgatcttccacgattgcctgtccacccttcaggtgg

SEQ ID NO: 341709 - DNA, 1000 bp, Homo Sapiens
ttttttttttttttttcattttataagcacttggttttattgcacagaagcaattgaaagtgaactccagtggaaagtgcgccctggcataattcagtggccagtccccggccccacctggaccgctcttccagaatagagagctctgggcaagggcttgaccactcctttggaaaacagaaggcatttgggaataggttaagacatctcaagcataatgtatttctaactgctcattcattattgcggtcatctgtcagttgcacatagaggcaataaatgcacttatttggaaaggaggggggcagtttttatagtcaagtgtttacgtgtggcattcggcatgtatcacattcagctacataagctatcataattgtccatcgcctggggagggcctgggggcaggggcctgggagtgccctctcttgctaacatattgctaacagaaattcctgtttgaagaaggaggccccgtcatctaagcagtttcttcttacataaagacagaaaaagtgaaaattgtgttactctgatccttgagctccgggactcttctgagtttctttggctgttccggatgttcctttctccctgccttacttccccttggcggccttgtcttctgtggccttctctggaggcttgctgtctttttggtctgtgctggaggatttttcagccttttctgccttaggcttgctaggctcttttgagagggtcttgtcatcttccttggctttggcctctgtcttgggtttctcctcaggcttcttggccttctcctccttggtgtcttttttctccggtgctgcctccttcttctctgctggtttgctgggttccttggccttggcatcatctggttccttcttggctacctctgtcttttctttgggtttagcgtcttccttcacctccaccttggcaggagcctccttctctggggtggggacttttttcttatcttcagcctcttccttcttggcttcaactttgg

SEQ ID NO: 341710 - DNA, 1000 bp, Homo Sapiens
cagagaaataaaaagctttattattccctctaagggattaatgccagggaatgaatggtccccataccccccacccctgggggagactgacagaacagtgctggacaaggcatggcccccttcagtttgggctgaacttccaacccctgaagccatcactcaagctaaaatgagcagttctggtcctcagggaaacagccacctgggccaggcccaggaatccaagcctccaaagctcttggggaccaggcctgggggccaccacggctgggcaaggttcatccctggccaccagctactctagaggggctgggccccaacccaggagacctctcacacacagtgaaggctgggacagagctgcacgcttgggggtgcctgaaggtccagaaagagctgcaggatcgggtccggaggacccttggctggagtgtctcaagctgagtcgggtccgtggggccagggcaccccctaaggatcagatcagaatccgaggtggagacattccaggtcagggctgcggcccaaagatgggcctacttgtcaatgaggcctccctccttgagcttgaagtagaagaacttctccagggcgctggcacagcggcagtactcgctgtccggggggttgtactcgcgacagttggcgatgacccgctgcaggtcggccacaaagagcttccgggtcacgtagtagcggcttcgcagccgctcagtcatggtcttcaggtcaatggggaagcggatgacctcgtagtagtcaggggcctccgacttcttcacaggctccatgaagggccaggcactggggtgagacttgatttgggccagcaggtttttgagggttgtgtagagctggtcggggtccttcagctccttccccttctccttccccaatggcttccagcctgtctctcgaatgccaggaacgctctccacagggatctgcctcacgccctccttgaagcagctgagccccgggtagaccttgcggatctggg

SEQ ID NO: 341711 - DNA, 1000 bp, Homo Sapiens; identical to SEQ ID NO: 159989

SEQ ID NO: 341712 - DNA, 1000 bp, Homo Sapiens
acacgttactctacaatttactctaccataaattactttcattttaatgatcctttacaaaatggggccgcatattgattttttttgacattacacaggtgggtaggttatattacctgtgaactcactgtggtgtaatggaaggaatgtcacaaaatatgtcgctaaagagggcactgagtttgatagatttgggaccaaccaacctcgagtgcttgggaagcatcatttccttagaaagtcagaagtcacccatgacatttctacccccagcccctccttccatgagtacactatgtggacttaccacattttttacttgtggttaaaagtcatcagcaaagtttctctcctatgtggattctctgatgtcaaataacatggaagcacccacagaaggctcttccaccccaataacgtgcacagggtttttctcttgcatgattttttggatgtcaaacaaagccagggctctgctttccggctgccctgcctttgctccgcctgcagagctctttctggagttcgggtgttgatgctgaaccaggtgtgagttcctgctcgaggattgttcacgccgccggcttcgcccatggggctgctcctctctggtgtgagttatctggtgccggatgaggtgagagctctgaatgaaacacttcccacactgattacatttgaagggtctgtcgcttcggtgagtcctctcatcttgactcaaaggtgggtcacagcccagggcttctgtccattcatgctttgtgagagctggcgtctgctcaaagatcagcctctggcggcacccaaagggcttctcccccgcgtgcttccgctggtgctgggccagggatgagctgtgcctgaagcccttcccgcagtggttacactcgtagggcctctcctcggtgtgagttctcaggtgcaggaaaaggcaagtggtccgagagaaggatttcccacacacactgcaggtgtatggcttctccccagtgtgtgtcct

SEQ ID NO: 341713 - DNA, 1000 bp, Homo Sapiens; identical to SEQ ID NO: 159991

SEQ ID NO: 341714 - DNA, 1000 bp, Homo Sapiens
gcctcatgatgtttaataacctgcttaagtttgtcagtattctgtacaaattgagcaaatgtatgagtaataaagaaaagaaaaaattgaaagtaggagggtatatttatgagtaatctattatataggagtcatgcctagaatgaataagaagagttaaagaacgattcctaaatagaataagaagatgtaggcttctctcacatggaagcgataaacttgaataaaatatttaaatcttcacataacagaatgagaatttaggcatctgaataattccaatatcaaagaacaaatttagtggaattaaataggttttcataacagaaaatttttagaagtattagtagaaggagatgtaggaagtacacccttacttcgatgaattaagggaaattgctgtttcaacataaaaataaagctggctctaagaatcttctttagggggctgttattgatgtccctcctaggaaaactcaagtgtcactgataccttagaaatatcattagtgaacattttattattttgagttaagaggttttttaggttcttaaagacaagaaaaagttatctattatatctctactgatttttaaaacaattaagttgtacagcatgttctctaattctgaaaaaagtaatataataggacaattacaatttagttttcaattcatcatctttcaaaaccgtggacttttggtatatatctttgcactcattttccttccctttgacttttgtctctataagctctgttcctgaagaggcattttcaccaggtagatgacacttcctcaaaagaattaagatgattaaggctggaacaaagcttgatcctcttagtgctgccggcaatccgaggtagatgtatctgaaggtggtggaatcatatatcctgcatgcccctgactcaccacatttcaaagttccccagtgtaaacatgtggaatccattaaagcgccaaaatatataggtgcaggaatgccagcaaatac

SEQ ID NO: 341715 - DNA, 1000 bp, Homo Sapiens
ttttttttttttttttttaggtccaatggtagtttttattccccaggaacaaagataatgtggagaagaaactccaaaaggaaacagagcacggatgacagaaatgacaccacggcagcctggctcaggagtcaggtagatagatggctgctccacagtggacctggtcatggccctggtttcttggatccacatttgccccgtctcttaagtgtccatctcagaggtggaggatggagacagtgaggtggaaaacgtgcttgctctacacaaagacaaatggatcttctattcccagaggaccagggacaccaaaacctccctcttcagaatggaggtagacagataaaaatgagaggggcttgagtgtcacagacaatctgaaagtaataataggggctcactgtggctggcagaactggtactgaaatggggactacaggggaagcagcttccagttttatggtggagagtcagtcctgaatcaggccctggggcaattataaccagagtgctgtttctagccacttacttcaaaggactatggctatgttgaatcagaagccattatctttttcccagaggatgcacttccatccctatttctggcatgatcctgctccctacgagcctgatcctttaaaaaacagattggcaagcgacgagaaaaacggtgcctcacatgcttgagatgtgacagcttctcctgcaggcaagaacctctcagaacaaggtcctttggtatgagctagatcatccaggcctgtccctgcagaacacaccaagactcatccctgtactacagggtggcctctggctatggcctggcacagtgaggacagaggcggggtcctgagtcaacatcacagggaggtctcctggaggatgcaggtggagctgctcccctgataggctgtgccatccagggccatggcctccttgtctctgctgtcccccagcacaccattcctcggcttctcaggaaacaggccagtgtcga

SEQ ID NO: 341716 - DNA, 1000 bp, Homo Sapiens
ttttttttttgcatttcttaaataagttactatttattccgctccgccccctccctctcccttgagaagctgagtcttctgcatcagattattgcaacatttaacctgaatttaaaagcacacgaaacaaaggtgtcaatgggaatctcgcggccaacgcccccagatgtaggggaggcctgattcgcatcggggccgggcgcgttactccatggggtcggccccttagtgaggtgtcacctctcccagagtcacaggacgcttctgggaaggcccgagcggaacggaaagggtggtggctggaaggggagggtggtgagggcgtgacaggcggacaagaactcagactgtgagtgaaggtgacattgggccgcggtggctgcaacctgccgccggcaagggcacagggcccccagcgagtgtcctgtaacaacgcggggcctgaaaggacgcaacctggtaccttcccctctctggcgggtgcccggtcttcgtcccacagacgcggcttctctcctgacgggaggctgacccagttgcccgcacagcctcggctggtagcaaaactcggagaaacccgaaccagaacggacggaggctcgtggggcccggcagctactcctgcttcgctgggcagagaaccagggcctgggccgtcatcctccccgggcctttctgctcacgacgggacccaagtcagggtccatgcagggttctgcctgggcctccaccccagcggggcccccagaccccagggccaaagccgtgggcggcaccaagccccgagctacacggggtcatctgcaccaccccctggggcaggggtggctgagggggaccctggtttctccagaggacactgggggactgtgaggtacagcccccgcctcttctctggggggtcaccgacgggcatgggaggctctgattctgggggttccaggggcactatggcccctgaagaggaagctctggattctggggtcacactgtggctacc

SEQ ID NO: 341717 - DNA, 1000 bp, Homo Sapiens; identical to SEQ ID NO: 159992

SEQ ID NO: 341718 - DNA, 482 bp, Homo Sapiens
gccatgccacgaggtgtgttttattttcattattcatacaaataattttctataatatcccggggcaaaccggagaatttggcagtccgattgggggggggtcccttcagagacccacaggccggtggcatcggcgcggagtgcccaggttcacagtgcagcttgtggctcgtgtccatcttgcaggtggctcttcctccacatcacgactggggtctcgaagaggacgggggtaggaaatcctccaggatcttaggaaatttcactccgcttctcctgctcaatggtctctttggtcggcagggtgttcttctcctgcgtctccgttttcttcagcttggccttatcgaagctggcgatttcccccatgtctggtttgtctgccattttcttaaaacaatccgtgcagtctcgttccgagcccgagatcctggtgctcccactcgcgttgctgcagcaagaaacaaaagagcggcgcccgc

SEQ ID NO: 341719 - DNA, 1000 bp, Homo Sapiens
acaaaaaaatcaagtttttatttcaaatatttgaatctaatagatcattatttaggtttatactctgtgaatatatatatgatattgtatttaattaatatctgagtaatctcaattaccattttctaggaaggatagagtgtaagagctaaacatttcatgtagaaatattaactttcaaaagttataataccagagttttagagtgaaggagtatttaaaatgtgtctttctttgggagagaatcattttgttctttactaacaataatttgaaaattggtaatttaatatcttgtgaatatgaaaatattatggtatagattagcttctaggagaagttaagtgtagcatgatttcttgaagattaaaaaaacatttaactttttaaagataatatgcatattgaatattatttgaacataatagtaaagaaaattatctttgagcttttttgaatatatggcatttgcaaaataacattagctcttatgcatgaaataaattgtaactagatttaataggacaagatataatttatataaaaattaataaggccttagttaatatttggtagtaaaatggacaatgaatcagagatcataattcaaagcagtttttcaaaggaagtttcattaataaatgcaaaaactcatatgtcctttttctcaaattgacaatgagtattaaaaaatgtacaaaaacctttataaatcagttatacagaagataaactataatttgaaaagcaaaagtatacaaccagagctacaggccttacagcttaattcatacaggtatgagtttagatagtctcaatcaatatacagacttcagatttcctgaggagactttcactaatccactaccacactcctgatttttgttcctggctgccagtgctttcaaaaaacatgaagtcaatgaggaaacaggcaccaatcattacagctttcattttaacatcaaggtctaaagggaactggattccaaagttatca

SEQ ID NO: 341720 - DNA, 656 bp, Homo Sapiens
tttttttttttttttttttttttttttttaagtttttaaactttttatttgcatattaaaaaaattgtgcattccaataattaaaatcatttgaacaaaaaaaaaaatggcactctgattaaactgcattacagcctgcaggacaccttgggccagcttggttttactctagatttcactgtcgtcccaccccacttcttccaccccacttcttccttcaccaacatgcaagttctttccttccctgccagccagatagatagacagatgggaaaggcaggcgcggccttcgttgtcagtagttctttgatgtgaaaggggcagcacagtcatttaaacttgatccaacctctttgcatcttacaaagttaaacagctaaaagaagtaaaataagaaggcaatgcttgtggaatgtacagtgcatattggcggcgcacgcctcattacgattcgcctgcttgcttctcctgttcaatcgtttctttggaaggcagtggatttttctcttgcgtctctgtcttcttcagtttcgacttatcgaatttctcgatctcagccatatcgggtttgtcagacatggttgcggaggaaaagcgaagcgaggcgcacgagtacgagcgaagtctggtctgcgcagtggccaccaccgagttgt

SEQ ID NO: 341721 - DNA, 1000 bp, Homo Sapiens
ttttttgttttaaagttttatttgcttacaaaagaaaatggaaataggtttgcgaaaacttatctgcatgtacaaagtaatccccgtagataaggagaggcaacccctggaacacactgctggataaatcgttcattaaaattatatctctttgcatcagagctggtggaaaatcattatttcacatgagttaaaaccattgaaaaactaaatctgtttcttaaactaccaaattcagaaagcttaaatccaaatgctgatttttggatacacatgaaaccagttaccaagtgatctcagagttggacagatcaattaaacaagaggtagtttctccaatattgtccctttttttcttatcagcaaggttattcctacagcaagtaggagtaagtgacatattctttgaacctctttgaattcttttcctgctagggacatatttccctcaaacacaatcatatctgtttgttcattttaggacttgagagagaagattccagagttcaatttatttttcccaattcctctttgagctctcttctctggaaaaacaaattatctgacatgccattaagacaccaaagggaaatcattgctaccatgtcatagattaagggaactttttaaaaatatatattttttgttaataataataataatattaacattatccaaggaggagatttaggctgctgaaatgagccctgccccccaaaagtagcatacaaaccacataacaacattttctcaaacaagattccttaagagttcttgcagttggtcttcaaatttctcctgaggctatcagactccagggccccacagttccatggcttccagctcatcttggacaggggtgaactctggctgatctggatggggagctctcacaccataggcagaacatgatgaggggtcacaatatccaggctggccagaaggaccttggggtccaggaacccccagatgacctggtgggcctcttggtccaggagag

SEQ ID NO: 341722 - DNA, 1000 bp, Homo Sapiens
catataaaaattatttttattaaaatagaaaagctttccagtatattgcattaaagacatttatacagaaaaaaggcaattgcaacaagcatgctacatcagcactgacatattctgaaagctttaagtgcccatttttcagcaacattttggtataatacgcatatccctatgtatttcagagggtacatataatactgaaaaaatacttcatgtaaaatctaagtttcatgtgcatacacacaagaagtattacatcaaatagcttatttcaaactgtgagacacattcaagtattcaatttcttagacaacatgcatacattttaatactcagcttgacacttttaaatatataaaccacaattctttatacttctatatcaaaaaagaaagtcagacagaacacttatctacattgtgcatatcacaaaaagcaaatgtgttttcacgaatggaaagcactgggttaacacacatgattgtcattttacaaatatggctattcaccttcttcataataaaatagaaatataatgtattatttacatgaactacacattatttcactttttggcaattatataagtagcagcaattggtttaaagattgatgtttaaaaactctacatttaacttggatgaataccgatgaatatatatctggttaatataaaaattgcataatgcaagatgctttgatgcaatgtcacttctccctttcacaaaagtcacagacacaaatccgtgaccagtgagcctgttgcttacaacatataattatatgagtgtcatttaatcagcttgcttttgcataacacagtagttggggttctgaattaaatttctgtaatttaatgcaaatttgcctgataatttacataatttacataatttcaaagatgttttatctatgtttcatattctttaatggcagtggctcttcactgggacccctagcttctagccagagtaggtaattatctgtaaacaaaacaaat

SEQ ID NO: 341723 - DNA, 594 bp, Homo Sapiens
aatgctgattttatttcaactaaataaagcaatgcacaagtcacctgggcagtaagcttaactccaggagcaaaagccaagaaacaaggattctttttttctttaaattatccatcactacacatggctgtcttccatacctgctctcagaaaatgtgtgttaacaaatctcatgtaaagaaacacaggaaaagagaaaaaggggaaatgcaatttatctagtctgccagtgaaggtggtctctccatcttcttttctgtaaactgctccatcagcagggtccatttcgaatgattttaatattatgaccaccttccctgattttcatgcacagagtacattcattggcataagtggacatgtcactgccacacacagggttaaagtgtctgggacatcctggtaatctatactgagagcagtttggcgttctatattttgaaaacagaccaaattgagggatcagagaggctgcgaaggtgactgccaggagcagcagcgccaagcgcagcaccgacagcgccatcctcctcccgcgccggctgtcttgcccctgcggtctgttacctgcgccactcgcagggagcgctcccc

SEQ ID NO: 341724 - DNA, 1000 bp, Homo Sapiens
agtcaagcaattttttccctttatttttgttaaataagattccagaaagtatagtgcaaacactcagtagaaaagttgcaattaagaaatgtacattcacatttaacatttcagtccattcactttttttaaaataaaaataggacaaattattcaattacttgtctcaatttaacaatcttgaaaaagactggaaggtaccctacagtgttcagttgacataaaaatagacccgtattgatcatacaaatctatcatgagaagttacccagtgagagtgagttattgtaattctgaatgtactcatcgtgtttctcacttctacagaagcatcctcagtgagttgtattgtgcgagaaaatgacacccttgcccacatcactctccattccatagagggacacaaccctatctagccaaacccagaagaacgcaggcgcttacacaacttttctcggacagtcgagaaaatccaaaagtgggctttgggcttaccttaaataggaatggaatgtaccactacgagatggtcatcataataaggacattgttgtttgagcggggggtgtgcaatcagtataaatgaggatggcggaggaagaggagtggtgactgaagggaggtggtgcataataagtgcacgagctacacaaagctcgagctacacaaagctcaggctccacgggcctcgccttggctcccagggatgctctgcagccagcgggcggatgacctgaggtcgggcctgggcctgtccctttgtgcatgcggcgtgatttcaaattcaaactaagttccacaccattaggagttttcacggcatgcagttccagagtgcaaatggcttgcatatgtgcagtttttacaggtggaaggcaagaccatacatctctcccacactgggcgtgcctcctagtggacagttgtatgcaagaggcggtgatgggctccctcaggatcccccaatgtgggaatggtcccctgagacttgtgcttcgtg

SEQ ID NO: 341725 - DNA, 1000 bp, Homo Sapiens; identical to SEQ ID NO: 159994

SEQ ID NO: 341726 - DNA, 1000 bp, Homo Sapiens
cccaggagcatctcatcatgtggtgcatttagctcacttcacaagccgtgcagctgtccagagtctgtctttccatcagtcctcctcttttctcttcacttctgcttggtttttatgaaaacaatggctctgatggattttgcacctatgctagcgcttgggaaaggtccatgcaggaatgggcacagtcacatgatgaatgagatggcatcatcccaaaaaataaactgaaacaaacaaaaacttaaaaaaaaaaaagaacaggactagaaaacttaattttttttgacatatctaaaaaaggggacaagaacagtagcatttgttctccccatggggacaggaatgaagagggaggagggaagagggacttgatttcttctgttcacaagagaatggttggaggggattcttcagagtttttcaggggatgggacccaaatgtagtgcccagactggtcctcaatgatttgtttgattttgttataaatctcttccagtgagtcaccctgtacaatggctgtaaagtactctccaaattcctgctccagtttcatggctttgtcatagatcttatttgcttgttcatatgtctgccttcggttcatttccataagggcttcaatggacttgggcttgatgaaaatggcaatggggtaaagttgtgcttgctgcagtctcttgatagcattgccggaaacatctaagatgcagtgcttgcccctctctgcaactgcccgcactgactggatgctggtcccatagaggttatcattaaattggcccgcctcgatgaacttgttgtcctgaatatctttctccatttgttctcgggacaccacaaagtggtagtcttgtccatccacctcattatcacgtcgaggccgggtagtatgtggcacacaggatccaaatttatgtggaaattcggagatcaggtcatcattgactcggtccttcattgggcccaggatgatcacaggccttgcatagtgaattt

SEQ ID NO: 341727 - DNA, 1000 bp, Homo Sapiens
aacagtgaaaacttttaatagtttactgccacagtatcaacttttatatgtgtgcatatgtttaaatacaaattagaccataaataccagatggtaaaatagctgcctctaggctgaaaaaaaaaatctctctaccactaaataaacaatcttaagtaatactgaagaaaacagatgtgaggtaattttccatctaaagtgactacaacctacattaagacattttaactaaaaattcaagtagttataagactcttgtaactcaaaaatgtaactttaatacacatttcaaactaaagaaaaatactttaattataaataggcaaaataaataaaattattcctgctgaaataaaatcaagacattatttatttgaggactgtatatagcccagataaaaaaaatgaacttacttgagaccctactaagaagctatataatactctaatacaaattatctatacagatacccatataagtatgtaagtatgtgtatacatatatattcaccaatgcatatatggaactttcattctagatgagaactaactgttccttttttttaagaaaagtatattccaattatgaaaatattcttaatttacattaagagatcactttttgtaggatgcacactaatgtgacaaggagcatttcgaacctttagaaactctttagaaacattcatatcttatcaagttacttctgaatatttgttctactaagtttcaaaaacatcaattaaaaattaacttctttttctttttattatccctggttatacaaaatccccatgttcttttattatattgaatgttcagtctactgatttactggccccaagtaaccctcctatactttatccaattttttcaaagttattttccagttttccatagtttctagtaacgcccaacaggaacacattgaatgaaagatcatctgaacagaagcaatacaatttgagtcaaaagaaacaaatgattttacgttgtgtag

SEQ ID NO: 341728 - DNA, 927 bp, Homo Sapiens; identical to SEQ ID NO: 159995

SEQ ID NO: 341729 - DNA, 1000 bp, Homo Sapiens; identical to SEQ ID NO: 159996

SEQ ID NO: 341730 - DNA, 1000 bp, Homo Sapiens; identical to SEQ ID NO: 159997

SEQ ID NO: 341731 - DNA, 1000 bp, Homo Sapiens
aatactcgaatagtcctgcacatgcataatatttccaacttagacaggagaccatacagggtgcactttctggcaaacaaaacaatagatggttccgctgcctggagctctgagttgtattccagggcatgagggaagcaggccaccaaagtaaagggaaataccaaactacagtggcaatcaatacaggtcaataattgtgaaaaattagcacatggttccatttagtttaaccaagcagttcagtaactatcaaaagaaaggtttcaacatgcagtcttgacttttatgcttccactaacatctgaatgattgaacagaaccattgcttctaggctgcattgcttaatcaaaaacacttccagaacattttaaaatttcctttgcattaaaacataaaaatgatagaaagccagcagcaaatcaccctggtggctctctaagcaacttgagtactcacaataaactaaaatttctcataacatctaggtaacctatacatgtcgtacctgtacatcataggtctatatattaaatatttgcaaaatgaaaacatgcatacacaaaatacgtcaagttttacagacatgatttgaattaaaatttactttgacaatgtacaaacttcttttaaagtaccttaaatgagtaattctgtaattcttcataattttgaaatttagaggttttcttcttaaatctctggggtgtaagtcttaaaagatctgggcaaaaaagactctaaattagtttttggatttgtgttcaagtaagagagcctgcctggaaataggatatgcattcataattaaaaaataccaagactatgttacagaattagccacatttaagaactatagacctgaggtcaacattttgtataaatgccaactgggtttctcggcattttgctcacaattcaaaatacagctagtaacctcagaaatgtattttaagaccatgctaattcatcctttaaagacatttcatggaaaaagaa

SEQ ID NO: 341732 - DNA, 1000 bp, Homo Sapiens
ttttttttttttttttttgacaatttaaagttttattgagtaagcttcacaaatgggcattttaattgacatgtccaggtgctcattacaaatcagagaaccaaagcttcattttaaaagttaaagcaatcttgctgctcataaagtattttttaagccttaaatttgttcctaatcaacatttaatttcattcagtggtatctatttatccattgctagatacctccttttcagaaagaacctaaggtactgttttattcccattacaaagctccatctcaaccaccacaatgattcatggaaagaacatcagacttagcaccagaaaatttgttcaaatcaagatagtaacacttcctagctatacgtcctagaggaaatcaaaatgtttctaaccttagtttcctcatcagcaaaatagggataacaatgttgaccttaaaggattgttttgaaaattaaataaaataaaatactcagatgtaatgtatacattataaagcaccagaaaaacgtaagacagtattattattcatgtacgaagatggttcattcattattcaatgaatatttattaaacattcccacttggcagactttttgcttggcagtgaagatacaaagtcaagaaaagacagccatcgcccgtgaggagcctacattccagtggaggaaccaaaactaaaaggcggaggaaagctctgggtgcttgggagccagaaggagctcctagactgggtatgggaagtgagggaggcctgggagcctcctgtggggctgacaccagaaggaactccatcactacagatccagcaagagtaaataaatctgagtccctcctctgtggggtggtccacacactccacagtcctgggccttaagctagttcaaaagcatcccagccccttaagtcaggttttctcaacctcagcaccattgatatttttgtctggataattctttgttgcaggggctgtcctgtgcaaggcaggtttggca

SEQ ID NO: 341733 - DNA, 1000 bp, Homo Sapiens
attgttaggctagaaaaagattacacttcataaaaccatgtttattcaaaaaaatctattcagaaagtctggaaagcgtaataaatatctgtacagtggccacccatctcaaacatgaattacaaagcaggaacataaaaatgatgtgtaaacataactgctgagccagtgaacaaagtgctgagtcaggagcgaggcagagaagcgtgctcagtagaacgacacagatgctgcagcctccgtcctcagcccctcaagctgcgctggagtccaccttccgccctctccacaccgctcagggaccggcagcgtccttctccattctcgaatttgcatgacgcttagaaaggtaggaggcagcaaaacgtgtcagaaatgaacggagtgcaaatcaaactttgccatgtgcttgagagaatcagtaaagcgttaggtaaaaatcccaagtgcagctttaggataacaccatttaatgaacaatactggataacattaagtactattatcactttaaaattcaaacaatcttccaaacatcaatacatacacagttagtttaaaatcacagacaaatcggacttgagggtaaaagtgaaatcctcacctcttgcccatgtttgactttgggatggaattcagcaaagctctcccactgcagattgggagaatcaggtatttctcccacatggggggctgccagggaaggaggaccctatagggtggccagcaaggggccactggcggtaggtcaggaagcctgagatctagggttcaatgtgtttataagttctgtgattttcatgacccgggggtggggggttgggttatgatgaactgtgtgaggaaggagagccagttaacttttggggaggtctatgtcatttgtgcaaatcatacggagcatttcattcgttgtggaggtgcgctgagctggcaaaatgcgaattctaagaacaccttcatttacatgtcgactgctgcttgaaagcagtcacttgct

SEQ ID NO: 341734 - DNA, 1000 bp, Homo Sapiens
gagtttaacacaattttattagaaattagtgtttgcttccatcacttatgctgagcaaccaaatattacagttatgtgataaaggaaaaattctttcctgcccaggacctgcgccatcctttaggccgaccttggtcacataccaaattcaataaaacccaatactggcctgtgttgttaacagcaggctgccaggtttctcagaaactgacaagaaaatctgaccttcatccatactttgtttacttacccctgggctgcttggagttgaaaaatgcacacagccaagagttgctttctgaatagggctggaaactttcaaagaaaacccccaaacttttaagtcacaaagtctgattaaagaagctaagatcatgtcagtgagttcaatgttagtattttccttaagaccaaggagagattttcagtcagagaagataaatgcccagtcccagactactgtgctttctcggcaaaaaagactgagacactgaggatgtgaatgtcaaagtagtaagcagggactaaaggggatggggaggtcaaaaggcaagcatcacaacacctcagtggggagctgggaatttgagtgttaaaggacctcaagagggcagctgagaaaataggccagtggtctcaggctgacgcattccagtctctgtgggaaagtcataaagccaaagcctgaatttggccaaagaagtggatttgtctttatcttgttacctcaatgagggctggaagaactagtagctgatcaccaaggtacctgacctgagagtcttagtgctgtttatacattcaagactgtgactaacataaaatgcctaattagaaagtcacatttcccctgtcccgccgtcatgtcacttcaggtccttgtgtctaaccctgggtctggcatttgcccataggctctgtggcatcagctatcataagagtagtcaagagagatgaacttgataacctgtgttctctccaaagagcagaaagtgggtac

SEQ ID NO: 341735 - DNA, 1000 bp, Homo Sapiens
ttttttttttttttttttttttgaccacagagatttgaatggtttaataactctgtcttcgtgagctggatggcaagctctcacactttacccgcaggctgtgctgtgcacctcccacacagtggtctgagcagaggcggcgtgggaccagaccctctcccacagccagcctggccaaggtggcacagaccagagctctgtgcagacaagcacccaggggtctaggaatgctcccttctctccaggggccagaggggagaaccaagctgctcagccttccttgctctggccagcaggaggcccttctcctggagcagccctcgtttctgcctgtcatgcccgagggacacaaggccatccactgtgctcctgctacatgggcactgctgggatgtgctcccactctgagtgtcccccacccagggcctctcccttcactgcacaggacagcaagggcagcttgtgctgggaagcacccgaagaccctcggccaatgccaccacagcccttggctaagaccgtctgccaagcccctccgcagtctctgaaatctgaggactggctggtggctccttcccccgtgacagtgaacttggctgcaggccgacaccctcccaagcgcccaagcgcggcccctgcccacttgtacagtgagaccctggcccagcgtggtggcccctccgtgagccggctgtgcctggctgcccccaacccccagacaccagtagggggcagttagagccctgtcaggtccacaatggccttgatgaagatggcatcgtcccgcacgtaggaattctttgcctccatcttggagacggggcagaagagggggcagccgcttgcgatgttcatgtcgttgactggcctctgaaaagaggatgaagtcacgtcgggcctgaaggcgtcaatcacgtgctcccggttattctggtcgagcagcattaaggtcaccttctggttgaagggccaccgcagcagggcgtcattcgggcccttc

SEQ ID NO: 341736 - DNA, 1000 bp, Homo Sapiens
acaatttaattatttattagcttcctcaacaacagttaaaacaacacaatcctgcatgaaatggatccaaagtatgctgagtatttgcaaaacagtactgatactgtcagtcggacttcttaatgttcttgtttccatgtacaatgtgtgacatgtagttaagcttagtaaattttttttcatgtaacctgtgaattggaacaataaatttcaatataagctcaatacatttcaatataacctcatatggctttatatcatttttgttttccctaatgttttcctccttgacatgaaatatttctaatggttaaacaggtactaaaacaaattttgacttgacaaggtaagttttgaaagatgttttgtcacaagaagaaaggaatctcttgtatcacaacgtcttcttgttgtaataaactaaaggagttcatttattgggtttcccagcttccagcctcagacgtaattaatctcttttccccttctttcctgttctaacaaacttccagacacaaaacagacattttgtgatgatgaatatcacagttgccacacaggccagcaggaacccagtcacatccaaagagtggtactggaaccaggtgaggtcgtgggctgcaacccgaaggtgcttggctcctttatggcgcatgacaaattcaatccagaagactgctcgatcaaggggcttcactggttgatcatgatgaattcttgataatttcatagcattctctttatataaaggatcattaattactgtcttcagtgcattgagtaagtctgtactcgacattgtgtggaagtccaaactaacagctgctcccttggccttcatgtgtgcaatgttatcaggttgatctgcaaacaatggaacgcccaccatagggattctaggagagattgccttatagatgccattggctccaccatgagttataaaagctctggtttttgggtgaccaagaagatcattctggggtatccacttgtacag

SEQ ID NO: 341737 - DNA, 1000 bp, Homo Sapiens
ttttttttttggcagcaattgtttattggtctgtcattgcagtaattgcaacttaacaataaaccagtctgacattttaggtcttgaggatacataccatatatatttctttaaaaataatcatactttttgtaagcaatactttacagtagacacctcaaaaatctaccatagatgtgaactaaacgagaaaaatttaagttctaaagatttatacatatatatccagatttctatatatattatatatacatacataagtatatataaatatatttatcagatttcaaaatgaacaaaactgggcactgtacataaagtcttttttaaactcaaacaatagaaactctttaaacattaaacaattttaataaaagtttctgtacaatgctaagcagttttatttacacatagaaaatgtaataggagtagtgtttgaaattacagaactccttaaaatttcaatggcaggtaaatctggaaaaaataacagcattccattcacaaatattttcaagcaataaatatgtattataatagtgtaaatttacatcaagattagaaacaaaaatcacaaatctgaagtttattccttagtctatgtgcaatccattacctttgtgacttggctgttaattttttaaattttatttaggaaccaaaagtgtaaccatcatggtctcaaaacaagacagaaaaacataaaagcagtaaaaaagtgtcttacctaacttttcacattaaaaaaaagttgaccaaagaaagacttaaaattgctaactaccttacaaagaaatgaccagctaggctagtattttttttccaaggaaaattctgaagggggaaaagacagatgaaaacaaattcatcagcccagaaatagagaaatataaaagaggttgtcttcaagtcagtagtctgtaagatgttgccagttttgtcagatatatacaaaacatggaaattattatttttttctgaagtacagctcatcagcttt

SEQ ID NO: 341738 - DNA, 1000 bp, Homo Sapiens; identical to SEQ ID NO: 159999

SEQ ID NO: 341739 - DNA, 1000 bp, Homo Sapiens; identical to SEQ ID NO: 160000

SEQ ID NO: 341740 - DNA, 1000 bp, Homo Sapiens
tttttttttttttttttattttattcatacttttgtaatttttattatgaccataaaaataaccctgtagtccataacaatttagttgtacattttaaaataaaatacaaaggataaatgctagtaagggatacctcatttaccctgatgtgattattacatattatatacctgtatcaaaacatgccatatacagcataaaaacatactatgtacccatgaaaaataagaacaataaatttaaataagaaaaaatataaatgtaaaacctatgggaatatttaacttatctgcagtttaaagccactggcaaaagagattactaaaaatgttagtccactatgtaaccaaataatatattgctatcatcttttacctacaccattgagtaaggtgaggtaggttagtttgtggcataataacgcttcactgaatgcacaagtcttaacatgttaaaacatgtttaaaaatctaagttcatacataatctaaaaattttgaaatgtactgcattatgaaaagcacaattcataaaatgatataattgaattttaatattaaaaatttttcactataatgcagaatattactctgaacacctacctcatgcatcactcaatattatcagttaaccacaagagcctctctacttagattttcatcatgcatctttcattttaatgttcttactcttccacagaaaaggtcataaataatgcccacctaataaaaaaaaaatctcatatctttgatgcagcaagttgatcacatgctttcacatgtgaatacaataggaatgaagaaaaaacatgcgccgggtgcagtggctcacgcctgtaatcccaacactttgggaggccgaggcgggcatatcacctgaggttgggagtttgagaccagactgaccaacatggagaaaccctgtctccaccaaaaccacaaaaattagccaggtgtggcacatgcctgtaatcccagctaccagggaggctgaggcagg

SEQ ID NO: 341741 - DNA, 1000 bp, Homo Sapiens
tttttttttttttttttttttttttttctgaaaaacaaaaaaaacatttatttctgtaaactgtctgagtgcagagatgttctttacaatcccaatacagtacagatttcttccccaaaacgaaatgagcaaggaaaaacagaaaaagagctatatcaaatgtgctcatgaagaaccaagccaatctcacctttctttaaaaacaaaacaaaacgatccttttgaatgtgtggtgcagacgcaggactgaagccacaggcttttggggtgctgtgagcccagggctttgctcagctcacagctagcgcggcgggcagagcaacccttcggcccaagccatcctcgcagcttacacagaagcttcctgaacctaagggatccgttcccagctctccttaaattcccagtccccaccctgggcctctctccctaacgatcttgtcgctttgggagcccctgaagtgaaccctgaaatactccctccgtcaactctgggctcagacctttgcccttctctgtgtcacaaggaaatttcggtcaagagggtgggaacaggtggtttcagaccgtgcagcaaagccactgccaggtaagttttaaggcaaattttatctcttcttattcagtctgagccggacctaaccttctcaccaccgagcaatcctgcctatgctggacatgcatcttaggcaactccggatggaggtgggatgagggagcccggggcagataccaggaggtctgggccttagtagggaatggacgtgtgtgcttatgaaggctgcaggcaccgggcacagctcctggcccagctgcccctcagtggtacacaggaagcagggtccaggaaaactgagatggcaaaataggcccgggctctggaaagcaacgtgaggtcatgcagatctcactaggcagacctcgtcgcgtggaagagaaatgccaggaaaaggggtcactgcaggaggcacctcggatctgatggcaggcaggaccttgc

SEQ ID NO: 341742 - DNA, 1000 bp, Homo Sapiens
ttttttttttttttttttttttttttttttttttttttaacaggaatgaatcatttattcaaacaaaacaaaaagctatataattttgagaatttcattttttgagagtaaaaactacaaaattgaacagcgaggaggaaaaaattctgacaatgtgattcaacattaatcctttaaaagtcactgtaacaaatttaaacataagtgctttatttttctattcacaaaactaattataatacaccacaatgaattttgttacggttttatgtgtgtaatagagggtatacatctccatactactagctaatttgtctgtttgttcaaaagagttatttttctctttttttcttctttgagacagggtctcacgctcttgcccaggctatagcataagggcacatcacagctcactgcagccacaacctcctgggctcaaccgatcctcctgtctcagccttcaagtagcttggactacaggcacacatgcaccaccatacccggctaagtttttgatcttgtagagacaggaccttaccctgttgcccaggctggtctcaaactcctagcttcaagcaatcctcctaccttggcctcccaaagtgctaagattataggcatgagccactgcacccagcccaaaaaagttattttagatcaccattagattgtagtggtctttcccatcaaacataacaggcttgtatccctgtggtgaacatagaaggcattgatttcagggaaattagcatacaataatgtaattcataccctttggcagctaaaaaaattaaagtgcttgaaagatggactctacattgatgtccagagagaggatttataacccatgtaagtaccaacaaaaatacttaaaaattagagtaagacttgcattgttaaagtttgtagatttggattgttgaggcttaaatactgcatagttctatattcactatgtcataatttgcattgctgctgcatcagaggagcttaaaaatat

SEQ ID NO: 341743 - DNA, 1000 bp, Homo Sapiens
aaagaaattagcctccctgggtacttacagtagattgagtattgagagatttacaaagatataattctttggaagattacagaagatggaaacaaaatcaaatctttcactttcaggtactggagttcattaattctttcaccaaaagcacatcactgaaggaaaatcagaagtggttttttagttattattaaagtagttcaagacccagggaaccccttgagatgaaaacaaaacagtattcaacttttcttcacaagactaccttgtactggcaagacttagaggacttctggcttgaaaaatattgcttagaaaacttaaaaaaaaatcaacaacaactatattttggacaaaacaatttttttttaatctgtcttgtaaaatccttacttccttttgagtctctgatggccacaacatttcatttgagatgtttggcagtcacagcttcaggggttatggttactgattatctaaaccccttaggtcagaatgaacaaacacagttcatgtaaacctggctgttattggagtcctctgaccaagagataatagtgaagagtgtggagagcctgaatgcccatggtggaaatgctggaaaaattaaaggtaagaaataaaacatagcacaggagattcagagggctgggatgacttctgagctgctctctatacccaaggccctttcaatttctagctgtgaaagatttttcatgcactgtggtgcctgatgtttcctgcaatttgacaaaaataaatactttacacaagaaaaggatgcaaggcttctacgttacactttggggatgctcaggagccaaggctcctgcttggctttcatttcacagggcctgcagccttgtctctggaaggtgctgattaggactgggaatggcctcctctggtcgagactctctgacccctaagtaaatgaacttgttcccatcccagtctccaaacagatcccaacactacgtttgtttttctatatcctgat

SEQ ID NO: 341744 - DNA, 1000 bp, Homo Sapiens
tttttttttttttttttttaaagagtaagagcattggaattttatttaactctaggtaccatggatttgacatcagtaggaaagactaatgaataagcagccatacaacttttttggtcactgtgcttcccaagcaccaaaaaatggagctatttttccaattcagtttcatctttaataagctagacagatcctgctgcattctttgtttctagtttaccagtacatcattatgtagtttactgcatgtgtggagcaagtcattatgtagtaccaagtttacatcatcataggactacaacatgcacattctacttaatgtagctcaagcaacaggaatacaagagaacggttatgggtggagacttgcctttgacaaagtcatgatcacactaactataggtttagaaatcttattagggaggtacctacagcggttcttcaattggtattagaacatcacatgcatgcacaagtggtatggtagagaatgaagcggaagaagccgctggatggaggacagaggggaaattagagatgggatgatgccgtgtatcgggcagttctcagctttccacagtaagtctctgctctgtgagagaggcctgctgggcaacacttttgttctcatgactgcgaagtttggatacgacatctagaaaagccaaatcctgtacttccttgtgtagacattcagatcccataagagcacatatcaggaccatggaattatatttgatttcaggagcacttctctcatctgctagcagtctatgtaaaatctgtacaagtttagcactttctagatctttctcagcagtgcccaattctaaagctgctattaatgccaaagcaacaagagcttcattctgcattattacatgttcactagttgccatggtaactagatgcttgatgccaccactctgcacaatggttttaattacatcttttgatttactgtgtcgtataagggcagacagcagtctgtttgactccc

SEQ ID NO: 341745 - DNA, 1000 bp, Homo Sapiens
agtagaaaaaatacctttttattaattattaggaataatccattcatgtaatgcaggatgtatgttggagaaggttaagtacagccacatgaatgaggggaaacgtgcaagaggaacagtggtgagaagggggatggtcccccactttccacaaactataaacagcaacatgaacacagagaatcacaaataagagggtctttcctcatgtctcctctcaccccattcttccataatgagtcccagttggtccctagaggtgccagggcatctggaagttctgggctgggagtggggtgcagtgagtggcctcaaagttgtgcagatgcttccgagccagaaacaaagccagctgccgccgtccatctgcactcatgtcctcccccacgctccaggggaagtcgggcccgtgttctgcctggtaggagcggaggacagacagacaccagtcctcttccacctcccatcggctataaattgaggcttcctccagctgtgaggaggcctccaaccactgcctcaccactcgaagaccctcctctgccatcacccggggataccgatgctgcaggagcttcagcaggaggtcattgcctcggttggacatgatgtcctcaggaaccgtggtggtgatgatctcatccttggttctccggatcagcagtacaggaccctggtatctgcacagctgctccgcgttgtttagattgagatgctgcctcacggtcctggtcaccaggcccctccagctgtctggcatgaccttcaaggccaagggcaccaggtcatcaaaggaggcatccaggatcatggcactaacatctgggtaggacatggctgcccacgtggcagtgaagccgccgatggaccaggcgtagatgatgatgtcctggggctggaagcccaggcggtggatggcaaactggaccaccacatccatggcattagcctcattctgcgggaatggcacccccgtgcttccagcaaagcctggatgatt

SEQ ID NO: 341746 - DNA, 1000 bp, Homo Sapiens
ataaaatcattgacagcagatatccttgtcttatttttataatcttaggagaaatgttcactatttcatcattaagcatattgtttgttgtagtttaagtctctttatgcagttaagtaagtccctttcaatccatcatttgctaagatcataaacgaacattaattgtaccacaagaatgttctgcatgccagattacttttctacaggtggtgtataatagcaactgacttgtgaatattaagccacctttgcattcctggaacacaatctatttgattaccattttaccttttcccagaacaagtccatctttgttttgtttacccagtatcaggtcatatgaccactataaaacaagttactggcaaagagaatgaaatcattattattttgactaatcaggattcccctgtgtcatgtgaagaagtggtaggtacctaaactgttccagcaagaaatggagcgaggacattaagttaattgatcaaaaaatatctgctagaaacttgaatcaatttgttctgaaatactgggaaaaaggagaatgcacaaaacaatgacactgtatttgtaccaaacagaagtttgtgaataaaatttctaaattacaaaatattggcactaggcacactcaaacctatgggttaaaaaacaagggtggtgtgagagctggggatattttagagtatgggcagtatgcttgttctctttcactgaaatagacttaaacaattccaaattatgtatgtatagtttatcaaaatagtcttttagaaaatcttatcttactcagatgcagttgaaaactttacaaaacgactgcctcctgtactaatgaggcatttgttaaaaacccatttgtaaattcctctaaatagaaaactaggtattttaccattttatacctattaaatattatctcaccaacaatatgtcctgtcttaatacattttgccatcctaatactcaaataagaaaactgcctcttcacaagtca

SEQ ID NO: 341747 - DNA, 1000 bp, Homo Sapiens
ttttttttttttttttgcacggtgaaaaatacattttaatccaaaagttttgaatattggcacttagaaagttatttacaatcaattttactataccctttgtgaataaagagataattatgtacgtgtagctacctatagttgtttctttccaactcaaacaccataactatgtggaaaaagggtaagagttaaagctgctgcagctcaaaatcattacaatcaacttagattctgcaaattttcccagggttgaaaaatgctggttaaatcaggacaaaagaggaggcaagtgagtacaccccactcctctcccattttacgtgttgctcccttacttaaccggcaaagacctgcacctgaattctagacaatttcatatacaacaggcctcttattatgggtccatagcagatggtttagggtagatgttttaaagatatcaatgctaatggcctaccaatgactttcatgacctcccaatattcgttttaatggtagtcaagagactatcaagcaggaagcctgatctcgacatgtttcctctgcggctttggtgaagctgactatctgcagtataaaatcttatggtttgatcgaagtctcatttttgactagaaacagtaaagagcagctttattaagatcaatggaatggttctgaatgcctgtttgctacagaaggattaaattaaaattttttcttttttttctttttttgagacagtcttgctctatcacccaggctggagtgcagtggcacgatctcggcttactgcaatctccacctcccgagttcaagcaattctcctgcctcagcctcccgagtagctgggattacaggcatgcaccgtaacacccaactaatttttgtatatttagtagagacagggtttcatcatgttggccaggctggtcctgaactcctgacctcaagtgatccatccactcaggcctcccaaagtgccgggattacaggcatgagccaccgcacgtggcct

SEQ ID NO: 341748 - DNA, 1000 bp, Homo Sapiens
ttttttttttttttttggggaccacagctgaattacatttactgtacaaagaacggttcggagagaaccaggaatggcggagtgtctaacagcagcgcgggtagtgttgatgccgtgaatgcaggaccatccaggtcctcaaagtctgtgaggtttgttcataaccccaaacaagggccctgctggcagcaacaggacaggtggggccaggacagggaagctggagcaggaggccagtgtctttgggggctgtggcagggccgcctgcctggggttcccttactcatctggtagttcatgcaggccacggccctcatctcccaggaacgggccatggggcgagtccactggtgcccagtaacaccctccgtgggaccaccttgggaagcatgtgccgcggagtccaccacggggggtcctgggtcccgggagggctccttctgcgtgctggccatgtcgtgccgcacggcctgaggacaggaggtagaggtgagcaccagtgctgtgggcaggcccaggcgatggtgaccgtgcagaggggctgctggggcaggcatgggcagaagcactgggtggaggagcggccaatggcttcaggagagaggtggccggccctgcgtgcctggggctcagcatgagcgccgggctggtgggcctttgaggaggggcctagcctcccgaggcccccaggtggacgtggacgtggacgaggtggttccaggcacgtccctaagaaggtcaggatggttctgatgccgtgcaacctcacaggagagctgcagctgtggggaccccagggccagcgacagaagctgccgagaacaggaggctgcacgcaggtgcccggggtctgcaccgctgcccatcaagtattcctaagtctacagatagctctgcactctccagggtgggcgagatgatctgagttttgagtggtcaatgtccccgaaggtgtcacatcacagcaggaaggttctcatccccacgtggggagggattt

SEQ ID NO: 341749 - DNA, 1000 bp, Homo Sapiens
ctactgactcttctttccgctttgtttcattaacatatgaacagagtagggaatgaaagcaaccacagttaggggaatggatgcacttttacaaaaagacagcacataaaataaatgctcttcgtgagtcgggatctggaggaaatggtagagctgcagtattgtcaatgaggtcaaggcacagagcaaccggaagctcagtgtgtagttatttccccctcggcagctcaggaggaacatctctgagttgattgcaaagcccaagccaaagaggaccccaaggtttctcacgagtccagcaaaaggcgtggtgtcaatgtggatccagtcggggttagcacaccactttttggctatgggcacggaccacagcaggtcaatgttgagcaccctaagaagcaggtaaaagccaactgcaaacaggaagagaaagaggttggtcttcaggtatgtgcccagactggccgtttggatgcctggagtgtgttcaaaggcctctgccaccagcatgccaccaattactccaagaataacttgatgaggaaaatgtgttgctatgaatactctggagatgcagacactgatttgaatcaaccaaaaaacactccaaagaaatgaccaggtcagtctgtgcagagtgatagagaacttatccatcccacagacagtgtggctcagggcagcggttaccatgacataccagacacaggatgcgcccattgcatggccagatggacttcctggacctgtttcacatgtagtagggaactgttcaaggcatggacttgagtgatttgggtaaatctgagtttcttggacccaccagtaaggtcgatgaccaaataatatccatttaaatataagatttaaccaatccccaatgactgctacccatatcatcttggttccaactgtctgattaaattgaaaacaaagtggaaaataaatgaaaaagatattcctggggtctccaacattggacataaaatttagaaaagtg

SEQ ID NO: 341750 - DNA, 1000 bp, Homo Sapiens
ttttttttttttttttgaatctcacaatatctgttttattaagatagtaaagaagacttttttactacaatagggttttgcagtagggagagagatctggctcaattccttcacaatgcctttctgagagaagataatcctcaatcccattcttgcccaacaagcatttgttattaagtttttcaacactttcatcacttggtagggaggtctccattcaagatatgtgtcagggaacatatcaaaagcagccattcccctttccccttccccatgtttttcacttaagtataagagatggtgagctctgtgttggtagggatgttcatcttacgtgccagactgacctagcacaggtgtttgtttgtttgtttgtattggagttttgctctcgttgcctaggccggagtgcagtggtgccatctcagctcactgcaacctccacctcccaggttcaagcgattctcatgccttggcctctcgagtagctgggattacaggtgcacaccaccacgctcagcaaatttttgtatctttagtagagatggggtttcaccatgttggccaggctggtcttgaactcctgacctcagatgacccacccaccttggcctcccaaagtgctgggattacaggtgtgagccaccatgccgggccgcataggttcttaataaatatctattgaatgaattaaccatctttaaaggtttacaagtacccactgccccccgtgccccaccagtctcactgcctgactccaagtctcctacactagatttacaatgtgacttcagactcggtctctttattgggatgggttctggcacagccttaaaacctagacttttcttttgcagcacaagtgcataaatgaagcctggctggaggtccttgtccttgggccatgcacacttctgtgtctccattatagtatctgccaaacatggtcagctaccctgattcttcatctttgtgaactttgaccttcaagtcctgtgga

SEQ ID NO: 341751 - DNA, 1000 bp, Homo Sapiens
tcagtaatacagatgtctattttattaaaaaagttacaaacaggtggactgcagggtcgtcttacaaaatgacaagaatgaaatctattggaaaaattttacttttacaaatctttataggtaattgttcaatgtttgtacttgttatttgagattttacctttcactgataaagttacagtacattagatccatgataataggttacattattttatttgcagagccctactgcagtgatttgaacaactcctaaatagatgccataataaagacaagacatatattgcatttaatattaatttattatcctaataagcaacatgcaatctattgaggaagctaaaataacttttggtcccttttcttaaaatgtgctggagaaaccacctttaaaatcactttcccctgattcctgcgatcctaagtgaattcaagtcaaatttgctgctgaggtcaatgacaatgaacactgtaattttgagagagagagagagagagagagagagagagagagagagagagagagagagagagaaacaagaacacaatctacaggaaagaaacattataaaaaaatcaaaatctctagaaaatttaaatcatgatgaattatttgattcctttagaatttcacaaagccacaaagctaataacaatgatccatgatcacttaacctacttttaaatgagtgtttggttttaagtttggtattaaagtgcaaacttaaattaagtattcacttcaagcagttcataaataaggaacaatgtttcaattgcctctatctttacaatctcaccataaaattcaaaatttaagaacaagagttcactttgagggaatttgctcaggaatcaaatgcaacacgatttaaaaaaaggaaatcaaagtttagtcaatttctactcagtaattaatggtcatgctgacccataaatcacatgaatgtagataccactttatttgaacatcacacacaatataaatttaaaattg

SEQ ID NO: 341752 - DNA, 1000 bp, Homo Sapiens
ctggacggtgtcagtaagaacagagtggcagtaactctcactttgtagtggtatatttaggatttgatgtgacacagttatttattgctgagtgagcaaacccctagcccccaagtggggactacaggcttcagtgcttcccccacactgcctgagctaccagcccttctgcactggccctcctgccaatactgcctgcactgtccccactccctctggctcccatgatcaccagatccgccctgcaggctccctgtcacctgtggggccctatccagaccccctaatccacttgcctagcagccccactcttccctcgatggctcagatcctgagatccaaggaacaccctgggtttcccaaccactctcttactgcagaggtctgtctatcctgccctggtctcctccaccccaggagagttttcaaaggtagagaggaccctttggtctttattcaccaccatcatacttttttttttttttgcttttaaaaagtggaggtggaaaaaaaaaaaaaactgaaggtgggagaaaagtaaaagcaaaaataacagctggtgaatccaagagcagtgccctcactgtccataaacacaaacaccctaaatagttctgttctctcctgtgtatgaaggggggccctgcaccctcgtactcgggtttcttccccatccctgaggtccctatgcttacaatttgggtcatgcctcacacttttctcctaaagcccacactctcttcaccctttgcccccaccccacggtcacagcccctttcccgggtctcccctctgctcctcaccttccctctccaacccctcactctcccagtcagtggccgcctcatccccattgggctcccggaggctgacagccagcaccaaggcctgcaggagaccaaagaggcaggcgaagtgcaaagggtgggcagtaagtaggctcagaacagcatggagcccatgcagggcagccaggaaggacagtaggccatgtagccag

SEQ ID NO: 341753 - DNA, 1000 bp, Homo Sapiens; identical to SEQ ID NO: 160003

SEQ ID NO: 341754 - DNA, 1000 bp, Homo Sapiens; identical to SEQ ID NO: 160004

SEQ ID NO: 341755 - DNA, 1000 bp, Homo Sapiens
tttttttttttttttttgcagtgaagctccttttagtagtttgttgttatgtctgcctggctgctgagggaggaaggatgaagggctggcgttgggaccaggaagggggcacagggtggccgggaagggagaagtagttgctgagcaatgccatgggaggagtggttgccgtgcaacaattccagagtcttgggtaagagtgaggggcccctcagggggggaagcagaggcagttcaggccccagagcagtgcctctcccactgctgctggagcaaggaggggcagccacactctgctatctccaagggcagttcctatggaaagggcccggctttgttcatttccggggggaatggggtgagagtccacctccatccttcctctccaaatctactcttccttgcagggacccgcgtcctccccaggttacagtcctgggtccctgcatggctgcatgttgtctgcaggccacatctcctcaggactcccgcactcatcactttcccattgctatggaagagaggtgtcaaggtggcacctgcctccctgtccgtagtgctcaggtgtgtggctaccagaggaaaagccactcccaacctttgccgacaaccatcccgtttctgggttcctggagaagtctgggaagctgctctgttgtagaggctgaaaggagggctggtgagagcccccagctgaaaccagccctgccccttacccttcctcacccctctacttcactctcctcctaacactccagggttttgttttttgtttgttttttgcttttctcaccccagggctcctgcctctccagcctggagacagatttgctttgggattgttacaaaaataataataacccaaatgcagagaagccacggaaagggctgagggcaaccctcccctccccccgccctcctccctccccattccaaaccgagtacaaaaccgcacccaaagcagacattctgtacaggggggtgggtgggctggggagca

SEQ ID NO: 341756 - DNA, 1000 bp, Homo Sapiens; identical to SEQ ID NO: 160005

SEQ ID NO: 341757 - DNA, 1000 bp, Homo Sapiens
ttttttttttttttttttccagtaacaattttatttatccccctaatttttatcatgggaaaaatccagaaatcaaatgtcattatgttatataaggtttaacttactttaaacaaaaatgtaacatagtgttaaaactggctttccaaaacagtcacagcatagctgtactctgtactaataatcacaaaattgtaatatagaactctgttatgcagtcccattatgttcttacaaaaatagaattaaactgtgtgaccagacaaggacttcaattacactacttggcaaacttagaatttcagtggagtctttttcctcttgcagtttaaagcaaaagtcaaatatcacatctttttcaagactcacaaagatgattcaggttgtttgtttggcatgtttttaatctctatcacaacagcagggatgttttcagctttagtcctcctgggcttcttctctagattgttactaagttctaaacaagaaatgctaactgctggggtcttttctgcatcctttccagaaggggcttgtggtagtgtcccacaacattgcttcaaagcacactgggttctgcaggcaagttcacacggaactacacttgatttagagcctacactagcaaattcaggctgaatggtagtagcgtgaattccgtgattatgaaaaacgtctttaatggttttagccacctccatgtatgatgttggatcttcacattttatgtgagcagtggcaatgattctgcttccagcaagttgccaaacatgtaattcatgaacttcctcaactccttcaacatttcgaagttcttttatcaaatttctgatatcaatttgtttaggaacagtttgtagaagaataagagcagattccttaagtaatggataggttgtgtaaagaagtatacaaaccattacaacacaaagagttggatctaaatatagcacccagcaaggaccagcctcataaactgatgcatgagtactattaatta

SEQ ID NO: 341758 - DNA, 1000 bp, Homo Sapiens
ttttttttttttttttttaggggtctggctttctctttagttctcatcacactagggctctcagtcacagagaaggcacttaaatgggaaggccacctgatgcaggccaaccatattcaccccccgcccacccgctctgggggaggggagcacaacgacatcaccacttgacatcccccttggcactggtatgtgggtccccttaaccgttagaccctggggagagcccaaggccttgacctccggaatcgccatgttaggaggaggggcttcagaaacagttggaaggcaggatatcctgggagctgcccccagccagcaggggatcaggcagggggctgtaggagatgggttggcacaggggaaggggacagcttggtcgggcttcctggagatccccaaaccccacagaaggtcccacctcctacagatcccccaaaggcaccggtgaaggatgggcaaggaggcactgatgagctggcgtagagaccccccacacacacttagctggtgggcctagcatatgctgggcacagaaggtgctcaagaaatgtttttttgaatgaatgaacggagcaaaggggtgtgagggacagaggacagggcctgggccccttggcccagcttgttccattcagaaaatagcagtttaaaaaatgtaaaaatcctttccctccctccccccaacttctgggcccaggaaaggggcaagggaggggtgtctctaccctgacccttccctctctccttcccctaaaaatctatatacacatgtacatatttatatggcaccacaaggggggtcctgcctatgcccccacgctcagagctgggggagccaagccccggggctggttaaggcagaagtctgaggtcattgcttggatgatgcagggagcagccctcagctgtcggccctggagaagctgcactgtggggcctgaaggacagactcctgctgccttccccagtggtaacagacctcccctccctccaaggc

SEQ ID NO: 341759 - DNA, 1000 bp, Homo Sapiens
tttttttttttcagtgacaaacttttattcagaaaataaaagtattatttcattttattattcccaaagaatcaagcccatcatgagtagcccacatggttgctgttcaaaggtactgaaaagggaggcatttggtcaccattacccatcaaggaactctttacaaggataggttccaagtccttcgtgctgctcttggtcattcagtgactgcagttttggcccagaagccatccaagatgagcaagtgctgagccatccttaactcatacctagatgaaacaacttgcgcagaaacgctggtcctccccagtaaccccttagcatcatattccaatacaggaaaggcatcaggtcagctttcatgagatacatggaaaggcgctctttgctttgatcaaaggggaaggtttctagcggctctgctttgtagtcaaactcagcaagaatcacacggttgtagccggtcaccagtggacatgatgtgtagccatcatacttctttgttggtgtttgattcttcataattacagaaattgtcctatcaagtattcctgactgggcagctactgcagcagcggtctttgacgtaggaaggttggtgcagtccccaatcccaaacacatttgggtacctcctgtgttgcagagtttctttatccacatccacccaaccagcagcatcagccacaggactggtcttgaggacatctggtgggctcattggaggtgtgacatgaagcatttcatatgaaatcacttgggtctctcctggtttgtccaggttctcaaatacagcctcttgtttatcggctcggacttcaatgaggtttttcttgtagttaacagtgaggttccgctcctggatgatctcctgcagggcatctgcatacttcttaaccccgaaaatggctccaagagaagtgttgaaaatgatattggccttggatcgcttccctgtcttcctgaagtaggcttctgataagtacatgatcttctga

SEQ ID NO: 341760 - DNA, 1000 bp, Homo Sapiens; identical to SEQ ID NO: 160006

SEQ ID NO: 341761 - DNA, 1000 bp, Homo Sapiens; identical to SEQ ID NO: 160007

SEQ ID NO: 341762 - DNA, 1000 bp, Homo Sapiens; identical to SEQ ID NO: 160008

SEQ ID NO: 341763 - DNA, 1000 bp, Homo Sapiens
tttttttttttttttttttttttttttttttttttttttttttttttttcataagtcagaatttatttcataccatctcacttatagcattttcaagtacaacattctgctcaacatcatttacacttgaaaacagaaaagcacaacttggtaaggcaccaggttacgatagtctggagagaaggccttgctcccattttggcttgtgtaatacctgggtagtttctcttgagtctgtcaagcagagaacaaggttataaaaggtccatttatacatacatggtaacaagagataacaaacagttttgaagtatgctgtatttataaattataatggtggcctacacttgtagttcagccaaagtggcattctctaaagcaaaattcttataaaatcttctctgcaataccaagctgcaagtttaacaattttttagctttgaagtgaaccaactttatatttaactcaaacacatactttaaaaacattttcggccccaaactctatgttcacgaagaaataaaaatggaggaaaatctcaagtataatcgtacctttactattctataaaatgcagcaatatattttaaaaactgttgcatttaaaggtcaacccactagatttttaacactaacagtccaaggtgttatcaaccccacttaaaattcaactgtataaagctttcagaactgggccacacaggtgtacttcactgagcactttccacccatggcctaaaggcaggaggtgtggaagtcccctccagggagaccaactgcagccccatacactgtcacacgcataaaacttctttcaagttttgtgttctatcttaaaaatgaatttgcactatactccatgccatttactttaatataaaaatagtgtttcaaatcgcttaccagttaaataactcatcttccctcccacacctccaggcaccagacaggcagagcccagcctgggaagcctagctttccacagataggtaagccagg

SEQ ID NO: 341764 - DNA, 773 bp, Homo Sapiens
gaatataatgtatttaattcttccaggaatcacacaaggtagatattatcatttccactttacagatgcagaaagcaaggcgtagagatgatcacaaatttcccaaccattgagtgacagagctcagtcatgcagaactcaggtttgcatgactcaaattaggcacaagttcttggaattttccataagggataactgcatcttttgcaccttcacaactagaaacgactcagcgactttttctgtgagcaaatgtcgaggtcttaactgctttagttcgaggaagttccttttttcttttcaaaaatcaggttgctgtaacaatctcattatttattttgcccaagagacgtattcattgttactattttcttttttgtcattgaagaagatgatgatgaggcaataagtagcaagttcattacataggtcacatccctgcaatctagattcatggatggatgagtctgcatacacccacttttttcactgaaggaagagccccagttgctggttctagagatctccttcatcttatcatctttctttgaggagtacaggttgcttgtgaatccactaacacagagcatgatctgttgattttcctggtgcttcaccaccagcactttctcagtctctttagctggcttctgcttctcagcatcatcttctgctattgaagtatctcagaactcagcccttggacaccctctttgctttatatacattcactctcttggtgacctcattccgtctcatgcttcatatcccac

SEQ ID NO: 341765 - DNA, 1000 bp, Homo Sapiens; identical to SEQ ID NO: 160009

SEQ ID NO: 341766 - DNA, 832 bp, Homo Sapiens
tttttttttttttttgagagtgacaaaaagtttattctgtgcttctcgcagcattaggcaggggataaaactggagagagggcctggtgtggaggtggagggactctgtgggcttcactctggtaggaggagagcatcagggcaggcctttaggctgttgctctgggcagggggtgggggtgcgggggcttacagtgggggcccttagttggcacaggttcggaagggccccaggcagacatgaattctcctgagacttgaggtaggttgcttcagccagcccgggcggagaagaagggcagagagcgaacataggagtccagtcgggagcgaaagagctcactttgcacagtttggcccagcgggcacaggggattcttcaccaccagctccacatacagcgcactgtagatgtggtgcagcacatctcggatgggtcccacgcccaagtcagtattcatgacaactttgatcccagtgggcgtctcgtagtaatggagtttgtaacggctagtttggaaggccaggaagccatccttcatgtctagcggggacatcttgctgacaaacgagcggatagagaagagcatcccgtacatcagcttatactcctcctccttgggaatccctgcttgcttcttgcggtgccattcgctgtagtgcagacacactccattccggtcaaacaggtacaggttgtggacagtcatctgcagggcagggagtgtgagcctcgctccggggccgcccccactccttgggctcgggttcccggacccacagccttccaaccaggtggggaccccacccacggactcacccggacgcgtgg

SEQ ID NO: 341767 - DNA, 1000 bp, Homo Sapiens
tttttttttttgaagtaaatcatcttttattttcatcttacatttggttatcatgagacatgcaaactcctccaattttaatgagaacagtgtttttgtgtctttttatcacatatccgcttaatattaggtgtaatattgctaagtcggattcgcatatgaggtgcagcatcaagtcttttcctatattttgtttttgttgcagcgtaatatgaaaaccccgtttcacacaggtgcattgtagcaaaaggaagaagtacacgcactgcacgccttgcaatgcttgggtattcctgaattaggctactccaaaaatcatttagtgaaagttcactaaaattttgcttcacttgagaatcagatgttaaatcaatcaggctctcatagtcccgtgctactaatgaagctggtttaacagtaactgtaaatggatttctaacccaagcattattgtcatttgttacaggaaagtattttaacagagtagcgcgcaaaccccttaggtgctgcacaatggcactgcaaatatctttatcaactgtagaattaatttcagtcaaaaaatcactgagtgtaggaaaacaatcaaagttttcttcttctacagatgaggcccaaaattccaattttcttaacaatgacgacattttatcaaatactgtaaaaacggtcacattttttccttgcattgacaaattaacttcatttaatttagtaaaaatatctgcaagatatgcaagtcttagcagccaagatgaatttgttaaacaatcagatagtcgaaaagcagaatccatgaaaaccaaaagttcacgacgaagttcaaaaagtcttacaagaactttacctcgagaaagccacctcacctctgtatttagaagaagtgctgtgtgctgagcacccatttcctcacataaaatttttaatagtctggattgatgtggtcgagctttaatataattgatgatttgtactgcctggtctagcacattttttagag

SEQ ID NO: 341768 - DNA, 1000 bp, Homo Sapiens; identical to SEQ ID NO: 160010

SEQ ID NO: 341769 - DNA, 1000 bp, Homo Sapiens
tttttcgtctttttactgttcagcgtggctttccgtgtactgccaaaatcaaatcgctctcaggaggcctactggtgtgaacaaaggcgctaaaatcaaagaacttccaagttttaatctgtcagagattggctgtgaagtatgggggaagagtcatttaatctctctccatcagttcccacttctgtacaatgagggtaaaactatggcggcacctctcatgggtactgtgtggactgcctaattaaagctaattaagcccctggaaagaaccagaaaatactacgtaaatgctgagtatttatgtgccgctaacagacacaaaaactcccaagggacaagattctgtgccgacagcacattctctattggtgattactaatcacccactgcttacaaagaaaggcactgttttcagtaacagggtagtttaaaaaaaaaatcacacaatgttgttcaacaacaccatctttattcaaaaatatatatctatgagacatttcagaatatactgctgccgccaacgacagcctatacttctaaatagtcctaaattaatatacaaatttaagctttgaaaatattctttaagaaaaacaaacaaacaaaaacaagggaagattgaagactttctgaggaatatgacctaaaggaaaggtcctttgaggcctacagatgccctaagaaagaaaaaacacaaaaacaaaaaccacccaccccacccaccaagtcacctcatacatacaaggaggaaagttcatttaaattaaacaaatgaagtaagcacactttgggaggatgtggacagcagaattaagatttaaaaaacgaaagcatttcatcaaaacaaaaaactaacttcctcacaggaagtccactagtaacaggtattaagaggccaacacattcatttacataattgctacagtttcatttcttaacttttgctgtaataattatgcaccaattgctggtcagagactcagttggataaaacaga

SEQ ID NO: 341770 - DNA, 1000 bp, Homo Sapiens
tttttttttttttttctttgagacaaagactcactgtcacccaggctggagtgcagtgacaccgtctcagctcactgcaacccctgcctcccaggttcaagcgattctcctgcctcagcctcctgagtagctgggattacaggcgtgtgccaccacacatggctaattttttatacttttagtagagacagggtttcaccatgttggccaggctggtctcaaactcctgatctcaagtgatctgcccgccttggcctcccaaagtgctgggattacaggcatgaggcaccgtgcccagccaaaaagttttcagttagaacaaaaatggaaaacagaaccacacaaactcatcatttatgtggtaacactaaataagaggatgtacaaattaaaaacctaccacattccctattatttttaattgcatctagtcacaacatttataagagcatatgtttataaaagatggttaagactggttagtaatttattcttgaggtttgttttaaagtgaaaaagggggaagtagttataagtccagaaagaatatttcaggatgatacatgttgactataaacgcaaaaggtatactgatagcaatcctataaacagcaaatatggatgcaattgatttaagcctattagttcattttttaaaagcagccttgtttctttaaagttaagtactataaatgattcttgaaaatctactgtggacatgatatattcagtcaaacttgctaggagttggggaatgacttcgtgaccatccagttcacagtctgattgagagttaaacagcattacaaaaaagttacagtcacggtacataatcaattccttggacgatacagcttccacagctctcatcatcctggttattcttctttcagctttcacttacacattcctttctttcagacaaacaaaaaatatcaaagttcaccaaaattcttaaagtcacagttcatgtagcactgaatgatagtagctttggcat

SEQ ID NO: 341771 - DNA, 1000 bp, Homo Sapiens
ttttttttttttttttttttttttttttgacattacaaagtattttaattcttttaacttagtccagacacaagaagccagattatattttaggtgtcgacagaactatttgtttaaaatagcaagttcaggtgagttagtagtcatgaaaattaaaatgaaataccaattccatttcctcgtgtacctctttgcaaatgtcggacaaagcagagttttataatagtttaataacttgtgtaacaacggtggctttggtgtatctctaaagtggagtctttaaattataaaggattttgtgtgcttgaaatcattttcactcattgtcgtggctttagatgaagaattactcttctggaaggaggtttcttttgaaaagtagcctttcctctgagcatagcatacaccaaggccacaaacggaaatcactaaggccacaactactacggctgctatgatgccacttatgttgagatcatctacttgcattcgtttcccaggacacctgcgatatccaacagaattgcgggcttcacaggaatattctccagtgtccagtttggaaacagtattaaattgcagagttccagtttttgtattcattgtgtatgagctgttggtgctttgggagccaagtctgggattttctagcaaacggatgccatccttaaaccatgtgtattcaggagctggattcccttctttgtcttgacatcgtagctctaccacagttccactcagagcagaagagggtacttcacatgatggaactgctggagccactaatacttccagagtgactgtatcctcttccaggttttggccttgctcagatggggcactaacttcacaacgatatttccccgcatcacttcttgtcacatttttgatccggatattgaaatctatcatctcagctcgatttttaaaatcaccttgaagagtctgttgatagtagacaaaggagacactccgacccagtttcttccactctaatctg

SEQ ID NO: 341772 - DNA, 774 bp, Homo Sapiens
aaacagcaccagagttcaagagagaaaattacacaaaagtcatatagatgctagtggtacaacagacggaggcctaagaaatcacagtgaccaaagaatgtgggtgttttcagagagggcagtgcaggatgctgagggtgttacagaaagatatttgcactgtggaattcaggaagggtgaggtgtcaagagtccagcctggggaagaaccaaaagtcctgaactattgaggaacaagtacatgcggcgcagctcagcaaaagacaagcccaggttcagggacagtgtgaccatggggtccaggccatcaggctccgtcccagcatggaaattggggaggggcagggagaggttcagggcctggtagaaccactgaatctgggagtcagacagaggcagggccaggggcctgtcatggggctccggcagagagctctggagttgggggcttgaccaggagttgcaataatcgtactgacagcactgggcctgataccagtactctgcaaagtaggtgttgcgtttttcttggcagcggtaggaaatgtactgtccacagcctcgaacgatgaagcgaaccttgacatcataatagatggtgatcaccatgcacagggatgagctgctgatggtacacttctctgagcctgaaatgcatcctacagaagggtcttctacgaggcagaagtggcacgtccggatgtcgggaacaggaacctttcctactgtgaagcccaccatgaccagcacacctacaagcatatggaccttcat

SEQ ID NO: 341773 - DNA, 1000 bp, Homo Sapiens; identical to SEQ ID NO: 160013

SEQ ID NO: 341774 - DNA, 619 bp, Homo Sapiens
ttttttttttttttttttttttttccaattttgcaacagagtttattgaggtgcccccccgtgggcctggccctgcccctcattcctctttctcgtctccatgggtgatgatgtagcacagtgacttgtagtcgatgttccccgccaggtccatgggtgtcagggcgaacatctgctccacctcagctggagagaacttgtctgcctgggtcaggagaagctgcttgaactcatccttgttcaccacccctttgccgctggggtcaaacatgcggaaggcactcaggatggcttcctcggggtctgtcccattgagcttctccccaaagagcgtgaggaagacggtgaagttgatggggcccttgccctcttgcagcatggcgtccagctcctcctctgggacactcaccttccccagctgggagtaggtctccctcaggtctgccttgcagatgatgccatcacgattctggtcgatacagctgaaggcttctttgaactcctgtatctgggcttgttcaaacatggaaaagacgttggaagaaccacgttgggcctgcttggtggctgccaccttgccccgggtccccgccttcctgctggccattctctctgcaga

SEQ ID NO: 341775 - DNA, 1000 bp, Homo Sapiens
tttttttttttttttttgttttctgttttttgttttttgtttttttttcccaaagtggctgcagttaggtcttgaaaaagcttaaggtattaaaactagaaaaacgcaccaaaagttgtgcgtcaaaaagttgctccccaatgagaagtcttctaccgtcatggagcttctgtttccacatactgtccaagaccaccacagggtgcaccgtaccattgggaggtgcttccatattccgcaacaaatgaaacttccatgatgaagatccggaagaaaagatgtagtgatggaaaaggagccacatattccaaccatttaaataactttaatttacatactcactcacacaggtaccagtgctttgaaaatagattgttcagtcctaaaaagcagctttgttctgtcttctcttttctgtccctcccttctcagcccaagccagccctcccactttttcatcactgttcaagtaaggtttgattaagaatttcaccaaacgctcattcttttttggcctctgcattctccaggagagatttgtcggcagttactacacagatggctactgtttcattctttagggaaaagtctatcccaatggcctcgtcatcttccttttcctctatggagggcattttaacactgttctccatgatctcttttgggtggatttcttctctgctcacctgcttggtgtcattcaatgccatgccgtgtctcagcacatgtctttcccactcagagccctgtgaaaacgcccgtccacaaaattcacatggaaaacgcttctcagtgttaagagcagccccgtggtcagaaaatctcatcagctctctgtcttcagccttgctgttcatttcttcttccttgtcctcatcatcgctgctggagctctccattttctccttcatctgttccagctgatccaagttaacccgtccaaccagctcaaagttacggcttaccttatgctcatcccgaaggtggctgtccagttcct

SEQ ID NO: 341776 - DNA, 947 bp, Homo Sapiens
tattgctcaaatactttatttagtgtgctggttagatcagggttggttccatcaaaatcattgcagtttatttcttctaagatatcagagcagtttggaaaatatcatttattgcatgttcaaccaaaaatggcaaagagtttttgccaaaaacttttaaaggctgggctgcttaatatagtttggttggaagtcgtaacttggacagtggcattgagcaatactgtgtgaggacggttggcgagaatttgagtagtattttcagtagatgctgcgggggttgctgctgatatggaggtggcaggctctggtgttgaagagataggtactgttgaggagctgatcgtcattgtgggttttgtggaagtgcctggtggttgctgttgcagtggtggggggatttgtggtgattgttgtatctgcggtggtgatgtttatttggggctcagggttagagataggaaggtaaatagcaagaaaaaaaggaataggaggaaatgggggttttaatatcctaataggtcctacatagtaaggtcttagtgggaaatgtaggtttggataacccggaaagagtcgaggttgtctaatagattccaatggaaagagttgagatagaatgactgcttggctaaatcgagagaaagaagatggtggaactcgccctgggacaaagggaagagaaagtggtgaattaagtcttgagtcatagggaggtgggggacttggtggaacccatcttggcctgtagagtggaggtggtggcagctggccaggtagatatggtcttctggagaatctttgactctcactgggtgtgaaacatgaaataagagccaacaggcccaagaagaaagttaatttcattctttaaagttgctccttggtagaagattcttctttggaacaaattactgcttaatcttactcttgccagatactcaatt

SEQ ID NO: 341777 - DNA, 1000 bp, Homo Sapiens
tttttttttttttttttttttttttttgctttgtgagcacatttaataaagaaagctgactgttcccggtggctgcctggatcctgggcgccctccatttctgtggccatgaaggatatttcctgggtaagggctaagcgctactcttggtaccgtccccttctgaccctcaccaggaactgcatggttggagcagcatctgatcccacctggagtgtgtggggtcccaaaagtccccacagtccccacagaggtatcaggatctctctctctccagctggctccagagcgcctggctgctccagagatacagacgcttctaactccatacaaggctggagaccagcagacgtggtacagaagtgagctctgccattccttttactttggggccctggcaccttttgccccaacagtcaagcttcctagggtcgaaaaaaactcctccatttccctctgcaacagctggttcctcctctccgcatcctcccgcgcccgttcagagttccgcagctttatttccagcatgatgtattttttcttttcctggtccagttcttcttctaaccgggacattcgttttctcaggtcagcactcccttcttcgattcttttcacactcctctcgtactcagtccgctggcggcacagctcggccctgagctcagtgaccagcccctgtaaggcctcggagcggcgcgcgtgttcccgggtggggctgtccggctcgctgggctcgctgttgctggcacccgcgcccgcctcgtccatgctgtggtccaggtccagggacttggggtcctcgctgctgctggggagcggggagggctccagggcccagtcggtgtgcagggaactgcgggcagacgagtcgctggcgcggcaggccgtgcagctgctgagtgagccccccaccgacgactcgctggacgaggccccggaccacgccatactggccacgctgggtatgccggggaccaggcccggcgcgggcacattg

SEQ ID NO: 341778 - DNA, 1000 bp, Homo Sapiens; identical to SEQ ID NO: 160014

SEQ ID NO: 341779 - DNA, 1000 bp, Homo Sapiens
tttcagatcatattcctttattacatatatgaaatataaaaacaaattaacaaagcaatatatatatatatttgcaagtccacaggacttcagagaaaaaaaggttctgtatgtgaaattattcatatggcactgtgttcatgttttgtatattcaagtacaaaagaaactatgtatagtggttatgcgtgggtacagaagatgaataataatgaaaaactgtgattttttgactatcacatacattgtgttaaaaaacaggtaaatataatgactattactgttaagaaagacaaggaggaaaactgtttcaatgttcaggtttaaatactaagcacaaaaatataacaaattctgtgtctacaataatttttgaagtgtatacaagtgcattgcaaatgagctctttaaaatttaaagtccatttcccctttagccaagcatatgtctacatttatgatttctttctcttattttaaagctcttctggttagtttttaaaaagttctctggctgctctttctagcctccmgctcaaagctgagacttcacgcatacatattctcctttctggttgcatcttcacctagtttctccaagtattcagagttaaatagcacaacttcttttatatgttcacttttgtccacatgtagtggccgtgcagctgcttcagtaggctttctcacacacccttttccttctttcaacagcagtcaccaaacgttcacaacacaagtggtaggtagtaaagtgctttatacaaggaaatactatatacacatggagaggttccatttaacacctacagaccaaagttcatgcgtaacacacaagagaaggctctttaacaaacaccttttctgatagtagggttagggattccttaaaacgtcattcattactttaagtagcatcaaacgtaagtaacatagctgaagctggaaggcgtccttgttagaggtactgcccttaatggattactgctaaatgtcatgct

SEQ ID NO: 341780 - DNA, 1000 bp, Homo Sapiens; identical to SEQ ID NO: 160015

SEQ ID NO: 341781 - DNA, 1000 bp, Homo Sapiens
tttttttttttttttttcttttttttttttttctagtaagactagatttattcaataccctagtaaaagttttgattataagtatccaacagtataaaaagtacaaaacagatctgtagatttctaatatattaatacaaagtgcatgactacatacagtacatcctacaggcaaagagaggtggaaggggaaaaagaagactgtggttgaggtctagtaataaataaataaatacagaagtagagatgatccatattatagtatattctaccaccaatactgcagccaaaatgtacaaaaaaaatcatttcaaataactcaggaggatgataatggctggacttttgtaattcacctcaaagactgtgggagagccaactcaactcactgtatagtctgtgcatatggtggcttgtagcatgtaggttttttccaaaagaaggaaatataaaatgtttagattaagaactataaaactacagggtgcctataaaaggtggcttactccttattgttattatactatccaatttttaaaatgcagtttaaaaaataagcactgagtcttgttattacaaggcaggcaaatgtttctccctcattttgaaaagactgaactggcaatgcttttcctgaacatttagaaaagaggcagtaagagtactctggtttgggttcaagtgagaggcttttcatgaaaatcttaggattgaagagctctaagttcaggatatctcaatgttcagaaagcctgactaaaagaagccaaaccaaaaccatttaatgtgaacacaaacctcttttcttttagtaagttttacttttaatacagagtgaaagaaaataaaaatttaataggctaaaacaagtcaaacacccattctacacagataaaaaccttcacaaaggtcaactgaagtaatccagagctgaaactgaattgtgcagattttcaatgaagtcacagaagtcatgtaacacaaacaaaagtcgattata

SEQ ID NO: 341782 - DNA, 1000 bp, Homo Sapiens
tttttttttttttttttttatttacataatggaaccacatcagggttcgagggtaagaacagtgttttcaaatgtcctctccaggtgtgtttaaaaaaaaaaaaatccagtaatccaaagctcacattatgctttttctaacaggccaatctttacctttcttttaaataagtactcagacatgggaacagttgcatctaatttgtgtgaaaagctgtttaaaacttcttgcgttttcaggtaattttactccctggtgaaattctgatctacaacgaagaaagccccaggaatttctctaagcacatcatcagtacatttttaaacactaatgagccaaggtaaaacaagatataaaccttctacaagacaaaaatgaaaacaaatagttagtggttggtaactgccttgaatgatttacctttatccttaaataacatgtaaacttacaaattgccgagcagaatacctatcatgtttgtaaaactctcactgtctgtcaatttgcctaattttatttcatttttttgttttgttttaaagggggttttcacttacactttttggtatgatgaattttttgttaaataaacagatacaatagaattaaactaaggaccaattagtgcaaaaatgcattaaatacagctctccaggatttttaggatatgcctcatttctgagcaataaaattaaaaggaaaaatcactatgatccacattcctttaaaagagaagctgaagcagccatcttattaataagaaaaccccatccagttagcaaaccacattgctcacgacacgagaacaccatgctctgggaaactaataacctaattataacagacatttcaggttggaacagtaccacttttcctttacaattctattctttagttgggaaatgttttaaggaccccaccaaagcaaattagggaaaagaaagacttttacacatacattcacaaacacattcatacagaaatacagtaggaatggat

SEQ ID NO: 341783 - DNA, 1000 bp, Homo Sapiens
ctcgtctccttagtttatttttttctagagtccttaacatgctacattaacctgacaaagcttaatcttgtgttcgtttcacaatacatttcatgcagttcacagctgtgattggttttacattgacattacacatgtttcgattcagccatgtgaaaagagtaattcttaatggggtttgtctctgaaaactgtccaagcttaaataagcatatgagcagttcactctattcttaagtgcatctctctttaaaatgcaaggatttttagtgtaagaatataatgtccctgtttatagtccatttgcaacagaaccacttcctttaggtttcacatatcctgaggaatccacttttacaaaattgcattcaagtatattatttcatttaacattccaggttgggtttaggtgcaaggctgaccttcagctttacatccccaaataaatcttccacggacccagccttcccaagactattcttaacattagactctcttttacaataaacattcagcactaaagccacagaacagagctatttggcattttccagtgaagtgcaagaagttaaataagttatgtttttattgctaatgtatagaatcaagcacagtcactttgtcaaacagaaggaaagggcatacacaagatgtggcctctcctcagatgcctcagggtcaaaacgcacagaaaatgtcacctggccaccacccatccagcaccactttaagatgatgtgttgagtgttctagagtctgaggagtcagacctctcgtcatagtcgtcctcggtgtaaatggactgctttgacacaaatggacacccatcatcagggatggaaatccgagggtcttccgtggcgcgggcaggaaggacgggcgagcttctgaagacgctggtagagttactggggaaaggactgacatactgggacctcagctgatactgctgctgcagcgtcatggtgttccacagggtgacatcattgggcaaaaaggg

SEQ ID NO: 341784 - DNA, 1000 bp, Homo Sapiens
ttttttttttttttttttagttgacacatttgcttttttattttttagaatatagtctacatctggattaaaaaaagttttaaataaatttaagacatacaacaacagtggaacccttcatcattctatgtacaacacgatagaatgtcagttggttccatttcggttaagtccactttctcataataatgttattattttcactgagtggcaagctacgtacaagctggcgaaatgccagcttatacacactggggtgggggtggggacgggagtggcacgaaagggatggggtgggggtgccataggactactatacagtgtaacagaaaatcattaataaagtagtaccgattaccgacagacagtgctgtttgtgcgcttatcacaatggaatcgctgaagtttcagagcaaggaggagattcgaaatacttcacacagggccaatgttacaaaaagaaatagtgcaaacaggaaaactgatgcaatcctagcaacgcctgggcctccaccggcccaaccgcagggcggcgggaggctacgcgccccgccttccccagcacccagctccgggctgctttcccaagtgtggcaacccagcgccgcgccctggtatggccccttctcgggccctctcctccgaaaagaacagaaaagaaaccccaggaaaggcacaggctgaatgcagggcgtcagcccagtcccattcccaccaacatagaatgcaggccccctcccaggaggttccttgggccctcccatctccggccaccattttcttctctctcacacgtggccccctcctccacgcagccccaccgcgcctcctgcacgtacgcagccccccagtttgcagtctgcccttcccgccccccagccaggaaaaaaaaaaaagctttgaggaatgagagagggtgagatgggtcgaagaaggtgctgggcagccacgggcgccacgcctcagtggccccaattgccgaagccgatctcctgcttgt

SEQ ID NO: 341785 - DNA, 1000 bp, Homo Sapiens
tttttttttttttttttttttaactattactcagaaattgaatagttttttatttgtttgggtcaatctcagtactactagaactcaaaatactatattctaattgttctaatttgtaccatctgcaaaagaccctttaagactgcttcaatgattctgaaaagaattaacaaaaccctgttactaggtgcctgaccttagatattacaactgtttcatttacaaaacctccactacaaaacactaagcttgcaacaaaacaacaaaatgaaagccacataatttgagtaacacaatagtacatattcttcagctgatgagagtaatagggaaatgtatatacttcctacacaaatgcatctagggaaagcaggctatatttattcaagaactagaaaaaggttacaatataaatctatcaaacaaaattcatttttgttatattcaagtaactcatatatattcaaatttagaccaaatcaagacaacaatccaatacacagattattatatagctcaaggagcaaaaaacaacagtcttgtcaatacagactctacataaatacacaaatctcaagttttaatataacatgaacaaatcacaagtacatgtgttagtgttctttctccaaatttctagtagtaaatcttgtatatttagtaaaagcatatagaatgtataaaaccttcaaccacatgtaatgtagactaggaagtgtaaatcaagtagaatgtgaggtttttatatgtaaagatgtacatttcagaaagaacccaacatgaagtaaattaacaaacatattgcaaaggtggtcactcacaaaaatgcttatcatttgcaattgtatacagagaacaaactgcccagaaattaatactggaatcttactgaggggtattatagtaaccaaccttaaaggacaaataacttatttggggggttaaaatagcagagatcagtgtaaattaaataacacatgaatgaaaaaaatctacaata

SEQ ID NO: 341786 - DNA, 1000 bp, Homo Sapiens
ttttttttttttttaaattataattgcctaggagaaaggtgagctaatctctttggaagtgtcatcagctggtgaacttcatcttggtctccactttatgtctttcactccatgaaaatgtcttttcaaagcagtgttatccgcccatggtgagtttaaataggcatcatcatcattttcttccaatctcttgagctcctcttgtcttctgtgatagtacagcatcagctgcttctgctcctcactgctaataataggctctcgggctggagctccctgtcccctttgctgaatcttggcgataattttggttttttcattcttccccacgtagtctgaaagcttcttcgttcttctcagctccttggctgcccaccacagctgcgcctctgcctctttaatgacgttgagccctgcctgtgttcccgacaagtcttccttattttcaaactccatgcggatgggatcatacggtggcaaccccatggggtaaacaatcatcaccgcgcctcgaagctggtccaaggcatctttcaccatctccatggtaacacagacaccggcttccacttgtttcttagatattattgctttggcttcttctatagtcttctttaacacttgcttcatcttctcatttggagcttgcccattccttcgtccaatatcatcctttttaaacactgcacctccgctgggtacgcatttttcaccccattcatccttcaatttcaattcttcaatctgatcatcggtcagtccttgcatattaggagggagaaatatgccatgttcggctaattcttccatttctgagcagaggcgctgcaccttgagccgcccattatagacccgggccacctgcaccgtgagctcctccagctcggtactcccaggcgcctgcagcaggaactggctctcgtcgccccgcttcacgtgcagcagaaccatggcggtcccgccgaggtactgaggcgttgagaaggccccggctgcgtgg

SEQ ID NO: 341787 - DNA, 1000 bp, Homo Sapiens
ctttttttttttttttttcaggctgatatccatttaatagtttttgaagattttttcctgtaaaatggcttgtatttccacaggtacaatagtgaagaaataaacttttcaatttgacatgaaatataaaacaacaattttacaaacatattcataaaatttaactgctaataacacaatacatggtaaatgtgaccatccccttaacttctagactatttaatacagagaagcaatctgtcatctcagctaaaaagaaacatctttcctttcattgagtttatttttgtttgtttagaaactgtcaagcaaaactggaaaatacttattttccttatcttcctctagggattcttcatgagggcaaagacttatttgaaaggatgtaagttatactaaaaagaaaatactgaaccttttttttgtgttactgcttcaatgatgcttagattattttaaaaagatgctgaagtcgtctcattggtcgcacagaaggaggcgcatcataacctaagccacaaaggctaaactactgggacagaagattgacagtaaagggatggagatggatttggcttaaaatcaaagtcctgtggtttgtctatcagaaattccactgttatgaggcaaggctgcaagaagatagtttttacccagcattaacaatggtgtaatcacacaccctttcaagcacatccaaagaacagaatggctttaaaaaagaaaagaagtgaaacaaaaccatagaactgcaggtaacaattctacaacctatattacacttcaattaagcagaaaactctcgtaagtgtccacacaatactgagctcccaaataacagaggtttgagtttttccatgaaaaaaaaaaaaaaagacattgaagctttatgaactaaagagttctcctcaagtttcccaatacagtaaatgtaataacttaaaataatttccctattggtactggaaaataaattctactacaatcatgtttatgccag

SEQ ID NO: 341788 - DNA, 1000 bp, Homo Sapiens
tttttttttttttaaatagctaccgtttattgggcactgcccatgtaccaggcactattaagcactttaaagacatgacttcatttcatcttcaccacaactccatgaggtaggtgttatgatccccacattacagatgaggaaaccgaggttctgggcactgatttcatttgtttgaagtcacacagcttgtgagtggtgaggctggaatttgagcccagatgggctgaacccaaggcagagcttgcaaagttgtgacatcagtacagtgtgttattgtacccgtccaggggccacagccctcaccttcctttcaaaccccattctcaggatagggtctgaaactcctgcctgcagaaaaggcttgtgtgtctccctccctggtggacctgcatttcgctttgttctatcagaggaatgaagctgaaatcgtgcaacgtcaggcagttgccctggctgggaatgagctgcaggccacacccctccctagagtcctgccgtcctgctggccctggccttggcagaagtgcaggttgttctggttctgcccagcctccttctggttcttttccaggcctggttcttttccaggctctcttcccacctttgaacaatgacagaagaggcaggggcctcatgctctgtcgagctagattgtgaaactggccaggaatggggcaaggagaggcaaattccctgagcactttgaatccatggtgttaggaggtggggctctggacctcgggagtttccctgcatttcctccttgcactgtcatttctgccttgcagggctcagcgagcacgcgcttgtctacacaagctgctccccagagctcccccgctgcagtccttatcatgctgctttgctccggtgaggagcgcacccatggcaggggccctgcatgccactccctctgcttctctcaagggcacccgtctgaggccagatcgcagagtgtgtggcgtgggcaggcatgggattgacagccaaggatgtg

SEQ ID NO: 341789 - DNA, 1000 bp, Homo Sapiens; identical to SEQ ID NO: 161044

SEQ ID NO: 341790 - DNA, 1000 bp, Homo Sapiens
gaaaatttaaaaatgtactgcattttattacataaaagtacaaatagtaaaataacgtactactaattttttaattttaacaaaacttaaatgttcttactataatgcaaaagaatattactctaaacacctacctcatgcaccactcaatatcataattaaccacaaatatcatctccacttagattttcatcatgcatgttacattttaatatccttactcttccaaagaaaaggtcataaataatgcccacctaaaaaaaaagaaactctcctatctttgatgccgtgacaactgatcacatgctttcacatgtgaatacaatagaaatgaagaaatagcatcaagtaacttgagagttgaatcacagcaatattagctttttaaaaaatctgtacttcttttcaaggaaaaaagaacactttgggtcgggcgctgtggcttaagcctgtaatcacagcaccttgggaagccaagctgggcagagcatgaggtcaggagttcaagactaccctgaccaacatggtgaaaccccgtccccactaaaaatacaaaagtcagccggacgtggtggtgtgcacctgtaatctcagccactcagtaggctgaggcaggagaattgcttgaacccaggaggcagaggctgcagcgagccgagactgtgccactgcactccagcctggacgacagagagagactctgtctcaaggaaaacaaacaaacaaaaaaagtatactttgaatgtaattacaaacttccaaaaaatcttctactccttttaaagttatgtacaaataaatttatctaccgttagtttgggatcatttttaacagtcagcactttgatatagtgtaatgtctgaagcatccataccttagtttgtttgtttttgagatggagtctcactctgtcacccggctggagtgcagtggtgcaatcccggctcactacaacctctgcctcctgggttcaacggattttcctgcctcagcgtccca

SEQ ID NO: 341791 - DNA, 1000 bp, Homo Sapiens
gaagtagaagtctatttgtgaacttggattcatctttgattccactgagcacctggtaggtgggtattcacatatttcttgaaacagagctatatcatctcggctcccgtgttttgatacctgttaccacaaagagttattttgctgctttttctagtatgcacactttaccactgttctgggtgtcttgtaaacatctcacatgtggtcctaatttttttttccaggctccacacagttcttttcaaggatcgagtggccaatattttacctaatatggtttgtgctctttcgcaactttgaatcttcaaatgctcaaatctaaaagatgcttgtgctctgttattatgcgctaccagaaagaaaacattgttttatccaatttgatttttaatgtaattaatagtgatttaattttcaaaggagcaaataattacaaacaagagaaaacattgctgagatggtgcctggttgcttctattcaggccattgctgaactatatagaaaaaaagtatattcatggtgtcttcattattatgaaaatcacagtaatatgactcatcaggaaatcacaataattttatgacagaaacaatatatttagaacgaatctgtcagtatttgactctcttttgagggaaaaataaatgaaaaccacgttctctggaaagaaataagacaagaaatgcccacagttgcattctgctgttgggaatacatctccaaaattcaaggttcaaaggttatcacatttaattttcaacacttatcaccttcttcttctctcaatttatggagatagatttctacgttcattattcgggattattagaaatttccttcagtttgaacaatgcgtaacaagtattctgtgacatgggtgcaaaaagttgtcattttcaatcaagttataagacataactgtgcataaagtgcatttcaaattaaagtacccatcaggagagaaatttaaagtgcaatacataaggtactttacat

SEQ ID NO: 341792 - DNA, 776 bp, Homo Sapiens
ggccaggcaggaccacaggtttattggggactccacgcacagacgcttatggcatcacacgacaacggcacggttactcgggacacacacggtggcctctgcccacagccagggcccagaggcagtggggtgcagtctcctcccttgtggcccagacccagctgggtcccttcctcctaggcagctgagggaaggactgctgggttggccacgggcctgggaaggggaagcgagcaggcgagtccaggaggggccggggccggggtggggctcgcctgccctcactccagggactgtagcatcagcagctgtttcagcaccttcgtctggctggtctctcggatttcgccagccaggaacatctcgtccacgaccgtgtaaaccttgtagaagttgaacaccaggtccagttcacagacattgtggaaatattcgtttaagacctccacaaagttggtgtgtttggcgtctcggacggtgaccacggcatgcacctcctcgatcagcttctgtttctcatcatcatcaaactgcatgtaccacttggccaggcgcgtcttgcctgcccggttctggatgaggataaagcggatcatggcgacccccgtccagaccccagcggccccggtcccgcggcgactgggcagctccggctcagggtgcagttgtagggcccagagctagagcggacttccggtagaaaaacccgcctgccttctcgcgcacagacccctgggagttgtagtttcaccaaaggggccagcctgggtgaagat

SEQ ID NO: 341793 - DNA, 1000 bp, Homo Sapiens
tatgtgcagaaattaactttttttattatatatcatataatgtagtagtaaagtttgtttgaagtgcatgaataaaaagttagtgaaattacaggaggaacaatctatatagcaataataggtgcattccctgtgcatctgaaagaaaaaaaaagagttttcactcattttggcctaaaacttagtgttcaggttcccaggattctgacatcagaacccggataacgctgattagaaccataggggctttacaataaaagctaaaatattgaccatatgatggcaaaaagtcttattttgtggttaacttattctcttctagctactctctgatgaagttggtggtgctgtggaagaggaccgccgcctcctggacgaggaccgggaccgctcagcattgtaagtgacgtgcttgtcgtagctctccatctgagcctcaatgaaatctctctgctgctgcctgatggtctggcttatgagcccagggagggcgtggatgctaccaatcaaagtctctagttttgtttccagggtaacaatcctcttctcgaagtcttcactcctttcgtttaagtcagaaatcatatcatacatgatgttctgggtctttgccaagtccaccaaagtgtttgcttggtcattcagtttcctctgctccatttttacacttcttaattgatgaatagcttgcaggaattttcgttgatgttttcttacttttgcatgatctatctttttcactagctttgtatttttgtaaattagccatgtttccctgagtacattggcagctgcattttttactcttttagtcagctgagtatccatcatgaaattgtgcacgtgtttttctgctttggtaagttctagcttccttgccactacagctaccaccagggctgtgcaaccagcacccataattccagtaagtaagcagactccttttccacagtatgtgttaggtaccatgtcaccataaccaatggagagaaaagttatt

SEQ ID NO: 341794 - DNA, 1000 bp, Homo Sapiens
ttttttttttttttttttttttttttttctgaaacacaataagcacttttattgctcctaaagtcttcgacttggccgcagtgctgggctcagctggcctcgctcatatgtctttatagctactcttctcaagtggtggactcagtttccccacctctgaatctgggtgagccctgggactccctttggccagtagaaggtagccgaagtggctgcgtgcggatcagctggagctggctggtctaggatggcctggattgggacccctgaactctccttctcatggtctctgcttgtccagcaggctggcctgggctttctcccgggcagaggcggaggtccgaagcaaaggagcagcacgcaggttctcttcaggtggaggaaagcagaggcgtcagctcagactatgcctttttcacataaaaaatgattttcagctgaaggcaattaagaagcagaaagtgcaggaaaagttcaggtttccctccccttttctgcctaaaggcacgatataaactctccatcactggacacaacccttgactcagaggtggtaccagaggctgctgcagacaaatcctgttgcatcagcttcctctcggatatttaccatcccatagtttaccacctttggaagcctaaaactgttgtccttggtcatcctatctctacaaatttattgtattttttaaaaatgctgtgtaagacagtgttccaagccatcactttgttacttttcattgaggcttatcctgagtgatgttggctgcctgtgttaacaaactgtttttcgccaggtacagtggctcatgcctgtaatccactcttaaggtattttgttataaccacctgaacaagaacaaagacattctctaagccatgtagtacacattcataaatctggggttttaaataccttcctcctataattgtcacgagggacagattcaagtttcatttggttgaagcttctaaacctggaaggaacctaaaatgagct

SEQ ID NO: 341795 - DNA, 1000 bp, Homo Sapiens
cagatgctaaatgataaatgttccaagtaatttttattttagaatacaagagaggtacaaatgtatttacagttgtacatatacaatcaaataataatatattacagttttgtaaatatcattttagataaatatttacaaggttaaagtgaccatcttctggaagtagaacgcagtttcttgaaaactctatacattttatacttttcattaatattatagtttattttacaaaacgccctacgggaatcctggtaaatgactgcaaagtgtgagaggcgacaccagagggcgcgcacggcccgaatttgaggaaacgggcagggaccgagggaagtgtgggcagactgggcggaattcccgggactgggcacagctcggaagcgcttcgtggccacagaagccaccttaacctctcgggcagcggttccagtcttgccctcctctcgctggagtgtgtgtgttggaaggggctgggggtatatttcgccttcccaggcacgatgtcacagctgaaggggagggggcattggtccaactccttcattttacagatggggaaactgaggcccaaagaggtgcagggtcttgctcggggtcccacagaggatttccattgtgcctccactctcaacgtgcctggtgcactgcaaagagctccttcctcatccgtccccaggagccaggtttgggggtaagctggcctaaaggagagaagggcccagaagatgcatctctccgggtctcttcccgctgccgatggaccccagtagcccgcacatgtcaaggttgcgtaaggactcccgacacttcaggacaccagtcccaggggccggaagaggagatggcgcccccacaacccccgcgcccgaccacacccggacaaggaggtcgccctcccttcattccgaagcacaggactctcggtggcggaggaggggactccccttcctctgctgaggggccctcgggggctctaagtccgctctcctgccaccca

SEQ ID NO: 341796 - DNA, 1000 bp, Homo Sapiens
tttttttttttttttttttgcatttatgagagtttatttctcaaatttttaaaattattattgaatgttaaacatgtatttctcatattggactttaatgtaaggcataagtgtatataaacattatgtacatttctaagcactcatgtacttaaaagacttgtattttaatgtttgaagttaaaggtttaaagtttctaagaaacatgaaaatcaccaaacggtgtaagaactgcaaagttataaaagaaacaccaataaaatcttaccggagagatgaaattaactatgagaaaaatgaaattttgtgacaaagacaggcagagaacacttcaagaaaggcaacaatttaaaaaatttttagtggggcgtggtggcaagtgcctgcggtcccagctactctggaggctgacgtaagaagattgctggagcctaggcagtcagggctgcagtgagctgagagcatgccactgcactcctgcgtgggcaacagagcaagacccccatctcaaaagaaaatgttttaaaaggacaaaacataaccaaactaataaaatgtgaatcgtcagcaaagtataacctatgctaaccacataataaaggaatacctctgagcagtaacaatgtaaaatattgggcaaatgcattaaagacattaagtaaatacaacaatattttaaaataataattgacatacaggcaataattattgtggtgtcttgtgcctataatcccagcactttgggaggccaaggcgggaggattgtttcagcccaggagtttgagaccagtctggccaacacggcaataccctgtcttatcaaaattaaaaaaaaaaaaaattccagcctgaccaaaatggcaaaacctcatctctactaaaaataccaaaattagccaggcatggtggcatgcacctgcaatcccagctgctcaggtggcttaggcacaagaatcgcttgaacccaggaggcagaggttgcagtgatccctgatcatg

SEQ ID NO: 341797 - DNA, 1000 bp, Homo Sapiens
tttttttttttttttttcaccgtcaatgaataaacatttattgagcaccggcaaatcccagacactacagaacacacagaaggcatggccccacgccgagggccccagccccttgcaaagctgccacgctgccaaaaatggtggcgcatgcagctcaggcgcaggctgaggctggggcttggccgggcagtgcacttggaacggggtcctaaggcctctgccaggttccagctggggcaggggtcacgtcgcttcctgagagcagagcaaataaataatggagaggcaggggctggggcctgaggtggaggggctctggcgttggcttatgtgactccataggagcaagacaggtggccgggagcccccaccccagggtggggaggcagagccaggggaccacagggtcctggggcctccctggcacctccactggtccctcgcctctggggccaaagcagggtgtggggggacaccccagaaggcactgctgaaatgcggctggactagaaatgagtgggcagagaagctggggctgggctgcagtccctagagcggggcgtcatcagtcctccacttgcgggggtaaccctgctggtggccatcgcagcgggggttccccatgctgtccagaggcaccaccacctcgtccgggttcgagttcttgttcagttccaccacgcggggtaccaccgaggaccagcgatccctgcggaggcggcccacggtatgcgagaagccataatactggtaggtctcattcttgcccgggtcctcgttgatgatgcccaagttctggttccagtgagaccagttcacctcatccaccctgaagcaccacctgcggtcaggagtgccgtccgagctcttgcccacggtgaccatctccccagagcggaaggccttcctcaggaatacggggaaggagcgctcaatgtccaggatggtggtggcccactgcagcttccagatgtgcttgctctccttggagacctggccc

SEQ ID NO: 341798 - DNA, 1000 bp, Homo Sapiens
ttaatgttagagaagaacatttattgacatgaaaaggtgtttcagatatactgatatgtcaaacaaatagtaaaacaacatagagtaatgattcattttggtaaaaaatatatatgtatatatagaaaaaaaaattctgcaaggacatatgctaaattggtaacagtgcttacccctgggaagggggtatacagatgttgatttactctttgggtacctgtatttcccagtttttctataaatcacatcatttgcttctgtcataagaaaaaataatatctattatcatcctttattttgatcaaaacaaatcaattttttaaaaaatcttaggtttttttaagaagcagaaataatttccaaattgcctccagagacaatgattttatcctctgcagaagctggtcagaaccttcttgatcacagccccagttagatacagggaagaatggcgcttcctacagcttcagcggcctcagctcagctctgtgccccaaggccaaaccagctcatctccagccccatccatcctattcttgctgagtcaccagtctcatcatcttcagagccatgtccccttggtcagaaggaaccatatgaccagctttcagaatccagtagaaagcaaggttcttgtaggacttgacaaaagcagatgtttccaaagatttagggtcactgtacagggccttccacttcagctgactgaatttaggcagttctggccacttcagtttccgcacccaggcctcctgacccatggtatctacgatgagatccagctgtccattatacaccgtcacgttgatccctgcctccagcaactcgtccacaatgctaatgactggcttcatgaagtcctcctccatgttcacaaagacgttggtagcctggcctccccaggattgatcctcaggaataattttgagcttctttctgatggggccattcatgagctggcttaaggcatctcgttgtaggtgtctcacgtggcgctgac

SEQ ID NO: 341799 - DNA, 1000 bp, Homo Sapiens; identical to SEQ ID NO: 160018

SEQ ID NO: 341800 - DNA, 1000 bp, Homo Sapiens
tgagagccaaatattttggtttttattgaactcactgggctcaaggacagaaagaaaaaaatgggatgaaagggagtgggatgaaaggggagttggatgaaatctttggagaaagacagatctccacaaacaccccaggcctgggaacctgttcctgagaacagccgttaggggtccaggcaagctgccctccaattcttcccctccccttaaaggtgctagggacaaaggggaccacatgttagacccaggcacacagtccttctgtgcccagtttccaggcttttccagagaaggaagctgggctggtggctctaggcttggaagaaagagaacgtagaaaggcatggtaggagaaggagtttggggattggggaggatgagggagaaaagctcagaaacccaagctgggcattccaagaggctggaacaagaggctgccccaagtggggcaagaagtgaagcggttccttcctttcggaggggctattgtgcattggactttggtcagcggcttttaacctggacgctgctgtgctggtctctcacagctcagggcccagtttgtatgatgccagagccatcttggctgcaaaagtctccatgtgcagaagagaaggttcaggtgaactgagaacagggaggatggaagggtctggaggacctgaggaactggtcctcctcatgcttggacctttctttcttctttggtggtatttgggggtggttagatggagacgctgttctcaatgaggggagggtccaggtaggtgtagggcagtgccagaccctggttccgctcctggatgtcccttgagatctgggccaggcggctctggaaggcggcgatgctccgcctcggggcctcctctgtgaagtgctcatctgggtaggtgcccaggggcctctggtccttgggttcttggctaaccaaccagaagaggaggaggttgttacagctgatgttcacttcagggagggtgtctaggtaagtcttcag

SEQ ID NO: 341801 - DNA, 1000 bp, Homo Sapiens
ccaatttgagatggagtctcactctgtcgcctaggctggagtgcagtggcacaatctcggctcactgcaacctctgcctcccgggttcaggcgaatctcctgcctcagcctcccgagtagctgggattacaggaatgtgccaccacgcccggctaatgtttgtatttttagaagagatggggtttcaccatgttgggtaggctggtcgcgaactcctgacctcaagtgatctgcccaccttggcctcccaaattgctgggattataggtgtaagccactctgcccagccaaaaagttaatagaaatcttaatcaaaatataaatatacattcataactgccatctacaatattctgttttggtcctatatcttaatttgcctttatccactttattattctaattgtcaactgattttaataaaactgatacatctttacagttgatgcacatattagcacattcacaacataaaaacaaaaatttagaggtaaagtttgggagtatttaggttaagttacacatgttcaaaagttaacacagacctatctgaaaagtaactaagttacaaaacaatgcacgtctatatatcagaataatccaagactttaccatcaagcaagactaacaatcttctattatcagtcatttagacttatttgtaaaagagaatccaacaggaaaagtatctttaacttggtcgtgggggacttctagtaagagacacattattataccacagaaaaactgtttaatatagctctctaactcctttaagaactgctttaggaatttttattttggctttaagtggaatcacttacatctagacatcctttgaagcaaaaccacttagaaaccagtattttgtgctaaggaagggaagaaatactacaaaatgttgcaaaacagaacaaaaagcttaaaggtttaagaaatttaaaggcacagatatttcacatcaattcagattttatagtatgcaaacatgaaataaacc

SEQ ID NO: 341802 - DNA, 1000 bp, Homo Sapiens
ttttttgggtgggggggagttttactcctgttgcccaggctggagtgcaatagtgcaatctcagctcaccgcaacaacctccaccttccgggttcaagcaattctccgcctcagcctcctgagtagctgggattacaggcatgtgccaccacgcccggctaattttttgtgtttttagtagagatgggggttccaccatgctggtcaggctggtctcgaactcccgacctcaggtgatccacccacctcccaaagtgctgggattacaggcgtgagccaccgtgcctggccggggtatttttatataacaaacgcctagtaaacatctatagaaaatacacagatgagtgaatcgtggacagagtttactatttgtatggctggtagtcctaagcttcagggtggtccaattagagttctggtattaccaaagtggaagggagtgtgcttttaaattatgtatcagtactgtcgtcagtgccttggtctgggagcaagaaacacgacaaaggaagaaagactgtttgagtcccctctcggtaatgttttaatggcagagtcttacacttgggaagtttcttcagatggttagttttgatgttcttaactcggggcatttggtcttctagagttccttttggaaagaatgtgatcattagtgaagtttgagagtgaaatggctaatttgtcttgctgcttataacagggagaaatctcttcttagcctgaagccattgagacccttcagaagatttgtagcaatctctagcgttaaggaaaaatccaatgtttgatgaaaaatatttaactcctgaatgtgtcgttgttggaggttgatcyaacaagtttgcaaacatattgtttgtgcagttaatgcagggaagtgtctaaaatatgtggttctgctaagtaaatggttctcaaacagccttccctcttcctgctcataaggttgagtgatgagaatctttttctactttgcaaacagactaatataatt

SEQ ID NO: 341803 - DNA, 1000 bp, Homo Sapiens
tttttttttttttttttttttttttttttttttttgggggagagaagtttattcatacacaaaggggcacgccaagggcgccagtctagggttacaccacgtgaaacagtagaaaattcaaccaggaaagcaggaaattcagtgaagctactacaaagtggggcgagtggactgaaaactaggattttccttgcaagtttcttttcataaaatttttactttatgaattaaatacattgagaaacagtgaaaatatatttacagtcatttgaagtgggcactactaacatatttaatttaaaaaaatctttgctgtttctttgcctgtttctttcaaagagaattttaaatatgactttagcttttaaaaaatacaataaggaaataattacattcttaatatgaaaacattttacaacgtatcaccatggtcaattaattctgaatatcacttaaaagttgatgttaaaatgtaaagtgaatatttcctttcttgttagaaaatcaaaaagattatctcattaaaaacacctttggtcctaagacttatgatctgaagatgtccttttgaaagtatcttccatggctacactaaaaagacccggtaacacttgtgcacggtgaagttgagattttctggaagaccaaagccggaactatttcatgaactacgggcgaaaggatgcgtctgacgcccaccacttcctgggtgcagtttcccttcttttacagacgccctgctatggcttggggactcacgaatagaggtgactgctttttctgcagtgctgtgccacgtatttacggcaggaacgttttggtttcattttagtttatttcacagtatgaacccagcccaccaaggggataagaagacagtgacaaccaggaaaaaatgaattatcctccttcaaactatgtcatgaacttgaagtgactgttcccattagaaaatcattttaggaaaagtaagaggaaggcaatagtttagtttaacatt

SEQ ID NO: 341804 - DNA, 1000 bp, Homo Sapiens
tttttttttttttttttttctgactttattactggtaatttattgcacaggtttttctgcatcaaaaaagtatctgctaaaatagagaaagttgtgtctgaattcacatttccccccaacttctaaaaatatttcccctaaaaaagaatccactcatctaattttaaagaaaatatacttcttacacaagacaatccaaactgatgcaaaatatttattccaagttagttattttatgcagtagtttccccctcgagacttgtgataaccacatcttttaaatctgtaaataatgttatcaaaataatcttaatctttgaaatctcacaaaaatttatattttacaatccaccctgaatatcaaggctgcaagaataacacaacatttcctatatccaaatattttacagctgtacccaaaaaggaaaaagaaaaaaaaacaaaaacaaaaaaacaaccaaaaaaacccacatatgcttggttaagggctaaagttacccgagcagccaaaaataaaataaaatatccaaattattagcattaatttaatacaattataacttcaatagtcactttgtcattgacaatgattgcttgatcacaggggtgagtgccccaagggctggtagtagaagctgttgctgcagaccagtgtctcctcttccctgcactgccagctcctacctgtgcatcgccccatatatactgggtgtgtatgtgtgtgtgtgtatgagtgtgtttaaaaaatctgtcccaccacacaaacttctctctataaagcagataacagggaagaacaataacaaaagcaaaacaagccaattgctctctctttgggatatgattatttcccttgtgaatgaagtattcaacaacataagaaaaggaaaagaacgatttcttttgtatactccctaaacacacagagtttactgggtcagatttaactgtgagcatttatatgcctacttccaggcatcgtcatctgatgtttcactgc

SEQ ID NO: 341805 - DNA, 1000 bp, Homo Sapiens
tttttttttttttttgtcagtatgagatggaaggttttattagactaggagatttgtgggaggtatgagcgctgggccaaggtggcacgggccatgctcaaggcaccctctcgggtgcggtgaccgccaatgaagccgcttgcatggacgaagatgcagccagggatcccactgacctggtccagggcctcgtcccgaagaccccgccatggctctggcaggggcagccggctttggaatgagtggggctccttgggcacacactgtattcgccactgtccagcctggtcagtgtagataacaaagaagatggccactggaggggacagcccagattccaggtggtagagatgctccttccagggacatgcacctttcgccagttccacaatctctccacttgggtccacctggaatcgctgggcaagggcctcttccaccaaggcccgggctggcagccagctgtgttggtagaaatctaatctctgcagaaactcctcttgaaccagatccattgcacgcttgaaccctgcctcagtgtcttggtcggggtggttccaggtaggattaagtcgagcaactcgtgcactcagggtagtggtcagtgcatatcgaggctccccctctgcccactgggagatcccattgtccacagcatccacctcctccacaaagttctcatacatcttgtcatagagggtgcccaccatgctgtcctcttcactagtgcccagcaactgggccagcagcttgtgcccgaagtgcagatagatgagtcccgcactgctcagcttggtctgccacggcttcccaggggacagggagctcatggtctctgtgaaagacctctggtgatggtcatatcggtgtctccgagggtcgtactcgccccccacgtccaccacgatgtcacaggaagcgagtttttcgggatcccgggtccgcacaatctctgcatcccggtactccggcaggaggcgaagcagtgcgcatgccagtg

SEQ ID NO: 341806 - DNA, 1000 bp, Homo Sapiens
ttttttttttttttttttagttaaatacgcacaattttattgattgaagagattaggacaaaaacattaaaccaaatacaggacaaagcaccagaggccatagatccccaccatgcatgtcaccaacctctcctcctccaaggtacttaaaaaataggggagaggggaaaaaaaaggtccttcttgacacagcaccatcttcagaatgttaaaaaaaaaaaaaaaccttctctcctttctatcttccattagcaaaatagaatcaagggcaaatccatggccgccttgtctcctggttacgaagggtgaagccgccctcctgggaacgtgaggacagggctcctggtgcgcaggcataaagcatccaagagtctgcacatacatgccacacactattatgaagcacagattcaagtaacatttacatactagagtccacgtgtcacctacccaaaaacaggaccatttcacaaaacatatacaggcagtcaaatccgaacaagtgaggtactgggaacacaaatatttatgccaaaagagttctgtatcatacagcaatagaaaagccgtaataaaaaacattttgccactcgaaatcaaataaagctatctagaaaagccaagtaaaaggttatttcagagacagaaatactcaaacaaggaaaaagaattataaatgttaactacagcatgtaatatgtcatcccaagtcaacccgtaattgaagtactggcttaatacatcacaatgtgacattttccttaataaatagaagagttcttgaaaatacaaaggtgcgtattgggatagagagctgtttttatttatatcatcatagctttcagctaattatccttcccgcttgtctctactgagggtttttgtccaaaccagagggccttacaagccttaaaaggatcattctctgtaaagaaaactaaatagctgccctgtattttatacatgtgggacaacctgctttgtttcactagtttctaat

SEQ ID NO: 341807 - DNA, 1000 bp, Homo Sapiens; identical to SEQ ID NO: 339260

SEQ ID NO: 341808 - DNA, 1000 bp, Homo Sapiens
gtttcttctttaattggcatatggagcttgggaatattagtaggagaacaaggagactatgtgaggcatataaaaggcaccacactggaaagaatccaagagaatgaaaaatcacttctttaaataatatttagacacagactttgtatctatattagatataaatcatgtctaaatacaaatctaaataatatttacaaataattattacacaaaacctatgtaacacacactttatagtacacaactgtaaataagaatacaaatctccactgctgtgggttcaaaacagcaggcttggaccactcaaaaatgacatctgagaggaattaatagtcatcctgaaagttctgcagacagacgctagcggacaaaccactttgacacttttcatgctatcattcagaaaaaaatagaatacatgtaataccaaattaggaacactgataatgaacatatatgcaaattatatcttccaatgatatatctgtgatatatgaaaataattttgaagaaataagcttaaaatataatttacggaattccagaaaactttttcttccttgactacatcctcaggaataaggcaattgagtggataacagtttgaatcttacttcaaagtgtagctacaaagtaagaaaaagcactgggccaggagtcagaatatccaggttataatcttgattctttcatgaaacagctttgtgacactgaaggaatctactaaattctttagatttaaattgttcttgtctgtaaagctgaaaataagagagaactgggctaatctgtagggttcctttcactccaatttctaccagtctttttctaaatgggatcatctctaacaaaaagttacaatggtgtgtcagaacatcctgtgactgaccctctgtttgctgctttttgatctgatgacagatggcttggagatgtatcaacaacataattgggagtagataagctggccacattgatgaatgactgagaggagact

SEQ ID NO: 341809 - DNA, 1000 bp, Homo Sapiens; identical to SEQ ID NO: 246547

SEQ ID NO: 341810 - DNA, 1000 bp, Homo Sapiens; identical to SEQ ID NO: 160021

SEQ ID NO: 341811 - DNA, 1000 bp, Homo Sapiens
aagaataaaaacatttattttaaaaataccatttagcatcaattgccccaagtttggcaggcatgaagagtgggcagttcatgttttattagtatataaaattggctttacaggaagcattatggcaaaaaaatgaatacttattatgaaaactgaaaaagagaagtgagtagtaagctactatcagaacgttaaggctaagaaaatgtcactatgcaatgaaaaccatctcctcctctaataagtactaacagaataggaggcttgacttacttgcatgctcctcatagaacgttttggttcatggctatgaagaggtaactgcaaaaagatgtgtgcagatcccggtactggtaggggatatacaagtggggaataagaaaaaagaaattaagcaaaatgtctttactcaaggatctctataaaaatttatttttaagaaagcctgagtaagcatgtatatttttttcctgtgactttaagtgtaatgacagcattaaaaataaattatgctgtcaatatacaaaaaatatcttttcattataagcatatataaagccttctgcaactattacatatcactttatcgaatccaaacttttttgcttgttcccttttgtggtccctagtttttcacatcctcatagaggacaaaagcctttagagatccatcaattcaaccctttcatttcacagataaaggagggtaaatagtttgcccacagttacattcatcctcagtggcagaaattggactagaaccaagtctcatgatcccgaagagggcttttctcattacatgacatgacccattctccaccccatccctgatctcaagtggacgatgctccctcaatctcagatgggcagaagggctgtggaggaaagaaacaatcctgtttggggcctctctggcttgttaggagcatggggctctagaataggaggtaataaaatacatctccttctatccaaagtctttataaataacctatcacac

SEQ ID NO: 341812 - DNA, 1000 bp, Homo Sapiens
ttttgagatggagtctcgctctgtccccaggctggagtgcagtggcgccatctcggctcactgcaaactctgcctcccaggttcacgccattctcctgcctcagcctcctgagtagctgggactgcaggcgcccgccaccacgcccggctaattttttgtatttttaatagagatgggggttcaccgtcttagtaaggatggtctcgatctcctgacctaatgatctgcccgcctcggcctcccaaagtgctgggattaccggcgtgacccaccacgcccggccaatttttattttatcttatttaaataaccacatgtggctagtggctaatgtattgaacactacagctgtagacaatacgaaataaatataaagcagtctcaactttggaaaaacagaagactcttactgcctcataatatagatgaaaaatgaaatactaagataagtaaaacgttctttaaagaacaaaaacaaaagaaaacctaatgaaagctataaaagtccattggataataatgctaccagtactaaggaagtacagcccctaagagtgacttgcagtcacaaatataaaaatgactattcaactgaactcctaaggtgaaaatttcttattcaccatgctccaaaatggtctgtaatattcttcagagatggcatggtgggggaggcaagtggcatctctgcccagagagaatacacaagcagaaagttcaacaccgcttacctggtgaaaccctacaagcgtttccactccatacgcgctctgaataatgggattgtgatgtcttacaccaattctcaaactgggcggccagctgcagctgaatcaactccaggtgcccgtagttgcgataccaagagtagtagccgttcacacggatcacatccacatacagagcccccttgtctgctgcgtaggtggagttggtcacaaaggtcacaggctgggaggggtccaaggctttggtgtgagcaatcaccatcctcccacg

SEQ ID NO: 341813 - DNA, 1000 bp, Homo Sapiens
tttttttttttttttttttttttttttttacatctgaatgtattttaatataaaaataacagctttcccccaattctcgctctaggaaaatgtgctatgctcaccttccctctacccctgtcccatcaggcccagagccaaggccatagggctgctgaatacacatgtgagggggccgaggggaagacaacagtaccaggagggcaggcagggcacccccaggctggccagtggaggggtgggggtatcgatcccgccgggggctggcttggttgctggtgccctgagcccttctctgcccgcctgggtgttgccttcactgatggaggtaggcgtccagccagatgtcaccagacttcttcagggacctgacgatgtccaccagcgcggtgaggaagggcttcacttcgtagctgaggccgtgcttggcacacagcgacttgaccagcggggccacccggctgtagttgtgtctcggcatcctggggaagaggtggtgctcgatctggaagttgaggtgcccgctgaaccagttggtgaaaagtgagggctccacgttgcaggtggctgccagctgagagctgacccagtcccggtgcttctcgtggccgatctccttggggatgtggttcatctgtgtgatccacacgaaccagtggctttccaggaccctgacagcaacaaagaagagcagcaccccagggacgccgtagaaggggaggtaggataagaagaagcgggcatagaagctggcggcccagagcaaatccgcccactgcatgcacaccagcatgtacgccagattttccacttcaaagttcaccagggtgagcagcggcgggccgatcaggaagaagtacaggtgctgctggttgtagggtaggtatctgcgtttcttcttgccatactcgacggatgactcccccaggaggaagacgggcgccaccgtcacgtctgggtctttgtggaagatgttgggcttggcgtggtgctggaagtg

SEQ ID NO: 341814 - DNA, 1000 bp, Homo Sapiens; identical to SEQ ID NO: 160023

SEQ ID NO: 341815 - DNA, 1000 bp, Homo Sapiens; identical to SEQ ID NO: 160024

SEQ ID NO: 341816 - DNA, 1000 bp, Homo Sapiens; identical to SEQ ID NO: 337282

SEQ ID NO: 341817 - DNA, 1000 bp, Homo Sapiens
ttttttttttttttttttggatatatttctgtttattggccaatatgaaatgtttgcagagcatcataaacaaacatagccctgccagtatctacacatgcatatggctcaagagttaacaaaatttctataaataacccatttatgagaaaaaataattaaaatgtaccaatattcaatgtaaaacactgaagacctagctagtagggtggggttggtagagaggagtgggacaggagggattatgatctcaatgtgacagggctgtatgttgtagaggggtatgctgtagtgctgaatcctttcctaacctggatctgagaatcttggaggaaaaaattattttcccaggctccctcctgtcaaaatccaagtcaaggtatatggagagaaaaacagtaatccaaaaaaaaaaaaattcattctcaggaaatacctccccttccttacaaacaaaaactacattttttttttttgctagttcatttagagacaacttaactgctgtttaggctcaatgtatgttgaaaatgtttttatcaagtgtactttgttcttccactgaccaataacccctttgtagaaagacacataaaagcacagtgctcaaagaaatatgcctcagcattgaaaagtaaaactgtaaaaagaactctcctgaagcaaatactcaactatggtatttgccatggccaaacagaaattataaagacgaaaatccttcacttcacctttacccgaaatactttaaaatgcaaagccaattgccacctccaattgctgaacctcaaaaagttggaattaaggtgattctgggtatggcttgggctgtccacatagcattcatgccatgagcaagcacactgaagaagtcttactctttcactttatcatatttttgttattattattattattactgtgttaccatcattatctttcctctagagcagcagtgtcaaatgtgggcttgaaccactgccagccacatggcaacctt

SEQ ID NO: 341818 - DNA, 1000 bp, Homo Sapiens
tttttttttttttttgtgttgtcggcatttattgatcagcatgggtgcaggtgcggatgttcacatggatcaagttgagggaggcagagggagaggcagacaattgctttgttccctgggattctgagaaacaagactataccttgaatagcatggtaattctaggaaactcactactttcagagctttagtgtatggaaaagccattagagcatgattctcagaatacccacaacttggtcacaaactgaggggcaagtgaacactcgagaagtagaatgcactggtttgtttccaaaacaagaatgctgtttatttgctgatcaaaacttgtgggaaaaattaaagtaaaaaaatattgggagaagaatggaaagcctttggataaatgattagctggttaaataaatgagcctgtgttactgaatgagtatggattgcccggttactttttttgtttcttgacactctttgctttgggtcgtttactttcaatgtttgctttagattcttcctgtccagtttttgctttagattcttcctgtccagtttttgcttcagattcttcctgtccagtttttgttttagattcttcctgtacagtttttgttttagattcttcctgttcagtttttgctttggatagtggcattttttcctgtttgggttttaagtggtttcctatcacttgccggaaaaacacaaaaaccactgaaaggattaataaaataaggcgaaacattatgatggacacaacccaaattgacgagggaatcgcccctctgagcagtcctggaggcccactgtcaatgcttcctccataccccacttcctcacagaatggaggtgcccacccatacatgcagtggcagttttttctgttgttgcaaacaccccgggtattgcatttctcaggcaaacagtcaaactgcaggactgagctattgacgcaattttttttaaaacatacccggccttctccacaggaggtgccatcatt

SEQ ID NO: 341819 - DNA, 1000 bp, Homo Sapiens
tttttttttttttttttttttttttttttttttttttttttttttttttttaaaattttttaaatttttatttcaatagtttttgggggtacaagtggtttttggttacatggatgagttctttggtggtaaattctgagattctggtgctcaacctctttttaagccaacatttataaagtcttttccaaatagaaaaaccaacctgaattcaggtacagaggaataatgggtaaccaagacaccagcatgtttgtttttttttaataatgaggtgtgtgaaaaatctactaaaatgttctatgagatgagcaagttaataaatagctaaagtaactgtaccaacttgttactcaacatcacaccagtcatttttcttatggttctcaggacctactgttttctaacttgagattatcactgtttgttttataagacaccaacgagttttataagaccgagagagagcgagagagtgtgtgtactttctttaggaggaaatagaaaaatcaaaatatttatttacttgtagaacaatgaattttttaagaaaatactccaaactttctattttagcaatcctaattaagatgagaaatggggtaactttcacatgacagtcacacataacctttctaagacaaacctaagtaacagaaagcaaacttgagtgtataaattctggatttgcttaaaagggcaaataaatgaaagcaatggtgacaccataaagagcgagcaagctacctgtgaaaaaaatgctggtgtaagagaagctgtagggagagatgggctcagtattcccagtgggcttggatcactgctcgtgatcacaagggtgggtgccagttctaaccctttgggtttcttggatcttgatgaattatttactttgtccttttctagcaagactgaatcctggtctttaggctccagtgacaaattctctggaagttccattggctgagaagccactgaatcaatgtctgtgtcgatgtct

SEQ ID NO: 341820 - DNA, 1000 bp, Homo Sapiens
atgcgatcagaattttattttattttttgtttacacatgaatataaaaatatagaaaaaggcttaattcatgaagttgctataggtttctctttctcaaaagtgctcacatgagggtcacaagagcacttatttgtcagacatttgtacactatatactaattctagaaatagcatcttcaggagaccccaaacctgaggatcacatggacccaatcatatcatctgtgtgaagagaccaatcctcagaaatatcaagaaagtgagatggctgcagaggttgagcctcctgagcccctgcttggtgacaagggacctgggtatgctcttcttcactgaagacacaaggtggacaatcgcagttgggcctttgactggactgtgacaagctgaacacctcgtagcatttctcatccttctgggctgtggccctgctcttgctggctactctcatggagcagggcttggtgagccatggggacttttggggggcagcacatgacactgggatcacaaacttagatggcgtgcccttagaagagtagtgtatctcagtgctgtagataaccatgtcctgagagacagctttggccctgatgccacattcagtaacacggtaggtgaactggtaggcgtgtggctgaacatggtttggggggcaacccaggcccaagtgtagttcatgaaagtgtacacacacatcgttgtttagcatgaaggggtgcactgtgaccatgaaccagtctatggagcacagcacagtcattggactttgtcctgaaccggctgaaaacgcagaggtgaggaggatcatcagtcctatgaacttaaaaactttcatccctgcagccaatcagataatgaaccacaggaaacaggaagccgtccagtgaggatttcttcttctggcagctggggataatttgtcagtttcctttgaaatgtggctttgtgctcactggtgaaggcagctgccaaatttccaaagggaagaaggaact

SEQ ID NO: 341821 - DNA, 998 bp, Homo Sapiens
tttttttttactctttaaaacaatctttattgtgactcagtagcgttttgagtgtcggttcagctaacctgactaggttgcattctttagggcttcatcctagcagtccccaaggctgctctagtgctttcagttctttgatcctccaataaactccctgaaaggacaggttgaataagtcctctgtgctaacattaaggtatgtcagatgaacatttttctccatacaaatgctggatcctttggatatcatcggcactgagctggaaggttctagggtcgtgataccagtaagtggggtacattatggagctctgattcccagagtgctgcaggcccaaagaatgcccaatctcatgagttgcaaccaggaacagattatatccagtgtctgaagctgaccagtgttcattcttgtcaaaatggacaactccaggatttccagaatttggtaaaaaggcatggcctaagataccacctggcccatcaaagggccaaccatcttcatgggcccactgccagaaagaaaccttgatgtctgcatctccattctgcacttgctggaatatcaaaggggtcacattgctccagatggaaactgcattatatatactgtctttcactgcggatggcttcatatcatgtgggtaattgataatcctgtaagttagagtgtgcttattccacttgcatcttcctggcgagatggaggtgtcggacccatcaggcaccccacagtggggctggtgtagcagagcatgcatctgcatgtcaagtaggtctgtcccattccgatggaattgttgcaggagctgtgtttgtgtctcctgggtaaggagtggcgactccttcttggtcaggaaaaattgatggaaatagccctcaacaaagtcccatcctttatggtctgcagcagggggcactggaacggcgaaacaccagggcaagaagatagtaactcttaagatgacgagctgcatgccaaaccctcatttgtc

SEQ ID NO: 341822 - DNA, 1000 bp, Homo Sapiens
ttttttttttttgagtgtgtaaatctagcatttattgagtgtctgctttgtgctcagcactgctcaaacactgtgagcaaatacaaaagatttaagagactgggtacccacttcagagggtgaacatacagttggaatttccattcactccacagttagagaacagtagaaatgagtttctatcaggcatgctctgggagttcacggaggcccctggctctagttttgtgttgtcagggagatgttgatcaagcaccttggaagtgaaaaagcaatgtcctctacctgttccctggattcttctctctttagacctgtcaccttgaagaaagcatgatcgattccaaacatcactgtaggcaaatcaccatagtacttgaactgagttactgtgaagaaagcatgtcatccttgacaatggattaaatgaaagtgagctaatgcatgccattctcaatccttgcagctacaccagttcccaggcactgtccttacaagtgatccatccatattccatacaagatccaacacttgctccaatgatatatccttgttttcaacttcagaaattcaacagacatttacatttagattatccctgaacagcctgtgagaccaaatacacactttccctaatatactctaatacaaaatccttattaagaaacagaacagaagtcaaatccagagacagaaataaatactgaaagcaatgtcaatgaagatgctctctccttggccatgttgtctttggacaattttttttctgaacagagtcatagttttgacatttaatgatatctttatcatcttatattttctataccatgaaattaacatttacatacaacaaaatcacctcaagaggaaaaacatagatttttctaaaaggaggtctgaacatcatcagtgttttggaatcctggattattttctcctttgctaatatcgatggaggcataaggattttctccacttcttgctttatttttcttcttcc

SEQ ID NO: 341823 - DNA, 1000 bp, Homo Sapiens; identical to SEQ ID NO: 160027

SEQ ID NO: 341824 - DNA, 1000 bp, Homo Sapiens
tttttttttttttttttttttttttttttttttttttttctgcttaaaaaaacaaaaaaaaattttatttgacaaaagacaaaaaagttatttacagtagtttttgctcaaataattcaatgggacaactgtgcttctcctccaggtttatcttacaaccaaacccaagcagagtctgccctacccaacaccccattttacataatggggaaatgccaaccagaattcagcagcatggctccctcaccaccctccattgctcagtgcactgtggggagggaaaatcccacctcagcccaatacacttccagagttccctactacaggcatcctgcagcagttgcaccagacctgggctcactgacagggctgggatggaagaggctgggcaaatggcagcatcagttaacctggatgaagccatgttcattcttccccactgggcctcaggagggtgaggatccctgatccccctggggcacacggggagagggcacgggaggaagaagccagagggaggcaacacagagagcccaggaaacttgcccacctagagagagcaaagctccctctccttcagcgatccgttcacactcccacagcaacagatgggcgactcagaagttggggagcctctgtgatggcttcagggatcttcccagaaagtacagaacacatgttactgtctttctcctggctagacccacccaagttagtcagtatccaggaaccttttctccttgtgcctgacctggtgatttcaggaaaactaaaggctgtcgtcctgatctatcttttggcccagtgacactactcaggacaaaaatattttggctagcaataacctaggattagtgtttcttaggatatataaagatggggcatattgttgaacactgtcagcaatgaaacagcaaaagaggctgggcgtggtggctcacgaggtcaggagttccaagaccagcctggccaagatggtgaaaccccgtctctactaaaa

SEQ ID NO: 341825 - DNA, 1000 bp, Homo Sapiens
ttttttgactgaactttattttaaaaggaaaccttctgcattatcacagttcatatcacttgctataattaattaaattttaaatacataataattaaatttaaaaggccatctgaatatcacttaaaatcagcttgtgcactacatgctacataccatgtctagtgaagctctgctataaacatcattttctcatatgtatgtatatatttatatatatatatagaacttttattatggaaatttttatgaacagtttcaaagcaaatgtgaaaagaatagtgtaataaacccacgtactgatcacttaacttcaacaattatcaactcacacctactcctgtttcgtctgtaccccaacccacttccccaacctccctattattttaaagcaaatctgagacatcgtatcatttcattcacatatacaacaatcttgataacagcaaacatgtgaagaatgtttgctagatgccagacaggtaaagcatagcaaatgcacactcatatatctacagtcaccacaaccttgagactcttaacccatcttcatggtggagggaaaaggaaagtggaagcataggcacaaaggcaacttgcccaaggtcccacagctggtaagtggcatagctggcactgaactcaagcagtccatgcccttaacctacaacactgtttcttggcctaggtgaatgcaacatgcttttccctttgcatagagctggcccagaatgagtttcctggagttggtgtgcagagcccatcatctttgctgtcccatctcggcaccctggccacatcaccatcaggttaccagagaggagctgctgccttgagacatgaggcaggaagggtggacactgaggtccctgcagcttctgcttggggcagaatgtgggcccagcatgtaaggcacgagctcctgggctgggggtattaaagacagtgtgttgcagctgatacagatacagaagttgacccttgataatcatttagtact

SEQ ID NO: 341826 - DNA, 1000 bp, Homo Sapiens; identical to SEQ ID NO: 160028

SEQ ID NO: 341827 - DNA, 1000 bp, Homo Sapiens; identical to SEQ ID NO: 160029

SEQ ID NO: 341828 - DNA, 1000 bp, Homo Sapiens
tttttttttttttttagaatataatgttaatttattatttccaagtaaaaagaggaatagccattttattagattcacttattttaagcttatattcgtttcatagtcacataaaattcattacttgtaagtgtagcaatgaagttgtattttgatgctgtttgaaacaacttgttgttgatattgcagtccagctacaagcttgctgatttgaatatgtgtgggaaaacaaagcatttaaattactcaagaaatatgttacaatcatatcaaaagtatgaaaataaaatatatgttttcttctaatgttttatccacaggtgttgccttcccagattaatatagccattgtctaaatgtttcgtttattttattttcatctgagggcagattttgaaaatcaggtctactgattgaagctggaagaacatgtaaatgtctgcattactcattatgtcaaaacagagcacatgatgggtacaaagtatactcttgcacatttcacagctttgtgatacaactgtcttggaaattgggtggaaatttatgcacaaatgtgcataagtaaagaccttgtgaccattgtttccttccttgcaatcttaaacttttttgtacttaaaaatcatcttgctaacatttagcatatttgtggattaataacaaactagtcttttgtatacctactttgagggtaggtgaggaataatgggttaaatacaatataatattatttattggcttaaattatttaagttatctagttttagtactttgaacagggcaaacattttccccctgtttctgtctattgtgagaaattgaattacgtggaagaaatttttactgttaacctttttttccccactggatttaagtgtggttgttgggacaattgttgcccaacagaatggtacaacgtaaagagagagacctgtagagagactatgcctccctgttgcattatatgacagtatgagtgaggtgtttcctgatgcac

SEQ ID NO: 341829 - DNA, 1000 bp, Homo Sapiens
ttttttttttttttttttttttttaaagatccccaggttattttattgctgtactcagaggtcagttaatgcccccggccgcctcaccctccccccggcggtggctgagtcctctgctagggttcgcgaacggcagcgggtccgagggtcacctctgcatctcgccgccggaggcgcccccgcctcccctccccgccgccgggccagccggggtccgaggcccgcagcccccggctgggaaggcaggtctggagaggccgctccgggtctggagggaggggaggctctccggaaaggggtggcgagagacccccgccacgactcccaagcttcttcgcgcgcgctggaggggacacggtgggcgcctaattctcggcgtagcagtaggtcccataggctgcctgttggggcctggggaagccgaaactgcgcactccgggatccgggagccccccgcagcgcggcctcggcgtggtgattgggaagcgcacactgccgtcagccagccagccgccgtcgcactggtctagccccgaaaacttccaggcggcgtagaggtgcccaaccttggccaccacggcgccgcgtcgccggcacgccgcgtgggcttcagacagcgtcagccgcccgggcacgaagaacacttggcccgccagcgcggaggtgaagcagaaggcgtcgtagcggtcgcgcatccggtcgcggggtccgtagctgcggatcccgggccggcctcggccgccgcacggggcgcgtgcggtgagcacagggtagcgcacggagccctcgagcagccagcccgcgttacaccagtccagaccctcggtccaagcctggtagagctgggagtaggtggccaggcgtccgtcctgctcctcgcacgcctgcttcgcctcgtagtaattgaactggtaccggccccggctgggttggtacggaaacaccacaccctccaagctcaaggtcagcgccacgctctcgtcctcgatgccgttgatga

SEQ ID NO: 341830 - DNA, 1000 bp, Homo Sapiens
ttttttttttttttttttttttttagaaattctcaatatggtttattagtggcaatgtaaatcgatgacaaccaaaaaccaaataaacatatctaccaaatgaataaattcttaactactattaattgcatataatatatccagcagatgttttaaaagtcaacaatattaattccctttgtagattaattgtaaaaaaataactgttttgagtctatctccatcagtacttgaaagtacaaatatacattaaataagattataaagactgtaatacatacaacaaaaaagtctataaaacaaagataactttaaaagcattgctcaatttactttgtagcttttctatataaaatattttaaaaccgtacctattttctggatcatacatgaaagttcacatccagatgtctttttaaatcaaattcttattctttcttcattgtcaaaatcttaattttcattcctgggtggatttttcttccttggcaattctttttgttaccccactaaaatatttctcacggaaggaattatgaccttggtatggcagaaaatgatcacttagcagatgtgaatactggtcccgattctcaaatttcttcaccttttccattgtgatcaagcgccttgatgtgtgactggaaagcttctgctcgcagttgctaacgagttccaggcaaggtgccaaggcaccatctcttcagtgtattctggcgtatacaccggtaaccaatagactagtcttccacctaaaacgagggtctcagctgcgaagtttaacaggtcaagaaacatatcactcagatgataactcaaggaaacaggaacatggctttctggacatttttcccatttttctatcccctttggtatctccttctgtgaacctgttcttcttgtagattctctgataccatatggaggatcagtaatgattgcatcaaaatatgtgcccttcctccaggaaggtttagatgcatctgaaaccaggacatca

SEQ ID NO: 341831 - DNA, 1000 bp, Homo Sapiens; identical to SEQ ID NO: 160031

SEQ ID NO: 341832 - DNA, 1000 bp, Homo Sapiens; identical to SEQ ID NO: 160032

SEQ ID NO: 341833 - DNA, 1000 bp, Homo Sapiens; identical to SEQ ID NO: 160033

SEQ ID NO: 341834 - DNA, 1000 bp, Homo Sapiens
cgcatgcacgcgtacgtaagcttggatcctctagagcggccgccctttttttttttttttgggagaggatgggtttttttaggtccacccagtttttttccttcctcatcttcctctgagggcagcagcagcagcaggctaaggtttggatttgtggttataatgctgtgtgacaggatcatggggagttgtctggaaacatttctcctgggagtgtgctgtcagctcgttttcatagtgcacatgaagggaaacattctgctctatacacatgcctttatccttatataggtacaggtgatgtctacattttcctttgggatggatgtggcctacctaggctaagatcacgctatgacatttagtctctttggagagcaagtctgtgttgattccagcaggatggggcagcaggggctggttgctaggatgtctgaaaacagaggatactactggagtggaggagtggaagcagcccagcaggcccactggtagccatgagtgtgaggatagcttatcggtagcggcaggccaaagcattgacattcttgaccacaaaaaagcccatggtgactggagggatgaccaatgtccggccggcccgaagggggcggggcttcaattctgggagggtcccgtcgtccaccatcactaagggctggccattcagttgcactgacttggactttaggccctcctgcccatagggctgcagcaggtactggtgaaccagcttgtctctgagagtcccagccagcttgattttctttcttgatcgatgcaagttgatgataaaaagtgtaatggacccacgaacgtagttgtggttgtggtggtttgtgcagtgagcataaatccttagtttgtcccggatcactcggccaggccgtggcttccgctggagcccagccacatgcacagccaagactttggggccgatcaggcgcttgtagaggagagagagccagtagtctggtaatgggttaaaattctggtccac

SEQ ID NO: 341835 - DNA, 1000 bp, Homo Sapiens; identical to SEQ ID NO: 160035

SEQ ID NO: 341836 - DNA, 1000 bp, Homo Sapiens
tttgcaaataaagtcaatcattttattattatatatttaggaacaaagttgaaatgttatctcctcaaataaacaatttttaaataactctgatatcagtaatttggaaatacagtcctaaatgagttttaatttccattgaaggctaaatgtccttaatagaagacttgaaatcaataaatatagtaagagaaaaaaggaagaaactttcagagaatttctgaaactttgtgggtcaatagaagttagcagttaattttctacaaatcatcctcagggtaaagtgagtcatattctgtttccgcagggtgctctggtctgacctgtttggctccccccaggtggtgttgctgtccttctccaattgtgagtctgttgaatgggattatcttcatagtggttttcttcatggaataccaccgggttttccaagtggcccaaataatgccattatcataaccattaggagtagatgcttttgagtaagtgccaccttggtaataaactccattgagatggccagcgtgacacttgttcatccaccaaccagatccatcctgttcagcacagttgccttcaaacttatcattgtcattgtcccaggtactgaactgcatgccattatgggatgtgaaaaacttgtcactaggatcatcgccaaaatcaaagccatcaaaggcatctccagcatccccaccagcgaagtaggcatatgttaggcggtacttgtcagcttcaggtcccaccttgaacatggcatagtctgcagtactggttctgccattccagtcttccagttccactcttaatgcatatgggatggcagactgtgtgcttatcaaatgaatcttctcatttcccagccaaaattctgttgtgccagtaggagacagatgtccaaatccttctttatattgaatccagtttttcttgaaatctacactgccatcaagtctcttctgaaacacagtccatccatttccagacccatcgatttcac

SEQ ID NO: 341837 - DNA, 1000 bp, Homo Sapiens
ttttttttttttttttttttttttggtgctttttcttttctcttttcaacctccaggtgaattcctgatgcggagatgagaccatgccctgaggggagtgatgaaggtgctagtacatgcagggctgtgcagggggaggcccactagctgtgccacgcagcccctccccgcttcccaccggctctggctcccctctccctggcgggtggagtgacgtctggcagcctgcaagcctggtccaggtgtgcggtggaaagatggagaggaatgtgcctctgggggaagaccttgccttcgccatgtcggcgccagcttgctcctcgtcctctgtgcctgagcttcctctgtgtccggctcctctgctaacctctgtctttcccattctgcatcttctcttcttcttcctctgcaccttcctctgctgaatggagctccttcaccagggatgacatggtgttggtgatggagtcagctgccaccagcaggtcattgcggaggtttctcctcgtaccttgtgcgaaggcctcctgcacgtctcccccgactccgctcagcgagtcctgcggacagtgggtgggggtggagccggcagacgtggagcgcactggcatgggcattggccggccgcctccatgggtgggcgatgtatgtggtgaccctgtggcctgagctgcctgcttttgctcttcctccttcagcaacttcatcagctcttccagctggaccatcagctcccgcctgctctcctgcagggccgacatcctctgctccagttcatccttcctttgcctcagcagccgcagctctgccagcagcgtggggttctgctgtgccttctcaggggtgggctgggaggcctgctcgtgttccaggcggagacgctgaatctcctgcaggatctctctgtttttgttttccagttctgcaataagctgtctttgttgtttgttggcatcaaagttaaagctcaagtcagtgggaggacgagtcacgtttcctg

SEQ ID NO: 341838 - DNA, 1000 bp, Homo Sapiens
tttttttttttttttttttttttttttttttttttttttttttttttttttttttttttttttttttttttttatttatttaataatcatttattgaaaacctactatgagcaaggcactgtgcaaagccttggggatacagagataatgaagacaccgttctgctctcaaggagctcacattctaaatgggacagacaagttttcaacaattataatacagtacaataaatgtgagaatatacgtattcatggaatactgcgggatcataaaggacagacacctaactcagcttagaagaactttaaagaaagctgagtataaaagaatgaagaggcattagtagagtggatgagcagggtggtgacagtgaagggcattccacgcacagcaaacagcacgtgcaaaggtgcagaggtgtgcgagagcctggtacatctgggaatggtgagtgatccactatggctgaagagcagtgactgtgcaagagttgggagagctaaggctgagaggtaagcaagggccagatcataaagagtcttggatgccatgctgaacaactaggacttgatcctgaagtccctgggaatccactggagaaatttaagcagggaagtgacatgctcacatgtgcaattcagaaagaccattcttgtgtcagtataaaagaaagacggtggaggataagacaggaagcaaggagaccagttaagactatggcaggagttcaggcaagaaacaacaaggacctagactaagagggatgctttgggaaaaggagggaaagaagaggtgaatcacatttactgaaggcctagttgcttaggaggttagaactgacagattgtgaaggccgagacgatgggatgtggggagtgagagagggaagagtttggaagggctgccgagtttccggcttgagcaacggggtggatggcggaggtcaggaatacaggaggaggagcagttttggtggtgggggaagaggggtgatgagttc

SEQ ID NO: 341839 - DNA, 1000 bp, Homo Sapiens
ttttttttttttttttttgaaacggagtttcgctcttgttgcccaggctggagtgaatggtgtgacctcggctcactgcaacgtctgcctcctatattcaagcaagtctcctgcgtcagcctcctgaatagctaggattacaggagcatgccaccacaccccgctaatttttgtatttttagtagagacggggtttgatcatattggtcagaatggtctctaactcctgacctcggcctcccaaagtgctgggattacaggcgtgagccaccatgcccagccaatgccaagtcttttactgttgaagagacacatgtcacataccaggcatatgagacgatgctcctcagtgaccatgatgaatcaggataaaactaagggcattttgtaactatatttctaaatgtgatagaggaaaacatatttcaaatcataaacatggccaaaatttttctcttcttactaatgtgacgtgtcattctcatacatctcacagtcatttatggcttttggtcatatttatcactatggtatattacacacttgctgacagcaggtatggtactgctggcttttgggaagaaggcactcagaggtacatgagataactgttggtattatgactgaatgaaaaattagggttgcggctgggcatgatggctcatatctgtaatcccagcattttgggaggccgaggcaggcgaatcatgaggtctggagttcaagaccagcctggccaacatggtgaaaccccgtctccactaaaaaatacaaaaaactagcctggcgtggtggtgcatgcctgtagtcccagccactcaggaggccgaagcaggagagttgcttgaaccctggaggcagaggttgcagcgacctgagatcacgccactgcactccagcctgggtgacagagtgagatttttttatggcttcggtccatattcctgatactcataggccttgtgtccaatgtcacctctgatgttcatattaaaagatg

SEQ ID NO: 341840 - DNA, 1000 bp, Homo Sapiens
ttttttttttttttttttttttttttggctttcccatgtttattcatcaaaactaggcataatggccatgctgagcttctgatcagctgaaatacccagtgttaccatgatgagttcatgttagcccagccataaatgtttaggaaacttcaaaacagcctagactgcctccttccccactagctctgaggagcccaagggaagccaggactaaagagatccccaaggccccagccaaacactttccaagcgcccagctgaccatcagcctgagcccatccctgaggctccgggtgcggggagcagggagtgagggcactgagacagaatggccttcaagctctgctcagccaaagccagcaggctgacattggaagctgtcgagggatgcacaaaaacccagcatgggccaggtgtggaggctcatgcctgcaatcccggcactttgggaggtcaaggcgggcagatcacgaggtcaagagatcgagaccatcctggccaacatggtgaaaccccgtctgtaccaaaaatacaaaaaattagccaggcatggtggcacgcacctgtagtcccagctactcaggaggctgaagcaggggaatcgcttgaacccaggaggcagagcttgcagtaagccaagatcacgccactgcattccagcctggcaacagggcaacactccatctcaaaaaaaaaagcccagcacagggcccacagcctggctgcacactaggaagttataatcacctggggagctttaaaacatgccaccactggggctgactgaactggtccaggtgggacacaagcaatggtactgtttaaacaagccccacgtgaactcctagttggcaggcggggaagacagacagaatgtggaagtgcagaatgacactgctgctacaggaggctcaggatggcatcctagaggaagtgtccttgtgtgggacactgcatccgcaggcatacacagcccaggctgcaaggggtggagggagag

SEQ ID NO: 341841 - DNA, 1000 bp, Homo Sapiens
ttttttttttcattattgaacttgcttttattcaacaccattgataaattattcaagtcagaaacaaaaacacagaaggtcataatatacatgagcacaagagcttcatctgagcccactggtaccccagacctcctggagcatcccatgcccactctgggtcggcttgatcctactgagccctatcggaaagtttgtccctgcagcctgagaattgatgaggagtgtgcctggggccagcagcctttggaaatatagctctggcctggtgtggtggctcacacctgtaaatctcaacactttgggtgccaaggcaggaagatcacttgagctcaggagttcaagaccagccctgaccagcatattatctacaaaataaaaaattagctgggcatagtgtcatgtgcatgtagtcccagctacttgggaggctgacatgggaggatcgagcctgggaggcagaggttacagtgagccatgatcaatcgcatcactgcactccagcctggatgacagagcaataccttctctcaaaaacaaaagaaatgaaaaagaaaatatagctgagctcccttagcccaggagcctccctgctggctgggaagccaatattccctatgcagcctgtaacagggaggcagttgcaatctgggatggccaggctcagcctttatcctcaggctagggctcaagacaaggtggtgaagaaagaaatgcccttcaggaagctggtgatggagcaccaagagggtggtcccttggtggatggtcaggggcccaaatgtttcaaggcggccttcagggacttcctcaggaaggtggtgttaggttctagggccatagccaggcccagcctctgggtctcagtgatgttagcctgatacttggtcatcactgtcagcatgagcttggcataggccatggaggtggtggctgccagcccctttttacagagcttctccattaagacactgaacttctcaggggtcatctccacctg

SEQ ID NO: 341842 - DNA, 1000 bp, Homo Sapiens
tttttttttttttttttttttgctggtaaaacatttatttcaaaagttcatttggttttcagatgataaataggaattaagaatgagtatctttcttaggctctaaaaaccagaaataagacacaatttcatacgtgcagacttttgaaatatggagtaacatttaaaataacagataaaagaaaagctctgaatgttactctttattctggtaggtatgatttacccagtattgtttacatgccttgatttagtatcagtgagtatctcctgtatgcaaggcgctcagagccatgattcctagcttctaacatccgatttctaggcctctcatgcagatgccaataaaggatctgtgtacagccctgtgcttacggcctatgtatctattagctcttccccttgggctaacagcactccttgtctggagcttggcttttcccctctgagaagtcacttgctgtgatgtagaagctatgccaaagcacagtaactcattcagcacttaccaataagttggcagcaaatcagagccaaatctttcatcagggggctttaggatttgagcggagggacatctcattgtccttagggaatgataatgccatgagggatttcctctaggagaaaaaggaatatttctgatccatgatcaactgtcactgcagtatgtggttctcaagattgagtcaatttaggggaggcagcaatattgtcagcccactctaggccagggaatatgtgtcttctctgccatacctcaatgtgtctatagaaggtgaattcacataacttaatggctgggtttggttcattaacaaaataatttctttccagcaaatgaagttaatgcagaaatggagagttaatgtatggcaatgttttactgagcagtttaaaagaagcttttaaaaattattcactagaagatttccagaagaaaagaatcattaagtagctaagaactccatcctcaatggctagcacactatttggctca

SEQ ID NO: 341843 - DNA, 1000 bp, Homo Sapiens
gacgcataaaccaattttttttcctcatcgatgttacaaaccacttaaggaaatgacatcattcaagaacattgtgctacgtgtcattttgcttaaagtcagtttctaagaacctttcgatggcatttaaggacttaactgtagttacaattgagtgcttactatgtgtcttgcacctctgaatatttaacgtattacctcatttaatcttcacaacaacaacttatgtaggtagtagtataatctcgattttactgaagaggaaacaaaggttaatctggccacggtcaccttactagtgagtggttggaacagatatttgagaacaggcaacatggcttcaaaatctaagctcttgcctacccactaactactccctttcaacgaaagactagtaggttatttgaacctgaataccctgaaagtaacaagcaaattttataattttctttctgttgtcagcatattacaaattgcaatgaaaattctttgttttcccaccaattatttagaagattgtgttttcagaacttttatgaaagcatcttttggaacttcaacgttgccaattttcctcagcttttttttcccttctgcttgtctcttcaaaagcttcatttttcgggtaatatcaccaccacaacattttgccaaaacgtttttcctataggctttcactgtttctctcgcaatgattttacttccaatagcagcttgaattgctatctcaaacagttgcctaggaagagaatccttcagccgttcacatatggctttgccaattgaatgagctttgtctttgtgtacaacagttactagctcctctacagtatttccattcagtagaatatccatttttacaagttctgcagtctggtagcctgcatcttcgtaatcaaaactagcatatccagaagatagggatttcaaagagtcataaaaatctaccacaatttcattcaaaggaaagagatatttaagcataactctattttgatca

SEQ ID NO: 341844 - DNA, 1000 bp, Homo Sapiens
ttttttttttttttttgggagggaagacatttactttaggtataaaggtttactattattaacaagttatcactattatttacatgtttataaaatggaaataaaaatgacatacacgtttggtgccaaaagtggcacatccaaactaatatcagtataaaaataaattttcaagctatgtgtttttaaaataaaggtcattgaaacagtaagggggaaaaaatctgcatctggcatgtgttgaaatgcaatcatcatcacagcaaagcagccctggggcaacaaaaccagtgcctgctggaagaactgtccccacgcgctcttgcaagaacccaagcaaacaaacaaaaaaacaaatacaccagtgatgttcctgagctacagaagtttagggcatccaaactgttgtgaattcctgctaaagaggaggccctgtgggatctgagctgatgaactctcctgagtgctcagctagcgtggcaccaggacctggcactacactctgagaggacgctaagcctacctgtgaaacacaaatcctctgctaacacaaaacagcgcacgagtcctctctgtcaatcaccaatcccttgcaagtctcctggctgcagataaacagggacaagggctgaggacagacagaagccactgggtttgggagaccctgtgcccatcagacatgccctttggtggtttcggcagagatccccaatgtttcgttcattcgtagagacatgcttgttcacacctggcagcagacctcattggttaacacagctgtggccccagcagggaaagcaaagccagcccagcaaaccctctgtccaccccacatggtgttttggccttcagtggctaactttcctccttgtttcccatagagctgggccaggactgcatgcctgctggaagtggcatgctgggttagtgagcgtgctgagtgagccaactcccactctgcccgctgcagcacagaaggatgcctgcccatgcacaaagt

SEQ ID NO: 341845 - DNA, 1000 bp, Homo Sapiens
tttttttttttttttttttttttcgtacatcagtaaacatgtggcctaattaccagccccttgttgccacttcaaaacagtacatggcccctggcccataactctttcctttattccatggactctctcagagtaaatgtctaagaatgcggccaaaaataagaataaccacattctagaagtcaaggggatcacaagagggcttttggctctgtgccttttttactatcgaggatagaagtatattttaaaatatctgtaggagagaattcagtgaacaaagtaccttaatatgtcagtatttcttcaagttcttcaaagacatgaaaaaataataataccttataataaatacacttcaactctccgacacaaatgaccacttaatcattctcccatcagctcccacacctccaccctcccagctctcaaaggcccccatgtattcttaacagaaaacaaaacaagacagtggtgatacccgtgtagctcatgtagttggtgaacggagcccctgggaagcgagtgaagccacaggtgtcactagtgggctctggttcccggcacagctcactcttgggagtaggggcggtgtcggcacagaggtctcccgtttccatggatggcactgtctccttgcaggggtcattgcaggattctctttcactgactcctttaaagacatggtagagtcccagaacatgtcccacttcatggatcatggtgtcggtgtggccaggcatcccataatatgctgggctgaggacaatgccacccaggtgagtgacagcgtccttgtcccaaggccaggtggcagcacctgcaaggtcttcccgcactgagctggcaaagtagatgttgaggaagtgagtactgttcagctgcagggcctccttcagctccttcacactcatgtatgccctcttgggtgagtcagggtcaaagcaggtcttgcgcacatcagccacctgggggtcgcagcagtctccgtcgtcaaagt

SEQ ID NO: 341846 - DNA, 1000 bp, Homo Sapiens
ttttttttttttttttttttttttagagtgggctggggccacgggacatttatttgtagccatcaagtgcctgcccacctgggggagggttgagactggcctgcaggtggccaacagatggggcagtggaagatactggctaccagccctctgcccatggccctttcctagttgggctgggggctgtcctgggtgggagtgtgcaggggctggaggagagaccctcctggccccagcaacccatccccctcagctcctcaccagggctcagcaccaagcttgggggtgggggctgctgctgcaggactgcagggagagactgggagaggctgaggcgtggctggttgggatttggcacagcagcctggactgggctgggcaaggaggccctgggggaggtcaccggacactcagggagactgaaccatgcgcttgtgggtgtcgaagacataacgcttgaaagtcaggctgagcaccacatgctgtgagggctcgctccgctcggcgctctcctcctgcctggtggcctccccacggccagcccgggcccgcttcttgagggcgggtgtcaggatcttcttggactcggggctgaggccacctgggatgtggatcttgaacttgccgctctggccgaaggcactgtcgatgatgcccagttccccagtggacaagtgcaccttgagccccacgaagagctggatgttggtttcctttttgaacagggagcggccgatcacactgtagtcatccatcgcccgctccacaaggccatgcttgtgcttcagcttgtacaccttcagcctgggcaggaagctgtcggcgtagttcctgtcctctagcccgtggagcaggatgccatggaaggctagccggcacgtgttggtgtgaatgtccgcatctagcctggagccaatcaccaggcacagccgagggcaggtgacgggcttctcaaactccaccagggcccactgctgccgaggacaatggccctctgtgg

SEQ ID NO: 341847 - DNA, 1000 bp, Homo Sapiens; identical to SEQ ID NO: 160039

SEQ ID NO: 341848 - DNA, 1000 bp, Homo Sapiens
ttttttttttttttttttttttttttttttttttttttttttttttttttttttttttttttttttttaaagtctctttttttttttttatttttcacaaaggatttgctgtaagtcttcaagtcattttgtccaatccaaaagctgtatttaagcgtcgtggatcccagccagggatgcaagaatctgactttctcaaacagataacaacagtcgaagaactggaaccgaaagcaaataactgcactaaggtattcattacacttgtgctgcccgacctcgagtgtcaccatgaagagtgcgctacccaagctatttccttccccttcaggttctcgtgtggcacactcggacagagaaggttaatctagccaacgagccaaagtaccacctggacacagtgaaaattgaggtataaattgaagcagcaactggtgcagtttgtccagccagtggatccatatggaagaggatgtttggagtttaggctacagagcattcaggtattgtttgttttacttcagtacagcagcctttcttgtcatctgatggacatctgtttaaatggagcttgtcagttaccataagctaattggatggttggtacaaaatgtatgttttgtcttcatttgttctgcatgttttctctacaacaactaaattggaagatttttttgtacagtgccgatactgcaagataccactcttgagtatatattttttctttttctccaatttgcccttataattggtagacttgaacaggttggtagacttgaacaggtttttaaaacagacaagtattttgtcagctaaacgttcctgatgattcctgactttgcaatactaagtaatttttggaaggttagtggcagtatacatcataggaaataaaaacccacaaatgaaaaggtctatggagtcatgtttaatgtagggaaataacattttgtcaatactaggcaccataaaatgtaaacacaattactgtcataaacct

SEQ ID NO: 341849 - DNA, 1000 bp, Homo Sapiens
ttttttttttttttttttttttttttttttttttttacttgaaagagaacatgtttatttacatcactatttcctttttacaatgcctccaccttttgaataataaaattttccaggaaatcaggtcattttaaattattaaggtattttaacaaatacaattttcaccctatgatttttatttacatgagttttcaagagttttaaatagttcttttgaaactgcacaatataaccagaaggcctgactcagaccctgcatcttttccaaaaactttcagtctaggaaattatgtttataatcaaatccttgcactttggatcttttccgatgaggattttattaacacctctaaaatatgaacctgcttcataaatgatccatattttggcagcaagctgaacctatttgacacttcttgatagtaagcaaagatatttttgataccttaattaaactgctttgattaaaactttctggaagttttccgtatcagtcatacaactccctatgttgttgtgtatgtgttctgagtacacactgaatttatgagaatgatttatttccggtctggccagctctgaaagagacacatgggggattcggaactttatggcacaggcactggtgcatctgctctctttgtccagtcacacttgggatgcttaattttcctgatattatacatgcaaatcacttacttttcatagaatttaccattcatcaaatgactttcaacaataacaatggtctgacattctttcatgtcgtactgagatttcagatatttattagagaaactataagacagattttcctaatatttttgaagtatgagttcctctgaatagttggtataacatccattaaaaaatagaaaaggttaactttttaccatgatcaaagctagagttcacaatgaaacacctgcatagctctgcccaacatctctgtaacaacagccaagggccggtcttgaacatcatgcagcagcaatag

SEQ ID NO: 341850 - DNA, 1000 bp, Homo Sapiens; identical to SEQ ID NO: 160040

SEQ ID NO: 341851 - DNA, 1000 bp, Homo Sapiens
atgtcaagaaggcctcatgtttcttggacccatcctcctcattttctcatcccaggcttctccgagatactgtttatgctgaggaataagcatattctggcttactgttcacagtggagggagtttctccccttctagataagtttttatcccaccagtgttctgcttccccagtagagactgtgttaagaaaagaggcaaatttgctttctcagactgcacagagcatctcattattttgtgaagccccatggccacctatttctgagacatggggcatggcggaagccagagttattcttggctgtagattttattcatccttttccaccttgatttcaatgaatgagttcaagtcaggacagcaggttttgtggggttggtcaaaagatggggagccaggtgcattctcatcccctccctcatcttcctcttcttggaaattaggattgtaaagttctggtggaaggagctgggcttcagcagaaggcagtctgtctgagggaggcccatacacacggttggctttggtgccatgcttagagttagcatccaggtggtagcagagctctgtgaggcgctgggcccggaaacggggagggcgggccacccacacacttggctcgttaagactgtcctcttcatctgacatcagttcctctgtcacatcattccacagacgttggtcctcaggtccaaaatgcctcatgatactggatcggttggcaaaaagccgatatcggcgacttcgaagtttcttctcctctttttccttcaggcctttaaaggggttcagggagttgcggtactcacgcctcttagtaaggaagtaggccacacaggctccttttagctccttatcagtgtaattgtggggactggtcaccagctcttgcttgagcttttccagaagaaacttcactactgaaatattccaagaggacttgatgctttcagacccattgaatctcttgtcattggtgatgtggttatgcacatt

SEQ ID NO: 341852 - DNA, 1000 bp, Homo Sapiens
tttttttttttttttttctgttaatggggcaacgtttttatttctgtacatttacatacaaattttccccaaaggtacaacagatgcgacaccatgcagacacgcagctgtgaacgacagttcagaactcagcgtaagcttgtgctatgaacgagcaccgtcagagaattcccacccacacgtacagaaacacagtttttatattacaacctcaaggacagggagggaagtgttcgccgctagacatgacacaccatactgcttttccaaaacacacgggacatgaaagcgaggtggtgccttctagacgagaggacagctgtagtgtggacctcccccgcacatgcgatacctcgggccgggcggtgtgacctcacaggcccacttatggcacttgcagtttgggattgctcatttggctctaggaagcggtggtgtctgagtgtgatacttcccttacgaggtttgtttttgttttctttctgttctgtagccaaaccaatttaccagcccgtcttccagatgcaggtgatcttactctcagtaaacaaaaacatgtaacctttttcctgtttctcttgggtggtaataattttagggcatttgataagagtttgacttcagaaaaagaacaaagtgaagaaatgttcagctccatctcaggtgttcacatttgtgcataacttttattgaaaggctgacagggtaggctagcggaacggaggggtgtgtggaggagagtagcagggggtgggagggtcaagttgaaacagtgggtgcctgcgaagggtctccctattagccaggaagggaacagcacagaggggttcaagcgtgacagacggtgctgggaagtgggcagccgtagcagcctcccctgctgagcccggcgggcccagatgcgtatcaggcttgggtgggtcctgccaccttgctcacttggtaccggatttcccggggctgtgcccacagggaagtgttgctgctctggcaacatttc

SEQ ID NO: 341853 - DNA, 1000 bp, Homo Sapiens; identical to SEQ ID NO: 160041

SEQ ID NO: 341854 - DNA, 1000 bp, Homo Sapiens
ttttttttttttttttttcaggatgtaaggagcctttcatttttttttatacacagaaattttggtctattctttaagttaggaaattcaactacagactttaaattattacgtatctgtgatctttctcattaagtttttttgttcatctttataacaggcagataaaaatgtaaaacatatttatgaactgaacacagttgaccaagccattccaagtaatataatgctttataaagaggggcttcccaatgagacagggcccccagccttgaagactgcaaaaacaagagcaaaagattccaggtcatggtaccccgtttctgaactccacagcacagcacaaaggtgacctagggactaaacaatagacatttacattaggcaactttatacagcagcagtgagggtttgcttttaatatctattggccattggtcctatcggtgtgtctacgacagagagtgagaagaagccggtgagtgcagcagcacgcagctccaatttcaacgtctcaaatttgatttctcattgaagaacacaaagaccctcaacaaatggagttgccctttttcttattatcgtttaaacaaggacatcagggaacagtttacaaatgggtgacattctcaatgtgccctttagaaaaaagggatggctttgagttatctgcagctggcattttaaagtgggattttcttttctaaccgaaattcttttgcccaagatttgactgcttctgctcaggggtgacatggcattcatgggaatagtggggatgacgcctgctcctgtttggttttgtgtggatgccggtggaggtgagacaagccttctgagggtgccagtgcacgttggtggtttccattccgatcctctgtccctcaggtcccaactgtctcccagtggctgagccccaggcccaaacacctccctgcaaaacgtgacacctgcaagtgtggaaggcaagggtcccccatggcatcactgtgtggaccta

SEQ ID NO: 341855 - DNA, 1000 bp, Homo Sapiens
tgcacttgggtttttaaagtttatttcctttgtggatacaacattatttttacaaaaatgcaaattgggaggaaaaactaaggctagagaatatatcttctacttcttggcaaagcatgtttactattggtcaatgttattatttgactctatattgccaaagggataatcggggagaaggtcataggaattttcatccttctttaatagcagacattaaagatgtctcctattataaggagttatgtgaggtcagctaaaactaattatttgaggtcatacaaatgactcaaaattcttagagaaaccatgggtttggagaggaatcctcatatatatttcagaagaggagaaaaaataagatagaaataagatcttgtatttttttaaagatttctgactttcatttttttctcaggcctgctcctactatgtccttttccttctctcatatatttcagtcgtctggagttctcagaataaggaatccattatcaatgacctatcccatgaacattttttttgagaacctgtgtaagactatatagacatgaatatttgatgacctgacacctcaccgttcaaacctagatttgggttgtataaatatcaactcaaggctgtaagagcctcccatggtctaatgtttcaagagtaaagaagaatagacaaacacccatgttggaatcatctgttgcagaaaagaacacaaagatagttttattaatttagaacaaattttgagaactttacatagacagaaatcttctatctcctttttttctaattttggggaatgtcttccactagtggtcgctaaaaatgtagaaatatcatagggagtgcaaattacattgtctctttacctgccacaatctggcagcactcatcatgtagcaaatgcccaaataatagactacagattatagtgacttcaccctaggttaacattatttctaggtaaggtactagtatatctgaattgaaaagtagggcagct

SEQ ID NO: 341856 - DNA, 1000 bp, Homo Sapiens
ttttttttttttttttttttttttttttttttttttttttttttttttttaaccgtagtaaacattttatttacaaatttaaggcgtcctaagtgcctttgagccacgacctctggggcgagtcagagaaacagtttagtcaaacacctcacagtcgaaccagcctgcttccggagagaagtgttcggctggctagcaggacactgagactcccctctgctttgggcagtgtccgctgcagccagtcggagcagcgtggggcgaagcgtgaatgtcgggaggtaggctccacgctgcgtctcctgccctaccaagtcgccaacatacagtaagcacaaaacccagcccatggttgggaggctgcacgcaaggcccggatcccctccgccctagtacagtctataagcagccaagcgcgccttgggctggctcggggcttttgggagcgctgctggctgtgggctgtgttgcagggagaagctccgaggcgccgccgccgccaaggctgctggcgcaacccgcactggtgctgctgctactaagactgctggcgctgctgaagctgaaactattgccgccgccgccgctgctcccaccactcccagcactgctggcggtaatgagggcgccagtgaccggggccttaataactgttgtttggtgcagagaacgctcactcccctcagtccgctccgtgtcgctgggggccatgtccagggactcggagtcgctgctctcgctctcagcctcgccttcagaacggctggggctcctctcgtcctgctcgccatccgcagccggggctccacctgatggcttctcgccagcctccttgtccttgtccttttgggcctgggcctccttggagtgccgccacttcatccgccggttctggaaccacaccttcacctgtgcgtccgtgaggcccagcatcgccgccagctgctttcggtccggcttggtcacgtacttctgaatctcaaaccttttctccaggcct

SEQ ID NO: 341857 - DNA, 1000 bp, Homo Sapiens
gacccacactttcattttctttatttttcattgataccgtatgaatacaaagtttctagaaagctacaaaatgtctaccactttatcaagaaggcatcaaaatgtgtcactttgcaaagacatgaaaacacctgcaggaactgacacaaaaatagcatttttagagtgatgaaataattgcacttaactgtcatgggtattaaagttatcacacatatgtaccgcaaaagctagaatacatttttttttttttacaaagcactttataaaaaaattctctgcacacaaatcctataattttcatataactatcatactaaagataaattcactttaaagccaacacttagaacattttaaaacaaaaaggtaccagtacctaaacacagacgttaacaaatacaagaatactgtactgccaagaggtttaatcaaatgccttttgaaagtttctgcaaataggttaagaaaacatgtgtgagaatttgcccacgcccacccccatctctccaatctacccaagaggaacccagttacccgaaggcaggttccacagcccactcccagcagcagtacaatatcaaaggaaccactgaccagatgaaacgcttacatcacaagcccattttatacacgtgacacaaagacacagaccgtgagaatcccattaagtcatttagaatgtgaacaaacacacgtggcgaaaaccgatttacataaaatttaagtgtattattaaagaattaaaggctattcaggtttcttttttaaatgttacaaattttttttttgtcattttcaggcacatactgtttttgtttttactttttttttccttgtctgcagtcatgagcctattgaaaaaggcctacagaagtaaatctttcaaggaggtaatagggagatgtatttttttttaaagaagtgcagttgatatctaatttacacagtgaaactaatgatagaaaataactaatgaaaaaaaatcagagactggttt

SEQ ID NO: 341858 - DNA, 1000 bp, Homo Sapiens
ttttttttttttttttttttttttttttttttttttttttttttttttttgagttttgtgcaaatgatggggctttgcattttttattaacattttcctctcacgtggtttacatcaatttataataatctacataagttgaaacagaacatagacaaaaaaatatatccttaccaacttattaaagtcagatattcatgaagggtcccatcctacctgtgtatcagcagaaactggcagccatcagccattgcccagcaagaacaggcagacctggcgtttcttagcctgactcctgctgggcacagcccaccctgctgggcacagtgactggaggttccaggctgcacagtccctggctcctgactcctgccgggcgcagtgactggaggtttcgggctgcatggtccccggctcacaggagaccctgctgggtgtttccttggtgcagtttagtccaggtctggcacctgaccctccccactctgggggtgggatttataaatatgagcctttgcatttctcagcctttgcagccttcccatagcctgttctcacgttgcctcagcgagcttggggctgtggggctccctgaggctgagacgcgaaggtgcccagtctgggccgtgactcactctgccccttcctgtccatcactttggaagcaagcaggagccttctgtgccacacaccgacactcggatgccaggcagggaccttaggaagggccaggcactgcatctttagactcaagttcaccgcctttcccagggagcaagggctccttgctaagctgctcacaggcagccgatggtcagtacttccttcctcttgggcatgtctttcctccgtgcacagagtatttactgttctgcccaaggccacaggagtaaacaggctcaaaaagggcctctcaccgcgcacgcgctgcagcgttagggccggcaaacccttctttaagactcagccctgagcacaagcaatgggaactgagctcccc

SEQ ID NO: 341859 - DNA, 1000 bp, Homo Sapiens
tttttttttttttttttttttttttttttgaaatttttattctttttattttgcagtgaaagaacacgaaatatcttttcaaaatggtaaagtgatcactttcaatgaatgatgtaataggaaaagagaattaaacactgtaattatggcttacacaattacacagaacaatatgtgcaaacttttgaaaatactgtgactaacacttcaccgacaaacaataacctcaatataactaagtttcattatttatcacagttacataaaatacaagagcctatgaacaagctgttattaacaataaatgtagttttgcctgaaattcttatctatatgcaggcctcttaagcatccaagttttaaattctactgcattgttattgcaaaatgaagcaggcacaacaaaattaaatccactagctaaaggactaagtaaacaaaaatagaaaaagaaaaacaacaacagcgaaaacccttgggttgtttcccaagattttttttccaaacaaatattgatctcacttagcatttctgatcatttcatagccacagattaatagctacatgacaaaaagacttcagaaggattaagctacacaacactatactagtgttttaaatcatttaccacagtgtacatttcttgaaaacattctactactaaaactcaaggtcaaattaattagtttttgaacttttcttatatttttgaaacatatgttttaactaacactacaagaaaaatacagaacacaaggcttcttataccttgagtaactatatctagggcagttaatttcagggccatgtatactctgctctaacgatcaatgtcttctactaatgcctcaaggtttttgcaacaagctttaacttcctcaattgcagccatccaattatcataaataattttgtcataaattgcatcattaacttctctaactaccccctcctgctgagattccagtgcatcacctgagaaaaataatactgatcttgg

SEQ ID NO: 341860 - DNA, 1000 bp, Homo Sapiens
gtttactccaacactttggtaggctccttctcccacgtctaggacctgatgactttctcccctcgccctcgcggttgtcaccgcccgcagaagtccgcagagcctctagcttgtctctacctgggcacttctgaattcgcccacgccgggtctgattcggcctgcacacgggagtgtcctcttcgtattaaaatatggaatgcttttcttcaaatatccactttttttttggagggggagacggggagcagatgcctcaaagggggtcaaagagaggggaaggaaattgcacataaataaaccggatgattccaaatgcaaggagtcctcagagcggagcgcggacggcttttccggagtcctgggtcgcatctggcgccttggcccctgctcactcgcgctctcctcctcctccttctcctcctcctcactgcttgagctccagggcccagacgtgctgcggccagcccgtccggcctttggttttcttgtcgttgctgctcactgtgcttttcaagatttcgttcagctccttcttcctcttctcctctttcacgtcggtcttcttgatctctgccttgaaggcctccgcctcgccgttctggtcgtccttggccagcaggtccatgaggtaggcgatgtagctggtggccaggcgcagggtcttgattttggagagtttggtgtcggcgggtacgttggggatgcactcgcgcagttcggcgaaggcgctgttgatgctctgagtcctgcgccgctccttgcggttggcggtgcctcggcgcttcaccgggcgcggcccccccaggcccgggggcccggcgcccggcggcacccccccgtaatgggagtggtccaggccggcggcgccgctggcatactcggggctgtaggacagggccatgctgtagtcggggggcgacatctccgggtggccaatgagccagccatggaagtaggggttctcctcgtggctgcagcggctggcggcggcggcggc

SEQ ID NO: 341861 - DNA, 1000 bp, Homo Sapiens
taagagttaggattttaattattttgcagggtaccactgaatggcattcagtacattcacaatggtgtgcaaccatcaccatattttcagaacattttcctcatctcaaaaggaaacctcatgccaattaagcagtcactccccattaaaatattagttatgaagattgtagcattattttaaaaactcatgatatacattgattgaaaaaatcagtatataaaattgtgcattatgatgtaagtagtaaagaagcatataaaaaatctgaaaaagtatataaaaagaatagcaattgcatttctcagactctctttacattgtaaaaatcattttcatactttcaaaagaaaagcaaaaagtacacaaacaacaacgaacgtaaaacaccatgacaaagcccagatcgttaaacccagatctcaggaacacagaatcatatatgatgtttacactctccaaggtcagagagtccagcggcattgggagctgccttgtgttctgcagcctcacggacagacaggaggtccagtgccactgctctgttcttctggttttcctcctaaacatgttttgggttcagcaaccatttctttcatcttttaaacacaggtacctttggggctggccttctcaaggaagccccagcttcttgtgattgagaataaagtgtgcaatcgctatgagtatctgaatggaagaatcaaatccactgagctctgtgctaggcatttggctggaggcactgacagttgcaaggtaagaaaaggtcaagagaccaaagttagtcttgtgctctcccttcttggtctcagccccttagacttcagtcccaaagaggcaaattctagaaggatttgtcaacgttagaccccagtctaagtgttgtttagaaactgcctagatctgtccctgaatgcgtattcagatcatctaaggggatgtcttggggcttgagttccagatcggtagcaagggagttttaagtgccgtaactacc

SEQ ID NO: 341862 - DNA, 1000 bp, Homo Sapiens
tttttttttttaaaaagaaataaaatgttttactcatttacacaaatacacacactgaagtccaccctgggagctggtaaaacaatttcagtctcagacccgtctgttttccagggtcctccgagcctgggcttcctcaagagcgtggcccaagggccccacagcccagatccggcagccccaccaccttcactgaggaggctccgaagctccgttcccgctgctccttacagacaggggaggcagatatacacaaacgcgcctcggcccagcttggggctggcgggggaggctgtgtcttcaaacctttgcccccagttgggtcagtagaaccaccagtgtcctccccttctacctcccagctccactttggaggctgaggaagcgagaggttttctaggcagatttggagccctggagattgagttcacagtgtatgttctgggggcgctggtgcagtcagcggtccagtctccagcctgcaggcgtgcacactggggtggacgatgggtggccccgcaggtgtacacatttgggtggccccggcccctataccccagtgttctctttgatccagtcccgaaacagagggagccttgtgtacacgcctggcttgttcctctgagcgcagccgtctccccagctcaccacaccggcctggaagatccgcccatccgcctccacgctggacaggggtcccccggaatcaccctggcaggagtccacgccgccgctgaggaagcccacgcacatcatgcgcggcgtgatctgctgcggcaggaggttctcgcaggtggtctggttgatgacgcggatctcacccttttgcaggatcagcgcgccagtgcctccatactgggtgtgtccccagcccgtgacccagatggccttgccggcagggaagacatgggaggcgtccggcaggcagatgggccgcaccatggagctgtactctgccggtttctccagctccagcagcgcgatgtcatagtcgaaggtg

SEQ ID NO: 341863 - DNA, 1000 bp, Homo Sapiens; identical to SEQ ID NO: 160048

SEQ ID NO: 341864 - DNA, 1000 bp, Homo Sapiens
ctatatataattatgagtttaatgaagtgagataatttaagatgatcacacaataaaactttacagccaaaatacaaagtcttcatcttattttcctacttcattttttttcatgttcttagtaagtgcatttttctactttattttttgaaaagaacattcatttttgaaaagtttatttcaccaaggaccaatcttttgttgatgttcaaatttaaattgttctttcatatctgtctcataggagaaaaacatgaaaaattgcttctgtggtagtttcttctaggttttcaagtactcttatagtagcaactggttcaaaatactgctttgtttcaaagcatacagtttagatgtatcttcactgatgatgggaacattttcattttgttcctgagctgtcaggtcactttcactgtcagatagtgtacacaggagagtgtcattttcataggttggaaaataatactccagttgatcccacgtctttctatcggggagcagcgaagtgtgtttagtttcttccatgtgagttcttaagtctgctttggatttgaacttcacatggcagccataacatctgcattggtgaacttgcctccgaataaaattgaccagtttcacttgctgatagaaatttaatccaagttctgactttattttgagaagatcaaattcgtgtgcatcctccatgtggacatacaacttctcaattgtttctgcttgcttttcacaaaataagcagactgcagaggcagggtgttcttcccaatcagaccagtcatcttcctgatggtccagcaactcccgatcatcttccaactgaacttcttcccacgattttccaagttccaaataattgatgacataaaatctgtcatattctctgttcttaggattaatcttacgatgctgttttttcctcatgtgatctttaagtgtatttttgtccctgaaggtcttctcacagtacaagcactgcaaattgtcaagctttttc

SEQ ID NO: 341865 - DNA, 1000 bp, Homo Sapiens
tttttttttttttttgaggcttaaatgttactttaatagtatccacaaagaatctggtttagttattaaaatgacttatttttatttaaagaaaaaatctgtgattttactcattgtatatatagaagtgaatttttaaaaaatagtttcttcttttatgtggattctcttaagatttgaagaaccaaactattctttggttttattatacgggaaaaacaacacgcagtctagttaaacaactttgtgatatttatattccattgcacagatatgggttatacaaattagtaacacaagttatttcttaaattccaaacattttctaaaatattattacagcagatgcctaggatattaaaacataaaggtggaaatcattctctaaatagttaaatatatttgacactgaaaatactgcacattttaattagaggaaaattaaaatgtgtgctcaaatgcacctaacaaactagggtagcaggggcaactaacaactacaaataagtcactgtggtccctttttacgtatgcatatatatgattattctctagataatccgtcttcttgaaaatgctaataaaacataaaaatccagataaatgatttaaagaaattgtaattcttcctactacctaaggtgacatgtactattatctatgacttcatacagttactaattcaaatataaaagacaccacacttcgaaagaaaaaaattttaaggtaatggttttaattgaattaatgagatgaaaagatagtaaagccctgtttgctacttacatgaaagaagactttaaaaaataatcactgcacaaaatgtaaagggtggggttatgctgtgatattaattttcctcaataatgtttttcttgactgttcaagaacaaattaaagtttccacggcaaatttgttttcaaaatgccgaattgcgaaacaattgctggcttcacgtttctgaatacctttaatagtttctctgcgttgcagtttgta

SEQ ID NO: 341866 - DNA, 1000 bp, Homo Sapiens
ttttttttttttttttttttttttttttttttttttttttttttttttagccaaaagtacattatttaattccttttgccttgatttgacattaaacccagggctacatttcccaaaactagttcttaggtgtggaatgccttatataaagtataatttgtgaaaatgcaaaaaaatttttactcacaagtggctataaacaaggcaggcactttcataccctttagctttgagaatagatgtgtacacagaaatataaggtgcatgtaaatggttcttctccggtgtgtttaactgattgtcagcgtagccttgtcacagagcatacccagcattccagccccaggaacaaacccaggccccatcaagtggcaaacagacctacctacaccaaatcacacacacgcactcacagctgcagtttgtgcccttgctcctacagactcatgtcctcgggaaccttcacttgggtacccagtgcccgccatcacagctcagcatccacacagggaaattccttgtgctgcttttgtcacttatcatttctccttttgatccaaattgtttgtgtttctgtttgtttttttaactataaactctgtgagctcaggatctatatctgagtcaatgctgtataccccacagcaggctacctattatcggtgcttaataatgtgttcaaatggatgcagagacacagaatgatgtggccggaatgaggtcatgccaagcttctgacatttggtgcaggcctcctggcttctcatctctctagaggactcccacagatactcatgcacctgccgatgagtacaggcctggagcccacaaagcagctcggaagaggaggggaacgagtgggaagtgggagacaggactattagaggtagcaatgaaaagactcaggaagcgaacaaacgtgggtatgtgggcatagaccccagatggcctatccttggtcgcttggtcccttccacaccttgacactttagtgggatct

SEQ ID NO: 341867 - DNA, 1000 bp, Homo Sapiens; identical to SEQ ID NO: 160049

SEQ ID NO: 341868 - DNA, 1000 bp, Homo Sapiens
tttttttacatgcaggcctgtgtgtcactttcaggcccttcctcatttattcataatatgtgtagccacgaggtagcatttcctttggcatcctggagaaacatgtctcacttagggttggacctgttagttaatagttctgcagcttctggtatttgtagtctgcccgttgatttacaaaatgcctcactgtgattgtcgctacagtcaccacattcagagctagaaccatgaaggaaaacagatgcacactgttgaaaggctggtttggagtttcttccgcatgtgtttcatgctgaaatcctgaattgccacttgcacttcgatcccttttcagacgaatgggtcctatgatggaatctgttttccatttatatgaagaaatgtctcgtttgcttctggagacacaaccttgattgcagcgagactggtggtcactgctatcacatatcaaaactttacactgcagatacacagagctcatacttctcaagaatttaaaggcattaaactggaatctcccatagtgtccaaataagggatacaccttacaagtttcatctcgactacatccactcttgattaggtcgtaggttggagatgcaaagtcagaggtgggagaggctctacaggtatcaagaaacaccaccaaatttggatctgaggtgtgcagactaacttgaacaaaaagagtttggttcaaatccacataatatggtgattcaagtatagtcttttcaaatgaattggattcaaaaagagccatgctggtgttatatttgcccagtgcattttgactttgtattacatcatcttctgttatgtatattatctccactgtagaattatgtcccatttcacacttcacaataatctggagttgtttctgacgggtgatcacttcagaagttgaggatgcagaaaaggtgattatattggtgtaagtaattgactgatcttctacctttctgattgtaccacatccattaagagggacaga

SEQ ID NO: 341869 - DNA, 1000 bp, Homo Sapiens; identical to SEQ ID NO: 160050

SEQ ID NO: 341870 - DNA, 1000 bp, Homo Sapiens
tttcctggccctaagggtcattttattagtcactgaacgcacgggcagcgcctggatcctgcgcccgggcagtcctgggcttgaacgtgtgtgtcagccgcgctgccagccatgctgaggctcgggactgagccgcccctttgttgtccccagccccccgctgccacacagccaggctgaccagtacgtcctcagctgggaccagcagctcaacctcgcctatgtgggcgccgtccctcaccgcggcatcaagcaggtccggacccactggctgctggagcttgtcaccaccaggtgggcggcgggcagggtctgggcgtcccagagccccttacagaggcacagatgggaggggagggctgggggctgctcggaagaccccttgttcccccacctcccgccgaagcaccctgttggggagagcgtgtccttgctggctgtgctggggtgagggctgtgtgctggagggagcccctgcatggggcacggtgggcttcctgcaggtctccctgcaggctcagggttggctgcgccgcacctggctcctggtgcacccgtgagcatccctgtgtgtgtctgctggccaggctgggtagggccactgcacctgagggctgagctgaggtctcatcggtcacagcaccctgggccctgacgctggtgcaggtggccaccctgtgagggggaggcacgaggtgtgaggggcacttgggtgtgtggggccttctggaaacacagagaccctcgtgcacttggccagagccgctggctcctaccagcagggtgggcaccgggcaggcctgggcatagggagtcctcttggcaccttggaggctgcatgatggcgggggacccttgttcaaataagatgtcaaccctgagcgtcaggtcaggcccatccctcctgagctgagggacggtgcattggggcccagccagcactgtgggccagcctgtctcggaggcagaggttcttgatttctgagtgtttgggtcctgc

SEQ ID NO: 341871 - DNA, 876 bp, Homo Sapiens
tttcatagaccaacattctttaatcacaaaggcacttgaggacccctacaaacccaaagtctctgccaagagtggccctgcagacgccccacctgccaccctccatccacccatccatccacacactcagagttcatcgtgacctgcagagggctccacactaggcttgatgaagatgccttccatggccttccacgtattgtgcgtgttggcactgggcatgccgtggacctcatgctgcccacggatggggcttccatactgctcacccgtgactgacaggaacacagaggtgcccacatgctggaagcgcacagcagcctcacgctcccagtgctgtccagagcagcgcactgtccataggtccaggtcgtcgccctcgccgtcttccccaaaggcactcacctcctggttgttggacagcggcgacgggaagtggtgcgtgtgcaggttcttgcccgtaagcacatgcgtgagcctcaccgcctgcccgcagcgcaccggggacccgcgcgggcacccgccctccgagccgccgcggatccgccagtagctattggcgtcgtccgacgcctctacgccggtcaccgattgctggccgctgccggatccgtatttgatgtcgtgcgagtgcagccgcacgcggtggtgcgtattgagcagcttcagcaccgacccgcaggtcacgagctccgcaccggtcttggcggcaccaccgcccggcactaacagcgccagcagcagccccaacagcaccggccaggcagccccgccgcggcccgcgctccacatcgccccggcccggctccagcccctcgggcccaggggccgcttccgtccccgccgcggcccaatccggttctgacagcgcccgct

SEQ ID NO: 341872 - DNA, 1000 bp, Homo Sapiens
tttttttttttttttttttttaaaaaaaaaaaaattctgtttattgtaataattaaataagagtaaacattttaaaacatataaaaataactttaaaatatagtaacactttacaaaatatgtatctaattaaaaatacattaacatagcatccctcaaactatacaaatatagaatatatattcatgaaattctttagaaatataacatctattctttgaataaagcttaaaatttgtttataattttcaaactaagaaaagaagtagtgaataatagctccatccaatttataattgtcttaaagagaatgattatgtatcatttcttgcttgtcttttctaatacccagtcaatcacctgtacagcattgttgtttgctgttttcttcatttcttcaaatagaccccttgaagttttaagatcctttagatagaacttagagatttcaaagagacgctggctgcatgcagtgaaacattcatgagtctcggtaatactgtgtttcttcagggtttcagtaactacttctttcagtatccgtgtgtgtttctgtgatcttgattccttaatttgccttgatgtttttgattcatgcatacttttttgacctgaactggtctttgtagcaagttttggagtttcacagctaggaattggaaccaatggacaagtcactggtaaggaccgttctgtttgtggctttctggatgtcacatgatgatgatagtgattactattaccagttgtctgagaaagaagagactctgaactttcagatttcacaagtctttttctgggataaaggcaattcagatctttagatctccgtttcaatcgggatacttcagttcgaagttcattttgtaaaacttctccgtcagggacacttccaggatctgacgaaactacaggagatggaagagggctcaacacagtaggtactggaaaactttctctggtgcaggtagtttgagtttcataacgaataagacgagac

SEQ ID NO: 341873 - DNA, 1000 bp, Homo Sapiens
ttttttttttttttttttttttttttcattctaagagcagtttttatttagaaatgtgcttccacaacttggtggccacctgggggcaggtagccccggcttgcttgttctctctttcctagcccaggaatcgggtccttgggtctaaagcacagggccaagttctcaaggatcaacatcccagacagctcccatggtctggggcttggagctggtatgaagggtgaaccaggttccatcctggactgtttatggttggagggcctgggcccctggcaccaggacctcagctccctctcctagtaagagctgggatcacccacaggccagctgtggccaggtcctggtggatatgacattgggaagaacaaggggctaagagaggctaattttctggtgctggatccagtttatcttcctgaggggtggaagccggggcaggagcctcatccccaccattgagggacttctgctgctcattgctgttgggcgagggggtcctgttgccctgggatccccagcgggtcaggcgctttagggaggagtcacggtgggcaagcagagggggctggaagcctgagaaggagctgctggtgaccggacgcttatctccaggctcaattggatgcatcagccggttcatctggacattccagtgtttcacgttggtgctggcctggcgcagttttctctgggcagcctccacatcctcgtcagccctctgccggttctgccgcacctcctccagctgctgctgggcctgctgcagggagcggctctgctgtgccatctcctgctgcagctcttccttctcctgctgcgcccgttcgatgtagcgctcctgctcctccttcagctgcatcaactgcttcagcttctcttcctcctcttccagcagtctggtctgagcgattcgcacagattcttcatctcgccgagctttcacctctagttgcagggcctcctgcaaccgctgctgcatctcctccagctccttgat

SEQ ID NO: 341874 - DNA, 1000 bp, Homo Sapiens; identical to SEQ ID NO: 160051

SEQ ID NO: 341875 - DNA, 1000 bp, Homo Sapiens
gagacggagtctcactctgtcgcccaggctggagtgcagtggcacaatctcagtaatcccagcgactcaggaggctgaggcaggagaatcacttgaacccgggaggcagatgttgcagtgagtcaagatcataccactccactccagcctgggtgatagaatgagactcagtctcaaaaaaaaaaaaaaagaaaaaaacaaagactacacattgggtacagacttgatggataaaaaagactacccttgggtgatgggtgcaccaaaatctcagaaatcaccactgaagaacttttccatgcaaccaaacactacttgttccccaaacactactgaaataaaagtttaaaaaaaatacgtaagaacagacatagggaaaaagaaaaaaaattcaacttgaaaaaggtctggagtagtgaatactacagaaactccatagctaactttgactatgaaaaaaaaaaaaaggcattcttacccagcgtgacctcattttcagaattctgctgagttatttctaggtggttcttcagtccaggttctggatccctccatgcctcctgggagctgctcactatctcctggccacccctgctcttctctgcaggaattcccagagccacatcaggcagggctgggggaagaaaagggaggcattagagtacatggctctcagctcctcttggggactagcccaactgggttcagacacagaacagcctttcctccccctcttagtatctgctttgtcctatcaaaggaaggttggtgaaaaaccaaaatgaaacatttctttttttttttttttttgagacggagtctcactctgtcgcccaggctcaaaaaaaaaaaaaaaattaaactcttcttattgtgtctttttccttgtaagacattaactaaaagttactggtagtaaatggtgactgttttacaattgggtttcattattgacaatatcaaaaaaaagcagcaatctttaagagttcaaattagtgta

SEQ ID NO: 341876 - DNA, 1000 bp, Homo Sapiens; identical to SEQ ID NO: 160052

SEQ ID NO: 341877 - DNA, 1000 bp, Homo Sapiens
gtttttttttttttttttttttttttttttttttttttgagagacaaaacaagaactagagttttaatgataataaaagcaataataataaaagcaataacaataaaaacaagatcagactctcactggggtaggcaagggactgaggaggtgaaaccaacccgtatggtgtcccagcacggcacctgctaaggagggagggtgggaaagcccaggccttcgttgcgggtacaggaggatgcaggagagggctgaggtgggggaggaacaactggtgtactgggagagagatttgggacgagggggaaccatcagcaaaaaatgaagccaggaatcacagtaagggcgcaagggctgaggccagttgtttccataaagaagactcaatcattacaaaaataatttttagtagttaaaaaacacacatagggccaggcatggtggctcacacctttaatcccagcactttgggaggcctgggtgggcagatcaccaggtcaggagttcgagaccagcctggtcaacatggtgaaaccccgtctctactaaaaatacaaaaaattagccgggtgtggtggtgagcacctgtagtcccagctacttaggaggaggcaggagaatcgcttgaacctgggagatgggggttgcagtgagccgagatcatgccactgcactccagcctggatgacagagcgagactccgtctcaaaacaaagcaaagcaaaacaaaacaaaatacacatagaatttgtccaagttattatcacccagtgtgaaaagcagattttatagtataaccgtttttaaatgaggggcctaagagagggcagtggctggttagtcctatgttagatattaacaaatacgtgtaggctggatgtggtaggtgacgcctataatcctcgcaccttcagaggccaaggtgggaggatcacttgactcaggagttccataacagcctgggcaacatagagtccgtctcctcacaagcttccattct

SEQ ID NO: 341878 - DNA, 1000 bp, Homo Sapiens
tttttttttttttttttttttttttttttttttttaatttttactcgtttctttattaatatagaaaaggagcccagggcagctggaccagtagtacaaagcaccaggagttaataccattctggtgaaggggatggttttacaaaagtgaaggagcaggcaggagccaccaggttctgaggccaggcccagcctactgcccagaacccctgaaacggctccctgggaaaaagctgacagatgggtcaggggtggattgagctggaaaccatggggacagatggcagggatagagggtcatgcagtgggaaccacccagtggctgataaggacagggaacttgtggctggaggctccccattgggccatgggcaggggcttgcagatggcctcagctctgggggcaggtagagaaactgcagagactgatgggcatggagaacccagacatggccctggggctgaagggcctttccaccctctcttcaccaggagccacctttgctctatactacatatggggcttcagggcccaaggcacaggggaggctcagaggcctccagttgggaggaagatggggcaaggaaggaagcacttgagtgtccctagcttaggcagccggggatgagacacaggcaggacaacagcacccccgcatagtggggctagaatgtgggacagggacgggcttatcctcggccagtgactaggaccagccccatggcaatggtgcctgtctccagccttagcaaatcaagtgtgcaacaagcacagggtgtcggcagacctgggctctagccttacaagctctgccagaacttgaatcacacagagctgtatcaccatggtccagccatgtcctgccttggcctgtttcctcctctgtcaatgagggctttgaataagacctcctaggtcatgaaaaggactctgcaggtgaagggaactccaggacctgctcttggcagttaagcagaccctggatggaactggtatggg

SEQ ID NO: 341879 - DNA, 1000 bp, Homo Sapiens
aaaggaaatgcattttatcccactgcacattgcaaaagtctcacgccaaaaaagctagactttcctctatgtatggcatcaaaagggagtaaaaaatgattggatcacccagattataaataaggttatttgtttctcaaaaatccttattaaaacattaaatatcagctcttttgggggagaaatacattcatttcagggagacctcggaagagtgaccatccttttgctctaccccaaccaggtgggggaggggaagccccagagggcccaaggggtcccctccagttgagccaggtagccactcacatcctgccactgaaggaggtggctaatgcacaatttacaaatgaaactgcacgtccattaaattaaacccaatggaaaacacacgtgtgacctgtcctgtcattcacagccatggggtgagagggaaccggaggagagggtgccaaccaagggggtctggaaggtgggtgggagggtatgtgttagggtggacagtggagagcctcttcctccttccaggagccccagttcctccagggctgtggatagcagggttagaacagctgggtggggtgtgtgggatgggcatccccgcaggctcttgggtgccattctctgggccctcccccacatttaggatattgatgggaagagggatgtagcaccttctccaacccctggcttcccactggactagatgctttccaatgtttcttctgccttccctgaaggacagaatgaagaaaggaagctggaggctgatggagccaggctgggagcaaagggatggccgtggcgacctgcgggctggaaagattcccagataacctggtttcaccttctctgaaggtctatggagggcgtggagcactgaaggtgggaacatctagggtaaaaaaccattgtcctgttgttaaaggagctaagttctgtgatcacctagggacagctgtggcctcaaagtcacctccatatggttcctagcccaggg

SEQ ID NO: 341880 - DNA, 1000 bp, Homo Sapiens; identical to SEQ ID NO: 160054

SEQ ID NO: 341881 - DNA, 1000 bp, Homo Sapiens
ttttttttttttttttttgtatggaataataatttaatgctcactgtggccctgactgaaagtcaagctcaggcacaattagggccatggctgggctcccaccaatgaggatacaggcaggcaaggaggttggatgtggtggtgtgggatacaggagaagggcaaagggagctcataaatagggcccagcctggctctgggttcaaaggtggaggttccaggatggcacaggctgtgagggctaggcagctgaggaggtagtactcgtattggctcccttctcccagtcctctacagacacgatggtggttttgcagaagaagcagtccttgttgttcatcaggtgctggttgatacaggctttgcaggacttgtggccacagggctggaacacagcagagatggggtgggcatagcagatggggcagaggtcctcctcactggtgggcagggaggcagctgctgcctgggcagatgcagaggtcaggtgcgccagcatctgttccacttgggccagctcatcggcactgatataatccgcatagctctgcagggagaagcgcttccggtcaggggctggcagagcagtgccaggtgctgggggctctggctgtcccaggagatagcatattgagcgtagctggaagcagggatctgccaggagcactgatgtggcttgctctctctctgaggctgggccacgcaccaggagctgcaccaggatgcccgtcactgccaccagaatgggatagtggtccacgctctctaggccaggcagccgtagggtgaccacacgatcaaacaggttcctctcagctgtcacccggttcagcacctggtttagcagctgtgcaagacgccgcagcagcatctcagaggtaggccgggtccagtcaaggaatatctcaggcaccagtgtgatagtcatctccaagacacgcagcaggctgaccgagaggtcaaagcaggtggcacataccttgagctgccggctgtccac

SEQ ID NO: 341882 - DNA, 1000 bp, Homo Sapiens; identical to SEQ ID NO: 160055

SEQ ID NO: 341883 - DNA, 1000 bp, Homo Sapiens
tgtttttttttttttttttcactatttttcgttagtttattacaaaactacagatacaatacacaaaattctaattccgaaatccttctacattttttttttctgagactaaatgccctcaaagcccgtctgcttggcctgtattacaacctgactcctcggctcctggatgcacaggtcagatgttccaacaaccctgaccatggccagtgctatggagtcactccaaaggtggttgagccctctgtgaaaatttaaatggctgctaagtcattctaaataaatagtgaacggattgtttctgcccctaagatgaaatcccacagatcttatgctcaagctcaggtcttcctactgccgccttcgacatctagaaagtatggtgggatcttcactgatttgttaaccctgggagtgccccttgtgatccagatgagtcaaaacaaacggccaggatctcttctaaaaagcccatgatggcccttctggctgtgtctccagttggtgcctggatgctgcccatgtgtttaagggccattctgaccatctggtctctttcctgtgggctgtggggtgctccagtgtcatctccctctgctcctgattttaaaaactgtagaatataggactggaccatattcccactcagttcaagggtttctttcatacaagggaggtccgaggcactggccaagctcaagaggtgaatcagtgcctggcagatttgggtccgtaggctgacacagtacttgaattccaaaaagtctatggtgtcttcactcttctgtaaagcggtgaccaatgcattccagatccgagcatactggtcaacagacccgtactgctctctcttccccgggacggaaagggcggctgcagatctgatgcgcactttgaagttcttgcatgatgtcacgaccgatgtcagggcattgtaggcctgggaggtccatggggctgtccctaaaggaagggcaggatttttaaatacatttcccat

SEQ ID NO: 341884 - DNA, 1000 bp, Homo Sapiens
ttttttttttttttttttttttttttttttagcataaaaccacatattctaattaatttaactataaaatgccaagcaaagacagcagatttataatatagaacaaacaccatctgcaccaccttaaatcattgttacagatatatttctaggaaaaaaatacacctgaacaattctcaagcctagattctaagatgctaaagtattaactaaataggattccaaacagacccagagaaagttactgcataattatttaaatattaacatgtactgagttcagaaatataaatataataacacataaacacagtttacaaattcatgtcaccattttcctgtgctccatgatttcttcaatttggctacatacattgggccccaggctttgcccttatctggaatcactaagagcccacattcctggccagtgggagcaaatgtgaagtcgtgggagcaagtccttgctattcctttaatgtccataggcatgatgttaccgtgggagtttaaaatttcactgatcacatcttgattttctgccttggaaagcgtgcatgtagagtatacaagtatccctccaggacgtaaggccttaattgcagaccttaacagctctatctgtagaagaggcaaattcctcctttgacttatcctacaggatgccttctgagagtcagaagaaaacaaccagcttcgatcatttgaacacggagcatccactaacaccttgtcaaacatttcaggctgggcatctcccatttttctgccatccaattcagacactttaattacatttatcaaaggctgtgggatgaaagattccaacgtctgccttagccacctcaatctcagactatcatattcattacaatgaagataacctggacaagcacactgcagcagagctattgatttccctccaggagcagcacagagatccagaaccttctccccatcccttaattccagagccaacactgggagaagagaagcagca

SEQ ID NO: 341885 - DNA, 1000 bp, Homo Sapiens
cttttttttttttttttttttttttttttttttttttttttttagaatgctaatgtaggagactgagtttattcaacaagtatttactgagcccttactatgttcccggcactattttaggtgctgagagtatgttgcattggttaaaaatatacaaaattcctgtcttcattgtgcttacactccagagaaaggatacaagacaataaacataataagtgagtaaattacatagtaatttagaaggtgataactattaccgtacaacaaaatagagcagtcgttgagaattaatggtgacatgtcttatctggaaattttccaaaaccagaagaggaaaaagtaaacttctatcttggaagactatatatatatatatccgtacataacaaaggaaaatatttctggctctttaatgttcatgggattttcaagcaagaaattaaagggatttttaaaacatgaaagtaatactgaaaactaggaaaagtagcttttgcaaaatacgtgctcaataccaagttattgaggcagtgcgatctgtgcttactgcaggagtagaagcttccacagttctagcaaattccatgattctggtcatactgccaaccacagtggatctagagagccaagtgagctgaagaaagactgctagggacagacgagaactcaaatagctttgagatttttttatttccacttccttttttaaaatacatcaccctgctttttttgtgttaaagggtgagctcattaaaaaggaaaactaaaaaaaaaaaaaaaaaaaaaacaggaacacccacatttccaactccacctcccctctcaaattgttcaagatgcacacatgtttattgtatatcagtagacctagctctttccacagttatcagtggttaacacaaaactaccagggatatatttttcctttcatttaaatttaaattccattccaacaaagcaaccaaaacaactaatgtctagttttttagcttctggg

SEQ ID NO: 341886 - DNA, 1000 bp, Homo Sapiens; identical to SEQ ID NO: 160057

SEQ ID NO: 341887 - DNA, 1000 bp, Homo Sapiens
ccagtagtaaacgtctttattcttccgtgacgtcgcacacccaagccacctcccgcggactctccgctggcagtcccacccagtgagggtagaggcggtggagggcccacccaaggccggctcttccaagcaccacaaatcctctcctcgcccaggtccctttccccctttctggccttcgtggggacaccttcagagtccccaaggaaggctgtgctgatagcctcactcaacccagcttttcaaagttctgcaggaggcaaagggcaagcccagagattagggttagagaccaaagacaagcggtcgttacccctaatatccaaggggaggggacgggagggggctttttgtaaaaatgcccctgaggtatagaaccggcaggcaggcaggctcggaacaaaacaccctgaaccagccacgaagactgctgctcccagactcctttctgcttcagtggtagatgaggccagggcagagggttttcatcatgtagctatgaaaggaagcccccaacccggtcagtcaggcaatgaggggctgtctgaagcacaactggaacccctcacaaaggccatgtctgtccgaaacttcatgctggtgggtggctggcggcggagcagtgactccgtctggtcttggggtagaggctcatcatagatggtggagatgagccccaagccatttctacggggcctcttcagttgcccaaatggctgtagcttctctccatggtaccccaatccacgcttgcatctggggtgttggccatcactatccagggcctcaggcacccctgagcacctgcagcccaggccctggccctcagcccagccctgccgctccatcaccttccgcccaatgcccttggtgtggcgctcaaaggtgcccacctggcgttcgatcacagagccatcttcctgtccatctcggagtctctgttctagacgcatttggacagagtctcgggcatccttgtctccaccatctctgtcatagt

SEQ ID NO: 341888 - DNA, 1000 bp, Homo Sapiens; identical to SEQ ID NO: 246549

SEQ ID NO: 341889 - DNA, 1000 bp, Homo Sapiens; identical to SEQ ID NO: 160058

SEQ ID NO: 341890 - DNA, 1000 bp, Homo Sapiens
ttttttttttttttttttctttttgaatagtttaatagttattatttaaataaggctttggcgtgcttttccacatttttaggtttttttctctatgtgtacaccttgcaagatgtatcattaactcatgaaaccaccagctcctcaggcaacgaaaagggaggtagaaagaacgccagaaaggtgggtctgtgtgttctggggtgcgtggggcccgcccccgaggaaggtgccaaccgtccctggagagcagaatcaccaggcctgggaaagccatgcgggttcgagagcctgcgccatggccatgctgggcagggcccaaggggtgcccaggcgtctgcccactgagaacactgttagtgcggagggatccacaggaggggagagcggcgccagggtcccggacacaggcaagggtctctagcccgccacccacccactgccctgggggtctctgtcaggcttctaggagacacagagactctgaggtcgtgtctcgagggtggctacctggggaggctgggcagagtctggagacatttctggctgttgtctgactgggagctgctggctaggggtgggtggaggccagggatacctttaagcatcctacagtgtgcaggacagctcccaccaaggaggacagcccgccagagacacagcaaagtgggctgggattggggaggctgcagcctggtgccagcctcacattggcaggcgggcgctgcaggaggcttgcggagaacacggcgaccgagggaggtttggcgggaaccacgcggaacagatcgtggtgggaatgaggctgcgcctactaacaataaccccacccaccctgacggccacaccagcctgtgaggaggacagggccgagcccgctggcaggtggggaaactgaggcccagagagcagcgagcctggtctggacccaggcccaccccaccctcccaccagctgttgtggactcttcttaaggagcttcaggctccacagtggtttg

SEQ ID NO: 341891 - DNA, 1000 bp, Homo Sapiens
ttttttttttttttttaaaaaaaaagagtttatttagaaagtatcatagtgtaaacaaacaaattgtaccactttgattttcttggaatacaagactcgtgatgcaaagctgaagttgtgtgtacaagactcttgacagttgtgcttctctaggaggttgggtttttttaaaaaaagaattatctgtgaaccatacgtgattaataaagatttcctttaaggcagaggctggtcgagatgctgctgttatcttctgcctcagacagacagtataagtggtcttgtttctaagattcctaccaccagttactttgggccaagtatccacatccccttgcgtatgggaggtgggtgaagagtgttggatgcaaagtggttattatgggaagtagctcgatggtaaaaggacaaacacctatctatcttagagcttaagcctgtatgtgcttattcccaagggagatagaggtgtttaatcacaaggacagcatgagttagaggacactggcatcaacagctgccacagccgtgcacaccagggccagagcagcccactgacatctgtctttggtcttgagatcaaatgcatcccattcttcatacattagaaggtcgacctccttgaagcagaccaagtatagcaagcctctaaaaggactactgagaaacagaatcagaaactctagaactctagttagggcccttcagcagggctgcagagcctccctggatacccaggcctgggaaagcctgtctggtcttgtcaccccaggtgacaaatacaactggaatctttcaatgagttaatgagatactgagaatgagcctcgtggaattttccatgcctaccctttctaaggaagacatccaacagttcatgtgggctctggcttcgtgttaacatgaggaactaaagacatgtttcaccccgtgagaaacagaaggatcccctgaacagtaactgatttgacaagtatcgacacataaagttatggcatca

SEQ ID NO: 341892 - DNA, 1000 bp, Homo Sapiens
ttttttttttttttttttttgtacatgaaagagtatttattgaaaacatggttactgacaggaagctcctggctgttgttaaatccatttcaagaagcagtttcttggactggaaggcaagggcatctgctgtttgttcctcgtggcccaatcccaggcttcatggtgatggagtgggcagagcaccctgccttcatgactcttagtagacagggaccaagaggaaactctgggtggtccgaggtgggtttgagaaatggctggcatttactggccaccaaaatcactacagattctgtacaagcaaaagacaaggcaccagaatgtaagtgtttctcctgggcccaaaatcccttctcctgggtaccgtcgtttctggctccaggctcagccatagtgatagacaaagtcatagctgctgggctccttggggatggggggtggggcttcgggaatctggatgttctccaggtccaggagccgcagcttcatctccatgctcagcagggtgtccaggtcactcttggtcagctcactggacatgtccttccccagaagggcactgaggccatcaatccagatgcagtactcatatttattaggtgcgatgaagtttaaggtctcatcagggtcatacaggatggagaaggccaattccaacacctccttgttctgtttcagagcacttttctctttcatgtggggacaatctttcccagtgacaatggccttaatgtctgcaacaggaattttctcctgcagggattcaaatgtcacctccccttgtgggttgtcatccaagtcaccatagtgaaggaccttgtggttcagtgccaaccggcagtaccagaaccgttcttgccttcggcggttcccaatctttcggaagctgctgccctcacagagccggttcaggcgctgctgcttgatcagctcaaggatctcgggctggatcttctccctcagctccacaattggcggggactggaagtcatcctga

SEQ ID NO: 341893 - DNA, 1000 bp, Homo Sapiens; identical to SEQ ID NO: 160059

SEQ ID NO: 341894 - DNA, 1000 bp, Homo Sapiens
tttttttttttttttttttatattttaatcagatatcaatttattatggaaccattcattttctgctcattagcactaaacatttttttttgggtcaagtatccatgtcatattatgtagaaaatggtccttcatgccaacagacttacatgtataaaacatgaacacccccaaactctggggagtattccagaatggggcaaaagagaggctgggaagtaccatttactacacaaatgtaataagatggacagaaacctttattagagttggaaaatcaagttggaaacaaacacatgaattcactacttaatgcatttaattccaacccctcattggaatcatcttggtaacatttaagattctacaacagttataatgcgacgattcagaggtggtctcaaagttgttacagtgttaaaaaaattatagtaagcagtataaaattacaatttattatggggccagggggattcacaaccatccttaaaaacattaagagcaaaccacggccaggcatggtggctcacacctgtaatcccagcactttgggaggctgaggtgggcagatcacttgaggtcaggagttcaacatgatgaaaccccgtctctactaaatatacaaaaattagccagtcatgatgtcgtacacctgtggtcccagctactcggagggctgaggcatgagaatcgcttgaacctgggaggcggacgttgcagtgagccaagatagcgccactgcactccagcctgggaaacagagcgagactccgtctcaaaaacaaaacaaaacaaagaaaacattaagagcaaaccttttagagaattctacttaagatttctttttctcaattcctttcccccactccttttgtttttttaagcactaatctggaatggagtcggcgggacagagcaaagctggatgggctgccccttgaatgatggagtaggtctgcttgggtagttcttgctgggaagaggaggagaagaccggtgg

SEQ ID NO: 341895 - DNA, 1000 bp, Homo Sapiens
gccaggaaaatatcatgactttatttgctacactgacagcagcactgaggggagctgggggctgccacccctacgcgggatggtccaaggtaggggacagtagtcaacgcttccccagggtgggggtggtctcgggggaggagtgtagacagtcgccaacctcagggatgtgggaggtggtggcggtggtgttgctggagaggggtccagttggtggctcagaggcagggagttccagtgtctggggtgcccgtgggcctgcactacctcagggggccggcgggcagcggcggccagggctgctcggccagctctcgttccagctgcttgaagcgcttcttggaggcccgcttgggccggaggcggcgcaggcaggcggggaggcactggtctagcacgctctccagcatgaaggcccccacgaagttgagggtgaccagacccagcagcagcagcttgaagccggtgtcagtgatgttcctcagcgccagcggcccctgcaggaggccggggaccaggacaaggcccaccaggacggagctcaggagcgccagggccaccaggaagggcacattggtgtagagcggccggcggaagggcgcccccttggacacggctgcagccaggatgaggtactggaagctggacagagagaagaccacggtgttctcgtagttgggcaggttgtctggtgcggccactgtcctgttcagaggcacgaaccatggctgggccagggtcaggaagtagccccctagctgcacgccggtcaccaggaccatctgcagcagcaggctgctgagcacgggcacgctgagcagcgcccccggtggccgcacccgtcccaggaccagcgctggccccgtgcggctcatgagcactgccactgtggtggtgatgaccaggtcgatggccaggaactgcaggtcacccaggttggtgttgatcgtgtagaggatcaggacggagatgaactgggtcaggctgtacagagccatgt

SEQ ID NO: 341896 - DNA, 1000 bp, Homo Sapiens; identical to SEQ ID NO: 246551

SEQ ID NO: 341897 - DNA, 1000 bp, Homo Sapiens
tttttttttttaagctgttcaggactggactccggtccctttattgagactgacaggccagtgggtccacccaaacaaaaataaatttctctcccaaagcctgcctgcaggctggggcacccagcatgtcctggctggggcccatggctgcccctaaccccaacagcacaggtctggctccctgggaatgagaggatgctggctatccagtatctggagatcctaaatgaagagggaggtgagtcctggtggccccctacccccaggagagctggccgcaaatccatgatctgtgttgggccctcggggctcagtcatcggccagggtgatgacgtcgtactcgatgccctggtgctgcagctgttgaatgtgttcgggcactgtctcgtctgtaccaaacaggccctgggcttgggccatggcagcatcagccactgctgtgacagctgagtgtgctgcagcctcaagttgagcctgtgtgacaagctgctggcctggggacacaggcacatactggatctgggactcctgaaggaacggggctccttgttcatactggatgtgtgtgatctggccctcctgtacctggatgtgatggccttcagggaccacaacatattcctgggggagcaggtgctggacaccatcctgggagatgatatactgcacctggttgtcggaggtcaccaggtgctgtacggtctggccatctgccgtggtgatctcttggatgtaggcggcttcctcctgattggtcactgtctgttcctgggcaacgatgatgtgttcctggctcagtgcctgctgtagccgctctgggcccaggaccccgtgactggactggagtgcagtgtgcagggtggccagtgtttcgtcatcactgttcaggatgatggtctgggttggggtctgggtaggggcccgggctgtaggggttcctgacttcctcccatcaggactgtgcagccgctggatgtggaacttgaggtgcccgttacg

SEQ ID NO: 341898 - DNA, 1000 bp, Homo Sapiens
tttttttttttttttttttttttttgaaggtatatattgtttattatttttacatcgtctcttccctactgcatcaagccccatcatcctagcatgcacccaggaaatcagcaaaaacccatttaagagtccagacttcaagggtccctcacagtaatgggcatctcttgttttgcccgagcagagcagaccactcgtttccccttattctgctaattgtatttcattttcctttaagcaaccacctttcaccccatcctgaatcctcagaccttatttccctggctctaggaattagcacatgacacaggcctggccactcaaagtgtttcattcccctagaagtagagatgagaccccaaacgggtcaatgacactctccacttggaattattggaataagtaaatctcttcccactgggttactgggttagcaggatagaagcctggagctgatggtggtcatctccatcactaggaaagagccttcctgaaaatcaggcttacagacagaaaaagctgagctgggagatggagaataactggagcctgatgacatcatttgtgcccttggatccagctgtgcctaaaggcagatacttctggactttttaattacctgaattcataaaatttctttctgacttaagtcactttgagttgggttttcagtgatttgcaactaaaatattgctggctgattcacagctctgagaccaaatgagatagacctggtgtggggtctgtggtctgttaggaaccgggctgcacagcacaaggtgagcggcaggcgagctgaagcttcatctatatttacagccactccccattgcttgcattaccgcctgagctctgcctcctgtcagatcagcagtggcattagattatcataggagcccaaatcctactgtgaactgcacaccaaaggatctagattgtgcactccttatgagaatctaatgcctgatgatctgtcactgtctcccatcactcccatatg

SEQ ID NO: 341899 - DNA, 1000 bp, Homo Sapiens
tttttgagacggagtctcgctctgtcacccaggctggagtgcagtggcgcgatcttggctcactgcaagctctgccttctgggttcacgccattctcctgcctcagcctcctgagtagctgggactacaggcatccgccaccacgcccagctaattttttttgtatttttagtaaagacggggtttcaccgtgttagccaggaggtctcaatctcctgacctcgtgatccgcccacctcggcctcccaaagtgctgggattacaggcttgagccaccacgcccggccagaaatcatttttttcttttctttttattaatttttgaagtcatcattaagaaatcaactttaaattgaagagaaaagatggcaggatgtcaggattttatttatttatttgtttttttgaggcagagtcttgctcagtcacccaggctggagtgcagtcgcatgagctcagctcactgcaacctccacctcccaggttcaagcaattctcatgcctcagcctcccaagtagccaggattacaggcatgtatcatcacacccagctcatttttgtatttttagtagagacagtgtttcaccacgttggccaggctggtcttgacctcctggtctcaagagatccacctgcctggacctcccaaagtgctgggattacaggcggaaccgctgtgcccagccctgatgtctggatctttagtatatacatatataattttctttctcttccatttccatctttatcaagaatctaaacactttccaggtcccaggcaaccaaatggcaagaaaagctcagaagtgttttgtttggtaggtagctagtgttgctggaacctggactgtggctgactagtaagactgcaggacaccagtgcccctgagggctcatatggctccagtagatatgcaggatctagaataggtagggaggagttacagaaggtatgtattggccgcccacaatcaccgaaagatgaatttttgcataggc

SEQ ID NO: 341900 - DNA, 1000 bp, Homo Sapiens
ttttttttttttttttcactttaaatagacactttattagatccacaggcgataaaatcccagagctactgttaggcacgtaaatatagaccctgctaaatatttaatattatcaagcttgtgtgactcaagcatggttttgaggccagcaacctcagtttcgatcttcctgtctgtctgggtaagggcccgatcttgctgggcatgcaatgccactatttctgttctcaattccagcagcttcttttcgttcaatgaatacaattcttttactctgctcttttctaggttgaagtctaatttggtatctgttcggactttgatcacttcatccattacttgttgttttaactgatgtagttcgagttttattttctcattttctgctctgagggctgaaaattcactcttctccaaaataatcatatcctttttcacattcgcaatctgagacattacttgctgaaaagtgatttcctgctgcatcttggtgaccatatctttgtagacgatgtccatgttggcctccaggatcttgaccaatgcagacacaatgatttctgcttgttgagtagcaaacccaaaatgttaacattgtttagctctgactctgttttcttttttctcgtctgtcttcctagtttttaaaaactcaaactaaacttttgccaaattttaaagttttattaagaagagttcactggctgggtgtggtggctcacgcctgtaatcctaacactctgggagaccaaggcgggaggatctttgagcccaggagttcagaaccagcatgggcaacatagtgatcccatctccattttaatgtaaataaaattttaaaaaattttaattaaaaaaagagttcatgtttaaacataattaggtttggcaactggacacagtggttcacgcctgtaatcccagcactttaggaggccaaggtgggtggatcacttgaggtcagcagtttgagaccagcctggccaacatggtgaaaccc

SEQ ID NO: 341901 - DNA, 1000 bp, Homo Sapiens
ttttttttttttttttttcagtggagacggggtttcaccgtgttagccaggattgtctcaatctcctgacctcatgatccactcgccttggcctcccaaagtgctgggattacaggcatgagccaccgggctcagcctgatgtctcttcttataaaggcactaatcccatcacgagggctccaccctcatgacctcatctaatcctaattgcctcccaaatgcctcatttccaagtaacatcacattgatggtgaggattttaacataattagttttgggagggacataaacattcagtccataacaactcatattacaccacttattgcataccagtattgttacatgaaaataccaatgtttactcatataaatatagatgatttatttccaaataaaacaatactgatttctcctggctctgaaatcctcattcttcactatatcttggttcttttactgatagcttgtctcagccaagttagacgttcacaccatgaagatcatatatcctcatatccgtggagatggtaaagtaaggtttctactgttacacaccattatgagtgacaactttatctacctaaagactcacttttctttattctcacccacaagtttgtcagctgaaagtggcaccctgttttgccgagaagttccttatatttgataattctagatctgagaaacagactcaaattcttttttctgtgaccttaaatcaggctcagagccctataatggacttcacaattctattttgttgtatgtgaccaataaattatctttaaaactatgctggaagtaaaatatcggtaattttttttttttttgacacagagtcttgctctgttgcccagactggagtgcagtggtgcaatctctgctcggtgcaacccccacctcctgggttcaagcgattctcctgcctcagcctctccagtagctgagattacaggtgcgcaccaccacgcccagctaattttgtattttttagta

SEQ ID NO: 341902 - DNA, 1000 bp, Homo Sapiens
ttttttttcttgggggggtttctgtatttccttttacaaatgaaacaaggtggcaacagggtgaggggcggggttgggaaggcatcaggacctatatacatgggacttggagggagtttgaggtgaggacttggggacaggcagggaggggagccctggcagaaccataatcttcatatgtcagtggcagccggggtccctctgaggccccaggggcccgagtcccagcagtccagactagcacccctggggctcctcctccccgcaggatatgttaagtggggtgaggctcgcggctaggaccctgctcacggcccgagtcccggtccttggcctccgaggaggacgatgaggaagaaccagagctgtggctgcggcctgactgccggtaggcagcactcagctcctgcagccgttcaggcgtcggcgcccacttggcaaagccagggtcgttctgtaggaagagcacagccgtgttgtggacggccttgtagtgcatttcctccttcttgcagatgtgctgggagccactgcggtactcatgctcaaaggcaggcaggatcaactggtggcgtttgaagcggctctgctccatgcgggtgagcgctggtgttgggggttcccgccactcagggatgaacacgatgaaggacaggggctccggtgagctctcaagcagtctctcaaagtgagagaccatggcatccatgagctcctcgcagaagggagggttggcctcaaatgaaccactcagtggagcaaagtctaggcagggcccgcgggagccaaagtagccgtctgtgtcggggaaggcagaacagtactggcggaagtagcagttgaggggtgaggcgaagcactcgaagctgacgccaaagagtcggtggagggcctcaaagacatgcacaggcagcgatccctgcaggccagtcccctcgtagaggcccacgccgaacatcatctggtaccgtcggagaagacaccagacccggggcaggaa

SEQ ID NO: 341903 - DNA, 1000 bp, Homo Sapiens
ttttttttttttttttttgactgaattgaaaatagttttatagcagaaaactgagaaacaagaaaacattaaaattgcaccacagaatctgaggtttcaaagatctgtttgaaatatcttcatttcattaatttgaaatttggggcaggatatgatcttaagagtctaaacattcaagagacgagggcaagaaagccagtcacatgtagaataccaagtccaaggcacgcgtcctgcggtcaggacagtgttctaggtgtgaactcacttaccgtggggcctatgaagcaggagtgtgtggccttcgaagttcgaatgtgttcatgtgggtgtgtagcgtgtgaatcggacatggaaaaaaaaaaatcccctatctgcccagtcaaaaataaatgtacacctgaaaatcagatgcaacactaacttgcaaagattcccacaacataaaaaagaagtgatgctttcatgtgctggccgtggacaatgtggaaaaactgaagcgtatacagcgctgttgtcagaacaactcatgtgcagacaggggtggatgtggcgtgccgggcagtgtggctatgcaatcagactgggatgaagagaatacgaatacttaccagagcctgagagtgaaaacagagattaaagaatcaatcattaaggtgaacgttcaccagtgaggtttacagctttggaaaacagtgacaggaagtcctgacagactagggatggacacagggcagcaggaggcatcctggacatgggctctgcttcccgctgatggtgcagccggtgtctgtgatcagcttaacacaaagctgcaactcccagtcctggacaggcccaggggatggctatccagaaagaacgggaggggtccaggaggccaacccctaggtgatacatacatttatacaacagtgacggcgagggagcagcagtcttttctggctttactgcattgtaattgtgatcgctcgcccacgacggcgtgctgctctcacaa

SEQ ID NO: 341904 - DNA, 1000 bp, Homo Sapiens
tttttttttttttttttttttttttttgaaacggagtttccctcttgttgcccaggctggagtgcaatggcacgatcttggctcaccacaacctccgcctcccgggttcaagagattctcgtctcaaacttccgagtagctgggattacaggcatgcaccaccacacccggctaattttgtatttttagtggagacagggtttctccatgttggtcaggctggtcttgaactcccgacctcaggtgatccgcctgcctcggcctcccaaagtgctgggattacaggcgtgagccaccacgcccagccacctctaaatttcttaatcacgattgttttcagctcagacatacacaaggcaagtagaattactaataaatcactttaccctcaaccattcaaggtctctaagagcatgcacatggatacatgacggggaaaggcagcaactcagcataaacactttagtattaacataaggagtatatatacatatacacatatgtatagaatatcttgcttttgaatatctatgggccatgaaacttcatagagagctgcataaaaatctagcagagaaaggatcataagtgaagtgccagccatggataacagactaatctgtgctcacaaaaaagggcaggcaaggaacacacagacatcactcaggaactacaggaaaactaagcgtagtgctgttttccaaatataaaacatatactaagtacaaaagttatagtaaatttgaggactacggaagtaatacttactatatgtacatcttttgttcacataaaaagcttaaagtaagatcttagcataaaagtatgctttctccagtaggatggtgtgagagggaaagaatgtaagaaggaacttgtacaagtctgaaaattaagtcttgaaagtaaaaggctaccataaaaaatattatgtcatttggtatgatcaaaatcagattttaaaagaccttaaaatataacccttgcacattgtttttta

SEQ ID NO: 341905 - DNA, 1000 bp, Homo Sapiens; identical to SEQ ID NO: 160061

SEQ ID NO: 341906 - DNA, 1000 bp, Homo Sapiens
ttttttttttttttctcttttaaggtttaacttttaatcagccaaacatcttgcgcagaccctgagccagccctgcatcctggttcttcccctgaatgaccaccttccccagttcctcctgggctgcccggtttttgggatctatcgccagcaccttcttgaggtcagcagttgctttttccaggttcccaagggcagcctgggcaaccccccttcggtataaggcctttaaatggccaggctcccgctccaacacccggtcacagctctgggctgccaactgaggctgccctagcaacaactgacaggcagccagattggcatgaaggacagttcgttctggagggccaggtgggggtaaagtcaggagcagccgaagagcccgtccatagcatcgggcagctccttcagggttcccagctcgaaatagttctgtgccccttgcacgttcttccctggccagggcttccttctcgctagtctccagctcccaggagtctcggccttgagtgaaggatgccagtgtgagcctgacaggaggtccagagtgcccaggcagctgaagctctgcttcctcaccttgacacatggactccaagcatttctctatgagctccccccaagtttcctccctccatggccctacgcccatagttagctctgtccagccctctggcggccctgatccgaaaggaaaccccaaagccagtacccggcagcaggagcctagtttgggtttgtccaagccatggccacggattacgatcttcttgacaaagctcccatcggggcagtaccagagatcagaagcttgaagggcctctggcatctgactggttgatccatgagacttatgagagtctccttcaagttcagcaaccagtttttcagctccttgagtatgctctagaatttggctggctggatctgggcttacttccagctcaagcgtttcggtaggagggtctcggggctgctgcctaatctgaataactgaatc

SEQ ID NO: 341907 - DNA, 1000 bp, Homo Sapiens
ttaaaaaaaaaaaaaaaaaggaaacctcacccaagtattccatgagttgttgatgttgtaaatactgcagaattgaaatcagtggccaattcagggaataatactaggaaaagagatgtccagagctgtgcagtagaaatcactggaatttctgtctgcaatcttattgcattgattatgaaagaaggaaggatcattggctggagtgtcaattccaactttcagtgctagaaacttctcaaagcagtctcaatgtagattttggcacctttgatggtgttagctctccaaatatttgaagatgcttcgcgtcaatcctgaagtgctatcatctgttttgaggtgcttaggtgaaggagaagtcatgaaagatggaccccttttctttacctgagacttagacgattcctttgccgcctcagccttgacaggagaaagtgtatgaaagacaaagtttcttgaatttcgaggagcactggggttatggtcagagagagcagccagtttctgaagcacagctttgggctggtttagcagtgagcctgtcttcacctgttgagcacttcctggtctgatggcttcaaaaggatttctgagcaaagactttgattcctgaataaccatagggcgactggcattcttctgcagtgctttggctgtaactttcttggccagtatcataaactgactgtcctccccaatttcttcttcttcttcagctgtaattttcccctgctgtgccatgtcccgaagccactgctctcgttcaattcgctccttcctccacctggcttctgactcatcaagctgttcttcagtctgatcatcatcagagtctctgtggaacaagtccatctgggaagcatcatctatgtttttccatcgaaacttcctcattcgcccaggaccatcgctgtgcagatccccatcagcaaggtacctctcttggtataaacgtagctgtcgcttatcatcatccaacatagttttcatgtgtatt

SEQ ID NO: 341908 - DNA, 1000 bp, Homo Sapiens
tttttttccagcttttatttcagatttggggatacagaaggatgcaaaatgaggcaacctagccacccaactggcccagtggtcaaggggggaaatgaggtggccgctagtcagcgctggagccatttctcgacggtgctttctgtttgtttgtttgtttttgttttgagatggagtctctctctgtcgcccaggctggagtgcagtggcgtgatctcggctcactgcaacctcaacggtgcttttttctgatcatagctgagctcaaatgctgaccccagtggcctgtctctaagcactgtggctccaggaaggaaaggcctggagagacctagaccaaggcctcagtagggagggagagaatttactctttgcaaaacgtatggagtccttgttatttaccaaatatcatgttacagaccagggataaaaacaacaataatgaatttcagtgaatctaaaacacaatccattgtaaggcacatcattattctatctcccaagacaggaaaaaaaatctttagatttcatagatatcaaatgggccaaaaaaaatgtatcttggaataaacaaaatatgctaatgataacagtaagatatgtaggacatactacgtacaggtgctgttcttagcatttcatatctatcattttacccacacagtgaatctgtgagatggaagctattatcattccattttacagacacctacactgagactcaggcaggccagttgtcctgcccatgtacacacagctcctaagtggtagagtcaggatttgaacccagaccccgcagcctggctccatgctctcaacagctttgcagaaactaaagttggaatggaagactgctcattccaaatctgtcctattgtccagcatcctatggcccattccagaaagttcagtgggtgtcaattagcttggctgtagtgaccactcttaagtgtaccgttaccttttattttaatttgagaaattaaataaaatacatcca

SEQ ID NO: 341909 - DNA, 1000 bp, Homo Sapiens
ttttttttttttttttttttttttttttgatatgacagagtttaattggcagtattttttcttaatgatacataaaataatggttcatataataatcaaaggaatcacagatttgatgaaatatggtagatgctaccagaacactttgggaaaactggtaactaaacatcccagggaatgaatatgagattgatccttatccatctgaacacttcattcaacaccaacccatgtgccaggtaaaaaaatccactggtcttataatttcacaattgcgttctagttcccaaaacagacttgctctccgacagagacagctgtgcaggaagtgagcctgcttctctgtgggctcatctttgccgtcacaaacaactggatgaatctttcctaccaagttgttgcggtgaagggcctctggggttgacatacagttagacatactcattgacagcacagaacccaaaaggctgcctctggaattattacctggtcattctctaacttggaatgcagctggctggggtggtggagcccatcggagacagtcttgccgcctgttttatttggtagactcctcctactggaaagctctccagcagaagaatctgtcaaaccatcaaaatcttttccctctgacactcccataaattctgtgaaagaatggtcttcaaggatgttggtggtgtgttctaccgtcacctccctggggcagaatcccctggctggctggctaattttgctggggcaggcatctagttctgaacatgagccagtcctgcacagtgatttggagtttttctcagggatgctctgggatgatgggctccctttggctaaggcactgttttccttgagtggcaccacaattatcttgtcctttaccaagcctttttcgacttctgtcaactctttgtttgaggacggcctgaaatcatgcacaagcgatggtgtggagtgctcggtggagtctgcatccttcgtctgaatggccagctggtct

SEQ ID NO: 341910 - DNA, 1000 bp, Homo Sapiens; identical to SEQ ID NO: 160062
